United States Patent Application Publication US 2006/0134663 A1 - sequence listing, part 129

SEQ ID NO: 433444 - DNA, 1181 bp, Homo Sapiens
  misc_feature (937)..(961): n is a, c, g, or t
  misc_feature (1091)..(1128): n is a, c, g, or t
aagagagagagttcagcacccataccacactcctatgccacttcttttgcattcttcttagccaacagttgagaaagactattttttagcttgtttcactttcccttgatcttctactttcttaatggctgcttggatcgcctcttggtcacgcaaggaactgatgagccccaacagcacgcaggttttcatccaattccagaagaatggggactccagtaggaagagtaatgttgatgatgtcttcatctgagataccttccaggtgttttaggagtgccctactgctatttccatgagcagatatcagaatggttttgccacgtaatacttcgggagcaatcctgttcattccaatagggaaggagtctctccagaacatcctttaagctttccgaccgtggcagttgatccaagggcacatcgcatactttatacctccggtcgttgtagatttcttggtagtaaggatgagactcctcaatgggaggcggggttacattgtagcttcttctccagagcctcacttgttcttcaccatgattcaaagccatctgctccctgttgagaccgatcaaggccccatagtgacgctcatttagacgccaggagctttccacaggcacccattcctggcctagctcttccaggatcagccaggctgtgtgaatggaccgattaaggacagatgtgaatacaagatcaaactcaaagtttaacgctttgagttgcttcccacagttccgagcttcctccattccttcgctgttgagtttctgatccacccagctacaaaaacggttctccttattccaagcaccctctccatgtcttaacataataagtttgtacttggacatactgatggctgaacttcccaggcgttttcaaatgggctaatattcaaggacagcaatacatctgcaaaggggccacnnnnnnnnnnnnnnnnnnnnnnnnncgctcctccgagccgccaaagagccagcgcctcctaggactcatcactgccgccggcatcgacgctcttttctagcccctgaacctgacccgctctcgacgaattcgagctcggccgatttggcctgatnnnnnnnnnnnnnnnnnnnnnnnnnnnnnnnnnnnnnncggccgccaccgcggtggaatgccagggcgccctatagtgagtctatcattct

SEQ ID NO: 433445 - DNA, 472 bp, Homo Sapiens
tttgttctgtccccggtgtgtgggtctgtgacagggtccaacagggcctggtccgtgtccggtcccccaaatctgtcgtccctgcccccaggcattggcatcaacaaaagtcagaattcccgggaacttgaacagaggctgctaaattcccagtaattgctcctttggccttctagggactgacttcaaagaaggaaggaaagaatcaggcagtgcttcctcattctcttttaaaacccgcttcccgctgagtctgcacccaggagaccagagagcaccttgcccttccatggaaactcaggctgatctcgtatctcaggaacctcaggccctgcttgacagtgctcttccttcaaaagttcctgccttttccgacaaggacagcctgggggatgagatgttggcggctgcgctcctaaaggccaagtcccaggagctggtaacctttgaggatgtagctgtgtacttcatc

SEQ ID NO: 433446 - DNA, 1616 bp, Homo Sapiens
  misc_feature (62)..(62): n is a, c, g, or t
atgaaaagtctgagttgaaagggacacatcctaagctgttgagatttatagggtaaggcaanagctcttgagactcagggaaagtgaggaaaatgggtgtgtggctctttcacgtggactctctgatatttaactcggtcgtaactctgagggagcttttgctcatgccgatcccattcaaaggcttctctccagtgtgaattctctgatggcgaacaagagccgagctgtacctgaaggctttcccacactcactacattcataggggttctccccggtgtggattctttgatgctgaataaggcttgaactgtaggtaaactttcctccacattccatacattcgtagggcttctctccagtgtggattctctggtgctgatagaggtgtgagctctggctgaaggctttcccacattcattacattcatagggtttttctccagtgtggattctctgatggtgaataagggttgagctcctgctgaaggccttcccacattcattgcaggcgtagggtttctcaccagtgtggattctctgatggtgggtgagggtggagctccagctgaaggtcttcccacactcattacattcatagggtttctcccccgtgtggatcctccgatgcagaatgagggcagagctacagctgaaggtatttcccacaatcacgtacacttcataaggtttttccccagtgtggacttctctgatgctgaataaggtgtgagctctggctgaagcgccttcccacactcattacatttcatagggcttttccccagtgtggatttctctgatgttgaataaggtctgaagttcgattaaaagctcttgctacattcatcacacttatggggtctgtctcccacggggagtctctgatgtgagataaggttggaattcacagtgaagctgttcccaaaatcattatatttctcgcttctctctcccctgggggttagcttctcctcaactgtcacttgaccaaaatctggcattttcctgttcagtctttctccaggggagttccccagcggccttttcagactgacttctcgttcataggcttctttaaacttgagaccctgagaaatatccttttgaaatcttcccagtaggaccccatgtgatcttgtgtcttcagaaatttcttgatcattttcagtcctggtctcacgatccagtgagaacacattcccgtaattctccagcatcacatctctatagaggtccctctgagcaggttccaaacgcttccactccttccggatgaagtacacagctacatcctcaaaggttaccagctcctgggacttggcctttaggagcgcagccgccaacatctcatcccccaggctgtccttgtcggaaaaggcaggaacttttgaaggaagagcactgtcaagcagggcctgaggttcctgagatacgagatcagcctgagtttccatggaagggcaaggtgctctctggtctcctgggtgcagactcagcgggaagcgggttttaaaagagaatgaggaagcactgcctgattctttccttccttctttgaagtcagtcccggccgggcgcggaggctcacgcctggcctaccgccacccaggcc

SEQ ID NO: 433447 - DNA, 2869 bp, Homo Sapiens
  misc_feature (709)..(748): n is a, c, g, or t
  misc_feature (859)..(871): n is a, c, g, or t
  misc_feature (1216)..(1216): n is a, c, g, or t
  misc_feature (1230)..(1230): n is a, c, g, or t
  misc_feature (1232)..(1232): n is a, c, g, or t
  misc_feature (1256)..(1256): n is a, c, g, or t
  misc_feature (1258)..(1258): n is a, c, g, or t
  misc_feature (1304)..(1304): n is a, c, g, or t
  misc_feature (1353)..(1353): n is a, c, g, or t
  misc_feature (1356)..(1356): n is a, c, g, or t
  misc_feature (1358)..(1359): n is a, c, g, or t
  misc_feature (1362)..(1362): n is a, c, g, or t
  misc_feature (1364)..(1364): n is a, c, g, or t
  misc_feature (1377)..(1377): n is a, c, g, or t
tcttctgtgtctctcgttccctctttcatggttttctgcgtcctgctcctgtctcctccctccgcgtcctcatctctgcaccttgtcgtcgcctcctgacttccccgcccgccgcgtcgtggcgctttcccattctccctcctcctccggctcggttcccttcgtcctgccgttgcggccgcgccgaggtctggctgtgttcgtcttcctctctccccgcctatttttttactcgccagcactcctccctggttataatatttgctcctctatgattcatttctcctcctcctgttgcttccccaatcttttctacgcgcctgcgccgtgttctatatgcgcccgcttgtttgtgctgcgccctgttgtcaactcgtgtaaagtgtttttaagtttttctccccctgttgggcgctttaatttctctcttctgtgtgggagtttggtgcccacatgtgttgttctcgccccccccgtctcgatattgagtggtgtctctcttctcctccaaggtttccctcatgcgttcccgcttttctccccgctttctgagcgtgttttatactctcgtcgccaagctccgttgcgcgttttaatattcctgcctctctcttttggggcgcccccttggttcccaaaaatctctggggattctcggtgtacttgggcgcctcccctctgggagtacttcttttggcgcccccccccnnnnnnnnnnnnnnnnnnnnnnnnnnnnnnnnnnnnnnnnaatatgccaaccctgttattgaactatttactattttaaaatatcattcttaaaagaggcccaccaaaattataacattcagaaattttaggtaaactcccaaagtaagcnnnnnnnnnnnnnggtagtcaacttgtaccaagtttagcagcaagaggatacttccttagagactttcagtggacttaaactcagtttccgctggtgctatgtaaagcatccacgatggttttattgtactctgcaatctgcttggtcacatttttcttaattggctggtaatcactctcttgactcttggttgctatgaattctttcatcgcaaaattattttgctcaaggtgttgccactttctctccaaatttgtaagctgagaatgtgtctcattttcttgcaattgtgtttttagtgcctcatactctatgttttgcttctccattattttcttaaaggcatttctggggggngataatatcattcncncctgatgtaattcccttacctttncntcacctgaggattttaaagcgggcaaatcattataaatccccagancagttgtcatttgcctaaattcgcctttaagagaatgcggttcttcagncancnnacntnccagaagcgccanttgcggcagagccaacggcagacgtggaagggctgaagtcaaattctgagctgtactttgtgatttctgccccttcagtagattttaaattgggggcattcctgcatcatctttagttcttgattggtgatagaggatatttgttttatacgatttatatttcgaactgcagtgctccaagagtgcaacaatgttggcttctatctgtgcctttcgtttcagttcctgattctttgtttcctcaaaagtctcaataaaagtgtccatatgttcctcccttttctttagctccttgtatttctggttcatttcaccttggtgttcctctaaatccatgtcaagttgtttaatttcttcaataaactgatttatcttttcttttgtatctgttaactgtctttccatgctggctatttcctgattatcatctttaatctgcttaagtaatttctctctctcttccattggagatcctatgcttttgtcttctgcaatcatttgatctcgatgggactccaactcataaagtttttcatgcagcaataccgcctcctgtttcacctgggagtgagctatttctgcttccaggctctcttttttcatgttctgtgaatccaattgttgttgaagtgtatctaattcctgtaacagtttctcatttgtggttttcatctctaggtacttgacttggttttcaaaagacatatttttgataatgtcatctgttgcttgtttttcctgttcaatttcttcttcgacacttctgatttgtttttctttcgcttgtctttcagtaaatatgacatccaaactttgtgtttctcgatcattttgagctttaagcatattgtaatcattcattactttttccatttcagggttggtattaagtttatctaccaacatgttgtagtctgctagttgtccttgaagctcttttatctcaacagctaaagtctcagccctcttttcatatgacaaatatactgaattctcttgattgtacatttctattcccttctgaagtttattaacttcagttgtaagttcacttattttacttctaagaagcccaagatagtaagatttgtctaaaatttgcctctggggacctttcgtcccagttttcattccagtcaaaccttgttgtgttacagggcgatgggcaactttgatttgagaagacagaactccaccagtccctatgggacaaccacgagaacctggtcttgctgtcccaggtggcattgcagttgccactcgaatatttcctgataggggtcgtatcccagaaggaggccttcctgttaacccaactccacctcttgaaacagggcgagctgctgaagatttgtgattgctggccattgtttcttcactttaatcgctccgccggcgcggaaggagggcagttgcccggctcgcgggtgccttaacttctttctgaggcccacgctcagttttcctcggctctcaggcctacccactaact

SEQ ID NO: 433448 - DNA, 570 bp, Homo Sapiens
ggagttgaaagatgtgagacagtattcagaataatgaagataataataatgattattataataatgatgatgattctctatacatttttcacctcggccaatatgtccaggaaaactgcttacttctcttttcttgcctggagcttcattgttcacccttacgttgcaatataggaattaatgctacaaaataaaagtaaagcttacctgaaaagtgcatagtttggggcaatggtatctacatctcccactgtgggaaaaccagcaaagcatcaaaactctcaattctcctgttaccgaatgcagatctgaattataagatgtttatgtttgaccattgtttcaacaatgggattttgttacgaattatccctttaactgaaaccctcagttttactgtttacattattaggaaaacagggatatcttttgaatctaaaaatttgatgtacagcatgtgatttttgaagtttacatgtaaagtcacagtataggtgaaataacgtttgtcatattttgagacgtatcctgcagccatgtttttacgtgagtgttttagtcaaagtacat

SEQ ID NO: 433449 - DNA, 1910 bp, Homo Sapiens
caattccacttttatttcttcaaggattagctaaatactcggtcctgacagtgtctttagaatgtctctgttccaaacacattctaaagacactgtcaggaccgagtatttaaaatgtgtttggaacagagacacacaattgggacagaggaaaaaaggattcatcttgtgagtcatcaaaagtgctttatttgtaaagcccggctcatgactggagtgtattgttagcactaggagataacagggcaaacgtcctcactctgtccaaatggtttatcaacagaaataaatgacagactgtttgttatagacaaaaataaaagcattctgtaaacttctaaaagcatacacagattggcccccaaggaaacagttactcaaataatgtatgtgtaccttatctttacttcagggtctcatggttgtggtcttgggtcaaaccacagtagaacttcacaacacaaaaactgatctgatgccagaattaatggtgcagggaaaaaccaaatcatagtatggattactttaaatacataaaagatgaatctgtacactacgtgacagtggtgttaacactggctgctgaggataccaaatctacataaaatgagtggacagtatacggagggcacgactgctggcttccaaagactctgtgaactagatccacatacacggggcacaactgcaatctggacagccctgaagtaaagttcctggaaaaggcagtacggcagggagatctgttgagttgcaagtaataattaaagggtcgatttttgtttgtttgttttcttttctgaaactgcccacaaaaatcatatcatgttttaaacaaggagtttcaaaggcatggctttagcgcagcatgtaagtggataacctactctaagcaagactaatatttaagctcaatgccttttggaaaatgcaggagagttggtagatacatgatctaggttggaaatttataacttgattaaaaacaatcagcacagtttagggcaatgaactttcataaaccagactggggcgaaatctctttttaaaaaaatcaatcattaggttgataaatgtacatttggaggaaaaaaaatccttttccttttattgtgaaagactgtctaccatgtactttgactaaaacactcacgtaaaaacatggctgcaggatacgtctcaaaatatgacaaacgttatttcacctatactgtgactttacatgtaaacttcaaaaatcacatgctgtacatcaaatttttagattcaaaagatatccctgttttcctaataatgtaaacagtaaaactgagggtttcagttaaagggataattcgtaacaaaatcccattgttgaaacaatggtcaaacataaacatcttataattcagatctgcattcggtaacaggagaattgagagttttgatgctttgctggttttcccacagtgggagatgtagataccattgccccaaactatgcacttttcaggtaagctttacttttattttgtagcattaattcctatattgcaacgtaagggtgaacaatgaagctccaggcaagaaaagagaagtaagcagttttcctggacatattggccgaggtgaaaaatgtatagagaatcactggggcatcagctgcttgttgcgggaggggtgggggctctggacaccagggggtcctgacaaggctggggccagaaccctgaaccagtacacacggagacgccagcattcttccgtccagtgctgggggctcaggttatcagtgttagggagagtgtctgcgtgcggggtagaaatggaacattcgctgtaggttttttccttggaatcatcatcattattataataatcattattattatcttcattattctgaatactgtctcacatctttcaactcc

SEQ ID NO: 433450 - DNA, 1285 bp, Homo Sapiens
gtctccacagcctcaggacaaggcccccagtttttttcccagaactgttcgagttaaggcagctactttcttgcttttctgtcatatatgtgaagggaaattggatgggatttttggccttgaaatggtgccacagaccatgactctgccactgagaatgtgagttcaaatgctggatatagagcccgaatctcaagcacagacatcaggaagcacagatattccttaaaatgaatctggagggaaaacatctcctaggattggcctcttcctggcctcagggtttctcatttctgtgtcctgccaacccatttcctggagcaccagaaactcaaacagatttctctgtagggaaatagttcccaaccttggaccttgaagaaaatgagcacttgaaactcttgattctagcctttctaatctggagggaagggcacatgtcctccctagggaagcatagcacagcctgatgtcctccagctagtcaagctttccgtgacaatgcccaatcaaatgtgattccactctgctgtcactggaagcagaggtatcctcgtaatggctttttggcctctatcaaattctgtcaagaagaaatcacctctcagtcctaactgttctgtgatactatttgacaacaaccccagcaaatgctcacattccttatcattgatgctaatcccacagtcagaaggttttctttaggctatcaatctagcaactcccttcaccatccttccagtgtagggctataaactacacagtgccatgcacaatatccttagaagactaatacacaacaagatgtctaacaacatacaacacattttggtaaatccaaccccaagttggattcatagtacccaaggatccatttaccttactgtgggaaaattccccacacgtactgcagtgactgtccctggacccttgaacaatacactcaccttaggcattaaggtaaacacaggaccacaaaatgtcagtgaccccttagtgagaattcaactcttgacctgctgcttcagtccacctacaacgcaaatcctacataacaagatctacatcttttctaccatgcctggcccactgcagttgccacaggccctcagcagcccaagagctctcaggtggggtggggataacagaaaagattttccaggactttcctggtaaaaaattgctccataacatgtacccgcctaaggcttaggcaggcatatgcctccaagtccttgagccctccgtcccacattcccgcccacaatctaggcttctacaaata

SEQ ID NO: 433451 - DNA, 428 bp, Homo Sapiens
gcatgagctaccttgctcagcctagaaatacttttcaaccaaaaagcgactctcttataaacagctaatatatacaaggcatattgaaataagtaacatcagaattatactctatgtcaaaatcatggatatatatagtcactgtaaataaaaacatggtggtctggatagactttaattagcttattcactaaaacagaattatttcccacaatatttaggggaagattactgggaaatatagttcttctctataaaatcagtgggagaatcattatatacacacttggggtacttatatacacctatagcttactcaacgtgtttatatcagaaattcgaagatgtcctctcctcctaagtgacccacttaaaatctatacagcagatttgttgaattcttgttaatttgtatttaacattaaatt

SEQ ID NO: 433452 - DNA, 640 bp, Homo Sapiens
  misc_feature (451)..(459): n is a, c, g, or t
gctgattggaatattattgtttagttgagaaagatagtcttctttcttgatattgattattctcactcaatggtagactaatttagaaacaaaatgttttctttcaatgcatgatttcacttcatttttactttaatgtccaacttggcaaaattcaaactgttcaatgttttgttttccatatgttttaaatttaaaaatcaattttatgtatgtatatgtatagccgcacagagatacatttctttcattctgttgttctcgctgcaatacaaattgtccatcagcaattgtaatttgaaacaaaccaaataaaagatttttagtcattccatacgaacacagtttccatcacaaaaagacagtgagctctaatgcaaacaggattatgttttaaaactacaggtttagttttacacaggaaaattttgagttatttgtataataaagnnnnnnnnnaaacttcagcagaacttgagaaacaaatccagattaattctaaagggctttgtggtgctttccaacagtgcttgaaaaaaagttttcctggtcaccatgtgttcaatgaaattttaaattagcttgaaggaatcacttcttaaatgtacaacgttctgtggatcgctgcaccttgaatttt

SEQ ID NO: 433453 - DNA, 1244 bp, Homo Sapiens
gaaacgacgggccagtgaatttttgaactttgggaaaattatttatttctccccacggggttcagacaagtaatttcacatttcattgtaagtcaagggtaagaaaacattttttgtacatccatcactaatagagatcacagtatgtcaatgaaatatttaaatacactgtacagagattgctttttaatggatttctataagtagtattaataggaaaaagcatataatacaatctactctgtatctaagagctttaatttattcaaatattggaagaaattcatcttctgaatttttcttatttaaaaagcattatgagaactgattcaaggatggaggaatcaattagtactcagcaattcacagacatgacataaacatgacatttttaagacataaacaaagactgcatgttggcagcataggggacagtcttgctcttcctcattttttgaagcagagatatttcatatttcatagtttctgaacttcctcaggagttctgagggagcatccttggaccagcggaaacgaaggtgccaaccattcacatctgcaaaacctgaagaatctgaattttgcggggagactgacttctctaggggcttgggttctttctgctccgttttctctgcggttgaagccagctcctctttctttctttctctttgctcattacattcctcattttccatcttggtggtatgagtcttgtcagattcttccagcatcaggtcttttttacctctgacaacccagtgcattgacgtcttcactgagtcattcaaagcttcccactgctggaatggcatcgacatctggctccttcgccagtggtcatagcgggctcgactctcttcattggtcagaatctcctttgccttctgcagtttctgaaaagtctccacagctttggggttttcaggatgcttgtctgggtgacattccagagctctgactttaaattctgccaggatttgttcaaccgaagatagttcatcacatcccagtaatgtgtagtaatcttcagtatcttctgacctgtaattcagtattgcatccatttagatgacttaatcagtccttcttccctcggaaacaagaggcacagtgagcttcgaattaacaggaagaaactctttaaatctgaattagagcagcatgttccacatagcaaaaactagctttaagactggccacagtcaatacaccagatgtcatcctagacctttgtaaactct

SEQ ID NO: 433454 - DNA, 1056 bp, Homo Sapiens
ggacccagtctcagctctcaagtgctgggatacaggcgagcaactgtgcctggcccaaaaccagaccgttaacacattaaagagtctgattttgttgaagaaaatatttgcaataaattcaagactcttcttattggtaattttccacacaatccctctgaaataagggagaggatatagacctttttaactttatagttagaaaaattggcctcagtgtgaaatttttccagtcccatagctcatggatgccaccagcttgcggtagtagcaagatgcttactaccacaccgttttcctcggtggcccaatagctcgtgtatctaagttgaacccggcagtatgcatgattgcctttttctcttctttttaaaaaaacccaacttcagatgctgcttgcgtggcttttaatgaagctgaatggtatctatcacttatttatccttgacaggttatcttccccactcttcctttttctaacttctccattcttctcattcttgacactttcattagaactatatggtttacgaagtattttcacttaactattttatttcttctctataactggtcctgtgaggtcacattacaaaagaagaaactgagggtctctgaggttaagtagctttactaaattataaggaaacctagctggtaggtagacagcaagaatccaggtcttctgactcctctttcagttctctttccacttagaccatagctgcttccttttcttattttttagcttccatctaaccattgcctatcttgcctgtcctaatgttctccatcttctctcacccctaatcccactcactgcttctctaccactttgctttttggtggatgctagcaatgtgctttgagagtcagtcctattttggttctctttctagttggtttgtacatcattatttctcctgaattgcaattaaactccttcctgggagatttgataatgactgtaaatcaataaggtactgtgatcaccagcctacttccaatctccacccacctccctgtctcttcccataatcctatcaaactacgggt

SEQ ID NO: 433455 - DNA, 361 bp, Homo Sapiens
gagctcggtacccagttcgacggagactctcagtttcttctctataactggtcctgtgaggtcacattaccaaagaagcaactgagggtctctgaggttaagtagctttactaaattataaggaaacctagctggtaggtagaccgcaagaatccaggtcttctgactcctctttcagttctctttccacttagaccatagctgcttccttttcttattttttagcttccatctaaccattgcctatcttgcctgtcctaacgttctccatcttctctcacccctaatcccactcactgcttctctaccactttgctttttggtggatgctagcagtgctcttgagagtctccgtcgaact

SEQ ID NO: 433456 - DNA, 495 bp, Homo Sapiens
  misc_feature (87)..(192): n is a, c, g, or t
tctttactctcattatactaaatttttttaatgtaatttgaattgatggtaaaaattgtatacaggccgggtgcagtggctcactcnnnnnnnnnnnnnnnnnnnnnnnnnnnnnnnnnnnnnnnnnnnnnnnnnnnnnnnnnnnnnnnnnnnnnnnnnnnnnnnnnnnnnnnnnnnnnnnnnnnnnnnnnnatattaaaatttttaaaagtgtataaactgtaaagtatattttactggtgttttcttccttattcctacttgtcagatgcaaatacacatttttgtgtgtttgtgtttagtaattataagtatacatatttcattcttctatttcatatatttctatgacattatatcttagatgtgtaatttatgaactactactggattattttaatccattagaaattactattcacgcattctgtattcaattcatgtgatagctaatatatttggttttaaatgcatcttattttgtggttgtcttct

SEQ ID NO: 433457 - DNA, 1744 bp, Homo Sapiens
caaaggcaaacttctgaggggcattttttattataaatttaatatggttgattaatgaaaaatgacaatgaagtaccaagaaaatgtttgtcaatataaaaattttagcagcatttccatagtttcaggctccaacattagtcgtacttcctccctcccgctatcaaaaaaagaagagactccaatgggatggagtagagcctgggggtgtccagctttgtgtgggcctcagagaaatactccatccagcatccaggattctccctccctctcatccctgaagtgctagaatgtcaaagcacagaaaaagcctcctttgtgctgacattggagacaaggatccgttcttcaggctgcagggagaattgggatagaaactgactctggacttgacatgtagtgctcagccacacgccctcaccaacacctgtgcattctctactctgatgacaaggaaaggccactgcaaggtgggtgggatctggggtgtggtggcggtggcactgctggtgggagccacggcgtggcgcatgctgggtgacggtgtcaccgccacacactgctctggggcaggcgtgatcagtgagggtgggagacagacaatgtgaaaacgtaacactggccaatgattcccctgcttctttggtactttccaaaattctctgatcaaaaaagtataagggaagcacaccattaaaaaattacagttttacgtatttacaaaagcaatgatgatatattacacaacaatcaatacacagtatatgaacaaatcttcagtgaaagcacttgtgagctcccgtcccgctgtcatcccacagcacgcgacctctgcagggtcaggttgcctgttctgaagctcattaccttacagtatattagaaggcaaaaacatcatttggaaaaaaaatcattttccaatctacactttccttttagaaggcttaacatttgccatcgaaatagttatgtacaagatttattgaatattgacttctaggcaatgatctccactcccaacttgaatatgtttgaaataatgctgcctattctatggatacaatagatatttaatatataagtaactgcaccacattatatcaccacgataccagtttaatacatattattatgtacagtagttaagttagctcgggaaggtgagtctccgcagcctgggtgaacagtgtgggatggagcctcctggaagggaggcagagagctggtcatgagagagccgtgcacggccaggatgtgtatgtgcggcacgagcacacatgtctcccacacgccaacaccagaccatccctttagctgtttgcagctggaagaagacaaatcacacatatggaaggatcccatacatgagaagagccatgacagcagcgctgaacagcccagccacagggacggtcacgaaccaggccacgaagatgttccgaaagaggcgccagtccacagccttgcgggagcggatccagcccacggccaccaccgagcccaccttacagtgcgtggtgctgactggaagcccgatgttggaggcgatcaccactgtgaaggctgaggccagctcgatcgtgaagccgctggacggcgtgatgggagtgaggtccttccccatggtctggatcactcttctcccccagacccagaggcctgtgcagattccaactcctccataaaacagcagccagacgggtgtagctgctgttttatggcggcgttggatgcagtcgggtac

SEQ ID NO: 433458 - DNA, 1667 bp, Homo Sapiens
  misc_feature (56)..(56): n is a, c, g, or t
  misc_feature (92)..(92): n is a, c, g, or t
  misc_feature (136)..(136): n is a, c, g, or t
  misc_feature (195)..(232): n is a, c, g, or t
  misc_feature (1374)..(1402): n is a, c, g, or t
tttttttaatttagaataacttttgtttttattatacacatggatgaaaaataaangtttttatgtacatacgacatatagtgcaaatgaanagcttttaaataccatggatagacatgttgttggaaacaaaagnagatgaatgatgggggttaggatggtcgtcctggaactgcaggagggggtcgcctagtnnnnnnnnnnnnnnnnnnnnnnnnnnnnnnnnnnnnnngacacagatgcagaggaagaaaacaatgtttaaattataaaataaacccaaataatagcatgcaaaaatagctcacaaaagtcaaattcaaatcacacacaaaaacatgcagacatgcaaaggaaatgaagggacatcacatagctaagttagcagttcccaggacttttcctggctactagcaatgttctaggtatgagccatttgagctcactcaaaaagcttcttattttgcaccatggaatgataaatccatgcactcttattcaggagaactgggactagtccccgagccaaatacctttataacttgtatatttgattttcaaccctgattttgtgaaactcagttatttccaaagatttcaatgaatgttgtgaaatctccatagggggagagggagttgatgtagccaatggcaggttaaattttttttaagtgaggtaaattagaaggtgtcaagagatcaaatgagcaatgtaatcacaatgcagagaatgccagaggttgatctcagaaaaaaggatttgtaaataagaatttgctccaggtgagtagtcctggtgtgtaatagcctggattcaggcctagggaaactaggaggcaaggtctggtccatggcaaccccaggattttctaggatttccctctgtctaagagctaggtataactgtatttctgatttattctgaagtgggcccaaggtaaatgaaatctggtctgctggatctttctccatttccctaggctggcttgcatttcatcagacctatggataatgaaatgagggtccaagttgtgcttcatttgacatcagcctttcttgtgttcagcagggagatgatttgcagctagagaaaatacagtaaaccctacattgcaatgaacagctttgtaagtaggaaaacagcaggccaaataaagctttccctctggtttttggcagaagtctacactttaatttcccctttctaaccaaaccattaatgaactcaacattataggaagctgtagaatggtgagattatctcaagaccctactctctttgacttcttatccaggtgttcaacaacgctcacttccatcttattcttgttacacatcttattcttgcttgtgagtggagcaatgaagtctatnnnnnnnnnnnnnnnnnnnnnnnnnnnnncttctttttcattttctatgagatgttagtggagccaaactgactggtgtatttctgggcagtggtaaaaaatgatcttagcttccccaaagtccaaaatcaattttccttcagtccagtttaagctgactacactaaagaggcctcccatccatttaaatgatggagaacttgttattggtacctaacctttcaacttcagggccggggcaggggctagggggtctgcaaggctttagctttagagatccagatcccgggaatt

SEQ ID NO: 433459 - DNA, 926 bp, Homo Sapiens
  misc_feature (10)..(10): n is a, c, g, or t
  misc_feature (18)..(20): n is a, c, g, or t
  misc_feature (23)..(23): n is a, c, g, or t
  misc_feature (32)..(32): n is a, c, g, or t
  misc_feature (36)..(36): n is a, c, g, or t
  misc_feature (40)..(40): n is a, c, g, or t
  misc_feature (47)..(47): n is a, c, g, or t
  misc_feature (54)..(54): n is a, c, g, or t
  misc_feature (56)..(56): n is a, c, g, or t
  misc_feature (59)..(59): n is a, c, g, or t
  misc_feature (66)..(66): n is a, c, g, or t
  misc_feature (75)..(75): n is a, c, g, or t
  misc_feature (83)..(83): n is a, c, g, or t
  misc_feature (91)..(91): n is a, c, g, or t
caaaatgcangagtggcnnngcncccatgagnaggncatnctcccanttaatantnttnaccctgnaagtgactntcctcctntctgtaantccgaagaataatagatccacttactaagtagggctgaagtagataaccagggtggaacgtttagctcagtgtctgactcacagcgcgagctaaataaacgtcagcgcctgactgctaaatgttcggccgctttcttaactaacatctatggacgcgtcctctgggccgggcactggaagtcagccaggaggcaactcacagctcccccactgtcgcagcacgaggggctccccaggggctctggagggaaaaggggtgtggtcgggtacatctatcagcacatccatgaatactgccgtatgtcctatgattaaggaaccagaaaaaaaggcagctcccagatggcaaaggtctgtcctcccagaggacgaggcggcctcggaggaggggaaccaccaggctgagcagatgtttggggcagccctgacagggaaggcgggtctggaagagcagctgggcacgtgccccgccggagcgggccaggagaagaggaccagagcatcaggcccacacttgtccctgcgtccacggccaccaggcgctccccaatgcgcacgcccaagggacgccaggctccagcagccgccctgggccgcagccggcggcgaagccgctgggagacgaccagacagggcggggtgcgggcccggcctcaccacccacctctcatccgccatcacgatggcatcgaatatgtcctgactgccagccatagcggcaagcagcccgcccttggcccccgggtttctgcagccccgcggtgccgtagcagacccggcagcttcaggcacaaatgtccgcttgggaggagacgagacccacttccggaagcgg

SEQ ID NO: 433460 - DNA, 2019 bp, Homo Sapiens
  misc_feature (882)..(882): n is a, c, g, or t
  misc_feature (1978)..(1978): n is a, c, g, or t
aggctggtaccgccgaattaggatgtctctcccaagcgacattgtgcctgaagctgccgggtctgctacggcaccgcggtggctgcagaaacccgggggccaagggcgggctgcttgccgctatggctggcagtcaggacatattcgatgccatcgtgatggcggactgagaggtttcatggggaagggtatcgggaaggctatgaagaaggcagtagtttgggtgtgatggagggaaggcagcatggcacgctgcatggagccaaaatcgggtctgagatcgggtgctaccaaggttttgcttttgcatggaaatgtctactgcacagttgcaccactgagaaggacagcagaaagatgaaggtcttagaatcattgattggaatgatccagaaattcccttatgatgaccctacttacgataaactccatgaagacttagacaagatcagaggaaaatttaaacagttttgttcgttactcaatgttcagccagactttaaaattagtgcagaaggttccggactttcattttgaggaggatggatgaacagagaccgaacgtcgaggaacagatgtgtgtgtgacgtgtttagaaatgcggtgaagggccagacggtgctgggaaggcagttgttcattgggagggtgagggttccggttcggccgtgggagggcttccttccctggggttttctgcctgtgtcaccttggtgcccgtcttggggcctctccacacatgccctttgttgggctgaagccgtccctggcagagccctcgtgcattgacttgacagcctctccggcagcacaggcctagctggttctgggttggagttggctctggatagggttagtcaccaggcctggactgaaggcagnttattttattattattattatttgcaatgagagagatggttggccccgaatgaggctcatgggaggtttggacgggtgctgtgccgcatgtcgaggccgattgtgtgccaggcggtgcgggacgtgcctcccgtgtgttatttaatcccttcaggagcccacaagatgggtgttattctcattttacagaggagggaggggagacgcgaagggattgcctggtctaagggcacccagcagcagagctaggacttccgccctaaggctgtgcctcactgccaccaggcacagccgcctccggaatgcacaggcgagtccctgccctccctcccaggccgcacaggtcctgccaagcctcacggagcacgggggagtctgtggtggccagtttacctgggcatctggctgagaggaagaaaggccaacctgatcctgaggggacccagacatatcctttgcactgtccctagaggggcgatgagctttgcagcattaaaaaatggtgaaggggggaaatattttgaaccaaagaccaaatgttaggccgccgttatatttgcagaagctttgagaaccatgcgtatagcctcctgcattctcccctctcctaggagctcttttgtctctgtccttacgaggcgtcatacagaggcagtggggtgggcacagatgagcagagtggatggttcggtgggtccccacgaggcgagtggtggtcatatgtgatggcacgtgttcacacaccctcctgtgtacccccccaggggtcaccgaagtccccacacgctgggctctccacaccccctcctgtttccagaaagcatgggtccgaaagcagtccaggagattattaaggggtcgccatgaatccactttggttttaaaaccattcccgaatgtcctagtggattgtgttgtgctgcctaagctgccggctgcaggagccagagaagtgacccccgcgggagcagcggcaggtggatctccacggtggctcgctttgtttttgtttggtttttcttttagacggagtctcactctgtcgccgagtttgggagtgtattggcgcgatcctcgctcactggaaacttcgccntcctggatttcaagtgattctccctggctcagcctccccta

SEQ ID NO: 433461 - DNA, 1627 bp, Homo Sapiens
  misc_feature (377)..(493): n is a, c, g, or t
  misc_feature (1292)..(1311): n is a, c, g, or t
  misc_feature (1471)..(1471): n is a, c, g, or t
cggtgctttgctctcccggagcctggcgtcgccaaaggaccatgattcatccagagcaaacagcagtttgcgccaaaagagggttaacgaatgccggctttatttattttcctatctgcaaataacccgggaagacaaactggtggggcaaggaagagggggaagatgttccccatcaatgggcaccgctcacgtcacccaggccggagctgttgtctcgcgtggttggaggtgggctcacccagccaggcagcctgcaaattattctctggagcctcccggggacaggacaccgcctcccacctcacacacctgtgctgagggcttcctcccagttgggaggggtgtgcctgctcctggctggattctgtccccannnnnnnnnnnnnnnnnnnnnnnnnnnnnnnnnnnnnnnnnnnnnnnnnnnnnnnnnnnnnnnnnnnnnnnnnnnnnnnnnnnnnnnnnnnnnnnnnnnnnnnnnnnnnnnnnnnnngctgcggcctcccacatccgccaagcctgccaccctgccctggttctagggcaccaggacacgcgtccctggctcacggccagcccaggaagcaaagaggcaggcaccacgctggggttttaccagttttatttctagactttcatgtttgtctttttgtcttctgctggaaacatgccggttacatgttggtgctgggaagcgccgcggtgcaaccagaaatgcacagacccagccgcccgccgcccagaccctcagacttgcgcgtcacaggacagactccgctgtgccccgtgcacttgccaccagcctttggcctctcgatacacacaacatccaggacttgtgcccttgccccatcacgacagacaaagcgtccctcaaggcccccgcgtggttcagacagacgccgcagccaggatggttgaggtaagcgtgagccgtgttctggaggggtggggcggggtgggcctgtgcccgagatggcctccgagcacaggatgaccctgccagggcagggccccaaccacgtgggcccgcagcggggtgcaaattcttttggttcggcagcttgctaggtgaccggggcacacagcactgtgagctggcttcattgagatttggagtctctttaaattagcattatggtgtaattaacaaaacaataacaaacagaacactagtacataacagattaaacatacccaaaacttgaacaaattccagaagctattccaatcatcccgaatgagagtcctacaggtacaacgccgtggtggcacgtaagacacacttgttnnnnnnnnnnnnnnnnnnnntatgcaacttccatagctacaccgcaagaataacacagctgtaaaaactactatgatgctacgccccgcatcagatgaagtcccagcatcacgggggcagggaaaaagaagaaggacacagcctggtcttgggggaaccccgggcgggttctcaccacgncggggcttcggggcgggcccccccaaaccttgggtgggattcccgcccccgtggttggcccgcccaagaagggaaaaacctggccccctgggggcccccctggggtaagtgggaaccccgtgaggggttttcgttgaaaaaccacaaccccttttt

SEQ ID NO: 433462 - DNA, 1674 bp, Homo Sapiens
  misc_feature (134)..(170): n is a, c, g, or t
  misc_feature (776)..(796): n is a, c, g, or t
  misc_feature (1135)..(1154): n is a, c, g, or t
  misc_feature (1653)..(1654): n is a, c, g, or t
ttagatgtttcacaccggaaggtttttaaacactaaaatatataatttatagttaaggctaaaaagtatatttattgcagaggatgttcataaggccagtatgatttataaatgcaatctccccttgatttaannnnnnnnnnnnnnnnnnnnnnnnnnnnnnnnnnnnnaaccttctgcctttgatgttacagatttaatacagtttatttttaaagatagatccttttataggtgagaaaaaaacaatctggaagaaaaaaaccacacaaagacattgattcagcctgtttggcgtttcccagagtcatctgattggacaggcatgggtgcaaggaaaattagggtactcaacctaagttcggttccgatgaattcttatcccctgccccttcctttaaaaaacttagtgacaaaatagacaatttgcacatcttggctatgtaattcttgtaatttttatttaggaagtgttgaagggaggtggcaagagtgtggaggctgacgtgtgagggaggacaggcgggaggaggtgtgaggaggaggctcccgaggggaaggggcggtgcccacaccggggacaggccgcagctccattttcttattgcgctgctaccgttgacttccaggcacggtttggaaatattcacatcgcttctgtgtatctctttcacattgtttgctgctattggaggatcagttttttgttttacaatgtcatatactgccatgtactagttttagttttctcttagaacattgtattacagatgccnnnnnnnnnnnnnnnnnnnnnattatgtgatcaattttgacttaatgtgattactgctctattccaaaaaggttgctgtttcacaatacctcatgcttcacttagccatggtggacccagcgggcaggttctgcctgctttggcgggcagacacgcgggcgcgatcccacacaggctggcgggggccggccccgaggccgcgtgcgtgagaaccgcgccggtgtccccagagaccaggctgtgtccctcttctcttccctgcgcctgtgatgctgggcacttcatctgatcgggggcgtagcatcatagtagtttttacagctgtgttattctttgcgtgtagctatggaagttgcatannnnnnnnnnnnnnnnnnnnaacaagtgtgtcttacgtgccaccacggcgttgtacctgtaggactctcattcgggatgattggaatagcttctggaatttgttcaagttttgggtatgtttaatctgttatgtactagtgttctgtttgttattgttttgttaattacaccataatgctaatttaaagagactccaaatctcaatgaagccagctcacagtgctgtgtgccccggtcacctagcaagctgccgaaccaaaagaatttgcaccccgctgcgggcccacgtggttggggccctgccctggcagggtcatcctgtgctcggaggccatctcgggcacaggcccaccccgccccacccctccagaacacggctcacgcttacctcaaccatcctggctgcggcgtctgtctgaaccacgcgggggccttgagggacgctttgtctgtcgtgatggggcaagggcacaagtcctggatgttgtgtgtatcgagaggcccaaaggctggtggcnnaagtgcacggggcacagcgg

SEQ ID NO: 433463 - DNA, 709 bp, Homo Sapiens
  misc_feature (572)..(572): n is a, c, g, or t
  misc_feature (617)..(632): n is a, c, g, or t
ctgcctttgatgttacagatttaatacagtttatttttaaagatagatccttttataggtgagaaaaaaacaatctggaagaaaaaaaccacacaaagacattgattcagcctgtttggcgtttcccagagtcatctgattggacaggcatgggtgcaaggaaaattagggtactcaacctaagttcggttccgatgaattcttatcccctgccccttcctttaaaaaacttagtgacaaaatagacaatttgcacatcttgggctatgtaattcttgtaatttttatttagggaagtgttgaagggaggtgggcaagagtgtgggagggctgacgtgtgaggggaggacaggcgggaggaggtgtgaggaggaggctcccaggggaatggggcggtgcccacaccggggacaggccgcagctccattttcttattgcgctgctaccgttgacttccaggcacggtttggaaatattcacatcgcttctgtgtatctctttcacattgtttgctgctattggaggatcagtttttttgttttacaatgtcatatactgccatgtactagttntagttttctcttaaaacattgtattacagatgccttttttgtaannnnnnnnnnnnnnnnatgtgatcaattttgacttattgtgattactgctctattccaaaaggggtgctgtttcacaatacctcatgcttcac

SEQ ID NO: 433464 - DNA, 467 bp, Homo Sapiens
  misc_feature (235)..(243): n is a, c, g, or t
ggctttttatccaggttatattttaatatctggagttttaatccagcatacaaaaatcaccagtatacatttattaagttaactgcagtattatttcaccatcaccatttacatgtacttttcaggtatcagagacttagtgctttaagtagcaaattacctaaattatgaacacatatttccaaaaacaaaatcaagctcataattaccaagtatatatgtacagtgcagattnnnnnnnnnctgaattagcacatatttctcttttctaaagctcctatgaagaacttacactcttctgcactaccaatctattctgtacatttaaaatagcatttgttttgatttaaagtcaaaaatataaaggcttaaatttttgtaagactaacccataaaaaaggactccaattttaaaccaatccctgaaaccaaagcattcaaatatttgaatattagttcaatatttc

SEQ ID NO: 433465 - DNA, 993 bp, Homo Sapiens
gtatttatatatatttattcagtaaacacaattgtttcatgtaccagatttttaatgcatttgaatctttattctacaacacaagcaacataaatacaatatcttttaaaatattttctctttagaattttcatttccacctcagataaaatgtacacaaaatacacttgcaagcttgcttacagagacctgttaaacaaagaacagacagattctataaaatcagttatatcaacatataaaggagtgtgattttcagtttgtttttttaagtaaatatgaccaaactgactaaataagaaggcaaaacaaaaaattatgcttccttgacaaggcctttggagtaaacaaaatgcttcaaggctcctggtgaatggggttgcaaggatgaattttgcattttataggtaaaatggtatactgactcaaatcattatggctataacaagcttcatttatttataatcttcaatgaaaataagttgattctttggcataatactataaggaataaaaggacccataccacccactggctttatctagagtgggagatagtagtaggggaactgtttataatgtaatttgtctaagtttattcctcttagaaaagcgggaaaagcatattgaataatagtctcttagcatgattagggcaataaacatcttattcttatctgtcccatccccacaacacaacactaagaaacaaaaataacttttcccttctaggcacctcctcctgccccatcatgccacacctggatattctatcacattgtttcaactgaagtgaaacccaacttatcaaaagcattcatctttgttcagctttgcctattttgtgggaaatcaatttttattagagagaagcactcccaataagaaccagatgaaagaaatgtaggacaaagcagcttgcacataatcccgaggtagccagggatgctcactggggctggcagtgtcaggcccgagcctccctaactttaa

SEQ ID NO: 433466 - DNA, 972 bp, Homo Sapiens
ggaggggggtaaccccagccggtttataaccaatcaaaaggcccccttcccaccaattttgaaaatgtgggagattggaccagcgtgaagttttcaggaacaatcccttgaccacagaaggaagcatcaccatggacctgtaagcaaatgaccctgtcccccggctgggctgagtgttctggagagtaatcgccgtcttggggagactgctgcctgccgcgagttttgcccacggccacggggtgaccggcctccaggtgcgagggattgggcaacattgtcacatggaggggatggtgcgccccaaagtacaggtccacagaggaggtcaggtgagacaggacgtctccagtggctgagaaattctctggaaattcacttaagcctcgcattttacggaacatcagctgagattccagcattagtttcgacagatgttttcgctcttctgtggtaaacgtctccttttgcagttcctcaaaccgcttggcaaaccagtctttctcatcctggctctgaagttgggaggtttcaatagaaatctgcccacagtagatttgattgagatagactaacacttcctcaagtgaggcctcttccttccccatgttcaataatcctgccgtgtggaagggtccctgcagtgtctgcaccagggcttggatttcaggcacattctccagcagggcttgtccggtgaagagggggttgattttggcagctttatgaccatgctcacaatatactgtcaccaacctggcaaggccatgatcaactggggggcgctccagggcgccctggggctcgcggctctcgggcttcctcggccggtagccgtaaacgccccgctcggtctggtagccacgccagaggagagggagagcccggccgaggccccgtcgtgctgctgccgcagtagcagaggccatttcaccagagtcctcgtccgaattcgccacccaggcctcgccc

SEQ ID NO: 433467 - DNA, 1931 bp, Homo Sapiens
  misc_feature (35)..(35): n is a, c, g, or t
  misc_feature (144)..(144): n is a, c, g, or t
  misc_feature (204)..(204): n is a, c, g, or t
  misc_feature (375)..(375): n is a, c, g, or t
  misc_feature (379)..(379): n is a, c, g, or t
  misc_feature (506)..(506): n is a, c, g, or t
  misc_feature (510)..(510): n is a, c, g, or t
  misc_feature (527)..(527): n is a, c, g, or t
  misc_feature (628)..(628): n is a, c, g, or t
  misc_feature (667)..(667): n is a, c, g, or t
  misc_feature (744)..(744): n is a, c, g, or t
  misc_feature (771)..(771): n is a, c, g, or t
  misc_feature (789)..(789): n is a, c, g, or t
  misc_feature (847)..(847): n is a, c, g, or t
  misc_feature (869)..(869): n is a, c, g, or t
gctcgacgggtgtgatctcatgttgttgttggttngagtggaagtggaaggggcttatgtcagaatatcagggagcaggtcggagggacgaaaattacaaaaggggggtcgacacgagtcatcgtcgttgtctgggatttctcntttcttcagtgggtttgtagtttgtgcatgtgtcggcagatcggctgccaggcttgatcnaggcggcatcgagagcgcgcagtcgttttgctagttcactcaacaccatcattttagtgctgacgagatgagtgtggcatccagagctaactatcacgtctcggccctatgctgctccgggtgcccaggtacgagtatttatttaggttatcgagggtaaatagtgctctncttntctggcttagatagtgttggctttgtgataatttctggtcaatgtgttggatggtgtatcagttctcgggctatccccatcctgattcgcagcggtgttagtacttcactgatgaggcgtactgttnacantgatgaggtggggagcngactattgggttgtggctatttgtgatatgttcagtaaccttaaagcgttgtattgattagttattgactttttacgaatagtagtcggatggagttgctnacatggaagagggatggtattaggagttgtggtaactanatatcaaatgtcgttacaacttagggcgccgtagcgtggtgtcgtatttctcggacgtgatatgttcattaggggtntgtgtatcaggacctatgttttgatcncgtgcgtactatcctctncgttggccattgttaatgaggctccatcagtgagctgacatatacactctcctagctncgtgtccgtgtcttgtcatcgntacttcactctatcagctgcacgcgtagtgcaacagagaatgtgagccgcactagtgctcgactgcgagctctcatcatctcagaagcgtaatttcgtgccggctatcgatgcaagtgtgaccagctcatagcggcacgccggttcgcacgttgcgtccgagtaggagttggtcgtcttcttcgtgtcggtcccttgtccttcccaacctcatcctcgttcacctagacggtcgcggttggcaagaatgtattcgtgacgagaggatatctcggtggactattaaatcctttctctgtcgtcggggactcagagccacccggtgccatgcagcgggtcgcgttcttccccttctatttttggcggtgccattttctttttcctgttagtatttcacattatatactcgttcttatatgttccatttatttctgttcgctcgccatggacgtggataatgcggggtgctagaactttccatatatcactccagtataaagaagcggttcgtctttcaggctggagtggtgtaacccagctggttattgacaatcaaatgcacactcccaccaattctgaaatgtgggagattggacagcgtgaatgtttcacgaacaatcccttgaccacagaaagaagcatcaccatggacctgtaagcaaatgaccctgtacccccggttgggctgagttgtctggagagtaatcgccgtcttggcgagactgctgcctgccgcgagttttgcccacggccacggggttgacggcctccaggtgcgagggattgggcagcattgtcacatggaggggatggtgcgccccaaagtacaggtccacagaggaggtcaggtgagacaggacgtctcccgtggctgagaaattctctggaaaatcacttaagcctcgcattttacggaacatcagctctggagggaactgcagaaggcctgtccaataaattcagcctccctctatggggcatccccaataatgacattcagtgatcccgctgtaggccgacaatttcagcagcccgtgaaatagggatccttagatcgacctgc

SEQ ID NO: 433468 - DNA, 1177 bp, Homo Sapiens
  misc_feature (70)..(70): n is a, c, g, or t
  misc_feature (122)..(122): n is a, c, g, or t
  misc_feature (131)..(131): n is a, c, g, or t
  misc_feature (136)..(136): n is a, c, g, or t
  misc_feature (139)..(139): n is a, c, g, or t
  misc_feature (158)..(159): n is a, c, g, or t
  misc_feature (236)..(238): n is a, c, g, or t
  misc_feature (271)..(272): n is a, c, g, or t
  misc_feature (791)..(837): n is a, c, g, or t
aacatatttttggggcccccttttttggggcggaccaatataaaaccctttggaggccaagttaaaaganccccaagggcaaggagggttttccgcggtggcccccagtctagcttgatttnccgtccatncattnttnctccatttttgggactganncatgtgtcttcagccaggtgacttgtgcattctgcagctcttctgggcaccttttacagacttttcatgccaacaannnccgcagggaggtcgagggggcacacctgtactnnccaggtggtgatttgcgcttctggctgagccaggccctgccagtgggcctgcaggttcagggcagggggcctgtagtggggccatgttatttaagtgatcattcaacttggcatagtaggaggattttatttcagacacctcttcctgcgtcatgagtccgccagcaatgaggtgctctgcatatgtgtctggaatgctctttcgagctctgatgattttgtacatgatggggttggtgtagaatggctcatccagctcaattgtggccccactgcctgtagcacaacagatccataatcacatccttgcggaactggcgttggtattcaaaagccagtcgtgtggcacggaccacttcctctgggctgtctccattgacatggatgatggcacagcccacaagcttcccgatatcactgcagtataaagaagaccttcctctttcagctggagtggtgtaacccagctggttattaacaatcaaatgcacactcccaccaattctgaaatgtgggagnnnnnnnnnnnnnnnnnnnnnnnnnnnnnnnnnnnnnnnnnnnnnnnaagcatcaccatggacctgtaagcaaatgaccctgtcccccggctgggctgagttgtctggagagtaatcgccgtcttggcgagactgctgcctgccgcgagttttgcccacggccacggggttgacggcctccaggtgcgagggattgggcaacattgtcacatggaggggatggtgcgccccaaagtacaggtccacagaggaggtcaggtgagacaggacgtctccagtggctgagaaattctctggaaattcacttaagcctcgcattttacggaacatcagctctggagggaactgcagaaggcctgtccctcgtctgagaacgccacccaggcc

SEQ ID NO: 433469 - DNA, 1114 bp, Homo Sapiens
  misc_feature (24)..(24): n is a, c, g, or t
  misc_feature (48)..(48): n is a, c, g, or t
  misc_feature (51)..(51): n is a, c, g, or t
  misc_feature (59)..(59): n is a, c, g, or t
  misc_feature (91)..(91): n is a, c, g, or t
  misc_feature (102)..(102): n is a, c, g, or t
  misc_feature (181)..(181): n is a, c, g, or t
ctggtggggggagccttttgcatnctttgttcatcccacatgactagnatncccctttngtggcctcccagcccttgctaaagcaacagtntgttttctctntaacatcatttttattttcaacacaggctgagcagactgaggagaaacaacctgacctgcatttttgtccatggaattnggttctgactgtttcttgccaatatcagcaaaggaacgaacaatgggaatcctgttggtgagttttttctgattctgatgatgatgctgtttcatcaatgcctcatggaccctatggcgtacatcttcattcagctgacctgagctcacttgttggtcaagaaccatatctgcaatttcttctaaagtgttggcatgcatgtccagcaacacagttccattcagaatacaacttctcaattcaaacaagctgtgcaatgaaagagtagccacataaggcttgctccacctttctcctccatcttccacatcttcttcaaacttcaaccacctggctgtttctcgccactcagcgtcctcaccttcacgccaacaaatctcatccagttctgtgaaaaggtcatgaggaatgtgttcctcgtcatcatcctcggttccaagaataaactgtaccctctgtgatggggtgtcaaaagaaggtgactcccttccatcctctaatcctgaatctctttctctgtctctctttctgtgtttatgaccacgatgcctgtgacgtcgatggctttttcttcctcccaagggcacatgtactccaataaatagtgttcgatgaccttctaaatcttctttctcaaagtgtgttttgagaatagaacgagttccacctctatccacaactgcttcttcatcatttctcgtaggcagcagcggctccatttgggctccctggtctttaatctccatgttttgtaacgcctctggaataagcaccttgctctgcagtgtcttcagtgtcttacactcagcccggcactcgctctgcttagtattcggatcaggtagctctgaagcaggaggcaattgcacactccaactcaccagagtcacatggctcctactcactcgggctgctggccaggttttgcccgct

SEQ ID NO: 433470 - DNA, 911 bp, Homo Sapiens
  misc_feature (114)..(114): n is a, c, g, or t
ttgagctttcattaaggccccaatttcttgccaaaacgtgtgcccccattaggccttttttaagggactgcgcaattttccttgcccaacgccgggtattgctggacctgggtnctatctgaacacaggcacctgggcctcctggacccaattgtttcccagagatagacattcaatgacatccgctttctcctaaagctccttctgtaatctggtttatttgccacaccaatataggctttcccgatatcctaggaatgtcttagcatttctgacatagcctcttttgtctcttccattctctcttcatcactggaatccacaccaaatattaccccccataggattcagcatagtaattcttccagattccccgaattctttattccacctcccaagtcaaagatggtgacttcaaactttccttgtctaaggttaatttttgaaaatccaacagtaggagctacatcttcagggtattctccttggattccctttgctgttgcggttttaccagcattatcaagtcccaccatcaaaagagtcacctttctgacaggctcccgccaccgcttgaaccagccgcagcaactggccatcagactgaacatcccgggtcgctcctcccaccacttcccatccgagcccggagcggacaccggcaccccgctcttccccgggggcctccggcactccgagacgcccctaaagtggataagtcgggaggaaaagccgggagggaagtgaaggcggccggcccgagcactaagccttgctaaccgcgtgggtccgcgacgactgccctcttagccaaggaacaacctgaccaaagacgcagatacaccgtagccgagttagcgggacccggctaaagaaaagccccgcgtcgacgtgctgacgttacttcgagg

SEQ ID NO: 433471 - DNA, 115 bp, Homo Sapiens
aagggtttgtggtccaaaggacagtttatttaaaacaaacgtgatgaggtataggaagaagaaaagaaggagaacaacaattctaacataaaaacacaggaagcatctcaaactt

SEQ ID NO: 433472 - DNA, 1277 bp, Homo Sapiens
  misc_feature (787)..(806): n is a, c, g, or t
  misc_feature (995)..(1053): n is a, c, g, or t
  misc_feature (1097)..(1109): n is a, c, g, or t
ttttccacagccctgctgtttcgtggcatttgcctgtgtatgttttgcctgtacagcttcatgccattggtgattaaagtcactagtgccacttccgtcaacctgggcatcctgacagcggacctctacagcctttttgttggactctttctgtttggctataagttttcaggactctacatcctgtccttcactgtcatcatggtggggtttatcctgtactgctccacccctactcgcacggccgagccggctggaaagcaggcgtgcctccagtcaccagcattgggattgacaacctggggctgaagctggaggagaacctccaggagacccactctgctgtcttgtagctggagaagatggcgcacccatcccccaccaggataaagcagagcctgctgcctgctgaggggacacttggggaaatagcagactcagaatggacactctacaaccctgggttggatccagtggttaggttttagaaaggaacactgaacaaagttcaaaagtagaaataccaaaatagagcagaaaccaagctaagagtgtgtttctgtgtttgaggaccaatatctgttcgtgttcaggagcatgaggtgcagactccacactggggtcttagaggcaccagtgggaaagcaggactggggagagatccaggactgagccagcctcaggccagggcgggaaagcaggctgtccaggctgggcttggtggtcaggaacaggggcagctcacggtggctctggagtacgtttcctctgtcagatgcttcaaggnnnnnnnnnnnnnnnnnnnngctgaggcagttattgtccacaggcctttgggtaccgatgaggccttggggctgactgcatgtggcagaaaacgggtgggtccgccctttgaaaagtcctgagatataagtgtgagtactatacaagcattaaactggagtgcagtaaacctaggaaccttcccacaattgtttttttggttgtttgannnnnnnnnnnnnnnnnnnnnnnnnnnnnnnnnnnnnnnnnnnnnnnnnnnnnnnnnnngatttcaggggtaagtaactggggattaccaaaagcatgggggnnnnnnnnnnnnnagcttaaggttttggtattttttaaaaagaacatgggggggtttcacccatggttggcccaaggcctggggcctttggaccctccccggacctctcaaggggaattttggccctggccccccgaacctttcccaaaaaggggcttgggggaattaaccaggggtcttc

SEQ ID NO: 433473 - DNA, 1230 bp, Homo Sapiens
  misc_feature (1037)..(1042): n is a, c, g, or t
  misc_feature (1044)..(1044): n is a, c, g, or t
ggggctcttaggaagcctgggaaggaccggtgtgctaggagatgatcggggaaagcatagtcccctgtctgtggcaccagacactcccgactgtgcgctgactctccccgcccagccagcagccttttccagagaggctgtggtccatagcctctgttcgttttcactgcaggaccaggcacgaaagttaaaacaaaatgaagattttttctgaatctcataaaacagtgtttgttgtggatcactgcccttatatggcagaatcttgcaggcagcatgtcgagtttgatatgctggtgaagaatagaacccaaggaatcattcctttggcccccatatctaaatcattgtggacttgctcagtagaatcttccatggaatattgtagaataatgtatgatatatttcctttcaaaaagctggtgaattttattgtgagtgactctggagcacattttttaaattcttggactcaagaagaccaaaatttacaggagctaatggcagcattagccgctgttgggcctcctaatcctcgggcagatccagagtgctgcagtattctgcatggccttgttgcagcagtggaaactctccgcaaaattactgaataccaacatgaggctcgtactctactcatggagaatgcagaacgtgttggaaatagaggacgaataatctgtattactaatgcaaaaagtgatagtcatgtgcgaatgcttgaagactgtgtccaggaaacgattcctgaacataacaagcttgctgcaaattcagatcatctcatgcagattcaaaaatgtgagttggtcttgatccacacctacccagttggtgaagacagccttgtatctgatcgttctaaaaaagagttgtccccggttttaaccagtgaagttcatagtgttcgtgcaggacggcatcttgctaccaaattgaatattttagtacagcaacattttgacttggcttcaactactattacaaatattccaatgaaggaagaacagcatgctaacacatctgccaattatgannnnnnanctactttcctccaaaagatgcacatgtataattttcctgaaaagtgggtggattccccatcctaagggggcgggccaatccgaaaaggggctccctttacaaaaaaacaattaaccctttaacggggggggtcacaccccagggaacacataaacctttgggaattcacccctcaccgggtcccta

SEQ ID NO: 433474 - DNA, 880 bp, Homo Sapiens
  misc_feature (79)..(95): n is a, c, g, or t
  misc_feature (726)..(726): n is a, c, g, or t
ctggaattggacaccttgtttccaacctccgtcagactgttgcagtagaagaatgatttcctttgaaacctccagtacnnnnnnnnnnnnnnnnnggaatactgacaattcctcgggaacctggcctctaattagttttagatgacaaggtcttaaggagaaatgaaattatcgatttgagcaatttgtacctgtgattgtaaagtcaatatcggattttattgttgggaccatggacctcttttgtttgtatgttgtattgtcgtcccaacggaaggagagctcctgactccaggatgggctgcaggttgcagtcagggcttgaagtaggagcccagcaaagaaccacctgctggacagtccttgacatgtgttctgtgtgtgtctgtatagccttaagaaaaagaatggcttcactttcattctgtattcttccccccaccatgtggctgggaggacttgggagggggatggggacattggggaacctgtcaagaagtgctttatccagagaagcaaattttgcacgattgggactgcaatttttgttttgtattgttgtgttttttcttgaaaagctttacttttctttccacactcagctctccctcctcaagcccacttttatttttcttgctggggttgaggagagaaaatatagaattcctggataagaccaaacaaaacaaaacattaaaatacctgtatgttggttttagacgagancaaactaaacaaaaagtatctgtttatccaagtaaaagtaacacaatggacaattcttgcttattctctcaaagagattctaagatgcacctttagaactattaatagcaacctgaatttgtgtttaagtttatacttcagaatcctttaagac

SEQ ID NO: 433475 - DNA, 1433 bp, Homo Sapiens
atgagccactgtgcctggccaaattaatttcttttgcatggttgctttcaccagtaagtggtccagaatacaaaatatggtaacagagaactgttttcatacttattccttggtacagttattaaaaataaaaactcgcattttaggattagggaagtctggaaaaaaatttttttaaacttggagatcacatattgaatagctgtcaaaattcaaactgactagttttgaagaacttcaaaaacgtgttcaaatgaataaagaacaaaaatgatcaaaagaaacccatagctgcctaagagtcttaaaaattattaatgtgacactctcatctctcatcaagtgtatccaaaccacttctcatttgctctttccatttaaagactcacagtagcttcactacacatatatttatactgaacatgtacagcggaacataaatatgatgagcatttatgaaaaaacttctatctaagatggtttacactgacttgtgcgctgatctagtgagttaggagacctttttgatcttatcagtttcttgacatgctcagtgaaaaactgttgcacagaaactctaagtcccagctggtaatcaggcccatcgtccactggaggcaaagcttctgctgaatgagaagttgatttcagagttcttatattttccccaggcaccaaaaggcactactactgcagtactgttatcctcagtaccgtactgtattgcctgttcagtcaccgcatgggctgcttcgttgggatcatggcactgattgacaaagtcacaaatctcttgactattcaccatgaagttaattccatctgtggtgaggaccaggaagctgtcatcagcatgatgtaacttaatcctcttagtttcaggttctgctatgacaccactggtcttaaggtccaaatctccaatacttcttgtcattgcaagcctgccatttacgtgaggctgccccaaactattccaagctacaaaaccaccacatttcttgatcctttctttttcatcttttctttctggagtatggtcaatggtcagcttcatgggttttccttttctacacaaaatagcccggctgtccccaacactggctacaaccagttcaataccatctcgcaatagggctactgttgcagtagtcccagaggtcagaagagttgcatcagcagacaggcgggcatgactcgaaaaggctttatctatttctagaaaagccaaggtcaacagagtttccaagttcttctccttaggaagcaaatccctctggatggctacgtccctgaaaaatgttttaattagctaacggaggacgggggaggagctttcttggtcggtaaataagagtgccttctccgtcgtctcggatctccgaagcaagcagtcaaagcggccactgccttgcctgctggaaattctcccc

SEQ ID NO: 433476 - DNA, 902 bp, Homo Sapiens
  misc_feature (41)..(77): n is a, c, g, or t
  misc_feature (583)..(583): n is a, c, g, or t
aacctacgtatatgcgggaccgggctcacgcggggcggcgnnnnnnnnnnnnnnnnnnnnnnnnnnnnnnnnnnnnnatcaggccaaatcggccgagctcgaattcgtcgagagcgggaggatttccagcaggcaaggcagtggccgctttgactgcttgcttcggagatccgagacgacggagaaggcactcttatttaccgaccaagcaagctcctcccccgtcctccgttagctaattaaaacatttttcagggacgtagccatccagagacattccattattgttccattgacctttccctcatcactgagtcctttggagctgagttatgtcaacagctgccttaattactttggtcagaagtggtgggaaccaggtgagaaggagagtgctgctaagctcccgcctgctgcaggacgacaggcgggtgacacccacgtgccacagctccacttcagagcctaggtgttctcggtttgacccagatggtagtgggagtccagctacctgggacaattttgggatctgggataaccgcattgatgagccaattctgctgccacccagcattaacgtatnggcaagccaattcccaaaatcagcttggaaaatgtggggttcgcctcacagattggcaaacggaaagagaatgaagatcggtttgactttgctcagcttacagatgaggtcctgtacttttcagtgtattatggacacggtggaccttcagcagttgatttttttcatacccacatggggaaatgtattttgggttttcttcctaaggagaagaacttggaaactctgttgaccttggcttttctagaacatagataaagccttttcgagtcatgcccgcctgtcctgctgatgcaactcttctgacctctgggactac

SEQ ID NO: 433477 - DNA, 1411 bp, Homo Sapiens
  misc_feature (217)..(232): n is a, c, g, or t
  misc_feature (510)..(520): n is a, c, g, or t
  misc_feature (761)..(761): n is a, c, g, or t
  misc_feature (770)..(770): n is a, c, g, or t
  misc_feature (806)..(806): n is a, c, g, or t
  misc_feature (857)..(857): n is a, c, g, or t
tgattttcagactttttattttaagaaacaaacaaaacctttcttcataccagatcttacttttaaatctaataaagctttgaatgggcctggaggctccctctccacgaggccccagagaacagtatgaaaaccgtggaagtaggtgacctaaggtcccttccgcctctaaacatcaggaatccatgaaccctgcctctggaagataaatagtgannnnnnnnnnnnnnnntcctcgctgagagcccctctctcctaagaggctgagctgattcataccctgcacctacgacactggattatagcactggcaggagaaccacagtgacaacccaaatccaggggctcaacaactgtttgtgggtgaaaatgacagatttattcaacttaaatggtcaccgaggctacagcagaaccaatgctgttacaataggcaagcactactgtcagcagcaacataccatttatttcttcaacagcatctgagcctcatgggttatgttttcattnnnnnnnnnnntcttataagccagttgggaagctgttaaaggccaattttaaatggcaatgtaaaacaaatttcactgaaaatacaattcaaatacaactgctatgagcactgtaagaaaaactgactagttactcagatataaatggaaaagacctttaaatggtaaataaaacaatagcagcatttaaaaacctgggtaactcccattttcagaagacgcccttcccctgcccaaaccttcatgcctctngaacacctngcctagcctaggagagggcctatttcaagcaggganggctactgggtatctggcacacaacatggccggatggagctctacaccagncggagagggaccagggttcagtgcagttgtgtgctggggacagcaggactcgtgtttaagtgtcagaggcttagaggggtcagctctgaactagaagtctctcacatatctggtcctgcccttgagaaatcttgtcagtaatctcaacttagaacaactttctggaaaatgtgactagaaattaaacagctgggactcctgccacattatccaaaagtccaaatggatagtcactttgctccacagcccagggtccactttaaattctgctgttagccctcacctactgcaatcaggtggatacagctgcagccctggggacaggtcacttgaactggcagcagctaaatgaaatcctgcaacagcaccttcaaatcagccctcattcccaaaagatcaatagaggtcagggctagagttaacttcaacaggcatgggatctcccagcctcatgtgcaagcaggcaagtatatcaggatatgcctttaattctcatcttgatgttttttaatagccagagattgtttaacaggtcctccagcaccttctgttcc

SEQ ID NO: 433478 - DNA, 349 bp, Homo Sapiens
ctctagcttgattttggctaattgtgcttccaacatccaatgttctttttcctgctccagtttagaaatcttttccaaactctgttgaacttgctgtgcaaggccttctcgactttcagtagagctgagaaggatgcggcggtttgccagtgcttcttcataaggcacagagtccaagaggggctttctcaaagacttcatataggcagcagcttttttcttatactgtagcatgcattcagctgaaagaggactaatgtatccactcgctgccttaggtccatagctcagtgaagcaatgaagtagtccaaattgttgctaagaaggatgcaatctttcctgctccat

SEQ ID NO: 433479 - DNA, 1011 bp, Homo Sapiens
  misc_feature (757)..(812): n is a, c, g, or t
gaacttaatcatttattcttcaacaagtgcttattatgcaaatagcagcaatctgcttttacattatctttttccctttatcaccagatgagaaatttctccccattatcattttgtgtaatttcacttgttcttgtgtaaatacttctgtttggtttttaataaaaattgctcagtggcaaatattacagaaaaaccaaggtttttattcttgataatttactgatagtctagtgttaacaaaattattacaggtgggaatgcttccttttttcgtaagtattaacaacttgtatatacactaattacaacttcaaaatattttacacaaatattctttttcatattagtatctaacttaattatctcagcaacagcattagtatagcatgggactactataaaccaaacatcttcaaagtaaaaacttgcaaatatcttgctgaaaatggaaaagttgaaaccaagatactgccaatataaaaatgtaaagcagggaaatgttttaccactgccatcttccctatattctttctctaatgtaacctccaaactgtaacctcagcatatcaaaagaattttcaaagagaaaactaatcctaaatttcatgtttaataacatatgccttgtatagggaacattctcttaaccattttttaatcactacaacccagaaagacatggtttggtctaaaattttcaccagtttgttataaataaaatgtattcataagtagaactttcttcagaatgtannnnnnnnnnnnnnnnnnnnnnnnnnnnnnnnnnnnnnnnnnnnnnnnnnnnnnnnttattcacaggcacgatcccacaaccgatcagcatgggagtttttatgtattgtagtgcaaaaatgtaggaatgtctagcttttttgatgtcaaagttgtaatttagggatttacttgaagagtgtcaagagattctcaaacacacaaaatgctgctaggaaattacagttgaaccttgaacaccacaaatttgaatcc

SEQ ID NO: 433480 - DNA, 1588 bp, Homo Sapiens
  misc_feature (223)..(278): n is a, c, g, or t
  misc_feature (784)..(784): n is a, c, g, or t
atggggattggtggttacccccttagtgggcccgtgtctagcctgttatccgtcctttggggccatggcggcagttaccctgggtcgggctttggattccatgcttgccaccttcgagaacccctttctctacctgaagtccccaattagtttgagcagtgtggcgcacatggcccgttattcccacctacttgtgagcttagggagagaactcgctagaacnnnnnnnnnnnnnnnnnnnnnnnnnnnnnnnnnnnnnnnnnnnnnnnnnnnnnnnncaacaacagggtaactccctccgaatcaaaagtatactttagcttactccatccgtcatcacagtagtgcttatactcttcctgtgggagccacccgttcccagtagcgatggtttcagttcaggtggtggttctatataaaagggcaatgtaagaagtagcagtattttcccgatatcctgccagaactcggctaattgaaaagcagcacaaggctagaatcagaacccagggtttcaggatccaagcccagttttatttctaagagaaatacttctctacaattacaatcttctataaccctataaaacagcttcttcagttcagattcttcatcagaacatttctatttttcaaatgctgccccctgcagttgattcgattttgtaatggatggttttgaagctatttctggagcaagtgtcggagcttaggaaacagttttaatgcattctgtgtcgtcacttctataacttcttccactgagatccctttcaccttggcanatatattctgctgaaaatagaaatgttccagggctcattccgtacctgtttttctggtcctagtgcaggtgaatctgtttctaagcatatagaagttaaaggcaattgtttcacaagtttctgctgtccacttcttatgatagaagggggaattgagaagaagtacccagctcttactccttccatggctacagatggccgaccatcaaatgcatgcagcagtaccttctcagcaccttgctcttgtaaaaggttgatggtaggtcttccagcagagcgtgagtgcacatttacaggcaaatttagtcttttggctaactggatctgtctgattaggacttgtctttgctcttccttctgttcaccagtgccagcaaatctgggggagaaatctagtccaacctctccaattgccaacaaccgatccttataattctcaataatgggcaaagctacatccaaatcctttagtgtgacacttctttggtcttctggtggaagtccttgaactggatgaacacccaagcatggcaggacaaacccattatacctttctgaaagttgcataatcttttcaaattctcctgaatgttcggcaactgccacaagggccacaacattggccttcttggctttctccaacacatcatccaaatcgcggtcaaagtccggggcggagaggtggcagtgacagtccaccaagcctacgccagccgctcgcattgcgccccggcggctgccgctttagaccggccagcagagccccgctctcgacgaattcgagctcggccgatttggcctgat

SEQ ID NO: 433481 - DNA, 521 bp, Homo Sapiens
gcaagagaaaactatgtcagtaacatgttgctttgtataaaaatcttatttataaatgtgaagctttttgatgccatcaaaacttattaaaaaataggatttacttttttctaattctgacctaagaaaaataatgagaacaagctgttgcaagctcttttgtagtctattgaatattttatagatattcaaaatttcctacaaactataattttttccatgatttagcagtgagtgattttctagctttggctcttattaggtattgtaaatagtagggttatatcgatatcagcttttgtgatggcattgtggtcatcagcttcatggacattttaccccatttgcagtgatcctgtgtaaaactgccagggaaagtaattacctgtagggagtttgctgagcttggaggagtggaaactgttgtgaatgagcctgatcataaaacggaccaggccattcattattcctcaagtgttaatatactgacttatgcagtattcaaaccatctagtgcaatg

SEQ ID NO: 433482 - DNA, 1036 bp, Homo Sapiens
ggcttgtggtatccgggtgggggtcgtgtggttgggcgtactgtgggcaccgctcgcctttgttgggcgcttgcggggtggctggcctccctgcttggcgccctattgccggctcgtgtgtcgcctcatggtcgttcccgcctcgtggtttcgtgggtcatggcgttgctttcgtctccgctgccgtcgcatcgtcatcgcgccttgtgcggcgttgctggctcgcctggcctgcgtggtcgggtgcctggctccattctcctagggggtttgctgggtgggcgcgccgggagctgtgggccgcagggagctctgtgtcgggctgcgaggtagttaagtggcgttcatctgggtcgggcagctagggtccttggatgcgcatccagggtgtctcgacgcaatgaatgcttgggcccagcggtgctagtgggctccgtttgtttggcggatgccgcctatgttatgtgtatgttgcgctacgtgtttgcttggtctgcctatggtctagcctggggtgtatcatgtgtgcaggctgggctattgggtcatgtggccctctgggccctataggccatgtctggatgctcccccttgggatgcctcctcctgtcctcgggggctcctgttgtcagatgtgggtttttcgtggtctgctgcatgttggttctccttcccagtgtagggctcctgctcttggtggtcgggttcctgacacggttgggtagcttttgggaggggcagccatactccttgattggtccttgagcctaggtgtctctttgatcgtgcccgctgctcacctcttcaaggcactcacagcaggtcaagatccctgaggcgttctcctcgcggctttggtctggcccaggaagcaggaactctgggaagagatgcgcgtccacgggcattcggcggccggagcgctgtgtgccaggccgagaggacagtgacgtcgccgcggctgctgcgcggctgctaagaagagcctcggagcacccagggtcattgactcggatgtctcctcgccctcagaccg

SEQ ID NO: 433483 - DNA, 963 bp, Homo Sapiens
tggagtcgttgatcgctacagtcgggtcgctcccccacatccaaggtggggctcgatcgggggctctccgcgcggccttgcttagcatggtctctgtgtagggggtcgctatggcatctggtggtggttgtttctgtgggtcgtatactcttatgcgctgcggcgacctcgatgtgcgattctctgtggttcgcgccatctgtttcgtaacgttgtgtcgcactgtcactccgctgttttcttatgagggcggttgataggtttggctgtatgtggtggggagaagtgtttggtggggtctggggtcgctgaggtagggaagacgttgttttgttatatagaagtgggtgtggcgggctgtgtttgtgacttggggggagaggttggatagtggggttttgaggtgcggtatgatatgtgtggtgtgacgtgaggttagtgagtatatgtggctttgatatgccgagccgcgtgagtactcgtcgatgctcatgtttctgtgcgtcggagttcggtggtgtgtttgtctcgttggtgttatatccttgtagtctgtaagagtacatgatatactgtgtgaccacctgtcatcatgggtggtcaatctggagaaccggggggccaggaaccaagtttgcctaggggtttctggggtccacaaaggaactttcagaagcacctgagcaggggctccatgcctcagaagaagtgctcccagggctccggggagcacttggtgtccccagctgcaggcgcccccgtgggggtttcttgggcaaggaggagaggagctggccaccgggcctctgagacccgcaggccctgggtgtcacctctaccgcggacgttctcacctgcggctttggctggcccaggaagcaggaactctgggaagagatgcgcgtccacgggcattcggcggccggagcgctgtgtgccaggccgagaggacagtgacccgct

SEQ ID NO: 433484 - DNA, 2039 bp, Homo Sapiens
  misc_feature (42)..(72): n is a, c, g, or t
  misc_feature (484)..(504): n is a, c, g, or t
gtagcccagaaaggcactcttctagcactcttctggtcccannnnnnnnnnnnnnnnnnnnnnnnnnnnnnncacgctgtttccaaggaattgtactaggtgctgcaatgcaaagggttatgacaaaactgtctgtaaatgtaggatctgaattggtctttgatagttttcctgatttgagaaagaagtctctatttggctaatttagggagctaggagaatggccaaaggtttgcttatgtctttctggcagcctagcatagcttttgcctccctcaaatcagttataagtcaaaacaaataaggcacattttttaaaaaaattcccccctttaattgaccaaagtaaagccatgacatttcatttggtaacctgtttagaattataaaaatcatttcatttggcccagcccatactgcccaagacaaaacttccagacaattctgatgccatccagttttgttcttacaaactgcatatttnnnnnnnnnnnnnnnnnnnnntcttcaacgtcctaaatgtgatgtgctcagtgcgaagcatatcagagctggacgtgacatttatgtccttgacaagcctcgattatccaggtcctttaccttgtatatcctgaccagccaatgttctgtggtatatgcttcctccaggacatcaagctcaaagtctttattcccaatctcagcatttcggacacggtcaaagcctggaggacgcttggcttctgtgtaaacctgtccaaagcgatagtaacacatcttgtacatgaggcagttgagcagcactggagaaccttcacggtccacacggaactccccagttggagtataatagtcattctccttgatatgtttgcctgtatctgtgctccctccaatccggaccatccaaagaaacttgttgatatcatcagaggaatacccagtgaggcctccaaaaatgaccagcacatagctgacatcgagctccctcatgatctcataggctttttcctctgtggacgccattgcctgccctactcgagaaatatgggtattattccatgtgttattgtccactaaaattgttcggtttgccatagctgtaatctgatagccataatcccaccaggacatgaccttcgcatcctctggagtattatgacgaagccaataatatgcttctcggaagtcatcaaatatgatcctactgccatccccaccacgggcagatagtacaatggacggagaagagtaggcctcactggtcacccaggttgaatgaaaggtgtaggtgatgagaaagaaagccatgacccagtatcatcccacttgccacttcattcttaatagggtaggtggaatcctgttgcttcttgctcttcttgtctggacgacttatgtccagattcttcatgtatgtggacagcacctgggagactccaatgccagagagaatgcacataacaggtgccaacactagcattagacgcaccattacagctgaaaagtacatgctggtcacaccatacatgatgataaaaatccgggcatcagacaggttgctaaagcagtaatagaggccaactggaaacatgaagacgaggagctgcaggtcaaaatagtatgaggaccaggttgtgggctgatgctcagacacagaagcaatgatggggatgttgttcttagcataagagggatccagcagtgagtagaaacgccccgtccagggagatatttttcctgtcagcatgaggagagctcccacggtgagaaggacaaagcctaccagagagatgacgctccggaaaagaacttcaaattgttgtggattcaacttgctgcgcaggtaatccacaaaggcatggatctggcagagaccaaagaccccaaaggctgccatgtgctctgatgaaaggacaggctggaaacccacaaaggagatctgcatagaaagtatagtgcccaggcagtaaacagtacagtaggccacatagatccggtgagagaaacggcctgtgagcatcagcacgaggacgtgagaggaattaagttgatca

SEQ ID NO: 433485 - DNA, 1100 bp, Homo Sapiens
gggagggttgggtgcgccgctgaacggatggctgagggagccccgcggatcgtttaggaaagccggccagctgatcgtcgtgtgttgccacccattcatgtcaagatgactaagtttggatttttgcgattgtcctatgagaagcaggacacacttttgaagcttctcattctgtcaatggctgctgtattatccttctccactcgtctgtttgctgtcctgagatttgaaagtgttatccatgagtttgatccgtactttaattatcggactaccaggttcctggctgaggaggggttttataaattccataactggtttgatgaccgagcctggtaccctttgggacgaatcattggaggaacaatttacccaggtttaatgatcacctctgctgcaatctaccatgtactccattttttccacatcaccatcgacattcggaatgtctgtgtgttcctggcccctctcttctcctccttcaccaccatcgtcacgtaccaccttaccaaagagctcaaggatgcaggggctgggcttcttgctgctgccatgattgctgtagttcctggatatatctcccgatctgtggctggctcctatgataatgaagggattgccatcttttgcatgctactcacctactacatgtggatcaaggcagtaaagactggttccatctgttgggcagctaagtgtgcccttgcttatttctacatggtctcgtcatggggaggttatgtgttcctgatcaacttaatttcctctccacgtcctcgtgctgatgctcacaggccgtttctctcaccgggatctatgtggccctactgtactggtttactgcctgggcacctatactttctatgcagatctccttttgtgggtttccagcctggtcttttctccgaagacatgggcagcctttggggcccttggtgctcgtgccaaatcctgtcctttgggggattacctgcgccacaaagttgaatcccccacaatttggaagttttttttcgggaggcggctttcctctgggtagggtttgggcctttccaccgggggaactcctccttaggggggaaggaaaaaaattctcccgt

SEQ ID NO: 433486 - DNA, 855 bp, Homo Sapiens
  misc_feature (680)..(696): n is a, c, g, or t
cctatctcaaagaaaaaaaagttatataaatggaatcatactgtatttaatcttttgagatcatgttttcactcagcataattctcttgagatttatccaagttatcgtgtatatcagtagacattccaaatggtacagtaatgtcacaccgaaaatctgctcctccataaaagcaatgaggacattagcaaaagctgttgacataaacttattagaattgtggaaattaacaaaagcttgccacattccaaggaatgtttacctaagaaaaacagctgaatctcagtaagaacggaaagcctatagtgttttaacttgctctaatcctatacacctctccccagttccatggaagccttgaaactcaatagcttcacatttatagtagttgtggaaagtagagcttagcagccactggagagaaaagaacagatttgaagcccaaaaaggttcattcctagagtattaatcacgagttgacctaacagctcactgaaaatctccataatcaggacttcttttaatttgacctatttcagagtacactctgtatacagcttgatgtacagggcatttatttcttaaaaaacaatcagtagttcaacaaaagaaattagacttaaccaaaatgaaacttttgtgcttcaaatcataacatcaacatacataatgtgagtgnnnnnnnnnnnnnnnnncaactcacacaccgggagaaaatatttgcaaatcatatatctgataagggacatgtgtctagaatatgtaaagaactgatacaattcaacaataaaaagacaaataacccaactgaaaaattgagaaaagatttgaacagacattgcttcaaacaagat

SEQ ID NO: 433487 - DNA, 238 bp, Homo Sapiens
ggttttcactttattatacaaaaaagggaaaacaaaacttccacagttggctttaagcataggcagacacctctaagccactccctctaatggaatcagagactgggcaaaacagaggatgtggagaacggggcagcctcagcctgctcccaccagggtcaacatctcccggccctcaccgaccctttttccagattcacaacaaactgatgtgggctctaggacagacccctttaca

SEQ ID NO: 433488 - DNA, 1497 bp, Homo Sapiens
  misc_feature (1392)..(1440): n is a, c, g, or t
tttttttcaaacctttgtttttcactttattatacaaaaaagggaaaacaaaacttccacagttggctttaagcataggcagacacctctaagccactccctcccacctcccatgatacaaattcaagttgtggtggttgttgaatcctacaaaacactccttaaatattagaaaagaagttgggggtggggatgggggtcttcccaccccagccatcccatcccagtgccaaaatgcactcaagagtgacctcttacagcaccaacacccccaccctgacagtcctgtttgtactgtaagaatttttcaatttttaaaacaggaaagaaaaagtgccccattcaaagttgtttttaaatgaaaatacattccactggaaacacaacagtgtaggggcatccaaataggaaactggggttctttgcagggctcttgggaagaaatagaacctataaacccctgtacttaattccaggattaggacaaaggaaggggaatgggagtggggagtgtcccccccaggcctccccacccccagcaccaaggtccaaggcaaagcagagactgtctgccttcctttgggagagggacccaccagcctctctgggaccagggcccttcaccgttctttgctccacctcccgcggcagagttcccgctcttcccccatttcttggctttcattcagagggggaaggtgaaaaagcaccaagccccaatttaataggtcagtgacatgaccataaaaaagacccccccaaatttagtcaacaaaaaaataagaactacagagataaggtggcttggcttattaagagtcaaggaatcaaggtaccaaaaaatacgggagatggctgggaagagttagagacagctgcagatgcagcttttgcagacttcttgcccagctgtggggttgggggaggagggagcagacctgagaaattaaaggaaatagggggtggtgggaggattcaaggaaggctggagggatgtgtaagttaggagctcccagcacatttcttgaagcccaggttctgagcctggggtggccaggcttggcctctcagatgaacaggggagaccttttccatcaaatacaagctttaagcttcacaccatcttgcctgcctttccgccttcctgctggacaatggagaccagcagctcggatgcatgtgactcttggcagagggagcctggtctgggaagcatccgagaatggcttcagcacactccccctaatggaatcagagactgggcaaaacagaggatgtggagaacggggcagcctcagcctgctcccaccagggtcaacatctcccggccctcaccgaccctttttccagattcacaacaaactgatgtgggctctaggacagacccctttnnnnnnnnnnnnnnnnnnnnnnnnnnnnnnnnnnnnnnnnnnnnnnnnngctgcacccatgctagtacaggaacacacatacctcgtgccgaattcgccacccagg

SEQ ID NO: 433489 - DNA, 397 bp, Homo Sapiens
  misc_feature (233)..(233): n is a, c, g, or t
  misc_feature (319)..(319): n is a, c, g, or t
cactttattatacaaaaaagggaaaacaaaacttccacagttggctttaagcataggcagacacctctaagccactccctcccacctcccatgatacaaattcaagttgtggtggttgttgaatcctacaaaacactccttaaatattagaaaagaagttgggggtggggatgggggtcttcccaccccagccctcccatcccagtgccaaaatgcacttcaagagtgacctntttacaggcaccaacacccccaccctgacagtcctgtttgtactgtaggattttttcaattttttaaaacgggaaggaaaaggtgncccctttcaagttgtttttttaaatggaaattacatttccactggaaacacaacgtgtaggggggggcttcccatagg

SEQ ID NO: 433490 - DNA, 1000 bp, Homo Sapiens
  misc_feature (746)..(746): n is a, c, g, or t
  misc_feature (765)..(765): n is a, c, g, or t
  misc_feature (820)..(820): n is a, c, g, or t
  misc_feature (825)..(825): n is a, c, g, or t
  misc_feature (828)..(828): n is a, c, g, or t
  misc_feature (830)..(830): n is a, c, g, or t
  misc_feature (832)..(832): n is a, c, g, or t
  misc_feature (837)..(838): n is a, c, g, or t
  misc_feature (841)..(841): n is a, c, g, or t
  misc_feature (843)..(843): n is a, c, g, or t
  misc_feature (853)..(853): n is a, c, g, or t
  misc_feature (878)..(878): n is a, c, g, or t
  misc_feature (885)..(885): n is a, c, g, or t
  misc_feature (888)..(888): n is a, c, g, or t
  misc_feature (891)..(891): n is a, c, g, or t
  misc_feature (893)..(894): n is a, c, g, or t
  misc_feature (913)..(913): n is a, c, g, or t
  misc_feature (920)..(920): n is a, c, g, or t
  misc_feature (924)..(924): n is a, c, g, or t
  misc_feature (928)..(928): n is a, c, g, or t
  misc_feature (930)..(930): n is a, c, g, or t
  misc_feature (933)..(933): n is a, c, g, or t
  misc_feature (946)..(946): n is a, c, g, or t
  misc_feature (949)..(951): n is a, c, g, or t
  misc_feature (959)..(959): n is a, c, g, or t
  misc_feature (962)..(963): n is a, c, g, or t
  misc_feature (967)..(967): n is a, c, g, or t
  misc_feature (969)..(969): n is a, c, g, or t
  misc_feature (973)..(974): n is a, c, g, or t
  misc_feature (977)..(977): n is a, c, g, or t
  misc_feature (981)..(981): n is a, c, g, or t
aactgcattggtaactatgaattttattatgtggacatctactgtggcatgcatctgtacaaacctttcaggcagtggtccacagctgggttatgaataaaaaggcataaatttttctctcattttattacaatgaagtttaacagtacagaaaagtcacatgaccttggtgggtcagatttcttaaaccctgcaacatgaggaactctaaatacattaaatattgttacacattcagacttccaatgtacaagtacttggaaacagttacagccctcaccaagctaggttggggacatgaagtccaacagcatctgaaatgctgtgaaggcaaactttacaaatagcaatgtaagcttacagaacttgcctttactagggtggtatgttcatgtaattccagcgccttcacaatttaacgaaccaaatttactatacttcacttctaaaaacctagatgaaacatgaaaaagaagccatacagtataaattgcaacttcaggaaaagttcctgctttattattccaaataatttttcccatgtaaaataaatgtccaatagttcctggtatgtgggaagataatgtttgttaaagtcacaatgaagccttattgacggaagcttggctatataaacagcacaagttgagaaaaggtttaatctccaaacctattagactggatgaagtaagatcagtaacggccaccttgcgacattacaggaggtctcattcccatcggaggtncgaggaggcccacccttgntaagggggcacccattggcgttccctgcccatacgggggcatagcaccaggaagntatcntgncntnctttnntgntnaccaccatantgaccatgaggtggcattgggggtntcattcnttnttngnntgggatgcctggctgtggnggcacanaccnccantngtncaactggtggatnacnnngggggccnttnnggcnangaanntantttnaaattagtaacttgccctt

SEQ ID NO: 433491 - DNA, 1247 bp, Homo Sapiens
  misc_feature (568)..(577): n is a, c, g, or t
tttcagtgaacatcaatttaaataactttattcagaggaatcctttggtccacttctgctgactcaacccctgcccatgccaacaaaggagtactaagaaaggcaggttagcctgaatgtctaaattcaatttgttcaactttataaaagcaggcaaagctactgggggttgccccctcccaccatcattctggtccaccatttgggccacaggcttagggaaatgaaggaaagtcgttttctttgaaggaaatcctggccaaagtcgagaaagtgggcaccattatgaggtcaactaaaccctgatggcagtgtgaagtgcaattcccttctccctccaaaataagaaacatgaatccaggggaaggggctttttcgtgtgctaaggaaaaaccctttcccacatagtcctgcctggcagagccacttcctgagaaagcctcgtgtgtataaggtggggtaaaggataggggactttatgactatttgacaggtaaaagccaagttggctccttagaggatggaaaggagagcaggcccaagcttcaccagagctgcaggtgggcannnnnnnnnnccttcctggcccagaagcttcttcaccttgcgccttagagggatagccagaatgaaacccaggcaggagggccgctggtagggatgcatggaagccgacttgatgttggtttttattccacttggcattttccctggttgacctgcctgagccatttgtaccccactgagcattggctgctgctggcttggagctcctgccatctgcacctgctgtaatcctgaggttcctgcaaggatcgtcccagctcctggctggcctgcctggccaggaccactgctgcctgaaggtctccaattagatagtcctttcccaaaggcaacagctgccaccaaggcattagtgtctgtagggttaaaggtctgcttgttcggccggagacctccactctctgattctcgctcctctttgctgattttctccagaaggtttgaacacattttattcaagctctggatctgcttctgggctgcatctgcaccaatgcgggcagcatctgtcgtcagttgcttctcctgttcttccacttcagggtcaggcttggttctcagatggtcagggactacctcatggctgaaaacaggcacccgtccttcagtctgccgcatgagatcttcatctcggtctggacctcgtgccgaattcgccacccaggcctcgctaccttagg

SEQ ID NO: 433492 - DNA, 1877 bp, Homo Sapiens
ttttaaattgcaacttcaggaaaagttcctgctttattattccaaataatttttcccatgtaaaataaatgtccaatagttcctggtatgtgggaagataatgtttgttaaagtcacaatgaagccttattgacggaagcttggctatataaacagcacaagttgagaaaaggtttaatctccaaacctattagactggatgaagtaagatcagtaacggccaccttgcgacattacaggaggtctcattcccatcggaggtcgaggaggcccaccctggtaagggggcaccattggcggtccctgcccatacgggggcatagcaccaggaaggtatcctggcatgccttgatgatgaccaccatactgaccatgaggtggcattgggggtctcattccttgttgctgtgggatgcctggctgtggtggcatcatacctccaattggtccaactggtggattaccgatgggggcctgtcctggccgaggaagattacgttgatacttaggtaactgtgcccttctctcttccagggatatatcctcatctggatggatcaacttactggttgcactagttgttgtaagtgtagcaggcttacttgttattgaagccgctggtttagctgcagtactatttgttgtactagttgttgaagctgtagactgtgtataagcagggaatgtaggctttgggggttctgtagttgttgcaggggtactatttaagggtttgaaatctgtaccaacaggtccttggacagctgcctgagcttgtgctgtgctaggaaacagagctttagaagatgcagacagactttctgaattggatgaagctgtacttgagcttgtgacaggtgtccccatctgtccagcactggggaaaagaggcttagtaactggaggctgtggggcaggtacagttgctgttggtgcaggtggtctattaagaatacctggcgctgaaacagcctgtgcttgagtcattggaggaattccaggacgtggaacaggtgggggcatacctggtggcattccaggcatcagaggtggtattcctggtccaggtggcatcattccacccattggcatcattatgttttcaccgcaaaatgactgggtgtattttctctgatgatgcaatccaggtggcatgcctggcataactggtggcattcctggcatcagaggaggaacacctggcattaatggaggtatgcctggaggcattcctggtgctcctggtactggtggcagtcctggctgtgccattggaggaatataaccttgctgaggttgaacaggctgtggctgaaatgaagttgaggctgcagagtcgtcatcatcatattcatcagaatcatcttgttgcttctttttttgactttcttgtgttttctgttcaagaagtcgtcgtctttcatccatgtctttttctggaataccttccataccatatatttccaactctatgtctgttcttccaggtattgcatttggtacggcatctattgtttctttatgtacctgcatgcaatgaatagctaagccaggtcctgtatacaatttcttgtgacatatatggcatttaaaatgctttgctttttggtgctgaataaggatcttctcatcatcaaaatctctattacaataccagcaccacggcttcagctgcttcttcttcttgcgacccataactgtgttctaccggcaaagtaaaagggaggagaaaagaagcaggagaaacgaggccaaaaatccctcactttcccaacccaacggctaccaccacgtcccacaggaagcagacacaaaatggccgacggcctcgttccacccgctctcgacgaattcgagctcggccgatttggcctgat

SEQ ID NO: 433493 - DNA, 1163 bp, Homo Sapiens
  misc_feature (46)..(46): n is a, c, g, or t
  misc_feature (112)..(112): n is a, c, g, or t
  misc_feature (153)..(153): n is a, c, g, or t
  misc_feature (235)..(235): n is a, c, g, or t
  misc_feature (285)..(285): n is a, c, g, or t
aagcctttggggggttccgtaagttgtttgcaggggttactaattnaagggggtttgaaattttggtaccaaccagggttcttgggacaagctgctggagctttgtgctgtnctaggaaaacagagctttagaaagatgcagaacagactttntgaaattggatgaaagctgtacttgagcttgtgaacaggtgtccccatctgtccagcactggggaaaaggagggttagttanctggagggctgtggggcaggtaacagttgctgtgggtgcaggtggtttanttaagaatacctggcgctgaaccagcctgtgcttgagtcattggagggaattccaggacgtggaaccaggtgggggcatacctggttggcatcccaggcatcagaggtggtattcctggtccaggtggcatcattccacccattggcatcattatgttttcaccgcaaaatgactgggtgtattttctctgatgatgcaatccaggtggcatgcctggcataactggtggcattcctggcatcagaggaggaacacctggcattaatggaggtatgcctggaggcattcctggtgctcctggtactggtggcagtcctggctgtgccattggaggaatataaccttgctgaggttgaacaggctgtggctgaaatgaagttgaggctgcagagtcgtcatcatcatattcatcagaatcatcttgttgcttctttttttgactttcttgtgttttctgttcaagaagtcgtcgtctttcatccatgtctttttctggaataccttccataccatatatttccaactctatgtctgttcttccaggtattgcatttggtacggcatctattgtttctttatgtacctgcatgcaatgaatagctaagccaggtcctgtatacaatttcttgtgacatatatggcatttaaaatgctttgctttttggtgctgaataaggatcttctcatcatcaaaatctctattacaataccagcaccacggcttcagctgcttcttcttcttgcgacccataactgtgttctaccggcaaagtaaaagggaggagaaaagaagcaggagaaacgaggccaaaaatccctcactttcccaacccaacggctacccctcgtgccgaattcgccacccaggcctcgctcc

SEQ ID NO: 433494 - DNA, 379 bp, Homo Sapiens
ttaaaactgtatggcctctttttccatgtttccatcctaggtttttaagaagtgaagtatagtaaatttggttcgttaaattgtgaaggcgctggaattacatgaacataccaccctagtaaaggcaagttctgtaagcttacattgctatttgtaaagtttgcccttcacagcatttcagatgctgttggacttcatgtccccaacctagcttggtgagggctgtaactgtttccaagtacttgtacattggaagtctgaatgtgtaacaatatttaatgtatttagagttcctcatgttgcagggtttaagaaatctgacccaccaaggtcatgtgacttttctgtactgttaaacttcattgtaataaaatgagag

SEQ ID NO: 433495 - DNA, 1319 bp, Homo Sapiens
  misc_feature (196)..(315): n is a, c, g, or t
tggtaactatgaattttattatgtggacatctactgtggcatgcatctgtacaaacctttcaggcagtggtccacagctgggttatgaataaaaaggcataaatttttctctcattttattacaatgaagtttaacagtacagaaaagtcacatgaccttggtgggtcagatttcttaaaccttcatctcgcgatnnnnnnnnnnnnnnnnnnnnnnnnnnnnnnnnnnnnnnnnnnnnnnnnnnnnnnnnnnnnnnnnnnnnnnnnnnnnnnnnnnnnnnnnnnnnnnnnnnnnnnnnnnnnnnnnnnnnnnnntttgtctgctgctgaaagcccatgttctttttattgtacccatctaggtgagccttgagcaaaaggtaatttcactgcccaactctgcaaagagcaccagggagtcgaggttgccagccacactcaccgctggtagggatgcatggaagccgacttgatgttggtttttattccacttggcattttccctggttgacctgcctgagccatttgtaccccactgagcattggctgctgctggcttggagctcctgccatctgcacctgctgtaatcctgaggttcctgcaaggatcgtcccagctcctggctggcctgcctggccaggaccactgctgcctgaaggtctccaattagatagtcctttcccaaaggcaacagctgccaccaaggcattagtgtctgtagggttaaaggtctgcttgttcggccggagacctccactctctgattctcgctcctctttgctgattttctccagaaggtttgaacacattttattcaagctctggatctgcttctgggctgcatctgcaccaatgcgggcagcatctgtcgtcagttgcttctcctgttcttccacttcagggtcaggcttggttctcagatggtcagggactacctcatggctgaaaacaggcacccgtccttcagtctgccgcatgagatcttcatctcggtctggagacaacaccagaggaatgatgacctggttacggaacagcggtgttttttcatgcttcaagaccttgttcagagtgttcagctgtccagaaagcaaggcaaagctgtccaggacagatggccaggtcagccggccatactcgttctccaacttgcaaatgaaactccccagagagttcttcagatcagccacttgactcagcagtgcatctaatgatgcctcaagctgcttctcctctctctgcattgcggcggccgaggcggctgccacgatttcacttccgctctcgacgaattcgagctcggccgatttggcctgat

SEQ ID NO: 433496 - DNA, 431 bp, Homo Sapiens
caatttaaataactttattcagaggaatcctttggtccacttctgctgactcaacccctgcccatgccaacaaaggagtactaagaaaggcaggttagcctgaatgtctaaattcaatttgttcaactttataaaagcaggcaaagctactgggggttgcccctcccaccatcattctggtccaccatttgggccacaggcttagggaaatgaagggaaagtcgttttctttgaaggaaatcctgggccaaagtcgaggaaagtggggcaccattatgagggtcaactaaaccctggatgggcagtttgaaggtgcaattcccttctcccttccaaattaagggaacatggaatccggggggaagggggtttttttcgtgtgtttaaggggtaaacccttttcccacatagttcctgccggggcggagcca

SEQ ID NO: 433497 - DNA, 1015 bp, Homo Sapiens
  misc_feature (232)..(251): n is a, c, g, or t
ggggggggaatactcacagacccctttttcctggtgtcccggggttttttctttgggaaaacaaatatatgggcccctggttcccctttccactagggggggccccggggcgcccaaaggaaatgggtttatggaaatttttttggaggggcccagagggcgccccacacttttgaattatatcatggcgtgatggttgtttaaacatgggtattcgtatggcttcaagtgnnnnnnnnnnnnnnnnnnnnaatgttatatcttcctttctgcgttttgtttttttggcattcaggctctttaatgtctgaggatggggggaagaagtcaatggtgaggcttctctgggaaattctgcaggccttgtagttctctaagcccctctagcaacatgtggatatgggctttgatattcatggagtccttggtgaggctgttgctgagctctgtgaggagagagctcttacgatcaatgaacttgagagcttctgccagtgtcaactccaggaaaaaaccatatcccagggccacatagatgcgtgaagtatctgggaccactgtgtcaacgaagaagttacagcccaaatccacctgcatatataactccgagtgcttagcttcctggagtcgctcaatgacatttctcagttgaaggtatttggccagctgctcatataccttgtctcgatggtccagcacctttcgcaagtcccgctgcagcacgtcactgatgaaggtctcgtagcgcagcactttctcccccgtggcctccaccgcccgccgcttagggggcgtcgccatgatgggctcctggggagtggggagggggaagaccatgttgaccgatccagtttggcctcacacacagttcatctctaccctctcaacgctgggaatcggcttgtccggctcaagctggggttcagccttccgcccctcccaactcggggacccgaccacccagggacacccaagcgcggcctttacctcaggccgccagcaataagacgccgct

SEQ ID NO: 433498 - DNA, 818 bp, Homo Sapiens; identical to SEQ ID NO: 120917
  misc_feature (49)..(49): n is a, c, g, or t
  misc_feature (97)..(143): n is a, c, g, or t

SEQ ID NO: 433499 - DNA, 831 bp, Homo Sapiens
  misc_feature (22)..(22): n is a, c, g, or t
  misc_feature (83)..(99): n is a, c, g, or t
  misc_feature (205)..(206): n is a, c, g, or t
  misc_feature (208)..(208): n is a, c, g, or t
tttttccccttttggggggaanaacccgcggctttaatgggcccccattggtttttccccctttaaccctttaccttgggggnnnnnnnnnnnnnnnnnaaaggcggaaattggttttttggaaaaaggtctttcttcgaaggggccccgaagggccgggcccaaaccaaggtagtttatttgttagtgggttatttgttttttnntnggaaaagggcatttcagggctcttttaatggtccggagggatggggggggaaagaagtccaatggtggaggggcttctcctgggggaaaattctggcaggcccttgtagttctctaagccccctctagcaaacatgtggatatgggctttgatattcatggagtccttggtgaggctgttgctgagctctgtgaggagagagctcttacgatcaatgaacttgagagcttctgccagtgtcaactccaggaaaaaaccatatcccagggccacatagatgcgtgaagtatctgggaccactgtgtcaacgaagaagttacagcccaaatccacctgcatatataactccgagtgcttagcttcctggagtcgctcaatgacatttctcagttgaaggtatttggccagctgctcatataccttgtctcgatggtccagcacctttcgcaagtcccgctgcagcacgtcactgatgaaggtctcgtagcgcagcactttctcccccgtggcctccaccgcccgccgcttagggggcgtcgccatgatgggctcctcaggccgccagcaataagaacggttggtaggaaccgcggcttccgggtggcgcgggtgaatgacgtccc

SEQ ID NO: 433500 - DNA, 1224 bp, Homo Sapiens
  misc_feature (1140)..(1176): n is a, c, g, or t
aggtttgatgtcacggtggatgatcttctggtagtgtaagtactcgatgcctttgatcagatcctggaagtagaaacgggcctggtcttcagagagtggtttgagggtgggcactttccatcacgggcccttggttgaccagttcgaacaccatgtacagatggtcctcattggggtcatccaggacctccaccagcttcaccacattggggtggtccagcttcttgaggatggcaatttcctggtacacctgcctcaatggggcccctgggctggatgcagcctccaggagctggccgggtgcctcggggtggagggcgacgtggaaagtcggctgccggatcagcttctttttggacagcaccttcattgcatagtaggtattgtcattttcattgtaggccaacttgacgacaccataggagccctttccaatttcatccttcagggtatactgattcagctgcacacagtcctgcatacccgtgatggagacgtggtgagactccactgtcggccgccggggcagccgaggcgaggactgcggggagctgacgggtgagtagggcagggacgggcagatgcagcgtccgttcatgtccaggctgccaccggctgccagcccaccctgggaccgctcttgcagagacagcttgcgaccggagaggtggggccgggcctgggacccggaggtgtcaagggggacctcttggccatcggcctccaggggccggtcccgcgccaagccgaggtccacagcacagcccggctcacactcggtgaccacaatgaaggactccatgcccaggtggatgctcaaggatgagaggccccgcagggcctcacagggcttctggctttcgctgctgctgctgcccctgccccccagctcatcctggggggcggcccggttgctgctgggctggctagagacacatgatgacatggtgcatgcgccagcttcatccagcacactggggcactcccatccggcagcggagccacctgggctccgcgccgccgccgcctcccgcgctctgcgcccccagctcggctcggctcggctcagcttgctctgcgcggccgcgcgctcctccccccgctctcgacgaattcgagctcggccgatttggcctgatnnnnnnnnnnnnnnnnnnnnnnnnnnnnnnnnnnnnncgccgccaccgcggtaactccagtcgccctatagtgagtcgtatcatc

SEQ ID NO: 433501 - DNA, 1312 bp, Homo Sapiens
  misc_feature (59)..(70): n is a, c, g, or t
  misc_feature (86)..(121): n is a, c, g, or t
  misc_feature (243)..(252): n is a, c, g, or t
  misc_feature (306)..(316): n is a, c, g, or t
  misc_feature (457)..(466): n is a, c, g, or t
  misc_feature (527)..(567): n is a, c, g, or t
  misc_feature (569)..(569): n is a, c, g, or t
  misc_feature (571)..(571): n is a, c, g, or t
cccccccgaccaccacctcttggggagatagtgagggcgccccccaaaataaaaccccnnnnnnnnnnnnttgtgtgttatatcgnnnnnnnnnnnnnnnnnnnnnnnnnnnnnnnnnnnnggggggaaaaataatttttccaaaaaaacaaacctccacggaagggaaaaatttttcaaagcagcgaaggaatatgtgagggggtgggtttttcccccccttttccccttaaaaaaatttgnnnnnnnnnncccccagagggggtggaaatttttgtggggggggggtgtggccccaaattattnnnnnnnnnnnaaaagaaaagggtgcttccccaaaaatgccccaccgtagcagtttttccccacccagaagggtgggaataaaaacgggccccggccctaggttttatttataggctccccataagggcgcccctctgttcaaaaaaaaaannnnnnnnnntaagacttgggcccccccagaggaaattttttaacggcccccccttttttctttctggcgnnnnnnnnnnnnnnnnnnnnnnnnnnnnnnnnnnnnnnnnngntnttttataacttaggtatttatttcattagagaatcaggtaaacctcacattacacggccaaggccaagataattttgcacagttagaatgtgttcaagaaaccagccacaatgtaaccggattagatttcaccaaggagatgactgtgttcctccaaataaacttcatttaggaagatgacattcctccaatatgtggaaagacaataaatgcactttcttctctccgccactgaggaagaaagtctccctcttgagggaccaacactatttcctttttgctgctcttttcccttctcctttctttggtttctcctttccacgaagcttctttagtcgtttttgctcatccataaaatcctgatgctcatctctgtagagtccaagaaatcggagcgtctgcatgagttcagcgtaagtgtggtgatttggataccaatcataagtctccttcttcttggccaagggcagttcactaaacagtttcaccactttcatagacttggaattagtaggcctggtgacttcaccaaatagccgggcactgagacgagacatgcggaaggcatattctgaaagggaggacatttcttgagtggcaaggagttagagttccgtatttttcttaaggtggttacaaaattaatctgcagcccaccacccaaagctacagtgccgaaggccgtgtgatgagcagagaaactgagccttctactgttaaccaatatggaagagagtaatt

SEQ ID NO: 433502 - DNA, 789 bp, Homo Sapiens
  misc_feature (23)..(23): n is a, c, g, or t
  misc_feature (82)..(82): n is a, c, g, or t
  misc_feature (88)..(115): n is a, c, g, or t
aaggcccagttcacttcccttangggggccggggggccaaaagaaaaggtttggaaaagtttttaaagggccaagcgcgccnaacagnnnnnnnnnnnnnnnnnnnnnnnnnnnnttgtcaaacaataacttaggtatttatttcatttagagaatcaggtaaacctcacattacacggccaaggccaagataattttgcacagttagaatgtgttcaagaaaccagccacaatgtaaccggattagatttcaccaaggagatgactgtgttcctccaaataaacttcatttaggaagatgacattcctccaatatgtggaaagacaataaatgcactttcttctctccgccactgaggaagaaagtctccctcttgagggaccaacactatttcctttttgctgctcttttcccttctcctttctttggtttctcctttccacgaagcttctttagtcgtttttgctcatccataaaatcctgatgctcatctctgtagagtccaagaaatcggagcgtctgcatgagttcagcgtaagtgtggtgatttggataccaatcataagtctccttcttcttggccaagggcagttcactaaacagtttcaccactttcatagacttggaattagtaggcctggtgacttcaccaaatagccgggcactgagacgagacatgcggaaggcatattctgaaagggaggacatttcttgagtggcaaggagttagagttcctagacctgaccttcctcacccacgcgccctcgtcccggaaggcccgcccccc

SEQ ID NO: 433503 - DNA, 1843 bp, Homo Sapiens
  misc_feature (1756)..(1792): n is a, c, g, or t
tcgtactagatgctatttattaaactgtagacaggagataaatactttatttcaaaagtgcaaagaagggaagacaaatcacatttctttttatcatgtaaacttgtaccaaagacttatgaatagatttatgaattggagtagaaaacatagacatttctaccttgaggatatagaagggaacttaggaagtgagaagtcagattaccctagtcctctagggtgcttaaagctaactagtcccgtgaatgagaatctaacctatgtgaaaatctccagcctgtacctgtacagcatcagccctgggacaacacagtcaggggcaggctgtagtcacatctcttagcctaagagtacacagctgtcagggaaagtcctgatggccacagtgaaaaaggtcatgggtggagagaagcaaagtaggaaggatcatttgaagcacaaacaaatggggaaactgaacagacaatctcagtatcaccacatctgcttcaaaaatagcacaccaactcccttccaaagtgcatcgttacactgcaccatcgtggaagaaatggaagagcaggatggatttggctggctggagtcacatcttggggaagctggccaggttggcaatgccacaggcgttgttcttatttcgagccatgaggatatatcctttgtttccccagttttctccccagctgtttttaattatccagtgcttgtttcccttctggattccatatcccactgccaaaaccgcatggttcagattatcgctattgcagctttcatcataatacacacctttgctgtaaaactggaaggaggtcaggcttgcatcaatggccacagagacaggtcccactcgggccactgccctcttcagggctttctcattcccctcggggatctctctgtaccctctgcatttagctgccttgcctgttgggttgtacatacaactctcttcctgtcccacatatgggtaggcatcttcagagtcaataccccggttcttctgcacatattggaaggcattggtcatgtagccccctccacagccatcattctcagacacacaatccactaggttctggggactcagatttaagagtttgccagttttcttcttgagttggccctccagggcacccacagagctaaaagcccaacaggaaccacactgaccctgatttttgacaggagtaacatatcctttctttcgatagtcgacagagtctggggctctaccttcccattctgggatataaagggtgtcattactgcgggaatgagacaggggtactttgagtccagtcatcttctgaaccacctcttcactggtcatgtcccccaggtggttcatagccagttcatatgtatggacaccaagagaagcctcaaggttatggatggaaatatacttcaggtttttttcccaaattaaacgccgagagatttcatccaccttgttgttatattgcttcctgtgggtcttcttccatagctcccagtgggtgtccagtatctcctcagggtacagagcaaagctcaccacaggtagcagcagaaccttgagcccccacatcctgctgatggaaatctgttgtctggcttcgtttcggcagcaaagtgtgggcacaccatcaggggtgctagatttattccatcgggattgcggaagtcagctccagtgatcggctggaaaatttgggtaagaggatgagccgctctcgacgaattcgagctcggccgatttggcctgatnnnnnnnnnnnnnnnnnnnnnnnnnnnnnnnnnnnnncgccgccaccgcgtagagctccggttcgccctatagtgatctatcatttcc

SEQ ID NO: 433504 - DNA, 1386 bp, Homo Sapiens
aaaaatcgaggcggggccgagaggctgcggcggctgactaggttttcggaccgcggcgcggcggggaagagagactgcggcgggagggccaggccgtgggagagacgcgggaaagtgcgggtcgcagaggcacttgaccaccccgccctaggccgacccggcggacgcggcgtctggtgtgcgggcgctggggcgggtcccaggtctccccgctgcgctgcttgaggctcggccatggcccagcagagagccctgccccagagcaaggagacgctgctgcagtcctacaacaagcggctgaaggacgacattaagtccatcatggacaacttcaccgagatcatcaagaccgccaagattgaggacgagacgcaggtgtcacgggccactcagggtgaacaggacaattacgagatgcatgtgcgagccgccaacatcgtccgagccggcgagtccctgatgaagctggtgtccgacctcaagcagttcctgatcctcaatgacttcccctccgtgaacgaggccattgaccagcgcaaccagcagctgcgcacactgcaggaggagtgcgaccggaagctcatcacgctgcgagacgagatctccattgacctctacgagctggaggaggagtattactcgtccagctcaagcctttgcgaagctaatgacctgcctctgtgcgaagcttacgggaggctggacctcgacacagactctgctgatggcctctcggccctctgctggcgtccccggagcccagtgctggcccctacaggtggcagcccctgcccactcccatgctgttggccctggcccccattgagcacgcctgagcctccggggccacggcttcgttctcaggaacaaaacctgaggcagccctttggatgccctcacagccttgcttctctcagcctaggttcccatttggggacttcaggaccccagagccactaggacttccttgggaagcccgttagcccagggtgggtcccgcaaggacagtagggaaacagttgtttccctagccatttccgaatagcccatcattccgagtcatcatctctgtttgctgccttcctggccagccaggtggaagaaagtttccaagctaggtctggcccgttggggatctcagcagtggggcaggagggtgcctgatttcggggagtcctgacccgagcctgttgtcagagttgggaggggctctgagcagtgttgggcaggccgggtctcccatcccgaggccagcgttcctgtgcagagccccatccactggttcttgccctgagccacatatgtctgtgccatgggctgagtgccacgacaggcccgtgtgacagctactgcccacgcatgtggaaactaggtggactcatccta

SEQ ID NO: 433505 - DNA, 1464 bp, Homo Sapiens
gagcgaggcctgggtggcgaattcggcacgagggagactgcggcgggagggccaggccgtgggagagacgcgggaaagtgcgggtcgcagaggcacttgaccaccccgccctaggccgacccggcggacgcggcgtctggtgtgcgggcgctggggcgggtcccaggtctccccgctgcgctgcttgaggctcggccatggcccagcagagagccctgccccagagcaaggagacgctgctgcagtcctacaacaagcggctgaaggacgacattaagtccatcatggacaacttcaccgagatcatcaagaccgccaagattgaggacgagacgcaggtgtcacgggccactcagggtgaacaggacaattacgagatgcatgtgcgagccgccaacatcgtccgagccggcgagtccctgatgaagctggtgtccgacctcaagcagttcctgatcctcaatgacttcccctccgtgaacgaggccattgaccagcgcaaccagcagctgcgcacactgcaggaggagtgcgaccggaagctcatcacgctgcgagacgagatctccattgacctctacgagctggaggaggagtattactcgtccaggtataaatagcgctggactccccatgcagagcgggagcctgcctacctgggcctggccagcaggcagggctgccttctgctttttcaaattcttgctggtcttagcagtggagccatgcctgggtttcagagcagagctcctggccagagcgtttgaccgacagacaattcacatccatatgccagggccctgggcctttcccacagtgcaatgtgatgaaaaccacaggactcacgccagtcggataggccgagtctggagaagggaggcgcctggctgtatcccccgcaggccctcttccgagagccttcctcctcgggcagtgcgttctggggctgtgctgctcctgttaccttctgaatccatatgtagagatttcagccaaggctgggccagccttttttgggcagtcaggtccacacctatgtccagggcaccagggatgcaattccatgtggatgtcaccaaaccccagtgtggaggcagggacagtcatgggaatgtgggggatgaagcccaggcagggaatggccttgaaagccattggagctccaattcgtgacccactcagccttatccacggagctggagccaacctacgtgccaggccccgtgctgggtcccagggatgcagaagggtcaaagcccatcatcctgacccttgtggggctccgtaagaagctgaaaccttcgaccgtttgagctggagggggccctgagaacaccagaggtctacgtattcattttacttagggggaaaccttatgcttggagaaccgggcatggccttccactctgccgccaatagcttcgaaaaccaggattccgtcccagccgatgcgaagtccatgtc

SEQ ID NO: 433506 - DNA, 1359 bp, Homo Sapiens
  misc_feature (1307)..(1307): n is a, c, g, or t
ttttttttgcaaaaaagtggcggtgttttaatcaagtctcattacaacggcagaattaggaatgagtcccacctagcttccacatgcgtgggcagcagctgtcacacgggcctgtcgtggcactcagcccatggcacagacatatgtggctcagggcaagaaccagtggatggggctctgcacaggaacgctggcctcgggatgggagacccggcctgcccaacactgctcagagcccctcccaactctgacaacaggctcgggtcaggactccccgaaatcaggcaccctcctgccccactgctgagatccccaacgggccagacctagcttggaaactttcttccacctggctggccaggaaggcagcaaacagagatgatgactcggaatgatgggctattcggaaatggctagggaaacaactgtttccctactgtcctggcgggacccaccctgggctaacgggcttcccaaggaagtcctagtggctctggggtcctgaagtccccaaatgggaacctaggctgagagaagcaaggctgtgagggcatccaaagggctgcctcaggttttgttcctgagaacgaagcgtggccccggaggctcaggcgtgctcagtggggccagggccaccagcatgggagtgggcaggggctgccacctgtagggggccagcactgggctccggggacgccagcagaggggccgagaggccatcagcagagtctgtgtcgaggtccagcctcccgtaagcttcgcacagaggcaggtcattagcttcgcaaaggcttgagcttttccaccaccagaaaccccagggagagacaggagcaggcagagaggaaagccaggggaggggagagcaagacagaagcagagttaagaaaacacgaccacaccccagacctgcctttccctttctccactcctgctccatctgtcccctgagttggcaggcctggcaaggagaggcggccagtggtgagagccaccctagcattctgaaaggaggaagccgccctggcccaaccaccaacagctgtgtgacctcagcaggcccttcctgcccagcctccacgtgggcctgtcctagcctatgcctcccagctggtgctggtccccctcctcttgcaaaaagctgtcagcctggccaccctccctcctccctgactgcagaaaccccagtgtcactacactgcaaagagctctctgagggcagactgtgttctttctgggtctgtccctgcctgagacttagcctgaagggggcgacagttgggaacacaggccctggcacttcccgnatagccctacagtcagccagagcggcctccagcaggcgtccccaccgtgtac

SEQ ID NO: 433507 - DNA, 630 bp, Homo Sapiens
aggaaaaccgcgtgacaacaagatggcggcgctgcgggacggctagcggccctgcgtggaggcgaggaatccgcatctatggagatgtccctgcatcccatgactcggagctgatggccttcatgacgaggaagttgtgggacctggagcagcaggtgaaggcccagactgatgagatactgtccaaggatcagaagatagcggccctagaggacctggtgcagaccctccggccacacccagccgaggcaaccctgcagcggcaggaggaactggagacgatgtgtgtgcagctgcagcggcaggtcagggagatggaggggactcattggcgccccctgaggtggactttgacaggctgctggccagcctgcaggatcttagtgagctggtggtagagggtgacacccaagtgacaccagtgcccggcggggcacggctgcgtaccctcgagcccatcccgctgaagctctaccggaatggcatcatgatgttcgacgggcccttccagcccttctacgatccctccacacagcgctgcctccgagacatattggatggcttctttccctcagagctccagcgactgtaccccaatggggtccccctttaggtgataagctgctcctc

SEQ ID NO: 433508 - DNA, 920 bp, Homo Sapiens
gcattccggtagagcttcagccggatgggcctcgagggtacgcagccgtgtcctcgccgggccactggttgtcaccttgggtgtcaccctctaccaccagctcactaagattcctgcaggctggccagcagcctgtcaaagtccacctcagggggcgccaatgagtcccctggcttccagaacttcttggctgtcatccagtccctctcgccatgctctgagactgtcttgctctctgagtcctcctggtccatgggctcgcccacccactgcaggccatagtcactgaggaaccgctccatctccctgacctgccgctgcagctgcacacacatcgtctccagttcctcctgccgctgcagggttgcctcggctgggtgtggccggagggtctgcaccaggtcctctagggccgctatcttctgatccttggacagtatctcatcagtctgggccttcacctgctgctccaggtcccacaacttcctcgtcatgaaggccatcagctccgagtcatgggatgcagggacttgccgactcacaggggcacctatgccgccatagcaggaagggactgagatcttttcttctgagccacacccatcactcaacatgtccacctcatcttcatctccatagatgcggattcctcgcctcccaggattcataggctccgagggcaggggcacttttcgggtcttgctaagggaggccaaaggtgagctcatagttctacttctagaatccagctgtcaggaactcccttttgcctcttccactgtctccacagaggtttctggaagtttctgttatctgcctgctcctctgggtatacggctttctgctctgaactgagagacctttggcctggtggtgcttgggaaagtacacgcagggccgctagccgtcccgcagcgccg

SEQ ID NO: 433509 - DNA, 840 bp, Homo Sapiens
gggccccatggagtcccctgctttccagaacttctgggctgtcatccagtccctctcgccatgctctgagactgtcttgctctctgagtcctcctggtccatgggcttcgcccacccgctgcaggccatagtcactgaggaaccgctccatctccctgacctgccgctgcagctgcacacacatcgtctccagttcctcctgccgctgcagggttgcctcggctgggtgtgcacggagggtctgcaccaggtcctctagggccgctatcttctgatccttggacagtatctcatcagtctgggccttcacctgctgctccaggtcccacaacttcctcgtcatgaaggccatcagctccgagtcatgggatgcagggacttgccgactcacaggggcacctatgccgccatagcaggaagggacgtgagatcttttcttctgagccacacccatcactcaacatgtccacctcatcttctgcagacagggatgcctaggtcaccgctcatctccatagatgcggattcctcgcctcccaggattcataggctccgagggcaggggcacttttcgggtcttgctaagggaggccaaaggtgagctcatagttctacttctagaatccagctgtcaggaactcccttttgcctcttccactgtctccacagaggtttctggaagtttctgttatctgcctgctcctctgggtatacggctttctgactctgaactgagagaccatttggcctgctggtgcttgggaaagtacacgcagggccgctagccgtcccgcagcgccgccatcttgttatcccaaacttccgggccagtaccagccc

SEQ ID NO: 433510 - DNA, 2355 bp, Homo Sapiens
  misc_feature (59)..(59): n is a, c, g, or t
  misc_feature (117)..(143): n is a, c, g, or t
  misc_feature (395)..(395): n is a, c, g, or t
  misc_feature (674)..(691): n is a, c, g, or t
  misc_feature (875)..(947): n is a, c, g, or t
gtcagagatgggaaagaatgtgatggtgtgtcgaaacgagttgagcgaggaggacgtgnggattacgggttggggagggggtttaatcagatagtggtatggtagagacgccgcgtnnnnnnnnnnnnnnnnnnnnnnnnnnnaggtgtataaaagtcgggatatggggctgtggaaatgatcgcgcgcgcggataagcgggggaatggggattagcggagatcgagtttgttgggagaatcattacggcgtgcgctatggggtgcggatatggaataggaaatagagtcggagaatacatacaggagaggatttcttaaggtagagtgtggatattctggtagaggcgcgaaggtgtagcgaagtatatgggaggagtatgtacgggaaggaanagcgggtaagtgaataaagaagcgagaggaaacgcgaataggttaagggggaggagagggagcggataatatagagtagaataaagggggttagcgctaggatagagtgtaacgaagggcggtcgaatgtgaatgcgggggcgttttattttttaagaacggagaggtcgagagattgagaaggaaatgctgggcgggtggatgtggtgagggaaaagggggggatgtaggggagggaaaataagtgcggatggaaaagttgatggagagaacggaaannnnnnnnnnnnnnnnnnttagtaagggtggggaaaggtaaaggggtgagtgagggtcggagaaaggttcgtggggtggttgtgaggctcggggtgggattttttggtaatggtgtgaatgggagggtgagaggcgggtaatgatgagtgggttggaggggaaatgggggcgcttgtcgtgggtgggtaaaagaactcaccnnnnnnnnnnnnnnnnnnnnnnnnnnnnnnnnnnnnnnnnnnnnnnnnnnnnnnnnnnnnnnnnnnnnnnnnncggtggtgtgggtcgggtagagggacgagggccggggccgggactggggctgggaccgggaccgggacagggaccaggactgaatttcaggctggacttcggggctcggcgtgcccgcagcagcagtgctcgctttgggcacaaggcctgcagcctgcagcgtgagtgtatcgtcctggtagagggtgggcgggaatgtgctgaagatctcaaaggcagaggcatccatgaccctggcctgcgctagcagagctcgcacgtccccaatggtgttgtcaggctgcatcatcagtaggaaggcctgttccccattctcagacttgatgcgcagcatggagagcgggggtgccggcgtgttgggtgactcctggctcctctctcgctcagcggccaaggtgggcgtctccaccacaatctcctggatccgggcaggcaatgggcagcagttctgcaaggtgtccctgatggggccccggatgtcaatcacctcgccttgccggatcacaaacttggggagcctgttcagaaatttctcagcagtcatcctggagcctggtgctcctccagccctgtccagggccttgttgcatccgctgcctgccccaccacacggccctcgcctgggaaggggtccagtccatcctccaggtagacctgattgcgcaagtcactcaccttaaaggggaccccattggggtacagtcgctggagctctgagggaaagaagccatccaatatgtctcggaggcagcgctgtgtggagggatcgtagaagggctggaagggcccgtcgaacatcatgatgccattccggtagagcttcagcgggatgggctcgagggtacgcagccgtgccccgccgggcactggtgtcacttgggtgtcaccctctaccaccagctcactaagatcctgcaggctggccagcagcctgtcaaagtccacctcagggggcgccaatgagtccctggcttccagaacttcttggctgtcatccagtccctctcgccatgctctgagactgtcttgctctctgagtcctcctggtccatgggctcgcccacccactgcaggccatagtcactgaggaaccgctccatctccctgaccctgccgctgcagctgcacacacatcgtctccagttcctcctgccgctgcagggttgcctcggctgggtgtggccggagggtctgcaccaggtcctctagggccgctatcttctgatccttggacagtatctcatcagtctgggccttcacctgctgctccaggtcccacaacttcctcgtcatgaaggccatcagctccgagtcatgggatgcagggacacgcaggccgctagccgtcccgcagcgccgccatcttgttgtcacgcgtttcctaggcgaccaggacccgtgcacttct

SEQ ID NO: 433511 - DNA, 925 bp, Homo Sapiens
cacaggttagagataagtgcaatcagataaacaagtcagtccatggatatgcagacgcaacccaaactctctgaggaattaaaaacaactctcctggtctggcaaatgtttacacaaataggacgtgcctctaaaagcaattcaaagcccacttattctaactaaccccaaatctcacctattcatctcaggatgccagcaaatgctgttcaacatcaggacattgaaatcagtactgtcctgcacttaagaaggaaaagccgaaataataattaccctaggcctctagtaggcaaataagccccccaaactctgtttttttgtgaaaatttacattacttctctatgcctttgagatacacattccctaactagtattacctgagaaactatcccttttcaaatgcttttaactggtgactagaaggaagaagcctatagttaaatatcccagaaatttatttgatgtttgcttgaatacattttatatagaaagattgggattgtttgccttggatgcccctggccaatctcgtgaggcattgaactagaaacggggtgcccatctggagacatcagcgatggaaatcacacgcccgattttagcactattctttaagatttcgtctctagtgaaatgaggccactcccttaaaaatgctcaaagtgttggagctactgtgtgacaacagctgacatttaggagggcatttcatgttctgatctgttagaacatttaaatacttagaaataaaaaatattcagctttgaagttttcaatactggaaaactttcaagtctaggatttacagccacttcggcattttctctttcaagcctctccatctgcctcgcaagttcagtctcatctgtatctgtgaccactttgggctccatttgaacattgaacacacccctcttttcc

SEQ ID NO: 433512 - DNA, 1859 bp, Homo Sapiens
catactttaccaccctgaattataaactcaaggcaagtagcttattattccaataaggacgtggtgtgataaattctctcacacaggttgtcatcaatctcaaatagataaaaggcacagacccgatctaattctttcaatgcattttaaggctttgtcccgctaagggtcaactgttcactgtggttaaagttaaatttattttctctaaaactcttcttttgaaaggatctgttatagagatccttgtattcacctgctcctacagttccacatcaagactaaaataaagataaaagaattatggtcttagtattaaaatgcttttaactggtgacaagaaggaagaagcctatagttaaatatcccagaaatttatttgatgtttgcttgaatacattttatatagaaagattgggattgtttgccttggatgcccctggcaaatctcgtgaggcattgaactagaaaggggtgccaatctggagacatcagaaatggaaatcacaagcccaattttagaactattcttaaagatttgtctctagtgaaatgaggccactcccttaaaaatgctcaaagtgttggagctactgtgtgacaacagctgacatttaggagggcatttcatgttctgatctgttagaacatttaaatacttagaaataaaaaatattcagctttgaagttttcaatactggaaaactttcaagtctaggatttacagccaggaagcgctgctctgtgttccttaaattggactctgtttcccacaaagttaatcttcagctttggcttccatttcttctgcatcatcatctccatccacttcggcattttctctttcaagcctctccatctgcctcgcaagttcagtctcatctgtatctgtgaccactttgggctccatttgaacattgaacacacccctcttttcctcaatcttctctttgataacagccatagcttgactgaggacagaaaggccttctgttctctccagggttgtcgtagtcattacataccgaggaggagctattagattaatcttaatgggcatgttttctgtagaacaattcaaacctgctcttagggcttcttttacagcatcaatgccttcataaccataacaagccacttcaatatctgctcgaattttgacagcctgtggggtcaagcgcctattaatattattaatgagtacttcccgttcatcttcattcaaatctaaactatccaaaatagatgggtctgagactgcatgcttaaatgcatcataggcaccatatccaggtctcttgtacttgtcatcaaagacccaggcagtcctctggaataggctttccagctgctcatccttggtgtattctaacacctcagcaacatgacgaagaatgctataaacagttttggattttgtgaatttgtcttcacatttgattgcttcctctggagaaactcttctttttgacaaatcaatatatcctttttctttgtccaccctaatgacaaccacacactcattcctgccaattcggatgagtttgttgatagaacggatacgccttctggataattcactaagaagaatcatgccttcaatgttgttgtattccagcaagctgacataagcccccatttcagcaatggatctgacattcaccatcactacatcttccacctcaggaaatttgtgttgataaaatctacaacttagacccggcattctgaggtatgtgtgtgattcccgcactggagcccagagccgacttcttcaatcacagagaccagacttgcttccccctcaccggccgccgatcctcctcagcgtgcgcttcgctcactccaccgcgcccgct

SEQ ID NO: 433513 - DNA, 460 bp, Homo Sapiens
ggaatgagtgtgtggttgtcattagggtggacaaagaaaaaggatatattgatttgtcaaaaagaagagtttctccagaggaagcaatcaaatgtgaagacaaattcacaaaatccgaaactgtttatagcattcttcgtcatgttgctgaggtgttagaatacaccaaggatgagcagctagaaagcctattccagaggaccgcctgggtctttgatgacaagtacaagagacctggatatggtgcctatgatgcatttaagcatgcagtctcagacccatctattttggatagtttagatttgaatgaagatgaacgggaagtactcattaataatattaataggcccttgaccccacaggctgtcacaattcgagcagaacgcgcctaatacgcagacgcgcctatacgcagacgcgcctataccagacgcgcctataccgacgcgccttatgtccg

SEQ ID NO: 433514 - DNA, 600 bp, Homo Sapiens
  misc_feature (21)..(21): n is a, c, g, or t
  misc_feature (40)..(40): n is a, c, g, or t
  misc_feature (45)..(45): n is a, c, g, or t
  misc_feature (551)..(552): n is a, c, g, or t
cattttctctttcaaagcctntccatctgcctcgcaagtncaggnctcatctggaatctgtgaccactttggggctccattggacattgaacacacccctcttttcctcaatcttctctttgataacagccatagcttggactgaggacagaaagggccttctgttctctccagggttgtcgtagtcattacataccgaggaggagctattagattaatctaaaagagaaagacaaaaattcatttatgaatgtacctacagaacccacaactattaggatgcttgagattttattaatctgctgtattaacaaatcaacaccagggatctaatgccaatagtattaaacagttcactgcgatactgaatagaaagaattatcatttccgtgtatctttggtggctaaactaactgcaattatcatcagtataatggataatttgtctctgaactaaactgatggaagaatccttctgagttacagccatccagttaattttatcactaatgaaagattctgatcaaacctcataaaacttgtatgtgtanncgatagaagaaagtgttactcttttttaaagtgctctcagtattttgg

SEQ ID NO: 433515 - DNA, 854 bp, Homo Sapiens
ggcgctgtgcccggggcgctccgggaggagggaccaggatccggcgccggggcgcagatactgacaccaagggaatccgggtgccccccccgccgaagccatgcgggccccctatggtaaactggctccagcgcagctcggttgccccgttggtccacggccccatatcctggaccaggctggagattctgacggacgattcaggagatcgggcttcgtcactgagaccgtcaggcctcttgcgcagtccattcccacgtcgccatacccctagtcatcctcggcaggtctcagtcccggttccatctgtgccctcgctcccagccgcagctatgttgcacaccgagggccacagctcttcttcgggcggtgggtcagggtaagctacgcttggccctgtttgcttctggagtgaggctgcctacgtgaatgagtggtgatgccgcagggggagactgccgctaatggacagcctgttcgggcccgctacgacgatccccagaacaaggcacgcctggtacggcttatcttcctggtagcatagggctgcggaccccaaatatcgcagaccggacttacgggcgcactggcgctcattgccactgctttgcagccgggtagatgggggtgcagcccgacggggtgtagcatcgcttgcttccttatcacacaccagacgcaaagacacccctgtctaggtcccagagattccaccgctggggacgacctcagagagtcttggttccacagggcccattggaaccccgactggaggtgaccagctgaatgatcgcttttggcgcacaagcattggccttgatgacgtgcctattgcaacgggacacacaaggggg

SEQ ID NO: 433516 - DNA, 730 bp, Homo Sapiens
gctctgctgttctctcccagttcattccttcagtcagatataatgcaaaccccgaaaggatcaagtgaaaaccagctgattgcaggccagccctttggaagcacagccaggaagaccatccccaaggagcaggtttcgtctgcccaagacctggacaccgtctggtctctgggggtgagattgatgcttggccacactcttgtcttgagggaaggggtgaatgggccacagttctgagaccttcagtgacttgtcttatctttagaaggtggagggttgtggtctcgggacttcaggggcttttccagtcctttaagcttagggtataatccccaaagtgtcagaaccatgttcctgcatggggcttccatagtcctgggagataggctgcaggtcacccacagccagggcaggttcccgaggtccgtgggccagcccagcaggaggaaggccaagtcggggcaggagctgaccgtggatctggatgacttgatttgttcagatgtctaggcttcctccagtgtcccgttcctagaggtcaggcccctgttggagtgctgggccagcacatggcatctccctttctctaatgcaaatcgcaccactgtcccgcaggctgaaagcctcggtgcactcaggacaagagtccacgcttcttaaacaaacggtcgacgttgtccgcgacctggcccggcccaacgggtcagaccgtcattggccatctcacagt

SEQ ID NO: 433517 - DNA, 1933 bp, Homo Sapiens
  misc_feature (726)..(726): n is a, c, g, or t
ccggaattcccgggatcggaggctcggccacaacgccactggattggtggtagggcggggcggggcggagtctccagcctgaagcggaagtggaggaaagatggaggaccatcagcacgtgcccatcgacatccagaccagcaagctgctcgattggctggtggacagaaggcactgcagcctgaaatggcagagtctggtgctgacgatccgcgagaagatcaatgctgccatccaggacatgccagagagcgaagagatcgcccagctgctgtctgggtcctacattcactactttcactgcctaagaatcctggaccttctcaaaggcacagaggcctccacgaagaatatttttggccgatactcttcacagcggatgaaggattggcaggagattatagctctgtatgagaaggacaacacctacttaggtaaagtggcccggcctgggagccctggtatccatggggaagcccactctcagagttctgagataccaggcttataggaggcacagtctgtgagtgggaagagactggagtgtagatgttgcccatttgtaggtggtaaaatcaattgtttttgatggaattgattttccctgagtggagtgctgggggaaggaggaggtccaggccggtagtggccattcgccgtgcctcagcgagcaggtgtgtgtgggtcctccaccactcacctcttggttagcgggagtgtgctgcncccacccccacccccgcacccccattctacacaaggcagaagaggcacgggttttcctgggagcgaatatcaagtgcctgagagcaactacaggactaactgtgtttgggttgggtgtagtataaataataataatggctaatatttcctgagcatctactaaatgcaaggaattgtgcttggtgtgtcatgtggattctctcttgcatcttcatgataaatgttattgtcgctgttttaccgatgagggttggattagaggggttaaacaacttgtcttaggctccacagctgggaacaagtggggctgggaagctgacttcgtgctcttcaccaccacaaaggatgtgtgtgcatcctggggcatgcctgcctcatgtgggggtgtcctgggctgaatttcctgggcacttctcagtggaactctctagcctcctggttcggaatgtcaactatgagatcccctcactgaagaagcagattgccaagtgccagcagctgcagcaagaatacagccgcaaggaggaggagtgccaggcaggggctgccgagatgcgggagcagttctaccactcctgcaagcagtatggcatcacgggcgaaaatgtccgaggagaactgctggccctggtgaaggacctgccgagtcagctggctgagattggggcagcggctcagcagtccctgggggaagccattgacgtgtaccaggcgtctgtggggtttgtgtgtgagaggtagagaggcctcagcttctcctggtgggggtgctttgcctgtgttccccagctcatgacccttctccagttgtcttgttcccatataacatttgaactctttacacacctgaacctgtgggggccttgcccatttgaccatgtggcccaggccaaagcccagtgttggccttacgcatggtcggcaggagagtcagttgtgtgctctgtttgagccccacagagcaggtgttgccattgcttgcggttcgtgcagaagcggggaaactcaacggtgtacgagtggaggacagggacagagccctctgtggtggaacgaccccacctcgaggagcttcctgagcaggtggcagaagatgcgattgactggggcgactttggggtagaggcagtgtctgaggggactgactctggcatctctgccgaggcgctggaatcgactgggcatcttcccggaatcagattcaaag

SEQ ID NO: 433518 - DNA, 922 bp, Homo Sapiens
  misc_feature (830)..(831): n is a, c, g, or t
  misc_feature (833)..(836): n is a, c, g, or t
  misc_feature (847)..(847): n is a, c, g, or t
  misc_feature (849)..(849): n is a, c, g, or t
  misc_feature (854)..(854): n is a, c, g, or t
  misc_feature (860)..(860): n is a, c, g, or t
  misc_feature (862)..(862): n is a, c, g, or t
  misc_feature (890)..(890): n is a, c, g, or t
  misc_feature (893)..(893): n is a, c, g, or t
  misc_feature (900)..(900): n is a, c, g, or t
  misc_feature (910)..(910): n is a, c, g, or t
gaggtgtggggacaggagctgggtgtgctggggactggccgcggacccctaacctgtgtctccggtctccctccgggagcggctcaacccagcccatcgttctggtcccgttctggccctgcagggtggtggttgggacgttgaaatgagcgcgcgagttgtacgtcctctctccgcgctcacgcccccctcctcaccgtgttttccgccaggaccatcagcacgtgcccatcgacatccagaccagcaagctgctcgattggctggtggacagaaggcactgcagcctgaaatggcagagtctggtgctgacgatccgcgagaagatcaatgctgccatccaggacatgccagagagcgaagagatcgcccagctgctgtctgggtcctacattcactactttcactgcctaagaatcctggaccttctcaaaggcacagaggcctccacgaagaatatttttggccgatactcttcacagcggatgaaggattggcaggagattatagctctgtatgagaaggacaacacctacttaggtaaagtggcccggcctgggagccctggtatccatggggaagcccactctcagagttctgagataccaggcttataggaggcacagtctgtgagtgggaagagactggagtgtagatgttgcccatttgtaggtggtaaaatcaattgtttttgatggaattgattttccctgagtggagtgctgggggaaggaggaggttcaggccggtagtggccattcgccgtgcctcagcgagcaggtgtgtgtgggtcctccaccactcacctcttggttagcgggagtgtgctnntnnnnccccacccccncnccccngggggnanagggagaagagggacgggttttctgggnggnatataantgctgagagnaataaaggataa

SEQ ID NO: 433519 - DNA, 1938 bp, Homo Sapiens
tttttgaagcaagagttttttcctcttttattaagtccgctatactaactagaaggagaatctgtggttttcgcctgatagaccacagggccaatcaccacagcttcttgtagagaacatggagagtgccaagatcaccatcaggtgccgcttccttcctgtggctttccatcttccagtcagcctggtcttttgccttgaagggccccaaaacaacagccctggctatcatcttcatcccaaaagcggagaagatgggcaggcaagaacacggagggtgtcacagagaggttcccatcaggttcacagggcgcccgctgtacctcttggagatgtcagcttcaatcagcttctgcagctccttggtcttctccagtagcaggtccagcttaggctccagagccgcctgctcctcaagtgcctcctgctgcttctgcaccatcagctctttcttcaaagccagcagctgggactgcttcagcttttgctggaggaattcagtcactcggtccacataccttggtgaggccaggatcataaacaggtgttgcagctgaagactggtaagcttgccaatcagatcctccagcactgacaccatggtaaccatcttctctttggtctggccctgcaggatggctggagccagctggaactggctcacagacaggacatctgcctcctcactcaactccactgctctctgggctaagaagatctcaagctccatgagctcatcaaggaactgattccgggtctcagtgtattcaagcagtgtcagggcatctgggcccctggcaacaccttctggagcctgggttcctgcttccagcactgtgatctgcaaagcaacagcatcgtctccccagtctatcccatcacctccaggatcctttgaatctgattccgggaagatgccccagtcgattccagcagcctcggcagagatgccagagtcagtcccctcagacactgcctctaccccaaagtcgccccagtcaatcgcatcttctgccacctgctcaggaagctcctcgaggtggggtcgttccaccacagagggctctgtccctgtcctccactcgtacaccgttgagtttccccgcttctgcacgaaccgcagcattggcaacacctgctctgtggggctctcacacacaaaccccacagacgcctggtacacgtcaatggcttcccccagggactgctgagccgctgccccaatctcagccagctgactcggcaggtccttcaccagggccagcagttctcctcggacattttcgcccgtgatgccatactgcttgcaggagtggtagaactgctcccgcatctcggcagcccctgcctggcactcctcctccttgcggctgtattcttgctgcagctgctggcacttggcaatctgcttcttcagtgaggggatctcatagttgacattccgaaccaggaggctagagagttccactaagtaggtgttgtccttctcatacagagctataatctcctgccaatccttcatccgctgtgaagagtatcggccaaaaatattcttcgtggaggcctctgtgcctttgagaaggtccaggattcttaggcagtgaaagtagtgaatgtaggacccagacagcagctgggcgatctcttcgctctctggcatgtcctggatggcagcattgatcttctcgcggatcgtcagcaccagactctgccatttcaggctgcagtgccttctgtccaccagccaatcgagcagcttgctggtctggatgtcgatgggcacgtgctgatggtcctccatctttcctccacttccgcttcaggctggagactgtggcccgccccgccctaccaccaatccagtggcgttgtggccgagcctccgtttagacacaaacgggcatccttcggccatcccgagaattccggaccggtcca

SEQ ID NO: 433520 - DNA, 871 bp, Homo Sapiens
  misc_feature (173)..(197): n is a, c, g, or t
ccctggccaatttaggtagaatgcctccagggaaaatatttagcccattatttattatttatacctaccaaccccaaaccccaaacacagtttagtccctgtagttgcttctcagggcacttgatattcgctccccaggaaaaccccgtgcctcttctgccttgtgtagaatnnnnnnnnnnnnnnnnnnnnnnnnncagcacactcccgcttaaccaagaggtgagtggtggaggacccacacacacctgctcgctgaggcacggcgaatggccactaccggcctggacctcctccttcccccagcactccactcagggaaaatcaattccatcaaaaacaattgattttaccacctacaaatgggcaacatctacactccagtctcttcccactcacagactgtgcctcctataagcctggtatctcagaactctgagagtgggcttccccatggataccagggctcccaggccgggccactttacctaagtaggtgttgtccttctcatacagagctataatctcctgccaatccttcatccgctgtgaagagtatcggccaaaaatattcttcgtggaggcctctgtgcctttgagaaggtccaggattcttaggcagtgaaagtagtgaatgtctcagcaaagaggggactccagtgacagcccctaagcactcacaggacccagacagcagctgggcgatctcttcgctctctggcatgtcctggatggcagcattgatcttctcgcggatcgtcagcaccagactctgccatttcaggctgcagtgccttctgtccaccagccaatcgagcagcttgctggtctggatgtcgatgggcacgtgctgatggtcctccatctttcc

SEQ ID NO: 433521 - DNA, 697 bp, Homo Sapiens
aacgataggctaggtacgaggctgggtgttgaatcggcacgagggaaagatggaggacctatcagcacgtgcccatcgacatccagaccagcaagctgctcgattggctggtggacagaaggcactgcagcctgaaatggcagagtctggtgctgacgatccgcgagaagatcaatgctgccatccaggacatgccagagagcgaagagatcgcccagctgctgtctgggtcctacattcactactttcactgcctaagaatcctggaccttctcaaaggcacagaggcctccacgaagaatatttttggccgatactcttcacagcggatgaaggattggcaggagattatagctctgtatgagaaggacaacacctacttagtggaactctctagcctcctggttcggaatgtcaactatgagatcccctcactgaagaagcagattgccaagtgccagcagctgcagcaagaatacagccgcaaggaggaggagtgccaggcaggggctgccgagatgcgggagcagttctaccactcctgcaagcagtatggcatcacgggcgaaaatgtccgaggagaactgctggccctggtgaaggacctgccgagtcagctggctgagattggggcagcggctcagcagtccctggggggaagccattgaccgtgttcccggcgtctgggggggtgggg

SEQ ID NO: 433522 - DNA, 546 bp, Homo Sapiens
tcaagccatgcacaagtaggtttcctgccagcatcccctccccactcctcttcctatgaccatcatccctctaattcccttctgtctctccacaacggctcgcctaagtccagtgcctcccaagcaggggctgcagcggggcagggagcccccgcccctgcccctgcctcccaagagccccttcccatagctggaccaggtgggacagggattttgggaggaggatggggcctgtgttggtgagggctggttgggagagagggacacagaggggatgcctgtctcacctgcccctgtcgctgtgtccctggttccggccccagcgacagcacctgctccacggccacttggctccattcagagaccaaacagcttcctcttccgttcctcctctcagagtggctcaggcccttcctcaccagactctgtcctgagacctcggcggtacccccaggttccagatgagaaggacttaatgactcagctgcgccaggtccttgagtcccggctgcagcggcccctgcctgatgacctggccgaggctcc

SEQ ID NO: 433523 - DNA, 434 bp, Homo Sapiens
  misc_feature (87)..(87): n is a, c, g, or t
  misc_feature (315)..(351): n is a, c, g, or t
  misc_feature (414)..(414): n is a, c, g, or t
  misc_feature (422)..(422): n is a, c, g, or t
cggtccggaattcccgggatccaaaatcggccctccctcacccctttcccttcctctctatttataaggtccctgctccacccgacncccacctgcggtgccttcagccccaaccaaagacactagtgcacccccttcacagacactgacctcagaggccccactctggtgcccccagaccctgggcccccagcctctggcctccctccagtagccccacgagtccccacctctcagtgctgacggtgccttcatgtccccgccggccctgcccctgccctctgtaccccgtgaggtgtggcaggagctggagtnnnnnnnnnnnnnnnnnnnnnnnnnnnnnnnnnnnnnaacagctgctatgggggggctaaattatctctattttgtagagaggatctatatttatagggnttcgggcnccaagccggtcc

SEQ ID NO: 433524 - DNA, 1095 bp, Homo Sapiens
  misc_feature (1001)..(1001): n is a, c, g, or t
  misc_feature (1065)..(1065): n is a, c, g, or t
  misc_feature (1072)..(1072): n is a, c, g, or t
  misc_feature (1074)..(1074): n is a, c, g, or t
  misc_feature (1078)..(1078): n is a, c, g, or t
  misc_feature (1088)..(1088): n is a, c, g, or t
  misc_feature (1090)..(1090): n is a, c, g, or t
  misc_feature (1093)..(1093): n is a, c, g, or t
cacggtctgtacagttatacacagagatagggcccggcttgggccccgtacccctactaatatagatcctctctacaaaatagagataatttatcgcctcccatagcagcttttgggtggtgggagggggagggcacaggaggaagggggagactccagctcctgccacccctcacggggtacagagggcaggggcagggccggcggggacatgaaggcaccgtcagcactgagaggtggggactcgtggggctactggagggaggccagaggctgggggcccagggtctgggggcaccagagtggggcctctgaggtcagtgtctgtgaagggggtgcactagtgtctttggttggggctgaaggcaccgcaggtggggtcgggtggagcagggaccttataaatagagaggaagggaaaggggtgagggagggccgattttggggcctaggaacccaggagccgagtgtaggtgacatagagcagcagcatgaggaccacgtagaagacgacgaagccgcccagaccagaggggggccagaggggcggtagggccttgccccccacccgcttcacggcctccagcgcggtccgcagcccccgggcagtgccctggaggagatccgagggcgagcacaggtcagcctcaggcacccccatttttcgacaggcttctagaaaactctccacattcttccgagccttgagggcactgagttttggcacagcaggggagggcacatggatgaagggcacggagcgcggccgtagctggttggccagctggcacaggatgaccccactggccagagcctcggccaggtcctcaggcaggggccgctgcagccgggactcaaggacctggcgcactgacgtcattaagtccttctcatctggaacctgggggtaccgccgaggtctcaggacagagtctggtgaggaagggcctaggagaaaaaggggggcatggggctgcctccactgctcaccactgactctngtagctgggtcccagtggcctggcacctacacctcctgcctctcttgttgttgggttttttttntttcatngnaatngggtctcctntnttncc

SEQ ID NO: 433525 - DNA, 2514 bp, Homo Sapiens
  misc_feature (26)..(26): n is a, c, g, or t
  misc_feature (33)..(33): n is a, c, g, or t
  misc_feature (72)..(72): n is a, c, g, or t
caggaacaagggtgggaaggttgttnaaatggnaaaaggtggaaggggccttacacatcaccctaaagacanttcacaaaaaaagatgggccttccaggaacactgcccctttcctgccccttggaaatggcgtgcctgggccaatagggacaggcccacagtgctgtgtcgaggcagctggaagaaggcaaagactggggatgcccaggctgtaatgtttctgtgtggagtgatgtgaaatccacaaatggcaaagagaagctgtaggtttgaagaggcaagggggcactgcacacctccaggaaccagttatgaaaatggttaaatttgatgattaaaaacaattccataggctttgcctgtggctttgtgcatgggctgtatttaacctgggttgctctgtggcaggtgagggcgcaggaggcccctggagcagcctggcctcagcccagggcaggtgcccagacatgtgggagtgggacagtgggctctcccagatgggaggccatgtgcttggaccggctggacctgattttcaggctcgtttcttgtgatgctatccaccaccaccgctcgctatggctaaggatgggatcttggcctctctgggtcttccaaacctggaagagtacgactgggataaaacggtacctgactagtgttttatttgaaagggaaaaataaagaccaccccatgcattgtccatcccatgaggcagggctgggccatgccaagacaatctcaaggaatgggaggtccctgagcctgggaagacatttgaactcagatgtatcgcctgatgctaggaagaggggctcagtatggcaaatctggaggctttaccctaggcaacgcagggagagcaggcaggagctaccccagtacagggaagggaaaggagcaggggagccctggactggggaagccgatgttggtcaagggccctggaaaacaatgcttttggcagaatacatgaaaaggttggtacatctcggggtgcccgtctaccgggagccagtgtcacatggctgggcgggatggagaggagacagtggcatcacagtggcctctggtgcgacgtatttacaacagagctcgatgttgaggaggggtggacagcaggtcactaacagccaggaaacacacactggaatccaccgatgggttctgcaaacctgtgccggatcaggaaagtggcaacagcttcagctaccttgtcaggggcatcctcatggactgcatggccacactggggtaggacctgcatctggaacttcccttgcatctggccaatggtcagatctttatccaatctatcaacaccagccaagagcagcaatttaggaatgggacaactaagaaagagattggataagcctcggaaccagccgtcccagtatttttctgtttttgccagttcaattctccaggtgtatggatggtctttcttggtctccatgtcatcttcctttttcctcttgcttatagactcacttccttcctcatcttcttcttcttcctctatgattccttccactatagattttgagccttctggacttgtaattccttcacactgtttgacttggccaaccattgagacacgggcagactccagatttcgaatctggccactcttcacactccattcaatagcattctccagagacttgaaggttttaggacgaccccgtaagaaattctgcatgctattaagtgcatccatagctgtaccttctacaacatcaatcatgcacagacccaagaggcttggtaccaggttggatgatgctgtgtggactgcaatagcaccacccatgctatgtccaatcagcataattggaggaggaaggtccccatacatggcttcaaccacattgccaacgtcttttgccattgtttctgcagacagatcttcaggattcttgacctttgtttcaccatgacttcgcagatccaaagctacaatcctacactgaactctactaataatcgctgccgtgaacacagcccaagaaagggcagaatgacctcctccatgcagaaggagcaggactggaccctctgaaccactcttgtagactcgaaaagtatccttgccagtttcattctctacttctacatcttccatggactcaaaatactgactccaaggaacaggggaaaagtcccgctttcttccagggcccattcgcatcttggctccgctctgactgcccccgctgccgggtagaggtgggcgagagggaaggcggccgaggtgcatgctcttttcgagggccgacatcgaggggaggctgcacgcacgtagtcaaacagtaggcgaagcttcgtcccacgttgagtgtggcccaaccggtcacgactcgctcccctaacgacgccctgtcgcctttggacagcacccagctacccgtagcaccgcctaccgcccaccggctccgtaaactccacccactcgcttcagcgcattccaccggaagtgcgcaacagccctcatacaaaggaagct

SEQ ID NO: 433526 - DNA, 495 bp, Homo Sapiens
ttttttttaaaggttgggagatatttattttctttaaacaaggtcataaataacaaaaaacaaagtaggtcccagactccggaccatgcagcaggacaggggtgggaggttgttgagtggaaaggtggagggggctacacatcacctaagacagtcacagaaaagatgggcttcaggacactgccccttcctgcccttggaaatggcgtgcctgggcaatagggacaggccacagtgctgtgtcgaggcagctggaagaaggcaaagactggggatgccaggctgtaatgtttctgtgtggagtgatgtgaaatccacaaatggcaaagagaagctgtaggtttgaagaggcaagggggcactgcacacctccaggaaccagttatgaaaatggttaaatttgatgattaaaaacaattccataggctttggcctgtggctttgtgcatgggctgtatttaacctgggttgctctgtggcaggtgagggcgcagg

SEQ ID NO: 433527 - DNA, 870 bp, Homo Sapiens
  misc_feature (62)..(62): n is a, c, g, or t
  misc_feature (222)..(277): n is a, c, g, or t
ccccccgctggcaggctgagcagtttccatccaacatcacccatgagtccacccagaactgnaacaaagtgacccaacaatgaggaactgggaacaaagcccaatttgaccctaaaatgaagtcatcatttttgcataactctgcctgggttagacatgtgcgaagaacagatgccaaactgccattatatattaagcttacacaggagcaaacaaatgatnnnnnnnnnnnnnnnnnnnnnnnnnnnnnnnnnnnnnnnnnnnnnnnnnnnnnnnntgaaactaaccctgccagcgtttcaataattccctgagatgggctaaaggaatgtgggaggttgtgacatatataccaattacaaatgagtggttctttcagagacttgcaagctgatgttaatttatgacatagaaacagcttgtggtttcaaacacactgcagtcacttttttcacacgtttaccttaagtgagctttgaccctatggaagaaagttgctttagggcattactggattttcattcataactctatgtacagatacacatatgaaagcagcagcaaatttacagatgaggagcaatgatattcattatgttaaaatcatacttggcctcatgtgaaacactcaatttacaagtaacatttatgaatcctgccttattttactttttgtaggcaagatagcttaaggtatataaaaattaactcatttggcaattataactccatgagttgatggcagaattactaacaaaccagctcctttctagcaaagtcttaagaaaaacattctaactactctgaaattcagaagaaacagatattgagtattgatatttagttattgagtataactaaatatctaaa

SEQ ID NO: 433528 - DNA, 1159 bp, Homo Sapiens
  misc_feature (47)..(92): n is a, c, g, or t
  misc_feature (98)..(117): n is a, c, g, or t
  misc_feature (205)..(250): n is a, c, g, or t
  misc_feature (393)..(393): n is a, c, g, or t
agggggggtataacccccgtttttgtgggggtggccaggtggtgaannnnnnnnnnnnnnnnnnnnnnnnnnnnnnnnnnnnnnnnnnnnnngtgttnnnnnnnnnnnnnnnnnnnnataagccccaagggtttttcgtgtttttgggggggtgccccagggtcccccggccagggggaaaaagggagggaaggaaaagctgtgnnnnnnnnnnnnnnnnnnnnnnnnnnnnnnnnnnnnnnnnnnnnnnagggacgggccccttgctttccacagaagtcttgctgtcatcccacatctgtcctttgagtcaggggcttggtacccagatgttcatggaggcgagaaaaagggaaaaggattttgtccatgagaatctcccgtctgtcagcnccctttcttttgggaataaaccttcgtgttgctaagtgcctatactggagtggaatccagtcccagcggtggctggttttggaagtcgagtcttcactaaaggatgtctgggcattttcccaagccttgggcccgtgaaagccccccattggccctctgaggctgacagccatccccaaagtccagagcagcccccagcatctgtggtgctctcagccctgcagggctggggctacgacaaggacagggctgacagggcacactgagtgggcagaggtgtgcaggggccctgtgaagctgcaggggtggctcagacacacgacagcggagggtcccgagggttctgcccagagcgagaatgctggggacagacctgccgccaccaaccccggagtagaacgcaagacacacacattgaacactgggaaaggtcagggcagccccctcctgcgatctcggccctgcccggccacaccaggggaagccaggactccgtgggcagcagggcatctcgggcagggccatgctggggtctcagtgggtcctttgatggaatcccctgctctgcctctagggtgccccaggactggagaccacaggacagaaaccggatgaccgtgtgcgggaccagcacgcggaattgggataaggggagtgggcgtggcccggagcgtttccccgctgaggtctttcacaaggaagggggcaggggtgtgatcacaaggaaggggcaggggtgtgatcacaaggaaggggcaggggtgtg

SEQ ID NO: 433529 - DNA, 2331 bp, Homo Sapiens
  misc_feature (16)..(16): n is a, c, g, or t
  misc_feature (31)..(31): n is a, c, g, or t
  misc_feature (38)..(38): n is a, c, g, or t
  misc_feature (56)..(56): n is a, c, g, or t
  misc_feature (68)..(68): n is a, c, g, or t
  misc_feature (82)..(82): n is a, c, g, or t
  misc_feature (1336)..(1336): n is a, c, g, or t
  misc_feature (1352)..(1352): n is a, c, g, or t
  misc_feature (1360)..(1360): n is a, c, g, or t
aaccctcctctgcaanctgaaggcaaacccnattcggnctctgaaaaaaaagcctncaagtttctccnacctaaacggtccnaatccggaaataaaaagcctgtttttgaaaatgaaaacgtctgttgggtgaaccagcctctctctggagtttctgagcgaaatagtggggggttccttttctgcctaaagtcgggctccagatagtcaagtgcaccacagagaagagacggggtgagctagcctgctgaggagggcgtcagcagaggcaaaggagccctcgggagctgtaatttcaatcgcttctgaaggggtgcccaagcccatggcctccagctccttctgggaggatttctctggcacctgcaagtgtgactcttggttaggggccagtcctcgtgggacaggatgctggtttttcgcagcagtgttcacaagggcttcagtctcttcaaaacttgaccctgaacacggcgtcggggactctgacatgcggacgggagatgacttgacagggctctcctgagaagtgtcaaacataaggtacaaggcctgcttcttcggggcatcgtcgtcctgaggtaaggaggagccaattttctccatatattcaatttcataggagtttctgtaatccaactcctcagtgggtgaactgaatttggtctcgtttacaaaggtggacaggtccgagggctgcgggtagtcctgtttgtcagcctctaggtccactgtcatgcacgtccacttctggttggtgaccgccagcttttcctcatctgtggcgtggaccaccgcagagatcactggtggtgtttctggtgtagcagctggggtggggtcctgggaaggtggatcagagagaggagaccgttttggcgactttttcaccgtctttaggggcgtcttcttcttcttggcgggcttgtttagcccatccccgtccactccattggcttccatagcactggctgggatctcaaaggaggctggggatttagaaggtgagctgggggtcttagaggatgtcttaaaggggtcaacggactcatcacaggtgtctgggtcaaagttgtatgattgttggggcagtttgggagactcctgcatttttgaggtggaagaaaaagggttaaaattggggtcatcccacttgtcaatatcaaaggtgtaagtacctttagcaatggggatgtcattgggttcagcaggggatctgggaggtgaggcaggagtgttgtcaagtttctcgggtgtctttttcatctttggccctcctcaggggcattttggcaactggctttttgcctatctttttggtaggaggggggttttncctgctggttgtcccnaactactnttgtcctcagaatagtcaaactctcagccttacggagagccctttggctggagagtcctcttgccccccgctatccgatgggttacctcccctgctccggggccgtggtaagaggcagcgttttcctcccgacagggggtgagttctgcactctgccacctccagaagccggggggacaaccccttctgcactctctgagtccagagggcaggcagctttgggccccacagcgggctcaaggggcgtctcctccaataaggctgggctaggaccttccgtcttggcagattccgttttcgtctcagatgctagattctccccactggggacaaggctctcttcatctggctcctgttgcgtctccttcactgggggggtctctgtgggtttcttggtggtctgtttcttttttaaggaaggcggcctcggttttttagttcgcttaagggtactagaagcactgctggaacccgtgctatatgcatctggggcaagggccacggcctcgggattgcctgaggaagaagcaccatcaaagtcactggcttgcaggctgagcgaccgggacagtgtagacttagagatggggacggaatccgtggacttcctccgtgtgttcactttgccctcctgattcttagcgtctgaggcaggaggctccaaggtctgaaaggtatccacaagctcaatgttgtcaaagtccaagttgtaagtcccactgctggctatcggtttgtcttcatcgaagacggcagagaaggagtgtgacgggggacggaagggacttccttccaccgagtcgctccgtgggccatcagggacagggactgtctcagaaccacatcctggttcttccgggggtggctgtgtgctgacctcgggttatgggatgacttcggggggtggtgggggtggagctggcggagctttgacaggggtcgttgactccggggtctcaaatgcctcttca

SEQ ID NO: 433530 - DNA, 1028 bp, Homo Sapiens
  misc_feature (947)..(983): n is a, c, g, or t
tcggtacccaaagagtaaacggactcagttaaagacctcactgaatgtaggagaatcaatgggaaacaacgtaaagccttctgctagggcataaataggaatccgtctatgtaatcaagaaattactttgcctcctgatctaaatgcttgcctctagtctagggcttagaaaaaggcctggttatttgaactggttgtcaatcaaggtccccttcattttcgctttcttggcttccaattcagccagctcttgcagtcgcctcttgctcatgcctttgcgctccagctgtttttcaatcactttggcattctgtgcatatgagtcagcaacttccctagcctcaatctcctcttcctcttcatcaatggtagacacggtgacagaactgaacttgcccatgtctttggtccgtttggtcatcatcaccttcttaggaggctcttgtttctgagtatatatgttcgttttcccaaaaccctggccaaacttgactactgctccatccacaatgaaggtaacaggagcattctttggctgggattggtagaagagcggcagtccacactttgcacatttcttcctgtactgtcgttcaatgccttcaggtctccgcagatacatagtctcctcatcttctgtgttacaaaacttatgggcatgtttggcagcatcaatcacacgggaccggtcccggggcctcatgggcaatttctctaactggcagtccagcactaggaccatctggccgcacaaacagtagtaaacatggaggggcttctcgccgtcgtcatattcctcccggtcccgagtgtcagagcagactactgaccgagacactactttcggcatggttcccaagagcaatctgaaaactctacgccaagaagatggtcgccccgaaaaatccgctctcgacgaattcgagctcggccgatttggcctgatnnnnnnnnnnnnnnnnnnnnnnnnnnnnnnnnnnnnncgccgccccgcgtgacccgggtcgccctatagtgagtctatacat

SEQ ID NO: 433531 - DNA, 517 bp, Homo Sapiens
  misc_feature (66)..(120): n is a, c, g, or t
gaggaactttattgttacatttttgcaataattgaggcacaactacctcctgcttttccaacatcnnnnnnnnnnnnnnnnnnnnnnnnnnnnnnnnnnnnnnnnnnnnnnnnnnnnnnngcctaaggttctggagacaaaactgactagagtctatgtgtagccaagttgtgaatgacagtttagccttgcagagtttccttcttctccaattacaatgtgttacagaatttggaagggggtgtctttaaaaacgttctaattcaccccggtcatgaggaggaggagaggggaagtccagctcagcaagggcaagtgcctcggccagggcggtggggtcagcgctgagcgggtcaagagcccgcgccgggggccatccccctgcgctttctattcgagttaaacggaccccacaatatctccttcctctcatgcttctggtttgaaagtgacgagtaaatatgtcagactgtttaaaggaaaacaagcactcattgacaaggccggactactcagg

SEQ ID NO: 433532 - DNA, 2893 bp, Homo Sapiens
  misc_feature (232)..(241): n is a, c, g, or t
  misc_feature (1311)..(1311): n is a, c, g, or t
atattaagcaaagaaagactaaatttattttaataaacattcagaggctgagggtggccaaattttcaagccagaccctcccaatgttaatacactgtgcaaagcttacaccatgaacaactgacccggaccactaccattccaatgggagcctctgccttacaataccaggttagatgtctgtgcccagaacccccaaattagttacaactaataatcttctttcaagagnnnnnnnnnncaatcttggagttaacaatctgacttatttttcttttatcaaagaagtaggaaaattacaataagaattctagagatctctataaattacagacctatgactcaaaatccttgaaacaatttctctacgaacataagagttaaaaatagatttcagtaaaaccctatatgcgtcttatgtgtacacagtatagctatgaggaacagatcttattttgaggaactttattgttacatttttgcaataattgaggcacaactacctcctgcttttccaacatcttaataaaaaagacaataaggattaacagtgaaattaaaattaaaaaatacaaaagcctaaggttctggagacaaaactgactagagtctatgtgtgtagccaagttgtgaatgacagtttagccttgcagagtttccttcttctccaattacaatgtgttacagaatttggaagggggtgtctttaaaaacgttctaattcaccccggtcatgaggaggaggaggaggaagtccagctcagcaaggccaagtgcctcggccagggcggtggggtcagcgctgagcgggtcaagagcctgcgccgggggccatccccctgcgctttctatcgagttaaacggaccccacaatatctccttcctttcatgcttctggtttgaaagtgacgagtaaatatgtcagactgtttaaaggaaaacaagcactcattgacaaggccggactactcaggaaggtgtttcaaacaactcccctgctacgcgaatcacagcgctgctgtcgccaacagcgccgcgaagaggctctccccgttggcggaggacccgcttgcacttcctctgggctctggattctaacacacacaggagacacagcgaaagccgacccagaaggcaaacaaagctcaccacgctccggaccgggctgcgcgtcactgttgcagactgcaaatgtgacctgagaccaccccgagggccccaccaggagctctctttctcctttaaaacgtggtcatcggcactcatctccggtcacatccgtgaggtctgtgaagagccacagaagcagtnacaaaaacagcgaacttctttatccagcccaaaaaaggagccacaagcccagcaaacactgacacacagcctcgagcactgcgagagagagttccatgctgtctcccgatgagaacgctgtgctaacagggtgacccagaggcaggtttcccctccctcttctgcttctgcatctgccccaagggcttgcgtttaccgggtttgcggaaaacaagccaagggtgagctgcagaggggctcggggctcggggcagcacggcctcgggacgagggccctgggatatgtgactgagccacagcaacattcgggtgccaattaagaggacgcttttcattttcttgtaaatgctaggacacatcccaaaacacactaggcaggatttctcagtagagtgatacacagaggggaccagcttggaatgcaatgtattttaaacacagtgaaagccacctggcaggtagctggacaagtgagctgggcccaggactggccagctcgtatcaacattcacaggctcccgcgggctcccccaggacagcggcatccgagagtgtttactcttctgcaagcacagtcatagaagcgaggggcctcgatgagaatcagacttagggagagcggcgaacaggcacggctgtccaaaggcactggtggagcggcagtttggagaaactcaagattcctccagcgtctgtgggcttcccgaaaggtcagctgttagctcgccaagcagctggggcattaacaaaagctctgctagtggccttgccagctttctgaagccccagaagaggaatgtttctgaaagaaggaaacgctatgtgctgccaactgtgtgtgagcagatgacttgcaggaagatgggagagccgtctgcaaggggacctggtttctgtgtctttgccgttgggttgggcagtgggtggctaaggggagaagagcaccgctgtgtgtgcacggacggagcggcagtcaccgtgggcatcctgtctcactccgtgttgtgctgctgggcatggggcagggtgggaagggctgagcctgctgtaggggcgtaaggtgaatccacacctgcagagctctgcagcccgtcctcagagctgggaagggatcctaggcacggctcctcagcttcatctgagaggcttggactaggggctcttaggaaatcggcacgggagtttgaaaaggcaacgtgctccctttgggaggtggccttcagacactgcggctggggctgcagggccgggctcaggcactgagtttagcagcatcggcgtgcactggatctctacaagctactgttaggcaaagctttcaggttagtctgtctcagggaagacttgtgagttagaaaagccgtctgcaaggccagctggtttttgtgtttctgtcattaaagacagagcgtgtgtacacacatacacacacaacacggtcctcaaactgcgtcagaaaaagaggaacgtttctgtaaaagcaaagcaagctgtgtgattaggtgttccgtatttacaacatcatcactcggattttcagtagtttcactcgcccccaggattcagtagctaacgggacagt

SEQ ID NO: 433533 - DNA, 601 bp, Homo Sapiens
  misc_feature (502)..(502): n is a, c, g, or t
atgaaccaccgcgcccggccatgctaagtcctttcttggttccattgtgctgtccctcctgctttctctccaggtccatctgccacggtgctgcgtgcaccagtgtgccagcaacagtggctggtctctgccccgtgcctcctccactgggctcacacctgtcttgttttgtcctttgttggctctgagaagcagcctctgcccctctccctttctcttactctttgtaagatcctcttccttctgcctctaccatgttgcttggacaccagggtggaatagcagagaacggctgcttgcgtttgaattccagctctgccactttgatagatttctgaactgagagatgtgactctctaggcctatttctgcatgggtcggagagtgggcgggactgctttactgagttatagtgaatgtagttttaacctaagcgcctcacatgactaactcctcatccatcaagaatgagctcagctctcacttccccactcctcacccncctgtaaagtaacctttctccaaagttatgcttcaacaggaatagctaacatttattaaattgtggcacgtaagtatcttggatatattggctcattga

SEQ ID NO: 433534 - DNA, 3489 bp, Homo Sapiens
  misc_feature (889)..(1071): n is a, c, g, or t
tttatgttttcttcttttctcttttcagttatcataatagaaaatgacaacagcagcaacgctaacaaagtgagatttcacagatacatttttacgtcttttaaggttagatatttttaatcaaaagagcacagcgaaatcctatattaagaaagagtcttcactgtagagaagtcagtgatcgcatggtgaaaccaggtgcttgggtagcaaaggactccaagaatagttaaaataccttttatgaagtcaactgcttacatttacaagttgatcatgaaaacatcagtaagacacaaaaacatttccgatgctctcggcatgaagaattggtatctggagagtagcaagttataatagtaaggtttctgcaaaagattaaatagtataaagaatattagtatgccttcaactggcagaaataggactgggcacgtggaaaaaggtcagaaataagagaagatgcagatttgctcaaaggctgctacccagcagtcccatgcccaccccattcctaagctcttccccaagcatactcttcatatgcattggtgaggggccaggtccctggaggtcccagagacacaaagttaagggtagggaaaagttcagccccacactcccatccactttgtagggctttctccctccagtctgggggtccccacaaatgcccaagatggtggaaacagtcacatggatttctaagagaccacatgacatgctgggagttgcagatcactgtcctcagctcgcattatttgaacgcagggcagtgaccatgatcactgctgctgctcagaagagctttaatttactcaatgactcacaaatggggaaaagtggaaagcatgcatagtttcagaatcagagataggatggccagcannnnnnnnnnnnnnnnnnnnnnnnnnnnnnnnnnnnnnnnnnnnnnnnnnnnnnnnnnnnnnnnnnnnnnnnnnnnnnnnnnnnnnnnnnnnnnnnnnnnnnnnnnnnnnnnnnnnnnnnnnnnnnnnnnnnnnnnnnnnnnnnnnnnnnnnnnnnnnnnnnnnnnnnnnnnnnnnnnnnnnnagcccttccttgagaacgactggcctcatgaaagccaccactaagtctcctagtgaaaactcgatagttaggtgtcctgggctcaagacccctgtctcctgaaaagctccacctggcaacactctcaagcctctcagagattcattttcctcaagttaaaaggttggaagctcccttctgccagcatatagagcccttgtcagaaccatctgcattgttgggacaacgcttcgaacggcaaacgcagtaatggtgtggttctttaagaaactggcagaaagacagccagtgagacagatacaggggacacaggggtgttgctcagccacgtggatggggctcggtgtggaatgggctctgattcccccaataatcgaggcctgcaaattccctgcaaatatgctgtgcacatctgtcaggatttatttccaaggcagaatggggctcaaacctcctcttggggaggcaggaaatcagcttgaaaaaggacccaagagcagatgacagccttgccaaatgtctggatggagccatccgggcaggcgcgaggctgccgccacggtcaaaagaccagcatccagaatcccccggggaccgcaccacctacgcagcctctccgaggaccaatgtccacgtcattctctgctcttttctatcttgataataaatgcatgacttctacagtgactcagaacacatcatacacttttatttcagaatttatggcgtccattttgtgtactttttggctcttccattctgcttctggcagtaactgttttctcgctccagggagtctttgatcgtcttcagtcatgaagatttgcattgttttgtcctttgtcactttccctcttcctcaaaaagaaacccagtaaatgctcaaggtctgagctcagaaggacgcgctgggaatgagaaggtgctgtgataattctggttatccagatttttcagagaggtcccttttcctgcttggaagctgtgggctctgtcctctgggttctcagtactcagttcaaccaccttctcctccatccctctccgtgagtgaccatggtcaggggcctgtggagtgggccagggtgggtggggctggggcaggtgaacatagaacattcaggatctggctgttccctttggctccctgagcagaactccctgggcctccctgtcatagcagctcagcccaaccctggcacttgctcggggacaatcactgggcatctgccaggacgaagcaaagcgggccgatggcagctgcagggagcacaacccacctaggggctggggcaggtaatcccgggcaagccctttgcttcccactgaacgcacaacgtgctggaccacggacccctgggccaggagcccagacacttgtcagctctccactaattttccacacggcctcagctgctctccccgaaaaattaaaggtctcgattagatgctctctaaagcctcttatcactgtgaggttctggaactgataaatccctgtgcactgccgcctgcccctttcctggacttacacttgaatgtggcaatctggctataagctcttcaggaccaaatctcaaccccagcctccgaggcctcatatcccgagatggtccatcccagggggatcaccctggtgggcatgatgcagggtgcctctagagctgacagaactgggtctgaatcacagctctttagctgtgagcgttcagccctggcctcagttttctccacagaaaaatgcgacagtaattaacgtgcatctctctgcatcctcattcctgcccccaggggcaatttgagaagtaaatgagacacaaatagagcaacaaaaagatgtgcaaaactggcaccggtaagaataataactgggaataatattactgctaataatgaaggcagatgatgcttctgaagaaggaaagtgccatttgtcttgcagggatcaggcagcagtgctgacaacagacagactccactgagcctcttcggtctccagggacccacttcaggagacgccagagtggtctggccggcctccaagccttccagctgaaccggggctggaaaagcatctgctgcctttccagcgaaatgctgctgcccctcctcccatcctttctccctcagatcctgggggatctgaaaggagcgagaatcatttctctctggggggtagagtggagcagggagtcttatttgcctcttgaccttgatttcatgggaaaggggaaggacagcgttggcttggagtaggaagagctgcgccatcatcctgcctgggtccctggaagcacaagtcctcttaaaacaggcctggctacagcggcgtctggcctcttctcaaagaccttcagtggtggccactcacaacctcacaaagcagtaagtcctcgtgccgaattcgccacccaggcc

SEQ ID NO: 433535 - DNA, 528 bp, Homo Sapiens
  misc_feature (28)..(28): n is a, c, g, or t
tataaaccccttgtcaaaaacccatctncattgttgggaacaaacgcttcgaagggcaaaacgcagtaaatgttgtgggttctttaaggaaactgggaaaaaagacaagccaaagtgagacagatacaggggaacacaggggtgttgctcagcccacgtggatggggctcggtgtggaatgggctctgattcccccaataatcgaggcctgcaaattccctgcaaatatgctgtgcacatctgtcaggatttatttccaaggcagaatggggctcaaacctcctcttggggaggcaggaaatcagcttgaaaaaggacccaagagcagatgacagccttgccaaatgtctggatggagccatccgggcaggcgccgagtgccgccacggtcaaaagaccagcatccagaatcccccggggaccgcaccacctacgcaagctctccgaggaccaatgtccacgtcattctctgctcttttctatcttgataataaatgcatgacttctacagtgactcagaacacatca

SEQ ID NO: 433536 - DNA, 661 bp, Homo Sapiens
  misc_feature (43)..(43): n is a, c, g, or t
  misc_feature (46)..(46): n is a, c, g, or t
  misc_feature (338)..(338): n is a, c, g, or t
  misc_feature (584)..(584): n is a, c, g, or t
  misc_feature (595)..(595): n is a, c, g, or t
  misc_feature (613)..(613): n is a, c, g, or t
acgtcttttaaggttagatatttttaatcaaaagagcacagcnaanatcctttattaagaaagagtcttcactgtagagaagtcagtgatcgcatggtgaaaccaggttgcttgggtagcaaaggactccaagaatagttaaaataccttttatgaagtcaactgcttacatttacaagttgatcatgaaaacatcagtaagacacaaaaacatttccgatgctctcggcatgaagaattggtatctgggagagtaggcaagttataataggtaaggtttctggcaaaagattaaataggtattaaaggaatattaggtatggcctttcaactgggcnggaaatagggactgggggcacatggggaaaaaggttcaggaaataaggaggaaggatggcaggttttgcttcaaagggctggctacccaggcacttcccatggcccaccccatttcctaaggctctttccccaaggcatacttctttcatatggcattgggtgaggggggccggggtcccgggggagggtccccaggaggacacaaagtttaagggggtagggggaaaagtttcaggcccccacantccccttccantttgttagggggtttttntccctccattttgggggggttccccacaattgccccagtagggtgggg

SEQ ID NO: 433537 - DNA, 396 bp, Homo Sapiens
  misc_feature (13)..(13): n is a, c, g, or t
  misc_feature (27)..(27): n is a, c, g, or t
  misc_feature (42)..(42): n is a, c, g, or t
aggggttaacaantgagcaaggcaaanggacattatgtgaantacagtttaaaacgaataacacacacgggtaacccagtgcaggaaataatacaactttccctcccttgttttcatttgcattttacttttatttatttttgctttaataatgcatattctgttcacgcaaaaggtgcaaaggacagaaagcaggggtttaacttggctgatgaaaaatcaagcaggatgacatttctagtttcatgaacaacctaaaactaggagaaatagaaaagtcacagctggtaccacagagcacgcccaacttcacagctgtctcctcttaggacctttggctagggtgagagaagctttgaagacagtggcctctagtggacttggataagtggcaga

SEQ ID NO: 433538 - DNA, 2563 bp, Homo Sapiens
taatttttaatttttttgaatcatggtagctgcatcacaaaagctccaatcaagagggtggtaaaaagaaggcacagatcattgcaaataccagattttctctttctctttttgtaaatataccgtcatatataagctaaaatttctcttagggtggtggggtttgctggcagggaaagggacaggttgaacctacaattgcatatgtaatagaatcctaatggggggacaaagagcgaggcagctcttagcctgaagcaaaagaaaaggacactcgcttctgactacgtgtagtacaaacactagggaagtctgtgacaaaacacgattaaaaaatcataaaattataaagcttgtaaacgaataatctgaaattacattttattaatggaaaatatcatcaaaatagtaccactatggactaaactgcctgagttttcatttcgcattgagatctcagagtagaaaagcctttagcacaattttgctctgtgtaagtcacaacgagtgccagccccaggactaaaccctggggaagattctcctcttggatggaatttgtgttgtgctatcaagacttttgtgctaatctttcaaacagggacattttgaggcaaacctttaatcttttggcacaagattattttggctggggcagaaaatttgagtctcggactcaggatgaataatgtgacatttcattgatcaagtattcattttgattgtagagctttctttatgtcgttcacttccatctgcaaccgaagccggattttcttctcttcatccaactcagacaataactgtttaatctctcgtttctgctggtccttcatggtctcgatgatgctcctcagctcgcggacctgtgtccttagctcctccacggccgcctggctgctggccgcaggctccatctttggttttccttccgtgccgaacagagacggggagttggctctgtgtccagctgttcccaaagaggatgacaggggggagggcgccgctgaggacagaggggctggcccaccgccacctgctgccatggtccccggcttgggcggcagggatgctttgttgtcagacacagatgtgagggactgggacggaggccgcctccctgtagcttttggtctgcttgtggtcggatgactgagtttctcagtagatgataccacggagtcaaaaccttctaagtcaatgtcattgctgcggtccgagagatctttgtccaggatgccagatagcgaactgccggccaagtcaatctttggactgtcacccctggtgtgtgtcagcggacccaccggtctctccggccttctcgggggcagtgcgccaggtctgctgagagaattggtcttaggtggccgaggcttttttggcggtatggcaggaacggagggcttctgtaaatccagttttggctctctctctggtctttctttttcttctgttctgtttggaagcatttctggtctttcaggaggtatctttttaatttcatgttttctctcagtggtgcctgccccttgtttgatgacaggagcggatggaggcggtggcttcttgggtctattcccttccttttcaaagtccggtggaagtaacttcacgaagttatcggggaacacgcctcgtctgccgttcagctctccttcccaccagcctacgtcgatgcagtccttattgatgagagtgactatatctccttctttgattgtcaattcatcatcattctgtgcctcatatggaaatattactttgcagtaatccttgctctttgtcctgctgtccatttctgtttttgatgagtctggagttgctgtagttgcaggtaacttcttcccaatagtcttttctaccggcagaaagtcattttctacttcaattgaccttggtcttagtttgattggcttgtctttgaaaatgtctccaaagcccactcccttaactttcttgggctggattgctgcagttgccactgtcccgttggcaccttcagacttggtgctgcttgagtcacccccatcactctcggagcctgtggtttcccttaaacttgacttggatagctgctcatcctgggaaatgccaagctcatccgactcccctgacagctccttgatgaagttggaaggaaacattccagtcttcccgttgagaacaccttcccaccatccttcctctacctctcctaccacctctatgatgtcgccaactttcagctcaagttcatcgtcattctggggcaggtagctgaatgccacctggcaccggcgcctccgtcgctcgcctctcttattggttcttaaaatcgtttcagaagacagcaaagagtttccactgggcacttcgtgcaggggcttttctggagctttgttggtgagagggtctttcttcatctctttctttatttcaatctcagacaagtctgcggcacttggggctttggctgctgaaacctccattctgtgaagtatgaaatggtaatttctggctgtgtctgaactctgggcaggaataagttccgtgctctccgagaactgcaagtctctctccc

SEQ ID NO: 433539 - DNA, 1332 bp, Homo Sapiens
  misc_feature (67)..(75): n is a, c, g, or t
aaaaggggggaaaaatattttcccctccaaaatatttggttcccccccttttggggggcttaaaaannnnnnnnnggagagttttttcccattttttcccccttgggagaatttttccggggggtgggaaaaaggcccttttaggccccaaatttttggcctccggggaaaaggccccccaaagggggtccccaaccccccggggactaaaacccctgggggaaagatttcttccttcttgggaagggaaatttggggtggggccaaccaaggacttttggggctaatcttttcataacaggggccatttttgagggcaaaccttttaatcttttggcaccaagattattttggctggggcagaaaatttgagtctcggactcaggatgaataatgtgacatttcattgatcaagtattcattttgattgtagagctttctttatgtcgttcacttccatctgcaaccgaagccggattttcttctcttcatccaactcagacaataactgtttaatctctcgtttctgctggtccttcatggtctcgatgatgctcctcagctcgcggacctgtgtccttagctcctccacggccgcctggctgctggccgcaggctccatctttggttttccttccgtgccgaacagagacggggagttggctctgtgtccagctgttcccaaagaggatgacaggggggagggcgccgctgaggacagaggggctggcccaccgccacctgctgccatggtccccggcttgggcggcagggatgctttgttgtcagacacttgggatatggtaacagtcttggaagttttctttgacgcgtccactcctctgtgcgcaagtgaaatgtgttcctccttatcctcttcgggacttggggagtcgaagatatcagggcttgaaagggatgaagatgtgagggactgggacggaggccgcctccctgtagcttttggtctgcttgtggtcggatgactgagtttctcagtagatgataccacggagtcaaaaccttctaagtcaatgtcattgctgcggtccgagagatctttgtccaggatgccagatagcgaactgccggccaagtcaatctttggactgtcacccctggtgtgtgtcagcggacccaccggtctccccggccttctcgggggcagtgcgccaggtctgctgagagaattggtcttaggtggccgaggcttttttggcggtatggcaggaacggagggcttctgtaaatccagttttggctctctctctggtctttctttttcttctgttctgtttggaagcatttctggtccttcctctgttcagttcc

SEQ ID NO: 433540 - DNA, 844 bp, Homo Sapiens
  misc_feature (193)..(234): n is a, c, g, or t
ccccagcaagacacacacaaactaaaactcacccagtgccgcaaaggccaagtttccattctgcaatccactaacttggagttcagcaaaggcaaccaagcctcggagttcaagaaagctgatccttgaacactatgtagctacttgtgctaaagctcccttccttcctctctgcatgcacgcgcgcgcgcgnnnnnnnnnnnnnnnnnnnnnnnnnnnnnnnnnnnnnnnnnngaggggaagtgggagaggaaagggaggggaagaagattagcttcatttgtgtcttggaaggatttgggtcatgagttataaacaccaaaaccttccacgcatccactgatccactgagtcatcccagactcagctacatgtgacaaggttgtagaaattgattagctttattaaaataaaaatttaaaaatcacaaggtgactcattcattctaaagtgaggccccttttcccttctccctatctgcttaatccttacagaaaagcgaaacaccaaaaacaagacccagggcgctcataccaggccttgctcccagcaggaatttaaaaccaaggataagagatgcctttgtcaaatcttggttccatgaaaaacttaccaacgcagctttttaatactcctatttcatccccctttctggaactctccctgctcccttctcatcctggggtttccatcctgtgtcccctcgggctgtggagctacgatgcctgcctgtggctttattaaaaagaaaacagtcccggggctttgttcttggttgttgctgcccaggcaggaagagcacttttatgtggatttctgatttgttgcaacagttcaatgggac

SEQ ID NO: 433541 - DNA, 438 bp, Homo Sapiens
  misc_feature (36)..(36): n is a, c, g, or t
  misc_feature (248)..(359): n is a, c, g, or t
attccaccaaattcttggaatacctagagataaccngatatcatgttaactgtatgataataagttagaatacttgcaaccaaaatgccagagttttctaggaaaacaagtaatcattcagaaataagaatatgaatagttcctcagttctccccctttgtggaatttgtgcagtaaatgctgctcccaaagctctgtggaaaacagaagcttcccatgaaaaatctgacaagggtatctctcagaannnnnnnnnnnnnnnnnnnnnnnnnnnnnnnnnnnnnnnnnnnnnnnnnnnnnnnnnnnnnnnnnnnnnnnnnnnnnnnnnnnnnnnnnnnnnnnnnnnnnnnnnnnnnnnnataattagccacgcgtggtggtgcacacctgtggtcccaattactggggagactgaggcggaagaatcgcttgagccca

SEQ ID NO: 433542 - DNA, 475 bp, Homo Sapiens
ctttcaagctctcccaagccttactggtccctgtgctgcagcctggggggccacgaagaggcactggtgctcggcttgtccacggccagggctcagggcagaatggagcagcacgcttgttccctgctgggttgtcaggtgtggagagggtgctcctggggttgtggtggcctggggcactcacggccccatcccccagatgccccgtggtgtgggcactgccaggccctggcccccgagtacagcaaggcagctgccgtgctcgcggccgagtcaatggtggtcacgctggccaaggtggatgggcccgcgcagcgcgagctggctgaggagtttggtgtgacggagtaccctacgctcaagttcttccgcaatgggaaccgcacgcacccggaggagtacacaggaccacgggacgctgagggcattgccgagtggctgcgacggcgggtggggcccagtgccatgcggctgg

SEQ ID NO: 433543 - DNA, 798 bp, Homo Sapiens
tgccccagttcagccaagctctcgtccacggggaagttgcccgcccctcatcaaacttcttgaagagaaccacagcgtaccttggtgaggccaaactgctgaaagagccgcggccggtcatgttgaggccaaaggtcaatgtccagggcgtcctggaagaagccaatcgaccactaggtcccggccaccgatcagcagccatgggcggccgcctcgtccatccagccgcatggcactgggccccacccgccgtagcagccactcggcaatgccctacagcgttcccagtggtcctgtgtactcctaccgggagcgtgcaggttcccattgcggaagaacttgagcgtagggtactaccgtcacaccaaactcctcagccagctcgcgctgcgcgggcccatccaccgttggccagcgtgaccacacatctgactcaggccgcgagcacggcagctgccttacgtgtactcgggggccagggcactggcagatgcaccacaccatcggggcatagaatatccacacagcagaggcagggtgctacccgcagggccaggccacagggtgtggcggctcagcaccaagatcccatcctccttggggatttcctcctctggaggctcctccgaggggctcctcgctgcctgttcctgaccccatgggcacgaagccctgagcagcagcagcagcagtacaggcagaagctggcggctcatggtgctgccagggcgcgtggggcgggggcaggtaagggggccagaagccaagcagcagctgccacgtggcacacaggcccag

SEQ ID NO: 433544 - DNA, 2260 bp, Homo Sapiens
  misc_feature (2202)..(2203): n is a, c, g, or t
ggttggcccatcacatatttattgcctgcactggacctgcagttgggatactgcagtgaacaagacagagtccaccctggaaagtggccacaggggaaggcaagaggcgatagctgggggtcacttgtcactagatggaagctccttggtccacacagtcccaaagaaaggtctgcccttgggcccacgaaacccatcccagccctcacaggctgaacctcaccctgggttttcccagagaggtgcccaagaagacccaagctgccccaagtcagaggagcagcaggaaacagcctcagaagtccgtcactcttcagtactcctcccttagaatgtccacttcctgtttggtgaccatggcaaccaaaagacaatggcagtgcagtgcgtgtgggatgggggagctccatcttccttgggtacatggggaggagactccagtgaccaggagaagcggggagagccatgggagatgttagagggacccagagaagatgggggacaggaaaaaggagagaatctgtctcaagtaaatggcctcctgccttggacctcggctgaaatgtggctggggcatcatccgcggagggaggaaagaggtggctccacttgcccgtctgcttggccccaggcgtgctcttgtcctgtttgggtggccagagttccttcgctgaagatccccatccccaggggtctccgaggaagcccagagctgtggaatggggtctgggcactcaggggtggcccaggagagcccgtggaggtggggtcttgccaaaacagatggcagagtgagctaagggaggaagctgtgcagggtgaggtcatccccctcacggtcctccctgggctctggcgtcaggcccgggctcttggccttggacaggcccccattggctgtggcagagggcccctcacccccatcaggcaacagggatgagatgcagaccatctcggtgggggagtaattacgcacggggtacatgtggcccttgcgggagaggcggaccgccagcaccacagtgcccacgaagaggatagtggccaccagcgccaagattaggatggccagcaggcattgcttcacagagatgtggtctggggcccccactgggtagttgacggacaacttgctggttgcccattggaatgcccttgtgagtaccagaggacccagaaaagagttatgaacagaccctcttttggtagtaggttccatggacagggccttctgtggcactgggtttctgtggacagggcctccatggctgccagtggagtggtctgtgcctccgtggctgtgggttgagtggtctgtgcctccgtggctgctggtggagtggtctgtgcctccatggctgtggtttgagtggtctgtgcctccatggctgctggtggagtggtctgtgcttccatggctgctggtgcagtggtctgtgcctccatggctgctggtgcagtggtctgtcctccaggcctgttggttgagtggtctgtgcttccgtggctgctggtggagtggtctgtgcctctgtggctgccagtggagtggtctgtgcctccgtggccgtcagtcgagttgtctgtgcctctgtggctgccagtggagtggtctgtgcctccgtgggcactggttgagtggtctgtgcctccgtggctgctggttgagtggtctgtatctccatagctgctgaatccgtggacaggttccccatgttggccagctccgtggtcagctctgtgactgcccctcctgcatccaggccagtagaacgccttgcagcaggctccacagtggtagactcaggggttccaggcccagtcagaggagtggtgtcagtgctgttcctcagcatttctggaggctccgtttctggcaggaaatcataatctaggtactcatattcggtggcctgtctccggtcccgggcaagcaggggacccaaggctttctcggcttcatctgcccaggtgtcccacagctgcaagctgttgccagggcccagtaggatcagcaacaggaggagttgcagaggcatggcaccaccgtgctcagcagagcatgggacagctgcctcgtgggcccagaagaagtggcttctctgctttagtgacaaggtcccagcccacgctgccaggcactgctgtggcaccccctgcggcagtcccggatccgagcaacccctttttgaattattcccnncccctacccctaaagttcgtggcaccgggggcggggggtggatttaaaaaaaataag

SEQ ID NO: 433545 - DNA, 999 bp, Homo Sapiens
  misc_feature (517)..(580): n is a, c, g, or t
gtccattggaagaaggttcctgatggatgagggtcagccacaaggccagggctcagcaggaagtagttagtgactgtcttgagctccgtgttgacctggaaagagatgagtaccatgcaggttgcctgtcatctgtgggctatcgaccaggaggcccgttgtgatcccaatgaagtccactggccagggaccctttgcctggtgccaggacggtgatgcttggggctggacagcaggtgggtcctgaagtgttcatggtgtgctaggtgggtctggggtttggagagccccttcctccaggcacgctacagggcttcctcaggggaaagtgcatcaccacggggctgaagaggggtctgtagggtcctcagccccactgcctccctgggggcctgcggcgtctccagggacccatacacctggctcccagggggagctgcgccctgtgctggcagcgggagaggcacagccagtgattggcatgtcccaccccctggcacgccagccttagcggggnnnnnnnnnnnnnnnnnnnnnnnnnnnnnnnnnnnnnnnnnnnnnnnnnnnnnnnnnnnnnnnnagcctcaggcagcgtctggggttggactaggttctggagtgtgcccccctccttcaccagggcacccaatttgagccccaagagggaggagaaaggacatgaggaaggcgagcccaggaaggctaaaagtcccggacgggagacaaggcggatacagggagacaaacacccacacccactgcacagacccggcggcacacacaccctcacaaaggcacactgtttccttgggctcctccccccacccaaccttagagcccccagcccctgtgcaccatgccccaacacacatgccctggtattcacatgcctgcttccctcgcacacacgccctcccccctgcacatgcccacgcacccacccacccaactacacaccctgctcttcctccctgctgtagagagctagattccttcttt

SEQ ID NO: 433546 - DNA, 2823 bp, Homo Sapiens
  misc_feature (2682)..(2752): n is a, c, g, or t
agggcccgctggttatgtggctttattcacagactcagcacttgctgaggatgaaaggaaagaacatttggggccaggctgggcctggagatccgggtggctgggaggccatgcatgggttggattggggagctcacaggagagaacctgctggctgggccaggcctgtgtggggcagggccggaggaggcagcatgcgggaggcctggctagatctgcatggagcaagatccatccaggtggtggctgtgagccaggagggagggactgaggcttctctggggcagggggtatggatttgcggctggatagcaggcacacttgactcccactcccaggaaaatgatattgtaggacagtcaggacacctggctcctggtcctgttgctgcctcgggacttgatatgtgactagccaagccggacccttccagtgtcattgtcttgctgatgcttggacatttgccttggagttgacccacctagggaccctctgaggacatttgtggacaatcctggagagtatgcctagggcccaggtgggcgggctctgcctatgaagcgaggggattccccagctccctgtcatctggcttttctcccagcggccagttcagtttctggctgtgccccccagggggcaccatctcacaccgcaatctgggccgctgctgggccaaggaatacttaatgttaagccttctttctcctggcccgccctgctggctcctgacttcctgcctaaaggcaaacaaggagtccaaagcccggatcctcctcccgggccttcttcctggtgaagagcgcattcccacccagcagggaacagaaaaaccagttccccgggtttccctccctgcctgggaatagcgaagtctggaaagttggcagggtctctctgggctgcccaggaaaggtgacccagggtccctgggaagccaggtgaaggcctgaagcagggccctggggctgaggatgcagcccctgccctcttcccaccggcctttcccggggactggggtggagggatgcaggagaggggactatcagcattggcgggagggagtgcggtgcacggagccagggcgcttggggatcttgcgccagcgtctcttgtcccagcggcaaagcagcagcaggcgaaaggtgtcccggaaggctttgttgcagagtgcgtagcacatggggttgatggtgctgttgacgtagcacagccagtagcccagctcccacagggtctcgggaacacagtccttgcagaaggtggacaccagcaccatgatgttgtacggtgtccaggtgaggatgaaggccaggaggatggcactcagggtccgagccgccttcttctccttgaccagcgagaaggtcttccgcttggccagctgctcctttccacggggcttctggcccttgccagctcgatcacgccctttcttagtcggcctcttgactgtatttggggagctccgtgggggctgcttggtgggggcctgtgcctcggggtccaccattggcatcttgatcaccacttcggagccaggctcctctccctctgaggatgtgagggactccatggagccttcgtcctcttcctcttcttccttccagctgtaggcctgcagcagcctgggggcccggcagcagcgacagcagcggcctggaggagtctctggtgagccctcagcccctggctgagacctctctgagctgctgctgctgccaccccctttgcctggcgtctcggagccctgaagggctgccagctcccgtgctcggttctctgtctcccggtagatgcgccagtagagcgtgcacatgactgtgacagggaggtagaaggcagccatggctgtgccaaaggtgatgatgggctgggagaggaactggatgtagcactgcccagctagcactgtccgctcccctaccaggtactgccagaagaggatggctggggcccagagcacaaaggaaaccagccaggccaggccgatcatcagagctgcccggcggggtgtgcgcttggcacggtagctcaggggccgagtcacggagaagtagcggtcaaagctgatgagcagcagattcatgacggaggcattgctggccacatagtccagggccagccagaggtcacaagccagcgtgcccagagcccagtggcccatgagcaggtacgtggtatagaggttcatggagaaggtaccgatgatgaggtcagcacaggccaggctcagcaggaagtagttattgactgtcttgagctccgtgttgaccttgaaagagatgagtaccagcaggttgcctgtcactgtggctagcgacaggaggcccgtggtgatcccaatgaaggccacttgccagggaccctttcctggtgccaggacggtgatgttggggctgacagcaggtggggctgaagtgttcatggtggctaggtggggctggggttggagagccccttcctccaggcacgctacagggcttcctcaggggaaagtcatcaccacggggctgaagaggggtctgtagggtcctcagccccactgcctccctgggggcctgcggcgtctccagggacccaaacacctggctcccagggggagctgcgccctgtgctggcagcgggagaggcacagccagtgattggcatgtcccaccccctggcacgccagccttagcnnnnnnnnnnnnnnnnnnnnnnnnnnnnnnnnnnnnnnnnnnnnnnnnnnnnnnnnnnnnnnnnnnnnnnnctcaggcagcgtctggggttggactaggttctggagtgtgcccccctccttcaccagggcacccaatttga

SEQ ID NO: 433547 - DNA, 900 bp, Homo Sapiens
  misc_feature (41)..(41): n is a, c, g, or t
  misc_feature (58)..(58): n is a, c, g, or t
  misc_feature (64)..(64): n is a, c, g, or t
tttttccatcttgacattgctggtgtgtgcttcctcgctgncagctggtggaagccgnccgggntctgggcgcctcagggaactctgtggagccgtttcgtctggcttccaagcagacctttccgacctgcttgggctgcagcccttctgcagatggtgcttcagcaacttctcaagcttagacacggctctgctcagctccagcttctcctgggtcaccgtgctgagcgcttttgtgagggaaacattgtctttcagcaggacgtccacaaactggaactgcagctctgctgccatttttttctgggaggaggtgggcctgctcaagtcagacttcagctcctccaacgtgtgcagtaaagacatcactgctttctcattggatgacgtccaatcattaactgtcctgtccacggcctggctggtgaagctgcttgatcttatgcaagtcacgctgacgctgcagttctaattctcgctccttctctctcctgagcgcctcacagtgcttctgagcctcagcctcaagctgctgctgagaatgcagggcttgctgctgcaccttttcaagcatcgcttgcaagtccaccacccgggacttctcctccttcagcttccgcagcagagcgtgatgggcctgtgtgtcctggtgcacgcaagcctcctgtgtcctctggctcagctgctcggtcaggagccgctcgtgccgcaaggcctctgacagctccagggtgcggctcttctcagccgcaaggtccttctggagctcagagagctggctccgctcctgagccagcaaggcctcgcagcgtgagtgctcgatacgcagctccttctgcaggttgtccttggccgtctgctcgtgtttcagtgccacgcagagtcgactgctctgagcac

SEQ ID NO: 433548 - DNA, 854 bp, Homo Sapiens
aggctggtaccggtccggaagttatcgggatatcgtcgacccacggcgtccggattggacgtcatccaatgagaaagcagtgatgtctttactgcacacgttggaggagctgaagtctgacttgagcaggcccacctcctcccagaaaaaaatggcagcagagctgcagttccagtttgtggacgtcctgctgaaagacaatgtttccctcacaaaagcgctcagcacggtgacccaggagaagctggagctgagcagagccgtgtctaagcttgagaagttgctgaagcaccatctgcagaagggctgcagcccaagcaggtcggaaaggtctgcttggaagccagacgaaacggctccacagagttccctgaggcgcccagaccccggccggcttccaccagctgccagcgaggaagcacacaccagcaatgtcaagatggaacaaattgtacctgcattacttgagagcagagagctttagaaaagctctgatttatcaaaagaagtatcttttgctgttgattggtggattccaggattctgaacaagaaacactctccatgattgcccatttgggggtatttccttccaaagcagaacggaaaatcacatctcgtcctttcaccaggttccgcacggccgtcagggtggtcattgcaatattaagattacgttttttggttaagaaatggcaagaagtagatcggaaaggagctctggccacaaggcaaagcccctcgccagggcccgagcacgacagcgcagtctccaccagaaccagagagtcccccaaccgggatgtacctctggcacacaggacctgccagaggcgagactggagagagctccaa

SEQ ID NO: 433549 - DNA, 1232 bp, Homo Sapiens
  misc_feature (13)..(13): n is a, c, g, or t
  misc_feature (33)..(33): n is a, c, g, or t
  misc_feature (48)..(48): n is a, c, g, or t
  misc_feature (128)..(128): n is a, c, g, or t
aagtacccttcanttttaacagatgaaaaaaanggatgcccccagaanaggtgaaagtaattttaccccaaggtcccctcaaaatgaaccagggtgggaggttccacatcccaagaggtttggctccnaaagttttgcctcataacccctttgttgcccttctgttacatggcggaaggtcccagcccactaagatagaagcccagaggtttaactggggaaatgggaataatggcagatgttcatctataaggctacactgccactccatgccacagactccaagaacagaattacagccaggcttcagattggaactgggcttggaaatgcatgcctctcaacgtgaatgtggccccaaaactcatgggggtcatacacagcttcccaatgatggcagggctgtacctatcattcagtaggcttttatgctttgatagctgattgttataacttagtgctctaatcccaaataggtcgtgcataaatctagaataccaaaagcaaggcctaattcgggtcttgtacgggcaaaagtggagtaaatgtacctaggcctttgactacatctccatacactgcaatggcaaatgtcatcatctagattggctggagttcatccttcacttcttcctccacgctatccagcttcttcagatatgttcttgtctagtctcgtttcccattttccacacccacttggtgttccaggtcaggctcgtattcttagtgttctaacactccacccttgggtctttgcaaaagtacttcccgcactaagatctcttccctcctctgcaaaatcaacttgtcctttggagtataatttcttctcgaaactttccagcaagggatccacagtaatttcctctttttcctgtagcacttgccttttgtatcactcatatttgatcccatattttcctagctcaccaaatagtctttttcaactagaccagagttccttgaaagcaaagggtttccatagctttttctatctctatggccggacaacgtagtaggaacttattaattcacttaacactactggagaagccaatcaatcaacaagcgcataaggttagttagtggtgagtgctattaagaaaaattgcggataaagcgatagaaagtgaggttggtaggtgttaattaaaataggaaggtcaggaaaatctttctgtcgggggcgattgtaagctgacaggcagtccgtaagcgctgtccctgct

SEQ ID NO: 433550 - DNA, 812 bp, Homo Sapiens
cgggaagcagcacgccgggcgtccttctcgaaagcccagggaccggggcacaggcggcccctgcagcacctgctgctgctgaaccagctggccctggatgatgctgctgatctgcggtggcaagttagccgtggtgatgtggcttgggctggccaggggctgcaggccggccccacccgcggctgcagggctctggggtcccaggtggtggatggtgccccctgactgtgtgtggggctgggagggtctccgctctcggactgtgatgggcgtacccgggtgctggagctgaacctgggctccctgggcgatctgggtgagccctgacccatcctgaaacacaaagtgtccaccactggaggggctcaagctgatctgcctcaccagcacgctggcatccacgaagtcccctgtagggctgctgctgcagaggcccagcccagggccaggggcacctgcacgcacattctgcaaggcctgccccggccccggactgggctgcgtgggactctgggtctggaccatcagctgctgtagttggtggctgggggatggcagtgtgaggggcagggacggctgggagcacgctggctgctcctcgcccgcgccggggcaggccccaggccactggacatggcgctggctgctctgggagctgctgacgtgctgcatgactacgtcttcaggaaatgctcccgcggctgccgggcgacgcagccaagcgcgctcccggcgcggatgagcgctgcgacagcggaccgggcggcgaggccactacaaccgaccaaaccgaccggccgacgcggagccag

SEQ ID NO: 433551 - DNA, 1207 bp, Homo Sapiens
  misc_feature (419)..(521): n is a, c, g, or t
ctcgccgcccggtccgctgtcgcagcgctcatccgcgccgggagcccttggctgcgtcgcccggcagccgcgcctcgcgagaccgctgtctacggcgctgacgccgcctctgcctcttgaccccttggccccgctgtcctgatccctgaggtcggggcctggtctgcactccaggaaagacgagtgcgcttagtgtgcgctgcacgtgagcagtgaagttgattccacgcgctgcgctgctcggcagctgtcccagaactgaccacggacccctccgcgggtcctgctcctgacaagggccttccggcactgggagtttagtgttagtggaaaggaagaatctaataataccaccacctttacagtaaagacgctgcgaattgacgccttttataataaagacacttatcttgcccaannnnnnnnnnnnnnnnnnnnnnnnnnnnnnnnnnnnnnnnnnnnnnnnnnnnnnnnnnnnnnnnnnnnnnnnnnnnnnnnnnnnnnnnnnnnnnnnnnnnnnngagcatttcctgaagacgtagtcatgcagcacgtcagcagctcccagagcagccagcgccatgtccagtggcctggggcctgccccggccgcgggacgaggagcagccagcgtgctcccagccgtccctgcccctcacacgtgccatcccccagccaccaactacagcagctgatggatgggtcagggctcacccagatcgcccagggagcccaggttcagctccagcacccgggtacgcccatcacagtccgagagcggagaccctcccagccccacacacagtcagggggcaccatccaccacctgggaccccagagccctgcagccgcgggtggggccggcctgcagcccctggccagcccaagccacatcaccacggctaacttgccaccgcagatcagcagcatcatccagggccagctggttcagcagcagcaggtgctgcaggggccgccgctgccccggcccctgggcttcgagaggacgcccggcgtggctgctccccggggctgggggcgcagcggggttagggatgacgtccccagccccgaccacagaccttccaggactgccgtgcccccagggccttatccagacctccccactcacgtctgtggggaacacgggaatgcagaaaggtaccaagacgttagaggagatacccccagacctctccggagatgc

SEQ ID NO: 433552 - DNA, 2299 bp, Homo Sapiens
  misc_feature (2153)..(2168): n is a, c, g, or t
ttttttttgcagtacatgaatgttttattcttcataaagtgcttaaaacatgaagaacaagctctttataaagagccttaactaggaagacaaacagcaaagcagaaccatgcctgctccctgcccaacccacctgcaactttcctccaagtgtggctaggagaagaaacatcaacaaggaccctgggcttcgattcaaaaactcctctgaagccatccatgccctgggcattagggaggcccacaaaggtcagggccagggctgggagtgaataaagcccagaggaatccccagtagggggggtgactccccctctctcagaaaagatacttacttctctaatacccaatgacccccaaaagcatgactgaaaccctggggaccagtggatacttttctcagatttgatgagtggagtttaaggtaggtaacgttacaggggctttcctccatgtgtggcgctcctctgctccatcctggcagcagacagacatcacccagagggcacgtgtctgcctgaggctttccaaaagcaagcccacaggccctctcctgaagaagtggtggtcccagaggagctcttgcctcctcactaagctgttaagtatccttcttcagcacctcatcaccccccatttttgctaattcagggtgccccaagctgccaaagttccctgcagatgccttggggaagcctaccatgttttctacaagcaaaccaggggctgggccaaaggacagatacttcatttcaaagtgcactgcagccaagccaggcaagcccctggggcagaagggacaggctgagatagcagcttaatggatggatgggaggacaacaaaggctttttcctaagtataggtgtctcccaaaggcatagtgggacctccctcttccaggcaagctgactggtctagtatggctaagtcctgaggccagacaatgagagtgagcagggcagccccaggcctgcctgcccgcctgcccagcagtgtttatcctgggatcctcctattggggttgagggaggggaagacagcaggaaggttgagggagcagcaacttggccagaccaagagattaactttaggggaggggaacagcccacagcagcgctgtccattcccattcccagggccctgagagagccatccctatgtattcaacaggtgggagggggacaccacacagcgggagaggtcgacatccaggggctcttgaccccgcccaccaaaggcacattttaattggtttccaaaagttcaaaccctgcagcaacacagagttttggcatctggacaggcaacaagaacagacatggaggcttgatccccaaatcataagcagtcccaagccccagcctggagggacctacacattggaggtggtcaagagctcgaaaagcaaaaaggtgctctctccgcacccgcccctgcgccccacacattcccatgtgacactcgtggaaaggtcagaggggtcagggagcagcctgaagcacacacatcatccaccactgtccacatggcactcgccccacaaacagctccagactgaagcagactcaggacatggcagagactggcccagaccacacaggcttcttgctctcaggggaatgggtgtgaggctgaagaggctggttgcccgtaactcacagacaaacaggcagcgtggtcattgtcccagtaatactagaagcccctccagggactggagggaaatgaaggggatggggctttggctgtgggaagaaatggctgaccatccttgggggataataaagtatgtgctagcaaccagtcttgtcccagattactgcatcaagctacagttcacccctgctctgtcttgggggaagagttccaattccctggggcccccaaagctgagggatatgaaaacaggcaggtgggaaagacccagggctcccaaagacacacaagttgtgcacagaacctgatgcctccaaagggaatccagagggcccccttccagcagccccagttgaggcaggagggagaggagcaaggagtgacaaggcaagacagacgatgccccactgcagatgagagagttcaggaggagagagggcaggcagcaataggtccatgccaaccctcctgggggtagggtgaggaaggctatttnnnnnnnnnnnnnnnnattgcagcagcgtgggtaggtctccatatccgcaccagcagccggtcgatgtagctctccagctcctgcacatgctcgtcccgctggctcagctcccgctcccgctgcaggagcaggctatgagctcatcg

SEQ ID NO: 433553 - DNA, 1690 bp, Homo Sapiens
tttaattctttaactagtccgaccaagatgccagattatattttatgtgtcgacagaactatttgtttaaaatagcaagttcaggtgagttagtagtcatgaaaattaaaatgaaataccaattccatttcctcgtgtacctctttgcaaatgtcggacaaagcagagttttataatagtttaataacttgtgtaacaacggtggctttggtgtatctctaaagtggagtctttaaattataaaggattttgtgtgcttgaaatcattttcactcattgtcgtggctttagatgaagaattactcttctggaaggaggtttcttttgaaaagtagcctttcctctgagcatagcatacaccaaggccacaaacggaaatcactaaggccacaactactacggctgctatgatgccacttatgttgagatcatctacttgcattcgtttcccaggacacctgcgatatccaacagaattgcgggcttcacaggaatattctccagtgtccagtttggaaacagtattaaattgcagagttccagtttttgtattcattgtgtatgagctgttggtgctttgggagccaagtctgggattttctagcaaacggatgccatccttaaaccatgtgtattcaggagctggattcccttctttgtcttgacatcgtagctctaccacagttccactcagagcagaagagggtacttcacatgatggaactgctggagccactaatacttccagagtgactgtatcctcttccaggttttggccttgctcagatggggcactaacttcacaacgatatttccccgcatcacttcttgtcacatttttgatccggatattgaaatctatcatctcagctcgatttttaaaatcaccttgaagagtctgttgatagtagacaaaggagacactccgacccagtttcttccactctaatctggaggaaacagtcttctttggggttttgcaggctaaaatagcctcttggtactctactgctgtgactacttgttggtcttttggggcagaaaacccataggccttatgatagcccagggcgaccaccaggtagcgcagcagcagcaggaggaggcggtggcggctcctcctcgccatcttcccggggcggcagccggctgctctgaggaggtcgagggtcccggcggcaggagcgcaggaggccgggggcccttgaacttctggggcgggaaaggagcagagagtcgggaggggaggaagaggagggacggctctagatgggatgtcagtttccccctccccggggcgccttctcagctggctgccaagaggcgggtcctccagcccagggatgggggtctgttctgttttgggggtgtgggggtaggggctagagggcgtgaaaaccagacgaggcgtccgccgggtcctagcgagggggcagcaggaggagagcagcgcccgggaaagccccggcgggtcgtccctccgcccccacgcctccgggattgatcggctttgtgtctggtccgcgcggggctgccagctgtccccagggcgaggagctgggggcgggaggcgcgggcaggctgggggtggggggattgggtgtctcggggacggggatgtatgcgggtagggaaacgcctcctgttttgccccaactcctttcttccccatcccgggaattccggaccg

SEQ ID NO: 433554 - DNA, 340 bp, Homo Sapiens
tggggcatcgtctgtcttgccttgtcactccttgctcctctccctcctgcctcaactggggctgctggaagggggccctctggattccctttggaggcatcaggttctgtgcacaacttgtgtgtctttgggagccctgggtctttctagcaaacggatgccatccttaaaccatgtgtattcaggagctggattcccttctttgtcttgacatcgtagctctaccacagttccactcagagcagaagagggtacttcacatgatggaactgctggagccactaatacttccagagtgactgtatcctcttccaggttttggccttgctcagcctgggtc

SEQ ID NO: 433555 - DNA, 2257 bp, Homo Sapiens
  misc_feature (125)..(125): n is a, c, g, or t
  misc_feature (158)..(158): n is a, c, g, or t
ctgcaagccccagggaccgaaaagttggtgtcaaatgaattttgcttggtggatgaaatgtcaagtggaagaagcagatgagaaactcttgaagatcttggtcctgtgttttttcctgcccaccnaaaggccagggtgactgaaagccctggccccanagcaggtgctgagcaaagggaacagtgaggtgcccagctagctgcagagccaccctgtgttgacacctcggcccctgctccctcccatcccttccccctttactcatagcacttcccccattggacacgtggtgcattttgcttgtttattatgttttctctccatcagaatgaaagctcctcgagggcagggactttggtctattgtctgtatttgccggtgcctaggattgtgcctgtatgcaacaggcactcaataaatatttttgctgtagactggacaggcatgagttagattctctggggcttctgcagagactggtttgggaaagtgggtgctagggaaaagctctgctccctgcaacctccccattttaatctttcagtattgaaaagtggagaggaaccggattcagtttgctggggacagaggcagtggggtgtggaggtgctcagagcagcctttgggaaggtgtgggggaagctggattcccaactgtcagcctccaggcctgggatggacctaggatgctgagaaagggcatacactgctgagggagtcacctgccagtcaccagctcactgaggaaccagaagaatgtacagttcttggtttgaaggcacttggagaaggagaggaaggagggatgggagctgaatctcttcccgcccccatctctgccaggtcccaggccccctctgggcttctgtcccacacagacctgcctggaagccttcaaaggctgaggagccccggtcggggtgggggtccctgttctggagccatgggtttggagtgccagctccagcagaggcatctgagcagcggcctgaggtgctgtgtctgacatgtttgttggccatggaaggcctcgggccgtcctgagctcagatcttggctgccggctgctggggcggctgcttctgcagcagggccagggtgtcccgcttctcaatggagcgcagctgcttcttctttgcccgcttgagcttggcggggtttcggatcacttggacgacctctgccttccgctcattctccaggcggcgtttcaggttctcagcccggcgctgtttcttctcctggcggcgcctctccttctcctcctccaggtgacgggcaaagtccttggccagcttcctctcctgtcgttccttcatcttccgctgccacgatgtgcgcaggggcttgtcctgaagcatctgggagaatcttttcttggagcggtccttccacactcgccccgatttgggcttccccttcgggattacaggaagctcctctttattcaacttcttggacgctggggcctgggatgaagaaccttttcgcttctttgccccgaagccgcctgtcaccgtctccccagctggaggtggcttgctcggctcatgctgaccccggggggagccaggtgccctgggtgtcagctccagtagtggctgagagggctccggaccgggagcttgctgaccggggtaaggctctggtgatcctgggactggcggtagctgatgctggggggcccccggggtcagctcctccttattctgggccaactccgaggccagtactccctggtcctgagaacactttggtgcctcctcacttggcttcggctgacatcgtggggattcaggactgtactctggctgtctttgaggcgactccaggtgtaggtcttgctgacgctggggggacgctgcgcctggctctggctgcccttggggtgactccaagcctgcaccctgctgcagacggggtgatcctgggcttgtcttcggcggcctttcgggggaccccaggccagcccgctgcacactcggaggagacccgggctccctcgtttcttctgggttcgactcgaactccacaagggcccgtctcgtccgcgaaactgaggtgaggctctcgggggattcgggccttaggcctcccagccgtcggctgcgccttaacggtgtatccatggctcagccggtaagtttccacacccctgcgcacgtgcagcccccgccgaaaccggcgccttcctatgacgtcaggagtcgccgcgtccgtgacgcacaggaggggggctgttgctgaggcggccatg

SEQ ID NO: 433556 - DNA, 1748 bp, Homo Sapiens
  misc_feature (1336)..(1336): n is a, c, g, or t
  misc_feature (1358)..(1358): n is a, c, g, or t
  misc_feature (1696)..(1696): n is a, c, g, or t
cccttttttggtaattaacttgcctgatctcccgtgaacctccaagctgcatgttcggttatcttagagcccatggagatttcagctattccttgattaagtactagatgccttcagagcaaatccaccatctcttttgcttcgtccacattcacacctgtagctctaccttagcttttacaagcagtcacagggcagggtgagctggtatggcagggtgccatacacgggtgaccacagtcagctctggggatggttcagggctgcttgcagggctcatccacaagacactcccctttgtgacagagtctctgacatttgtgcatcccacatggtagcgtggcactgcagggtaatccgcaagagatatcaaccaggtgacaggggatgttgctccgaaactcatgcttgcccatgcaccacttctgagttaggaaagtgcaagggggacacttctcctcactatgacaagaatgatatactggatgttcacactcatggactctagcgcaggtttgggtacattcagggggcctagtaccacagggaactggagggtaaatcactgatgcaccacaatggcaggttaattcatcaaaactggcttgccagcatgtctggcagtttccacgatgacaaggttcttcacacctatgaaggccacaacggagtttcctccgcacaaatcaaaggacacttgtgctccttatccacacagcatatctcattacatttatgccgtccacacaaccgtttcttgttacaccgcttgtcacacataaatgtagcatcttcacttttgagactggtacatggaagctcctttgttctgaaagagcatctgcaggaaataactgatgtgcgagagcatggtccacagtctccttcatggcagagcttttcacaggtatgaatgaaatctaaggaaccacaaggcagaggcttgccgcacacttttccacatgaaggcacagggtccatgcatgttttccgactactacttccaagttctagcaattggctgagaggagtttggccacaggggcaacagcgcaccagctgggggagccgtgggcattgctggcagggctgagggtggcacacttgcgaacatgtatggttaccgcatttcaagtccttgccacatatctttaaacagctgaaatccccaaatccatcagactttcctacatcggttccacataacacatctcgggaggtgctgccgcaatagcatacctggttcaaaatgatctggcaaggctggcactgacccccatggcacagctcagcacactggtgctgaccacagttcaaaatattcctcacatgggtnagaaacagtggactgaaaacancctgaccacagcgaactgtgtgcctggtccgtccacattccacatgtttttgtcataaaaggcagggcagggtgggcagggtcctggatggcagagaaggttaacaggaatgtgggcagtcctggccaggctgtttctttctacaaacctcaccacagctatgtggaatttcatttctgctccactcaggattctttaccttgccacagaaacaagtgtaggtattaggaacatgtgcagaaacattctgacaggcagggcacctccaaccactctggccatctgcttgagatgctggagaccttgcccatttctttatgcagttcaaatgaaacacntggtaacagctctgacaactccacactggggccgtgacacgaaccaattcac

SEQ ID NO: 433557 - DNA, 1268 bp, Homo Sapiens
tatttacacgggggttatatgggtctgccgccctctctttgagccggaagaagaggtgtttctccccttacagagtgggggttcgccccctcccccaagaatttttttcccccttgggtgttgtccccaaggggttgcctgaaggggcccttggggggggttgttccccgggccattttttgccatttggaagggaggggaaggccgggggccttcccaagcggccaaggttggtttccaggccgttgggaagaaggggggtccatgtttcaaatccaccaggctgaagtgtcctggcttggtctgggttaattgcaatcctccagcttctctccacttggaagtgtgcgggacgggggtcccattgatctccaggatgcggtccccagggtggatggcgtttcgattgttgggactgatgtgcatgccggttgacctctgttcacttgcacaggtggtggcgtatgtgtggagcaggcactcttccacggacacgggagtaagccccgcagctgccttcaagtggtgtccggcatggagatgagcgtgacagagtagggcagctgctcctgggctagactctgtggagagtctcctcgtacatgggtcgccagcagcacctcattgtggcacttcccacagtagagggtggcatgctgcaccagtgcatatgcatccccatcctcaatgatcaccttgcagctcatacaggcaaagcactctgggtggtacttgaactccccagccaccatgaaaggccctgtcatcagcagggagcacccatgacagaactccccgaacttcccccagtagtccttggggcagtagagcttcccatccttctcatagtaccagttggtgagggaatcctggcattctgaacaccgaaacaggtctctggaggtgaagtaagccgggactgacaagtaactccccatcttcttcccacaccagatagacaggctcagctgcaaatccgtctgtgactgcctcaggccggctgtagatggccaccatgacaggcccggggctcccggcacctctggctgcaggcaggctgccctgagctcacctctccctccggagcagctgcgggagcctgaggactccaggccacttggcccccagcagattcccacaggggctcatggctgggatggctcctccctagttctcagaagctcaggcggcccctctggactccgagaaaacgacctctctgtggaggctacacacacactggcattcttgagcaggggccggtgact

SEQ ID NO: 433558 - DNA, 728 bp, Homo Sapiens
  misc_feature (12)..(12): n is a, c, g, or t
  misc_feature (32)..(32): n is a, c, g, or t
  misc_feature (61)..(61): n is a, c, g, or t
  misc_feature (69)..(69): n is a, c, g, or t
  misc_feature (78)..(78): n is a, c, g, or t
  misc_feature (96)..(96): n is a, c, g, or t
  misc_feature (121)..(121): n is a, c, g, or t
aatatgccggantccacaagggggaaactccnaaaaggaacctggtaagcggtgaacggtncaacaaangaactaccnaccaaacggccgtaaaanaacctaattgcctgctggaaatcanggaatttggggttaaaggcttccatatgcttggcttattgtgaccccaaatcccaaatgatgtttgaaaatacatgtccttaagagtagcctgacttttccagtcatcacctgcttcagttatggctgatgtagccaactgaataaccagttcaggcaaaccaatgacatctagtagtcgtaaaaccttgtcataatactgcagcctgggggtagacacgatctccccatcctctgagcgaatcaagcgatccaagaattcctctttgcctacttcagatgctgcctgacaaaaacattccagagccttctgtccttctcctgtaactaggtaacaccttcccagcataaatcgacaggaaccaacattgacttgacaccagggatgtagcagttgaatataatcctgcaattgtacatattggcaatttcccatcaaacattctagaaagagacaaccaggattgctaggccataaaagctgcaataaataactggtaattgcagtaatcatttcaggccaattcaatccagtttggctcagaggtgcctttggctgagagaagaggtgagatataatgtgttttcttgcaacttcttggaagaac

SEQ ID NO: 433559 - DNA, 2093 bp, Homo Sapiens
ttttttttgggattatattgggatttattaaatttataaattaattccaggaacgcttgtttccttaaatacacagctgcttctggctcacgctcatcctgagggagtagatgttggtaaaccagcctcatgtgcagagggtctcctgctggatccccaactggagccatccctgggcctagacttctgtctccctcacttctaaatgagtgctcagtgatgtgaagcacacaggagtccctcagggcaaaagtggctatgcctggtgctaccctccccatgaccccaaaaacgagagccatgagacaatgccaccttagccatttcccttgagagaaatgaaggaggaacagacataaggcagagccacctgaggtttttagaatctatatctcacatactgaactagtgtttaatggctctgagaataaaaccaaaccaaatcttccttccacttgagtttccaacataaggacaccttactctctgcacttctccttgaccaggaggcagcactcggggaagcagcaccaaggcaggcatcgtcattctgcatatgcaggccttgactggcagcagagctcactgtcctgatgggtacgtcagtagcacacagaaggtaaggctcaccgagcacaggccatgaatctcctctgctcgactggatgttctcatactcttggctgggaacatgacctctgcctcgagaccaaccctcgcaagggctaaggggcagggtgtggtgtgggcccactgtggccatggggaggccttggagggtgaagccaggcaggtggcagaggaacaggtggactgagtggtcctgaggagcaggcagacgggaccagggccaacttctcacccctccaggatgaagggccgaatcagctctgggttcaacagcgactcctcaagaggccggtccacgtggaagtcatggatgtgggggggccctggatgggccttgggggcaggtccccctagacgctgaggaatcggcagctcagatggatgggcaggcaggggagctgtgaagaagtactgatggaggagagccttggaagctgcgatgcgctggtgaggagggtagagaaggaattgacccagcagatccaatgccctggggagagacgtcaggcagcacctcctccaggggcatgggcacctgctccttaaaggagatcttgttgtagtccggcagctcagtgagctccggccagacttgagggtttggggtgcccaagatgcgaagcacatagcaaagctgttcaatatcgttcttgcccgggaaaaggggggacccattcaacagctcccccatgatgcagcccacagacctggtggccacctggtgtgtgtagaggcggctgccgtctggggaaaagactcgagccaggccaaagtccgctatcttgagctggcctgaggcgctgatgagcaggttggcaggtttcaggtcccgatgtacaatgttgttggcatggcagaaggcgacacccttgagcagcatctgcaggtagctcttgacctgtgcctgggctagtggcctctgggcatggcgcaccacctcggccagatccgacagcatgaactcaaaggccagcacaaagcctccaccgtgtgggaacacagccttcagttgtaccacatactgattgtcctccatctcctgcagagccttaatctcccgcagggcctggttagggaagccgtcttccaaccgccttagggccaccttcttgagggcaactatctcgccagtctccacgtgcttggccttgaagacgatgccgtgggcgccctccccgatgcggcccaggatgcagtactggtccatcccgctgcagtcgtgggcctgtgcccctgtgcccctgaacttccaaactccacttctcctccaccccacgctgatctgagctcgcacgctgttgcctagcaacagcgcggcagctgaccactggggtggttcctgtaggccacgtcaccaggagaacggaagctgcgtcgagtcaggggtgacagctccgggccccactgcgccttttcctagccctccgctgtcacgcagcagcaagcttaatcccgcataaaaa

SEQ ID NO: 433560 - DNA, 2291 bp, Homo Sapiens
  misc_feature (29)..(29): n is a, c, g, or t
  misc_feature (31)..(31): n is a, c, g, or t
  misc_feature (87)..(87): n is a, c, g, or t
ctgaggtcctggccctttcccccaaccangntggcttcctccccatgacccaagttctttccaaggctacacagccccttccctctncaggtccccggtgatggagaccccagcggcacaaacccaggcccagcctcctactgggtttggctcagcaggggcggggccggagcaggagggggaagagtcacttgaggcctacaggggtgtggggagaagcaccaggcctgggggtgaatggccatgggcaacaaagggtgtccttggccaccaatgcctccctccaggctggacagtgaccggtccctctgccccttcctctccccagcccctttgtttctaggggctcccccagttttcaggtggggggaaattggtccacatcccccatctcgttgtaggtctggtcacccatggtgaaggtgagcttgtagcggaggcgaaccttctccttctgggggttggcaagcagcaggacctgggtgattgctgaggggtggacgatggggttaaaagctggcagctccgtgcccgagggtggctgcagcttcaccttcataaccttggggacagctgactggaacacgatgttgcggatgggctggggggcggtgctcagcatggaaaccaccaccaccagcacgtcggagcgccctggcagtgggtcccgggcaaaatggaagaggatgcggaagccgtgctggtcatacacagtcacgggcaggatgttgctgggtttgatggactccaggggcacagtgatgctggccagtgagagctcggttggtacgggctgctgcggaggcctggggggctctggggacacggtgtggagaaggctggtggcgctggagctgggggagctgcagctgctgctcttattctgcaggtcccggagtgtgagccggggggttggctgctgcttctcccaccgcacttgctgggattccgggggcagcgactgctgcaggagggtcttccccaggaggtctaggtcgtccagaccgctgcttgctggcagggatgtctgcgctgggggtcggctttccatactgggggcctgggccagagcaggggctgggggctcagtggcatccgacgactggaagctgttccatccggtaccatccaggcttgggcctgaagggggtgtggggtcactgaggcccagagacatgagctcgtcgtcaagcagggaaactgaggcactgggctgctcagggctggcctgctcgccagggcgggtgggcatagctgggtaggtggtgcccgcaggcgggagatccaggcctgagagatccagcagggccgaggtgctcccagggatggagccggctgtggcatcaccgttgacctcctcaccccgcaccagctgcttatacaggttgatcacctgggtgaggttgtcattggcctgcaggatctccgctaaggcctcatcattgtcctctgtgtcactcgccagtcggaagagcgtgggccgcatccgctcacagcgctggtacagttccttcatgaggtcctcgctgctgccagctgctgcgccgccctggctgtggctcatcaccatctccgtgagcagtttcacattgttgttcacctcctcgatggcattcaccctcttcgagatcttctccatccgcttctggtcctcctgcaccatctctttgatgagcttattggctgcgcggaggtcttcgggatgggagctcttcagcaggcgggccagcatcttggatttctcctcatcttcaaagatcacattcttcggccgtggaggaggaaggggaaaggtagtgtcatctggaagcttggggtcggactttacaatcccctgcttctttagcatctggtaggcctctgcgattttcacctcctcgggcaggcccactgtccagctgtagaggagctccaagatcttgttcttcaccttctccgatgtccgagagcccagatacttgggagacacgaccttgatgagctcgttgagaaagcggaacttgcccacttcgtcgtggaaccgcttgccgcagctcttcatgcatgtttccagcaccgtcaaggcctggatcgcctcccactcctgtggggactggatcttgtgggccagcagccgggtggcgagtggaggcccctcaaagtcctcgttgagctgctcgcagaagccgttgatgctggcccagtcgagctccttgttcagggggttcgtggctctattgattcgcgcctccagagtctccggctccatcgcgggctccatccgccaccggcccccagcctcaccacccgct

SEQ ID NO: 433561 - DNA, 1245 bp, Homo Sapiens
gtttgtgttctggtgtgttccaggtaaacgacgttttattttcataaatactcctgctctcactcacacactgaccccacttctgaccacggacagatggatggacagacgtaagacacccataggaggccccagcagaggccaatgaatgaaggagacacaccgagaactctaggtgccccacagcccctcgctggggccatgggcctctggcattacccttgagcccccacagtccctcagggggcccaatggcaaagggaaacccccaggagtacgggccaggtgaggttcccccagcctggccccctgaggctgtgaccacagggccaatccggaagaaaagcagagtcaaaccacacaccagagtgcaaatagctgggggtgtaggcgtcaccccccagtcactgggttcctatggaggaggcctaagctggtccccagctccagcatggcccccgagttatggctgggccttcccataaggcataagagacaggtggggaagaccccaccccagctggggttggggctgggcctgaggtcctggcccttccccaacagctgtgcttcctccccatgacccaagttcttccaaggctacacagcccctccctctccaggtcccggtgatggagaccccagcggcacaaacccaggcccagcctcctactgggtttggctcagcaggggcggggccggagcaggagggggaagagtcacttgaggcctacaggggtgtggggagaagcaccaggcctgggggtgaatggccatgggcaacaaagggtgtccttggccaccaatgcctccctccaggctggacagtgaccggtccctctgccccttcctctccccagcccctctgttctagaggctaccccaggtttcaggtggggggaactggtccacatcccccatctcgttgtaggtctggtcacccatggtgaaggtgagcttgtagcggaggcgaaccttctccttctgggggttggcaagcagcaggacctgggtgattgctgaggggtggacgatggggttaaaagctggcagctccgtgcccgagggtggctgcagcttcaccttcataaccttggggacagctgactggaacacgatgttgcggatgggctggggggcggtgctcatgcatggaaaccaccaccaccagcacgtcggagcgcctggcagtgggtccgacgcgtggtcgacgatatcccgaactccggccgtaccagacgcttt

SEQ ID NO: 433562 - DNA, 1069 bp, Homo Sapiens
  misc_feature (82)..(93): n is a, c, g, or t
gaaacacatgttgtcgaggacgtgggggcacgaggggtgcacgacaggagtgtgaagggggtgagggagatcgcatagatannnnnnnnnnnnaggcgtaaaacagagcggggggcgcggggcacggtgataagagccggttccgcgggggggtgcgccaaatggagggcagtgcaggcttttggaggattttgccccaaccagttggggtgctgcggcgccatttttttaaggagcttattggctgaacggaggttcttcgggatgggagcttttcagcaggcgggcccaacatcttggagtttctcggtcatcttcaaaggtccacattcctatttctttagcatctggtaggcctctgcgattttcacctcctcgggcaggcccactgtccagctgtagaggagctccaagatcttgttcttcaccttctccgatgtcggagaggcccagatacttgggagacacgaccttgatgagctcgttgagaaagcgggaacttgcccacttcgtcgtggaaccgcttgccgcagctcttcatgcatgtttccagcaccttggtgtcgtcacatggcgggggacggatggtggcctctccccttctcaccgtcaaggcctggatcgcctcccactcctgtggggactggatcttgtgggccagcagccgggtggcgagtggaggcccctcaaagtcctcgttgagctgctcgcagaagccgttgatgctggcccagtcgagctccttgttcagggggttcgtggctctatcatcacaccaggttcagaaagccttcattcccttgggagtggctcacggtgtccccttctctaatcctctactcctgcccagggtagcagtgctgggtcagttctcttttgtgtcccccagcctgctacggcactgcatcccagccactcatgtccacacctgtctccctcgccgtcccaggggtcatggcccagggatccgacaggtgggcggcgcccgctcccaccgctggaccgcgccggggccggggtcctccatcgctccagggtctgaggggccgactgagatcccgggaattcc

SEQ ID NO: 433563 - DNA, 829 bp, Homo Sapiens
  misc_feature (131)..(131): n is a, c, g, or t
atgtgtgatgctgttaataatttaaaatgcagagccaaagccactgagcagcagctgacatggttgctggtttgtgtgtgaaaaacattttccccctcttctttccttaacctccttgttgcttaggatgnaggagactctgtaatttaaagcagaggacgagaggaggaagaaacttccatgttaacatggcctactctcactcctttctaaacgagccacttttggcgtcagaagttgactggagagagataaacaaactcccagtcaaagcccctaaagcgacagtgcccagagttcttttattttttgctgcaaccaacgtaaacctgtaaaagaccaacagtgaagattagtgtattagtgaatgcatggaggccaatgctgccctaatgagacgtgataaaaagtccatcactcctctaagccaaaaggaaacaaaataaaaatgaccctttttactgtacaagggaagcctgtcttggtgtgtttgttgcttgactatcccaattcttgagtcctgggaggggtctgggaattgggaccttagcacatttggggaaaggaggggaatagagggaagagaaatcaaaggggctctcgcaaagttctggctaagaaggagagattggaagaaaagcaaggtcctgaccccccccagatccccactcacccattgcatgtggcattccccactactggccggtgcttagaggcccataaaacctctcttcacctaatccacctggcagagccctcagagatgacgtcagccaacccagctggactggccttacttctgcctttttcacctgtatgttaaaaaaaa

SEQ ID NO: 433564 - DNA, 1448 bp, Homo Sapiens
tcctcagcttccacttgagccaggcgcgctgcaagccttcccaggcgctcctgcaacaacccgccgctcgtcttgcagcttctggacggtgtttcagggctgcagccctcaccctcctgcccgctgccgcagcacctcccgtagctgttgtagctggccctcggcctccacccgctgcagttccaggtcagccacctcgcctcgcaacgtctgcacctgctcgcccagggagctgctctgcttccgtgcctcagataatgcctgccgggcggcatccagccgttcctggagtacttggcggtcatgttcacaggcggtcagagccttctgcagatgcaggttcttgtcccgggtgctgttgaggctggcactgctctgggccagggcctctgtcaggccccgcaccttgtcccgcagggccccctcgctttcctccaccttggccagggccccattcagccgctccacggtcagctgcagggtccctgccttcacctcgctgtcggccacctgtctctgcagggaatccacccgatcctggagggcctgggcttgggcctcgcggtcactgaggcccaggcggctgcgctgcagctccccctcaagcgagcgccgctgcagctccagcttgacagtgcggctctcggaggcgtccagaacctccttcaggcgccgcttgtcgccctccagctttgtctcattggccttcatcttgctgatcttctcctggctggcccggagctcgctctcggtggcctgcaggctcctctccagtgtggccacctggtccagcgtggcccggcgctcccgctcactgcgccgcacactctcctcctgcagcgccagctccgcctggaccccgctcagccgcccatccacactgcgccgggcttcctcactctcagccaccgccttctgcagctgcctggccctcgaggttgcgctgtccctctcagcctccatctcggccagctggcgattcagggcactggtctgggtccgaagttcgtcccgttctctctgggcactccgcagctcttgcaggaattcccggagggccccgcgcactgcctccgggtccaggtctggagaggctggggaggtggcaggtcctggagatggtggctgggacccagggctgcattcctaaggctgctggaggactgttgagccccttcccccagcttccttcttgcgggtgcagtcccgggcaggggaaccgggcactggccgcggggctgggctgggcgcgcgaccgaggccgaggccccggcgcagagccgagcgcaggccacccagctgggcctccgccagcgcgccgctgcacactccacgcgggccagctcaggcctccaggccttgtgcccggccctcggctgcgctcagccgcaggcccagctctgcagcctcggcccgcgccgcctccagcttcagctccaggccgcggg

SEQ ID NO: 433565 - DNA, 969 bp, Homo Sapiens
aactgaagttgggccccccaggctcggagttctgggaaagctgcttttcctgaaatccccgcaggcaacccgcagccaggtgccccctttttctttgaagggtgaaggcttctggggccctgaggagcagcggatgggggccatttgctgggtccctgagggcccgccccaaggcctgggggttcgggctccccatccccaacacgggtccccatcccccacttgacagcagccggcgctcagggtggcccttggcaggcaccgtggtctggcggaggcccttggtgggtctcgtgtctgaagcatggccaccagcttggcctggggaatgcggtggggcggaggctgtcgtgccagaagaggtgacaatggacctagatttcaggctgggggccttgtctctctctccggccttagtgatgcctcttcgaactcgtacagccttctccagtgcctgggtcagaaactccaactctttgaggtcttgtggactgggtgtgcatgctggaagggggtcctctccattagtttctggccctggaggtggcttcaaagcccgggtcccagttggttccctgcaaagacacgggcagccatcgcacggccaggaggcagggcccagcccaaacagacccgagggggccgccgggccccgcggcaggcccccagctcagagcctgcagggtaaggagggtggcactgacaacccacagctccgaagtgggcggctgcgcccggtctcccagccctgggcgctcggggcgggactctgagggcccgagggaggtctggccagtgggtccggggtccgcgtaccaggcatgcagcagccgacggcaaacgcgcaggctctgctccaattgcaattgtcgctgtgcgcaggcgtccagggcgccctgcagctcggccaccagccggcgcgagcagcccgccggcagcatgaaggcggcggcgtctccttgcaatttt

SEQ ID NO: 433566 - DNA, 1488 bp, Homo Sapiens
  misc_feature (85)..(141): n is a, c, g, or t
gcaaggggcccgcgccccctgcgggctgggtgacaacagctttcccagggggggaagggagtttcaggcccttcagggacccttnnnnnnnnnnnnnnnnnnnnnnnnnnnnnnnnnnnnnnnnnnnnnnnnnnnnnnnnncaattctggggaccagggtttgggggccccccagggtttcagccctcctcctcctttgggaggctcccaggctcccttcttgccgtcccaggccccttctgacccatgcacttcccaacccacacacacagaccccaggcttgcccccatcctcctgggtcctggggggtggagcagtcaagcccctaccctcgggtcctcaaggctgcggacctctgttgcacccccacctcctcttccagaagcaccttttccaagtggatctgctggtccagcacagccactcgcagcttgagggccgccagggtctgcagctcctgggtgctggagtagacaagcagctgggggctccatgcaggctccgctctacccccacaggacggcgaggctccggggggcctccccacaggacatggtcttggtggctgttccgccaccgctgcacgcagctcctgcagcctgtgcagacactggcccacccatggcctggcagcccctccagcgtgagccaggcagcggtactcctgcatccagtccatggggggctgctgagagctcctccctcatgggcagtctcagcagcgagcaggccttccgcaggcgcgccgcctccgcctccacctccacagcactgagcctgggctggggcccgcctgaagctgtctgcatgttctggaggaactgggttttggcagcggcggcatccgtggaatcactggtctgtgtggaactgagctgggcccacaggctcgagttctgggaagctgctttcctgaatgccgcaggcagccgcagcaggtgccccttctccttgagtgtgaaggcttctggggcctgaggagcagcggatggggccatttgctggtccctgaggcccgccccaggcctgggggttcgggctcccatcccaacacgggtcccatcccccactgacagcagccggcgctcagggtggcccttggcaggcaccgtggtctggcggaggcccttggtgggtctcgtgtctgaagcatggccaccagcttggcctggggaatgcggtggggcggaggctgtcgtgccagaagaggtgacaatggacctagatttcaggctgggggccttgtctctctctccggccttagtgatgcctcttcgaactcgtacagccttctccagtgcctgggtcagaaactccaactctttgaggtcttgtggactgggtgtgcatgctggaagggggtcctctccattagtttctggccctggaggtggcttcaaagcccgggtcccagttggttcccggcgcgagcagcccgccggcagcatgaaggcggcggcgtctccttgcaatttgccgcctctgaa

SEQ ID NO: 433567 - DNA, 899 bp, Homo Sapiens
  misc_feature (820)..(821): n is a, c, g, or t
  misc_feature (847)..(847): n is a, c, g, or t
  misc_feature (855)..(855): n is a, c, g, or t
agcggagaggcggcaaattgcaaggagacgccgccgccttcatgctgccggcgggctgctcgcgccggctggtggccgagctgcagggcgccctggacgcctgcgcacagcgacaattgcaattggagcagagcctgcgcgtttgccgtcggctgctgcatgcctgggaaccaactgggacccgggctttgaagccacctccagggccagaaactaatggagaggacccccttccagcatgcacacccagtccacaagacctcaaagagttggagtttctgacccaggcactggagaaggctgtacgagttcgaagaggcatcactaaggccggagagagagacaaggcccccagcctgaaatctaggtccattgtcacctcttctggcacgacagcctccgccccaccgcattccccaggccaagctggtggccatgcttcagacacgagacccaccaagggcctccgccagaccacggtgcctgccaagggccaccctgagcgccggctgctgtcagtgggggatgggacccgtgttgggatgggagcccgaacccccaggcctggggcgggcctcagggaccagcaaatggccccatccgctgctcctcaggccccagaagccttcacactcaaggagaaggggcacctgctgcggctgcctgcggcattcaggaaagcagcttcccagaactcgagcctgtgggcccagctacagttccacacagaccagtgaattcacggatgccgccgctgccaaaacccagttccctcagaacatgcagacagcttcaggcggggccccagccccaggctcanntgctgtgggaaggtggaaggccgaangcccgggnccccctgccggaaggccctgcctcgccttgctgaggactggcgc

SEQ ID NO: 433568 - DNA, 1077 bp, Homo Sapiens
  misc_feature (13)..(13): n is a, c, g, or t
  misc_feature (15)..(15): n is a, c, g, or t
  misc_feature (28)..(28): n is a, c, g, or t
  misc_feature (42)..(42): n is a, c, g, or t
  misc_feature (51)..(53): n is a, c, g, or t
  misc_feature (56)..(56): n is a, c, g, or t
  misc_feature (66)..(66): n is a, c, g, or t
  misc_feature (70)..(70): n is a, c, g, or t
  misc_feature (74)..(74): n is a, c, g, or t
  misc_feature (77)..(77): n is a, c, g, or t
  misc_feature (80)..(81): n is a, c, g, or t
  misc_feature (102)..(102): n is a, c, g, or t
  misc_feature (108)..(108): n is a, c, g, or t
  misc_feature (137)..(137): n is a, c, g, or t
  misc_feature (220)..(220): n is a, c, g, or t
  misc_feature (244)..(244): n is a, c, g, or t
ccccaaaactgtntnaacgtatttctcntcccgcccgggtcngggagcggnnnggngcggactttnagtngacncgnggnnaccgcttatagggtcataggngggctntctcggcgggcatagctgggtggctgatnttgcgacccctcagccgcttctcccgaaactcttctccgctggcgtcgagagcggcgtcccgagtacatggccttctcctccntcaagagcccttggcatgcttganggcctctgcctcctccttgtctttccggagcatcctgacgaagtcaccgtcggccatgccataagtcgtggcctgtttgttgagatctgcccacctgctcctggttcaattcatccacgtccacctccacgtcgatgtcggggatgacctcatcttcgtccgagttgctctcctcctcggccgctgactcctcctcctctggcttttctgccgccttctctacctcggccaccgtgctgtcctcgtaggtataaccgatggaagccttcttctctgccagcttcttcttctcatcttcgctgggtctctggaggcctccgtacaactcatcaatgtagatctggtacaggcactgctcctctgagatgccggcaaagtcgttctgcaccaggcctctgtagcgctcgtagttacacttccgttcgtccgactcctgttctggggagatggtggtgagcagagggggggtgtagtcggggatgtggtccaggtgggcacggacatcgaatcggtcaatcatgttgttggtgtccccctgccagggcatcatattaacagggctctcagcggccagggcgactgcagaatccaggtgcaccttgcaagctcggccatgtacctgcaggaactgggctgggtccttcttgatcttttcataatactcccgtctccgctccgccctcttcttgtagtcgaccatcatgcctcgaagcttccgctcatgcttccgagcctcgtgccacattgtggtgaggccaagcctggggcctcaaccggctggtcgccgcctcccaccgctgcgctcgcgcgcggcccgcaccggaagcggaaat

SEQ ID NO: 433569 - DNA, 1473 bp, Homo Sapiens
  misc_feature (56)..(89): n is a, c, g, or t
  misc_feature (200)..(200): n is a, c, g, or t
  misc_feature (976)..(999): n is a, c, g, or t
  misc_feature (1446)..(1446): n is a, c, g, or t
  misc_feature (1451)..(1451): n is a, c, g, or t
aataacttttgactttatttcactagagataaaaccagcagcatcacagcttgagnnnnnnnnnnnnnnnnnnnnnnnnnnnnnnnnnnactcttctgcctaatgtcggtaatgggggcttcgggatcgggaccttgagcgccttcgagaagagctgtattctcgactgtatcggggggagggtgagcggctctgccggnctgtactggcgttcccactcttctctctccttctctcggcgttcccgctccttcatgcggatcttgcgggccatggctcgaagctcgtcttcccgctcctgccgctcatgctcctgctggatcatcttttcttgtgccgccttcttatccgccttgaactgcctgttcagcgccttctgcatcctcagtttcagcttctcctgaggcgtcagcttgggtttggcagctcctgtctctttaccagcggcaggttcggtctttttcagcttctcgcccacagcaggggacgcggccggcctggtcagcttctctcttgcgggtgatggcgaggggctgtggcctgcggctgcggctgcgggtgcggctctggctggggctggggctatggctgcgggtgcgagtcaggctgcgactgcgggacgggctgagggaccagctgctgcggctgcggctactgctgtggtgcctgaggccccggccgccccgcctgtagcggtcccctgagtgggagcggctcctgcttctgcgccggggcccgtaaccaccacgccgggcgggcgagcgggagtaccggtgtccgtctcgggagcccccacctgagtgccgccggccacggctacgggaccgggaatagcgccgggagcgggagcgggagcgggaccaggagcgggaccgggagcgggcgtggcggccggaacggtagtagcccccaccacggcgagagcgggagctggagcgagagctggagcgggagctggaggtcctcgaggcagaannnnnnnnnnnnnnnnnnnnnnnncggcggcgggcgctggcattacgtcccggggcggggccgccaggctggggaggtgcggggggcttccctgtggtgactcctgatgctgctgcggcagcagcggctgcggctgcctcctcatcgctgcccccaaaactggtgatgaacgtgatcttctcctcgcggcccggggtcggggagcgggagcgggagcgggactctgagctggactccgagggtgaccgcttataggggtcataggtggggctgtctcggcgggcatagctgggtgggctgatcttgcgacccctcagccgcttctcccgaaactctctccgctggcgtcgagagcggcgtcccgagtacatggccttctcctcctcaagagccttggcatgcttgatggcctctgcctgttcagcgccttctgcatcctcagtttcagcttctcctgaggcgtcagcttgngctgnggaggggggagaagaggcggga

SEQ ID NO: 433570 - DNA, 2440 bp, Homo Sapiens
  misc_feature (318)..(318): n is a, c, g, or t
  misc_feature (717)..(746): n is a, c, g, or t
  misc_feature (1094)..(1131): n is a, c, g, or t
  misc_feature (1326)..(1326): n is a, c, g, or t
  misc_feature (1337)..(1345): n is a, c, g, or t
  misc_feature (2418)..(2418): n is a, c, g, or t
  misc_feature (2428)..(2428): n is a, c, g, or t
gacagggacacagtgggaggggtggccccctggggccccagaaagggggggcctgacacccaagggcgcgccttttttgcccaaactttttgtgggaggcccgtgagcacaggttggtttcaggttcacaaaggggtttgggggatcggggcacagcgcccacaaaagccgggcgcctctattctggggcccttcaatgaaagcatggcccggtgagtcaaccacttgagaccgcaaaactgaaccaaccaggccagggggaatggaacgtgggattgggaggcaaaaggctggaggagggggggctggcccccaacngggaagaaccccattccttgcagcttccggtggctgcaacatcttggcccctgcagatcttttcagaggtccggcacaatgactccacagagggctgacgggttccatgatgcttaagaggttaggaagcttgtaggaggcacgcctgacttgccactccctccacgcaggcctgactatctgaggaccaattcacacacctggagccccgagtagcagcctgaaggaatgctaaggaggtaggtgagggagtggggggcaggcccttgcccccatttcttgattgtataacacttcattaaaataaaatcacgcagtgccatcttttattagacattttaataccatatcaaaacaccttgactaatgaagaaagcttttctcccaagctttgaacannnnnnnnnnnnnnnnnnnnnnnnnnnnnngtattttaatatataaatacagaaacctatcttgcatgggctgatgccacgtgtgaacatcaatggctaaaatgttctcaaacatagtgcctgaaaacaggggtagctgtacatatttcttagtaagtctttttttgtttaagttttctgaaaaaataaatccacgagggcctaagaataatgttcaggcatttttgcaggacacttgtgattgttaaatcctctgaactgaccggaaccaggaggaaagaagggaaaagagatgggatcagtaggaagaaagttctcaatgggttgttttttggcaatgaagtcaagatattagggtctcaaggggagaaacgagcnnnnnnnnnnnnnnnnnnnnnnnnnnnnnnnnnnnnnnaaacccaaagtagagaagttggtggtggagagggccagttggggcaggggaagagaccgtgtgctcgcccgccgtcagaaggctggcagcgaggccttagctgtgttcgtctgtcactgagtgggttatggctgggcagcaaacagcaagctgtaaacatcacgagggaaaacaccagtcgacactagacttttnttttatataannnnnnnnngtaaacactttaaagacagacccacaatgcctttcaaagatgaaaaagaaaatgccctttccctcctgggctgaggggtgaggggaaggatagcagttgattcattcttctctcaaacttgctctcatccaatttggtgtcctcagggaggaagggagaaccatgatctggaagtcagtgcagaaggggtgccctgttcccgctggtgtcccaagctcagctctgccccagggtccggtgagcctcctccctggagcaggggcgctctgtccctttgagaggagtcagcaagcaagcccgcaggtcagtccgcagggtgttccggacaagatctgttcacttcaaaccacgagtctatgcagcttttgtgatagatgcacaggcagggcagcctggctatcgtgtccccctgcagcagctcctccaggcagatcacacactcacccgcgtctttagtcagcacatcatcgttgtaggagaggcgaggtttgctcaaacacattataaagtgcatttccatctcgtcagaagccacagacttggagcaaatggggcacttgaaaccactatgcgagctgaaccacctgggtgcgatgtgcagaggtagagcatccgccagcgaggctcgggagcccaggtacagcatcccgtctctatggtgaccgccgcccgtctcctggtaaccattgccatgggcataggtggagtcggacgcagaccctccgccgccgggcgccctctcggagtcgccggtgccccgggaggcgggggtgtagaggccaaagggcacccccccggccgtgctggggtccatgcccatgcctgccaccgagctgaccgagcggctgcgcagccccatggccccgccgcccgtccggtagtgcccgaaatggggcgcccctcccggcggcggcacggcgctgtcatcggtggagacccccgggaaggggccccgggagcgggccgccgtgctctgcttgccccccatgctcgcccgggccccggtggggcgggaacctggaggccgagaccctcccccacttctcagcagcagggggagggctgggcgagcntaaagggggngggagtcaaaaa

SEQ ID NO: 433571 - DNA, 1023 bp, Homo Sapiens
  misc_feature (765)..(765): n is a, c, g, or t
  misc_feature (924)..(924): n is a, c, g, or t
  misc_feature (940)..(940): n is a, c, g, or t
  misc_feature (957)..(957): n is a, c, g, or t
  misc_feature (985)..(985): n is a, c, g, or t
  misc_feature (1011)..(1011): n is a, c, g, or t
tggtattaaaatgtctaataaaagatggcactgcgtgattttattttaatgaagtgttatacaatcaagaaatgggggcaagggcctgccccccactccctcacctacctccttagcattccttcaggctgctactcggggctccaggtgtgtgaattggtcctcagatagtcaggcctgggtggagggagtggcaagtcaggcgtgcctcctacaagcttcctaacctcttaagcatcatggaaccagtcagccctctgtggagtcattgtgccggacctctgaaaagatctacaggggccaagatgttgcagccaccggaggctgcaaggatgtgggttcttccaggtgtgggcccagcccccctccttccagcctttgctccccatcccacgttccactcgccctgcctgttgttcagtttgcgtctcagtgctgactcacgggcatgcttcattgaggcccaggaagaggccctggtttggggctgtgccagctcagagcccttgaaccagaaccaactgctcaggctcacaaaagttggcaaaatgcgggctgggcaggcagctcggggcagggagcagcagtgcaggcctggcctgtgtccccgtgcccagcgggtcccggagcagcattccagagcctcctgcagagccagcgaaggaaagctctagagggagacgactccaccgcctctctgctctgacccttctcaggcccgcctgatgtgctggaccatccccctgctgccacggcccctggctnccgcagtcaccctccatcagatgcttccagaagcacctactctgtgcaagggcatttcacaacaggccagtgggcaaacgtgagccagggccagcggaggaaacactaaagaagactttggtggtttcagagcttgggtcttagcgcgggacccgtctngggttgaagacctttngggctttttttgagttngttggcaggaaccttgggttttagaatnttgcattcaaggttttccttaatttnggcagaattgat

SEQ ID NO: 433572 - DNA, 1092 bp, Homo Sapiens
  misc_feature (937)..(937): n is a, c, g, or t
  misc_feature (958)..(958): n is a, c, g, or t
  misc_feature (1089)..(1089): n is a, c, g, or t
tctcgggatccctcccaggctgctccgcgtcggcggcgccccgcgcgattggctgcgccgcccccacgtgacgccggggtggcggcggcggttgcccgggtgacggctgcggaggtggcggccgggctgggatagcgcgagtgtccgcggccgagcagcagagatttttgctgtgagaattaattaccagtaacagttcaatatgggggacattctggctcatgaatctgaattacttggactagtgaaagagtatttagattttgctgaatttgaagacaccttgaaaacattttcaaaagaatgcaaaataaaaggaaaaccattgtgtaaaacagtaggcggatctttcagagactccaaatcattgacaattcagaaggatcttgtcgctgcatttgacaacggagaccagaaggtgttcttcgatctgtgggaggagcacatttcaagttccatccgagatggggactcctttgcccagaagctggaattctatctccacatccattttgccatctatcttttgaagtactctgtggggagaccggacaaagaggagctggatgaaaagatttcctacttcaaaacctacctggagaccaaaggggcagccttgagccagaccacagagtttcttcctttctatgccccttccttttgttcccaaccctatggtgccacccttcatttaaagaactcttccaggatttcctggactccagagttcaaagtttgaagttggaaaaagtttctaagctttaatatcctaaagccagcaacacgccaaagcttttaacaatatataaggagaatggacaaagtaacaaagaaatcttgcagcagctccaccagcagctggttgaagctgaacgtaggtcagtgacatacctcaaacggtacaataagatccaggccgactaccacaatctcattnggagtcacagcagagctggtnggattctctagaggccacagtcagcggcaagatgatcacccctgagtacctccagagcgtctgtgtccgcctgttcagtaaccagatgcggcagagcctggcgcatagtgtggacttcacgaggcctgggncgg

SEQ ID NO: 433573 - DNA, 951 bp, Homo Sapiens
cgctgcaggattcttgttactgggccatcccctatatattgtaaagcctttggcgtgttgctggctttagattataaagcgtagaaactttccaacttcaactttaactcctggagtccaggaatcgtggaagagttgcttgtaaatgaggggtgcaccatagggttgggaaccaaaggaagggcatagtaaaggaagaaactctgtgttctggctcaaggctgcccctttggtctccaggtaggttttgaagtaggaatcttgtgtcatgccagctcctctttgtccggtctccccacagagtacttcaaaagatagatggcaaaatggatgtggagatagaattccagcttctgggcaaaggagtccccatctcggatggaacttgaaatgtgctcctcccacagatcgaagaacaccttctggtctccgttgtcaaatgcagcgacaagatccttcgtgagattgtcaatgatttggagtctctgaaagatccgcctactgttttacacatggttttccttttattttgcattcttttgaaaatgttttcaaggtgtcttcaaattcagcaaaatctaaatactctttcactagtccaagtaattcagattcatgagccagaatgtcccccatattgaactgttactggtaattaattctcacagcaaaaatctgggaagcagctgggcctgtcctttcttgggatgtccaggcggccgcctcggcccttgccgaagaaagatccctggaccgcaggcgagaagtggtagcatccggcggcggcggagcgggcgcgtcgggtttttcctcggaacaagaggtccgcagagcctcggccctccaaacgcaccgctgctcctcccctcgtgccgaattccgccacccagcctcgctaccttaggaaccgttatagtactgcctcgtttataacggtgttacactgcttag

SEQ ID NO: 433574 - DNA, 800 bp, Homo Sapiens
ctgtaaagtaaaaagttttcacatcaggaaaccttgtaatggaaagtgaaacgttctcctttgcctccctttgtcagaaggcatctggtcaagcccactttcttagagccatacttttgaatgatgggatcatcctgaaggttagatggcggcttttgcattagaaggtaaaggcccttccaattgtcttgggcagatctccagctctttgttcagtttgtagcccaacatcatcagctagaaaatcagatgatggtggaggcaagcggaatttatgtctgaatgcttttcgaagacatccaaactccacatagaacctgtaaaagtgtagctgactcattccctgcagaaccaaaaccactacgttgtttaggtggttttgatgaaaaagctggcaccagctgggttttggaacattggatttgcccagaactgcatacttcagcaattcacacagctggtcatgggttacttcacagttgtcagtaaataaaatggtagataagcgggctttcttggcctcgggctgactctcctcgagatcccaaccggctttcatcgcctcagctgccccgaccagcttatttggggcctgcctgctttccctgaccttcctggggtgtctctcggtcccttccctctctggctccatggctgtggagaaagatgaggtagagctggggaaactccagcgcccctattcccccgcgtgccgcctcctagcgggagagctacacgggcttgacagctttcaacctccctcggatccgcttctcaattcagtttaccgaactatcccc

SEQ ID NO: 433575 - DNA, 1842 bp, Homo Sapiens
  misc_feature (1688)..(1688): n is a, c, g, or t
gggtgtccagtccgcggaacggggagatcgttggcaccttcgcttttttaggggaacggggatagttcgccatggagccagagagggaagggaccgagagacaccccaggaaggtcagggaaagcaggcaggccccaaataagctggtcggggcagctgaggcgatgaaagccggttgggatctcgaggagagtcagcccgaggccaagaaagcccgcttatctaccattttatttactgacaactgtgaagtaacccatgaccagctgtgtgaattgctgaagtatgcagttctgggcaaatccaatgttccaaaacccagctggtgccagctttttcatcaaaaccacctaaacaacgtagtggtttttgttctgcagggaatgagtcagctacacttttacaggttctatttggagtttggatgtcttcgaaaagcattcagacataaattccgcttgcctccaccatcatctgattttctagctgatgttgttgggctacaaactgaacaaagagctggagatctgcccaagacaatggaagggcctttaccttctaatgcaaaagccgccatcaaccttcaggatgatcccatcattcaaaagtatggctctaagaaagtgggcttgaccagatgccttctgacaaaggaggaaatgagaacgtttcactttccattacaaggttttcctgattgtgaaaactttttacttaccaaatgtaatggttctatagcagacaatagtcctctctttggacttgactgtgaaatgtgcctcacatccaaggggagagagctaacacgcatctcactggttgctgaaggaggctgctgtgttatggatgaactggtcaaacctgaaaacaagattctggactacctcaccagcttttcgggaatcacgaagaagattcttaacccagtgacgaccaaactcaaagatgtacagaggcagttaaaagcactgcttcctcctgatgctgtgttagtgggccactccttagatttggatctcagagcactgaaaatgatacatccatatgttattgatacatcgttgctttatgtcagagagcagggcagaagatttaagctcaagttcttagccaaagttattttggggaaggatatacagtgtccagacagacttggtcatgatgccacagaagatgctagaacaatccttgaattggctcggtatttccttaagcatggcccaaaaaagattgcagaactaaatctagaagcactagctaatcaccaagaaatacaagcagcaggccaagagcctaaaaacacagcagaagtacttcagcacccaaacacaagtgttttagaatgcttggattcagtgggtcagaagcttctttttttgacccgggagacagatgctggtgaacttccatcttccagaaattgtcaaactattaagtgtctttcaaataaagaggttcttgagcaggccagagtgggaaatccccctgtttcccttcagcattgttcagttctcttttaaggccttttcacctgtcctcactgaggagatgaacaaaaggatgaggatcaagtggacagagatatcaactgtctatgctgggccatttagcaaaaaatggcaatctcaggggctctgaagaaggctgtttaaaagcttttggcccagtcccagccaatggatttttgnttctttgaaacccgtcagcctcctttctggaatacggtatgaaagccttaaaaagctggcccacttgggcataaaagcccttgggaagggaatcctggaaaaaagggaatttggcatcaagggggaaagaggcctgggaacaagattcccctct

SEQ ID NO: 433576 - DNA, 850 bp, Homo Sapiens
  misc_feature (152)..(152): n is a, c, g, or t
ggtaagtaaaaagtttcacaatcaggaaaccttgtaatggaaagtgaaacgttctcaagttcctccttgtcagaaggcatctggtcaagcccactttcttagagccatacttttgaatgatgggatcatcctgaagttgatggcggcttatngcattagaaggtaaaggcccttccaattgtcttgggcagatctccagctctttgttcagtttgtagcccacaacatcagctagaaaatcagatgatggtggaggcaagcggaattttatgtctgaatgcttttcgaagacatccaactccaaatagaacctgtaaaagtgtagctgactcattcccctgggttttggaacattggatttgcccagaactgcatacttcagcaattcacacagctggtcatgggttacttcacagttgtcagtaaataaaatggtagataagcgggctttcttggcctcgggctgactctcctcgagatcccaaccggctttcatcgcctcagctgccccgaccagcttatttggggcctgcctgctttccctgaccttcctggggtgtctctcggtcccttccctctctggctccatggcgtccgcatcggttaccggattctcaacggttccccaacggctacaacgggcgtctgcctggcaaagaaggaaggtgctgccgagcggcttcgccgcctaaaaccactccccacgccccctagcccgggaaacgcagaagagaagacgggcggggagcagaggttctcccctccttagccacagctgccaacaaccaccgcccctcagcctcgcgggctttttgaacggaccggaagtagaagtcgagcgacttccggc

SEQ ID NO: 433577 - DNA, 1068 bp, Homo Sapiens
  misc_feature (55)..(55): n is a, c, g, or t
ccggtttggccccagtttcatccctgaaagcccaggcacccttccttcaggccanccagggagaatgggggttaagcttctcttccccctgggatggagaggcccatttcccccgtccagattccaaaggagagggcttatgttctggctatagaacccattaccatttggtaagtaaaaaagttttccacaatcaggaaaagcctgtaatggaaaagggaaccgttctcatttcctcctttgtcagaaggcatctggtcaagcccactttcttagagccatacttttgaatgatgggatcatcctgaaggttgatggcggcttttgcattagaaggtaaaggcccttccattgtcttgggcagatctccagctctttgttcagtttgtagcccaacaacatcagctagaaaatcagatgatggtggaggcaagcggaatttatgtctgaatgcttttcgaagacatccaaactccaaatagaacctgtaaaagtgtagctgactcattccctgcagaacaaaaaccactacgttgtttaggtggttttgatgaaaaagctggcaccagctgggttttggaacattggatttgcccagaactgcatacttcagcaattcacacagctggtcatgggttacttcacagttgtcagtaaataaaatggtagataagcgggctttcttggcctcgggctgactctcctcgagatcccaaccggctttcatcgcctcagctgccccgaccagcttatttggggcctgcctgctttccctgaccttcctggggtgtctctcggtcccttccctctctggctccatggcggattctcaacggttccccaacggctacaacgggcgtctgcctggcaaagaaggaaggtgctgccgagcggcttcgccgcctaaaaccactccccacgccccctagcccgggaaacgcagaagagaagacgggcggggagcagaggttctcccctccttagccacagctgccaacaacaaccgcccctcagcctcgcgggcttttgaacggaccggaagtagaagatcccgggaattccggaccg

SEQ ID NO: 433578 - DNA, 1524 bp, Homo Sapiens
  misc_feature (808)..(927): n is a, c, g, or t
  misc_feature (1084)..(1084): n is a, c, g, or t
cggggcccagccaggagccagcagccaggcgtccctgtgttccagaaggattcacgcccctcctggacctgggcgggcctcccagggggtctgtatcacggccttttgtgtgtgcgtacgtgtggtttttttatatatcactactacatattcttgaattgccaagactttctgaaacaagacagcttaagggaatcagccttttgctttgtgatgtgaaaatactgtgatttgacgagccgcttcctgaggggcaggcccacgtggggaggttgcgccgtgtacatagacccgccgtctgtgtccttggtcaggcccggatgcttggtctacactgggttagaggctgctctccccacgcacccatgtgctcatggcttctgcagaccctctgctgggtacatcggtcccctacggcgaagttcagccagggctctccctcctgagagcatggcgtccccaccttcctgtttcgccgacgtcactacccagggtggcaagtcttgcaggcagagggtgtagcccaagttcagcctctctctgtgtcctccagagaagagggttctttgccctcatcagggccctgcttgtgggttttcggctctggggaggagagtgttggcatcagtgtgtttggcctgatttcttcagggggccaagctcccgggaggacccctagccaggagggccccccatgtccatccatccctcctgctggggcttggatgtcaggcttgggggctgtgagctgggacctcgcctgagcccggtcaggtgggacaggagcctgccagaagcccatgggggnnnnnnnnnnnnnnnnnnnnnnnnnnnnnnnnnnnnnnnnnnnnnnnnnnnnnnnnnnnnnnnnnnnnnnnnnnnnnnnnnnnnnnnnnnnnnnnnnnnnnnnnnnnnnnnnnnnnnnnnctacaggtgtgagccacttctgcccagcatcccaggcctgaacagccttggcaggacccgtccctagagggggctctggtgcctcccttaggtgggccttgagctggtttttaaccaaacatccttccaaactcgggctgcgacctgcttcctgagntttctgtatttccaaggagccctccgaccagggagaggctgggtggaataaagtccagcggtaattcggggggccctcttgtcacctcgcccctgaaaacagcagcttcccatcacctttcactggggtccccgatggagcccgttttaaaaaggccgaggggccccccctgtgttggggtgaaaacccccacggtctctttaaagtacgggcccaccctaggcgatgtccataacaagttgcccccgtggggctgttgccccttctaccacctatgtggccctcccgggtgccaaagaccattacgaaccccccaacatacctttccctaaacaagacctatcgaacactcgcgcaaataatcgtgagcctcttatcattataccgtggaaggagactcgctcatagcgactctatcgcccccccctgtggtgtccttt

SEQ ID NO: 433579 - DNA, 1829 bp, Homo Sapiens
  misc_feature (175)..(175): n is a, c, g, or t
  misc_feature (296)..(422): n is a, c, g, or t
cggtccggaattcccgggatcctctctctgtgtcctccagagaagagggttctttgccctcatcagggccctgcttgtgggttttcggctctggggaggagagtgttggcatcagtgtgtttggcctgatttcttcagggggccaagctcccgggaggacccctagccaggaggngccccccatgtccatccatccctcctgctggggcttggatgtcaggcttgggggctgtgagctgggacctcgcctgagcccggtcaggtgggacaggagcctgccagaagcccatgggggnnnnnnnnnnnnnnnnnnnnnnnnnnnnnnnnnnnnnnnnnnnnnnnnnnnnnnnnnnnnnnnnnnnnnnnnnnnnnnnnnnnnnnnnnnnnnnnnnnnnnnnnnnnnnnnnnnnnnnnnnnnnnnngtgtgagccacttctgcccagcatcccaggcctgaacagccttggcaggacccgtccctagagggggctctggtgcctcccttaggtgggccttgagctggtttttaaccaaacatccttccaaactcgggctgcgacctgcttcctgagttttctgtatttccaaggagccctccgaccagggagaggctggtggagtaaggtccagcggtattcgggggtcctctgtcacctcgccctgaaaacagcagctcccatcaccttcactgggtcccgatggagccgtctcagaggccgaggggccctctgtgtgggggtgggacgcaggggctctcagagcaagggccacaaagccgatggcacagatgtgcccctgggcctggcccgtcacccacatgtggtgccctgggccagggcgtgcgggcgccagagccttccctacacagcctaagagcaggggcaagactcggcccctcactcaccctgggaggcctgcctgggctacatggacacctgggtctctttctacccccattcaccatggaccaggggcctccatttcctgggggctcttgcggcatgtgatttgggggtccctgggacattctcccgtcagctccacctgagccaagtgtcctgttccctgcggcccttggccttccagggtcctggccaggcaggggtcaggcaccccatactcttccgtgtggcacaggtgtccacccagccccactggccacagacaccattctccccctgggagcaggaggtggagtaagttgtacccccaggcctgggtggctggggagttcctgagggcatgggtggggcaggagtgagtgcctcgtgatcccagcctcagtttctctcttgtcactttctcaaacctgcaggtctcagggccccgggctcctcctgggcaggatggggggcaagggctgggccttggggtggtgctggctctgatgattccagagcctgtatccaccttctgggctcctggccagcaccccaacccccaggagcccagggacaggtggcatgtgttggggtcgggggatggcccccatctcgaagtgttctggaatttgggggcaacccttgcccagcccagccatcaagaacttctgatctcctgcccaccaggaggggacttagccatggacttggccagtaggcctggggagggagggctttggcagccaaagtccactggccctgccgtgcccctgagtaggaaactgtcccctaggggctgggtggccccactgatatatgcaaacccgccggtccgagccctgttcctgcctgtgctcctctgtgcccaggctggctctcccccaaccctagcatgtatactctgccacggacgtcccgtgggcccatgattgtggtcggtccgtcaag

SEQ ID NO: 433580 - DNA, 1285 bp, Homo Sapiens
  misc_feature (299)..(299): n is a, c, g, or t
aaaagtgatcaggttcattttattgactacacagaatcaattccattttccactaacaacataatttatggatgaagaattctgactcagtgtctccacaggaacctgttcctcagctttctggatgtcattgtttctgacatcacaccttcctagacaggtatttctggaaaaggatctggtaagaggatgaatttggctctaaacaaatgcccatggccccggaagacctgtcggggccaccaagttagtttctctggcaaaatttgattccttccatctcaccactatagtaactngttgttgttatgttaccaggagccacacaaaggttgacccatcaaggtggagccacgttaccaggagccacacgaaggctgaaccagcaaagtggaggaccagctgtttaattgactcgggtctggtgacaggccaacatggagagagacagcccagcttcaagaacagcaaggcagccctttgcacagtttccactggggtggggaggctggagatgaggactgcattccacatcagagttgttttatttctggatattcacagacagctagaagtcagaaaaataagccaaagtgggaagcccctggcagaccagctccactggcttcctctccagagtcactgttccgaagtgacaggtggaagctctttcagttcctccttttccgggtacacttcagacaccttattcatcttggtgaaaatctggttgatctctatgaacgtcttggccttggtctccgggacaatcaagaagatgtagatggtggtgaggaggcggatcgcggcgaagacaatgaagctgtacgggcggaggccctcctggatgaacgggaagatccaggccacggtgaagttggagagccagtgcacactgccccccaccatgaaggcagatggccgagaggactgcaggaagatctcagtgatgagcagcgcgggtatgggactgggcccgagggcatgtcctatgacgtaggagatgacacagacgatgctgatgtatggcatccaggacactgtgtcctgcagtgccagagctgcagtgagcacgcagcaggctatgaggcagatggagaagcccagcagcagcagcagcctccgacccaggagctccaccacgaacacggcgcagaaggaacagcttcagcacggagatgaagcccgcggccttctctgcctcatcctcctgccggatctcggccacctccctgtccacagagtcccagccgcgcagcgtctgtagggctttcttggcggccgc

SEQ ID NO: 433581 - DNA, 1466 bp, Homo Sapiens
accaggcgtggttggcaaactgcagccacccaaggggctggttgtagttttcaaacagtttgactcttttcatcaacatccagcaccacattatcccaggaggaaaagcagacgcgtgacagagtcacgagagcaggcatagagtgctgtggcagtcagccagtgcccacatcaacaccaaggagaagtcctgcgggtgctgtgcaatggccgggtgcacgcgttactttggctaaaaggaggtgagcggcactctgcccttccagagcaagcatggagcaacaggatcagagcatgaaggaagggaggctgacgcttgtgcttgccctggcaaccctgatagctgcctttgggtcatccttccagtatgggtacaacgtggctgctgtcaactccccagcactgctcatgcaacaattttacaatgagacttactatggtaggaccggtgaattcatggaagacttccccttgacgttgctgtggtctgtaaccgtgtccatgtttccatttggagggtttatcggatccctcctggtcggccccttggtgaataaatttggcagaaaaggggccttgctgttcaacaacatattttctatcgtgcctgcgatcttaatgggatgcagcagagtcgccacatcatttgagcttatcattatttccagacttttggtgggaatatgtgcaggtgtatcttccaacgtggtccccatgtacttaggggagctggcccctaaaaacctgcggggggctctcggggtggtgccccagctcttcatcactgttggcatccttgtggcccagatctttggtcttcggaatctccttgcaaacgtagatggctggccgatcctgctggggctgaccggggtccccgcggcgctgcagctccttctgctgcccttcttccccgagagccccaggtacctgcttgattcagaagaaagacgaagcggccgccaagaaagccctacagacgctgcgtggctgggactctgtggacagggaggtgtccgagatccggcaggaggatgtggcagagaaggccgcgggcttcatctccgtgctgaagctgttccggatgcgctcgctgcgtggcagtgctgtccatcatcgtcctcatgggcggccacagctgtcgggcgtcaacgctatctactactacgcggaccagatctacctgagcgccggcgtgccgagggagcacgtgcagtacgtgacggccggcgccggggccgtgggcgtggtcgtgaccttctgcgccgtgttcgtggtggagctcctgggtcggaggctgctgctgctgctgggcttctccatctgcctcatagcctgctgcgtgctcactgcagctctggcactgcaggacacagtgtcctggatgccatacatcagcatcgtctgtgtcatctcctacgtcataggacatgcctcggtcccagtccagtaccgcgctgctcatc

SEQ ID NO: 433582 - DNA, 796 bp, Homo Sapiens
gctgtaccttttcaatgtattagcacctcatttcttacaagggtagtttatacctcttttctctacttcctcacctccagttcactcttcaaattatcactttcagctgttttactctacaaaaacagcgctggagaaggaagcctaccctacagcttcttaattagagattccctgatgtcaatcctgtgaccatcccatgtatctcagcagaagactgtgtccctctttaccagggcagcttttcttgaaaatcctctcttctcttgatgccccagatgtaattctgtccagattcttttcataaatctttagcctttatttctcattcttttttgcccatactcctctaaagaaaccatgtacatcttggtcatttcatggggttttgtccttagtgagtctctccctcctactgctgggcgctgtccttttgcagctacctctgctgttgctcctaattctctccttttttctgaggcttgaaacctcctttgctcttgagtgtttaacatttctaccaggaaattctccaggcacctcaatgaaggatgctttcttttctcttccctgtaagtactacactgtggtagatttgtgaactccattgatgggtcacagtgtggagtgaggattccttcttgatcctcctctttactctccacattcaaccattacaaagtccttttcaccacctaagtatgtcttcaacagggtctcctcttctccatttcttcaaggttttcaaaaactattgcaatcgttccctcgtgtgtatctcttcctcttccgtttc

SEQ ID NO: 433583 - DNA, 1270 bp, Homo Sapiens
  misc_feature (81)..(81): n is a, c, g, or t
  misc_feature (887)..(930): n is a, c, g, or t
  misc_feature (997)..(1032): n is a, c, g, or t
tggtcctctgaactgtttttcttggaaaatcttggaaaagcacaaccccccaccatctttcttgcatagtaaaagcaaaancttcatccgcagttgtttgaaggaaaccctggaatatggcctcggcaagtgtaaaagaattctttgcaatagtctttgcagagcagaggaagtactaggtctctttccaagacttctctctcaggtgagtggaacaggctttgagaatgtggagagcaaagtgcacatttgatttcctccagtaacttccctcattctgtgttgttggtaacagaaaatatcttattctccaggcgccctagccccgggctgtcactccgcaggcagcaggacagccgagggtagaagccaccgcacagcgtctctcccccactcagcagctccagctgggacatcatcctcctgtctctccttttcaggcgcttcggggggttcccattcaggcaccttctcctccttgctccgctcccttcgtttctttccccaaacttagcatctccttcaaagaagcccagagccacggccagcagcagcagcttaaaggagagcatcttcagcatcgtctgccccagagcagcatgggctgggcgcgggaggatgggggggaacgccactgcccagcaggggcactagggcgcagctccaggaggagtttgcggggctgtagggcactccagagacagagggaggttgcggggacaaaaatatgtacagcgatgcaactttgcaaaaaataaaagacgcggcgatgggtccaatgccttaggggagcccgaggagcgagataaagttgtgcggatgacaccgtttgcagttgtgccagtgtcagttgggttgggggctttctgctgcggctgggaagtggnnnnnnnnnnnnnnnnnnnnnnnnnnnnnnnnnnnnnnnnnnnnagccacagttgttcacttgtccgtgtaacggtagttgtttaggtgggacagtagcaggaacagaaannnnnnnnnnnnnnnnnnnnnnnnnnnnnnnnnnnncagcgctgggctctagatgatgctgaggtctcctctgccggcggctgcagcttctcacacagcctctcatgtttcgttccctcttttcttcttctttttaactagcgcgcggggaggtgctgccacagcgcgccccttgacgtcaccgcttctcgcgcgcccccgcccagggtggagggaaggggagggggcggcccccgcgcgagcgcgtcccccgggccccggcggcccctccgct

SEQ ID NO: 433584 - DNA, 1412 bp, Homo Sapiens
  misc_feature (185)..(205): n is a, c, g, or t
caggcccttttgcgtcgcccccttgcgcggcggccccgccccgctcccaggctccgtcctcccacgcaccctgcccccggcaccacagccgcggggcactcaggagtcacaccagcttccacccttgtccaagggcccagcagcccctcgtgtatccctggacggctccccagctgccgtgtctnnnnnnnnnnnnnnnnnnnnnccatctgtgaactcctcctggttgaggccataggccaatgtggtgtgcgccaggtctacctcgatggggaagacgtcggcatcccgcagcactgcgtagcagtcgttgtagtacttggacatggtggacacgaggcgctgcagctggaacacgatgtcctggacgtgcttctggtccagcagctccatcttctccagcacatccttgcgcatctgggagaagcgggcgcgcgcctcctggcggcagcgcaggatcaggcggtactcatagttgccggtgctcacccggtaaaggggctcgcctagggcaatgcagctgtattcctcgtcatccatctccttcaccttcaggcagtacgacaggtactcaaacttcacgtccaggtacttcttgatggtgaggcgagtgtccgggatggctttgttgaggtacgtgttcagatccgtcagcatcggcttgatggttttcagaagccgaatgccgaacttctcgatgctgcggtgggcatcggcgaacttcacaaaagcctcgctcgcagctggctggggctcccgcaccccgatcacggagaacacgtccccaaaggcccggtgagtctgcgacagctcataaaaggcccgtaggaggttcttggtgtgttccgtcatcccattgcacaggatggcccggctcaggcccagagcatctgcggtccctgaactcatgttctccaccagccggtgcttgactttcttcaacacaatgtccagggacatgccctgcttggggtccgcctgcagcttgttgtagtggatggtcacctcccccttcacctcctgaatcatcttcgccacctccaccttagttttccctttgattgacctgccattgacaccggtgatctcatcgccagctgccactgtgccgtccaaggctgctggggtgttgtcaaatacctggacgatatagaggcagggacagtactgggcccctcctccaatgctgatcccgatcaggttctgagcatccttctgcagggtcaccttcccaggcacagtcgggattccgagtttatcctcttcgatgtcataatccaagtctgcaaacatggttccgagagttggagtgggctggctaactgcccagctcggtaggggaatggggaactgccgttccacctggcggtggccgcgattgtcacgtcctcgtgccgaaatcgccacccagc

SEQ ID NO: 433585 - DNA, 930 bp, Homo Sapiens
  misc_feature (182)..(182): n is a, c, g, or t
  misc_feature (840)..(840): n is a, c, g, or t
  misc_feature (892)..(892): n is a, c, g, or t
  misc_feature (914)..(914): n is a, c, g, or t
  misc_feature (922)..(922): n is a, c, g, or t
cttgttcctactaacagcgagcttccgccaatacttgttctcgttcttggttccgagcgtcccgggagccgggaagggaaggattgtctgcagggattggagcaaatatccagtggggggaaagccgggacttccgcgtcttgccggaagtgacgtgacaatcgcggccaccgccagggganacggcagttccccattcccctaccgagctgggcagttagccagcccactccaactctcggaaccatgtttgcagacttggattatgacatcgaagaggataaactcggaatcccgactgtgcctgggaaggtgaccctgcagaaggatgctcagaacctgatcgggatcagcattggaggaggggcccagtactgtccctgcctctatatcgtccaggtatttgacaacaccccagcagccttggacggcacagtggcagctggcgatgagatcaccggtgtcaatggcaggtcaatcaaagggaaaactaaggtggaggtggcgaagatgattcaggaggtgaagggggaggtgaccatccactacaacaagctgcaggcggaccccaagcagggcatgtccctggacattgtgttgaagaaagtcaagcaccggctggtggagaacatgagttcagggaccgcagatgctctgggcctgagccgggccatcctgtgcaatgatgggcttgtcaagaggctagaggagctggagcggaccgctgagctatacaaagggatgacggaacacaccaagaacctcctacgggccttttatgagctgtcgcagattcaccgggcctttggggacgtgttctccgtgatcggggtgcgggancccagccagctgcgagcgaggcttttgtgaagtcgccgatgcccaccgcacntcgagaagttcggcattcggcntctgaaancatcaagc

SEQ ID NO: 433586 - DNA, 772 bp, Homo Sapiens
ttttttttgcgccatccaggtttgtgtttattcgatacaggcccagaacccagccctccttcagagaagtggccgagctgggggaacagaataaataaaggccgccgaggtgtgatggggactggacgggccggtctggggcgaggcaagggtgcccaggaggcattgaccccaacctcagctgtccacggctggccccactcccagcaggctccgggggcagtgtgagcgcccacaaggagcagggctcggactcctgccacctccaagtcctttcttttccttcctgccctccctctccttcctaaggcaggtccagagaccaagctctccctctggccggggagccgggaggggagggagggtggaggggccagtgtccaggtcccaggccatgaccctggtgcctgtcctgggcaggagcccaggttcgctgtgcgaggacagaggagcagggaggcaggcgccccaagccagcaggcctttatgcgtcgcccccttgcgcggcggccccgccccgctcccaggctccgtcctcccacgcaccctgcccccggcaccacagccgcggggcactcaggagtcacaccagcttccacccttgtccaagggcccagcagcccctcgtgtatccctggacggctccccagctgccgtgtcttcctcctcctcctctctcctccccatctgtgaactcctcctggttgaggccataggccaatgtggtgtgcgccaggtctacctcgatggggaagacgtcggcatcccgcag

SEQ ID NO: 433587 - DNA, 906 bp, Homo Sapiens
cggtgggcatccgcgaacttcacaaaagcttgctcgcagctggctggggctcccgcacccctgatcacggagaacacgtcacccaaggcccggtgattttgcggacagctcataaaaaggcccgtaggaggttctttggtgtgttccgtcatccctttggtatagctcagcggtccgctccagctcctctagcctcttgacaagcccatcattgcacaggatggcccggctcaggcccagagcatctgcggtccctgaactcatgttctccaccagccggtgcttgactttcttcaacacaatgtccagggacatgccctgcttggggtccgcctgcagcttgttgtagtggatggtcacctcccccttcacctcctgaatcatcttcgccacctccaccttagttttccctttgattgacctgccattgacaccggtgatctcatcgccagctgccactgtgccgtccaaggctgctggggtgttgtcaaatacctggacgatatagaggcagggacagtactgggcccctcctccaatgctgatcccgatcaggttctgagcatccttctgcagggtcaccttcccaggcacagtcgggattccgagtttatcctcttcgatgtcataatccaagtctgcaaacatggttccgagagttggagtgggctggctaactgcccagctcggtaggggaatggggaataggtacaaaggggggctccaggccagggcgataggctcagatcccagagtccgccccacgggtctccaggccctggggagctgcctctgtcgctcaccggaagcgttggtcccacagccgggtcccggccaggctggtacctgaacccacctgccgttccacctggcggatccataactctccgggccgtaccagccgct

SEQ ID NO: 433588 - DNA, 983 bp, Homo Sapiens
ctgactcagccctgcagggagaagaggggctggaggtgcaggtggcctgccactggctcccccaacccctgcccacctgggtcttgtgctgtgtgtacttctgctgcgtctgtcctcccttgtgaccagcttctgctggacctgattgtccagccatgatcttctgatcatcatggtttctggacacacatctgttggactaaggaatttgtgttcctggccacagaacagtgccacctctgcctcaagcagttcctggtctgggcactcccccaggaggccggagaggactgagccgtctcctgatgcagaaagtcagccccgctgggcagtgctcgcccaggaagtagggccccacccaacggtgtgctgactgtggaacactgtgtctgcctaggcgggtctggccacattcctgcagcatgatggttggcagttagcttcctggagtgtggacgggtccttccctgcctgactgacttgtccacagggcagcgagaagatgcgccccttggtgtgtcccgagtgtctcctgtaggcagctgagctttcgcaggtctggctgggagccaaggttaccaatctggggggtaacccagccatcatctggatgagcgttggggtctttctgctctggattgcagggcagacgtcgttttgtgctggtcaggcccctcgcctgcctgattcccttggagccccccaagacaggagatgggcagatgtcctctgaagtggcatgggctgcttgctcactggccttcccaggaccctgcccaggtggtgctgcttggccccaggtcgaattcctgtgctggcagcaagcaggggcctgggctgtcggctggctggggctcatgcagccatcccctttgcagccatccgggtgacctgcataggttcctgcggggtctccaacaaggctaatgacacagcgtgggtagtggaaggagggtacttcaacagttccctgtcgctggcag

SEQ ID NO: 433589 - DNA, 2486 bp, Homo Sapiens
  misc_feature (2095)..(2095): n is a, c, g, or t
  misc_feature (2219)..(2219): n is a, c, g, or t
  misc_feature (2275)..(2275): n is a, c, g, or t
  misc_feature (2351)..(2351): n is a, c, g, or t
  misc_feature (2434)..(2434): n is a, c, g, or t
cggtccggaattcccgggatctcggagccgggactcgcgggcggcgggcgggggcgtcgctgcgcggctggccggtgaggccgcggcatggggcgagtgcagctcttcgagatcagcctgagccacggccgcgtcgtctacagccccggggagccgttggctgggaccgtgcgcgtgcgcctgggggcaccgctgccgttccgagccatccgggtgacctgcataggttcctgcggggtctccaacaaggctaatgacacagcgtgggtagtggaggagggttacttcaacagttccctgtcgctggcagacaaggggagcctgcccgctggagagcacagcttccccttccagttcctgcttcctgccactgcacccacgtcctttgagggtcctttcgggaagatcgtgcaccaggtgagggccgccatccacacgccacggttttccaaggatcacaagtgcagcctcgtgttctatatcttgagccccttgaacctgaacagcatcccagacattgagcaacccaacgtggcctctgccaccaagaagttctcctacaagctggtgaagacgggcagcgtggtcctcacagccagcactgatctccgcggctatgtggtggggcaggcactgcagctgcatgccgacgttgagaaccagtcaggcaaggacaccagccctgtggtggccagtctgctgcagaaagtgtcctataaggccaagcgctggatccacgacgtacggaccattgcggaggtggagggtgcgggcgtcaaggcctggcggcgggcgcagtggcacgagcagatcctggtgcctgccttgccccagtcggccctgccgggctgcagcctcatccacatcgactactacttacaggtctctctgaaggcgccggaagctactgtgaccctcccggtcttcattggcaatattgctgtgaaccatgccccagtgagcccccggccaggcctggggcttgcctcctggggccccacccctggtggtgccttccgcaccaccccaggaggaggctgaggctgaggctgcggctggcggcccccacttcttggaccccgtcttcctctccaccaagagccattcgcagcggcagcccctgctggccaccttgagttctgtgcctggtgcgccggagccctgccctcaggatggcagccctgcctcacacccgctgcaccctcccttgtgcatttcaacaggtgccactgtcccctactttgcagagggctccggggggccagtgcccactaccagcaccttgattcttcctccagagtacagttcttggggctacccctatggtgagtcgacagccagggcttggcagggaggggacgccaagagccccacgcagaccctgctttcttcccgcagaggccccaccgtcttatcgagcagagctgcggcggcgtggaacccatcctgacccctgagagctgaccccgtgctgccttctccatgcaggcctggcctctgccttgggactggggcgcccaggtcctcgtgccttctctcttggcctagcgtgggccactcaggacctgcccagcctctgccaggtcctctggcatccgccctcttctccctggggctggggtgggggtggcatggagctgggccctgtcgagacaactcctgtaaataaaaacactttatttgttagagagaagcgccgaggatgtggcgagttgcagtaaggcatatcatcagggggataccgctagctgtagaacaaaagtgccggtgtctatgatgaagggggagagagcggttctatattagtttaccggagggatgtgtgctatatttcccctaccgccccacagaccctccctatattatcagtgagtcggagggttggagggaggaatatttttccgtcgcccttataccgtccaccgctcagtaggagtactaagagaatgaggaaaaacgaggatgacagcgatagtggcaactgctgtgtacatgtaaggtggtagctactttaacctacttcatgaagttagactgatttcactgaaagtaatacgccccataggacgtattctgttcagagcttgaatggggnaacataagggcatgtgagcccagatgacagcacactctcccggttctgtgagtagagggccgactcacgtattatagaggctatcacactctctagtgaagatatcgaacgtagtgagagaagncaatggaccgctaatgtttgaactagctgtactggtctcggtaatgtaagcttgantgatagaccaaatgtatgcgagtatcagagatagaagtgcaacgctgcgcaatcagactgcctcacattttattantcgggagagaacgctgtagatgtgagttatagatagactagagtattgtagggtaatagatagatagagataattagagaggngaagaatctagtggcaatgcaatcgagaacgctacccacgctttcgcggaca

SEQ ID NO: 433590 - DNA, 418 bp, Homo Sapiens
  misc_feature (367)..(367): n is a, c, g, or t
  misc_feature (393)..(393): n is a, c, g, or t
ctacaaataaagtgttttatttacaggagttgtctctccaggtcccagctccctgccacccccaccccagccccagggagaagagggcggatgcagaaggagctggcagaggctgggcaggtcctgagtgggccaggctaggccaagagagaaggcacgaggccctgggcgccccagtcccagggcagaggccaggcctgcctggagaaggcagcacggggtcagctctcaggggtcaggctgggttccacgccgccgcagctctgctcataagacggtggggcctcataggggtagccccaagaactgtactctggaggaagaatcaaggtactggtagtgggcactggccccccggagccctctncaaagtagggggacagtgggcacctntttgaaatgcacaagggagggtgca

SEQ ID NO: 433591 - DNA, 1737 bp, Homo Sapiens
tgtggcaaaagttgatcaagcctgtctttgggcccaggggcaagccccaagtccccagcaaaagcctgccgcccatcaaagccatttcagggcagccaagcatcttttctgtcaaggtgcgggtttgggccaatgctcccgggcctgaaagaacttctccagccctgattaagcaaaggccggcccggcctccacatccaagccaaagcgggcagcagtcagctccagcgagtaccggacggtcagcacattctggccctgcagctcccccttggggtcctgactggggctgatgttaccagcctctgtgaggccgtagtgcttcatgaggagctggcctgaggtcagcggctcggtggcacccaacacaggctccgggaggagctgctgaacctctttgaccgtccacacatagtaggcgccctctttgggccgctggcccggctcttggggcgaagtctgcatcttctgcgctatagaagcctccggacccggtggctcaggctccgagccacgttcttgcaggatgcctttggccacgtcagagtagaattcatcaccagagagctggaaaggcctgcgaataggccacagcgagctgtgcctggtcatagagcatcgttctcaaagtgagggacgtgccactggcggtctgtggagtagcggtgaaagccctgccccacatggtcccggatgcccccgttagccatcattttcagggtatgcaaggccatctgctgggcccgagagccatcctgagtcagtcgatggctgagccagtaggagaacaggaagctcaggatcaccggcgtgggaaacttgggggcctcagcgaagccaccgtattcctcatcatagccctcatcccagctgctggaagcagcgattgttcacggtggcggcagagggcggcagctggcggtcacccacgctgatctctgatcgggccagcagggcagtggtgacacgctggctattttctagcagggtgttcttgttctgtttccactgttctcgtattctcagcaacactgtgcggaagccgactcgggtcaagccatcctcaggagggaaataggtgcccccgacaaagggctggaggttgggagtcagccacacattcatgggccagcccccgccgctgctggtggcctgcacgaacgtcatgtacaccttgtccacgtcaggccgctcctcacggtctaccttcacactcacaaagtcctcactgagcaggcggccaatctcctcattctggaaggactcctcttccatcatgtggcaccagtggcaggtggagtacccgactgagaggaaaatcggcttgttttccttcctggccttgtcgaaggcttcctgtccccaggggtaccagtccacaggattgtaggcatgttgtaggaggtatggtgacttctcgtggatcaggcggttggggaccctctggggtgtagatgaaggatggcttcctttccctccagcaggcatgggcactgaactactgaccgtcgcacttcggtccttgtcccgggaggagctacccctgctgggactcctgtggggccaggtcctgggccagactccaggacacctagggaatcagagacctcagggagttcagcctggaagtgggactgcaggcagactgcggctcgcggcgaggcctgcaccggcgcggggcagcagaaggacgcggcccaaccaggcccgcgcgcccagcatggctgctcggggccg

SEQ ID NO: 433592 - DNA, 1297 bp, Homo Sapiens
  misc_feature (8)..(8): n is a, c, g, or t
  misc_feature (12)..(12): n is a, c, g, or t
  misc_feature (40)..(40): n is a, c, g, or t
  misc_feature (42)..(42): n is a, c, g, or t
  misc_feature (60)..(60): n is a, c, g, or t
  misc_feature (70)..(70): n is a, c, g, or t
  misc_feature (121)..(121): n is a, c, g, or t
  misc_feature (169)..(169): n is a, c, g, or t
  misc_feature (181)..(181): n is a, c, g, or t
  misc_feature (201)..(201): n is a, c, g, or t
aacctctntacntccacacatagtagcccctcttttgcgntngccccgctctggggcganctgcatcttngcgctatagaagctccggaccgtggctcagctccgagccacgtactgcagnatcctttggccacgtcagagtagaattcatcaccagagagctggaagncctgcgaatagnccacagcgagctgtgcctgntcatagagcatcttctcaaagtgagggacgtgccactggcggtctgtggagtagcggtgaaagccctgccccacatggtcccggatgcccccgttagccatcattttcaggggtatgcaaggccatctgctgggcccgagagccatcctgagtcagtcgatggctgagccagtaggagaacaggaagctcaggatcaccggcgtgggaaacttgggggcctcagcgaagccaccgtatttcctcatcatagccctcatccagctgctggaagcagcgattgttcacggtggcggcagagggcggcagctggcggtcacccacgctgatctctgatcgggccagcagggcagtggtgacacgctggctattttctagcagggtgttcttgttctgtttccactgttctcgtattctcagcaacactgtgcggaagccgactcgggtcaagccatcctcaggagggaaataggtgcccccgacaaagggctggaggttgggagtcagccacacattcatgggccagcccccgccgctgctggtggcctgcacgaacgtcatgtacaccttgtccacgtcaggccgctcctcacggtctaccttcacactcacaaagtcctcactgagcaggcggccaatctcctcattctggaaggactcctcttccatcatgtggcaccagtggcaggtggagtacccgactgagaggaaaatcggcttgttttccttcctggccttgtcgaaggcttcctctccccaggggtaccagtccacaggattgtaggcatgttgtaggaggtatggtgacttctcgtggatcaggcggttggggaccctctggggtgtagatgaaggatggcttcctttccctccagcaggcatgggcactgaactactgaccgtcgcacttcggtccttgtcccgggaggagctacccctttctgaaccatgggggagactgtggcctttgtgctcccccttatgttttttggggggtgaggagaggtggctcattgggggctccttgccaggttagtctcccccaacctcctgggcctggcggtgggaagatcccgggaattccggaccggtaccagc

SEQ ID NO: 433593 - DNA, 1562 bp, Homo Sapiens
gttccgcacggccttccaacatccaaaccaaaacgggcagcaatcagctcccagcgaattaccggacggtcaagcaacattctggccctgcaagtctcccccttggggtcctgactggggctgatgttaccaacctctgtgaggccgtagtgcttcatgaggagctggcctgaggtcagcggctcggtggcacccaacacaggttccgggaggagctgctgaacctctttgaccgtccacacatagtaggcgccctcttttgcgctggccccgctctgggggcgagtctgcatcctctgcgctatagaaagctccggaccggggctcaggctccgagccacgtactgcagggatctttggccacgtcagagtagaattcatcaccagagagctggaaggcctgcgaataggccacagcgagctgtgcctggtcatagagcatcttctcaaagtgagggacgtgccactggcggtctgccccacatggtcccggatgcccccgttagccatcattttcagggtatgcaaggccatctgctgggcccgagagccatcctgagtcagtcgatggctgagccagtaggagaacaggaagctcaggatcaccggcgtgggaaacttgggggcctcagcgaagccaccgtattcctcatcatagccctcatccagctgctggaagcagcgattgttcacggtggcggcagagggcggcagctggcggtcacccacgctgatctctgatcgggccagcagggcagtggtgacacgctggctattttctagcagggtgttcttgttctgtttccactgttctcgtattctcagcaacactgtgcggaagccgactcgggtcaagccatcctcaggagggaaataggtgcccccgacaaagggctggaggttgggagtcagccacacattcatgggccagcccccgccgctgctggtggcctgcacgaacgtcatgtacaccttgtccacgtcaggccgctcctcacggtctaccttcacactcacaaagtcctcactgagcaggcggccaatctcctcattctggaaggactcctcttccatcatgtggcaccagtggcaggtggagtacccgactgagaggaaaatcggcttgttttccttcctggccttgtcgaaggcttcctgtccccaggggtaccagtccacaggattgtaggcatgttgtaggaggtatggtgacttctcgtggatcaggcggttggggaccctctggggtgtagatgaaggatggcttcctttccctccagcaggcatgggcactgaactactgaccgtcgcacttcggtccttgtcccgggaggagctacccctgctgggactcctgtggggccaggtcctgggccagactccaggacacctgcggctcgcggcgaggcctgcaccggcgcggggcagcagaaggacgcggcccaaccaggcccgcgcgcccagcatggctgctcggggccgtgggcccggccgctgaggacaggaagggaaggcaggaggctagcgagggcggccggcacctacgagccgcggcggtcttc

SEQ ID NO: 433594 - DNA, 1766 bp, Homo Sapiens
  misc_feature (216)..(225): n is a, c, g, or t
  misc_feature (230)..(231): n is a, c, g, or t
  misc_feature (1053)..(1055): n is a, c, g, or t
  misc_feature (1066)..(1067): n is a, c, g, or t
gggggggaaaattccaaaacccttatgttcatgagcccgggttttttctttgggaaacccggcatgagccaccggtcacctttcctcgacgggggccccgggcgcccaaaggaaattgttttagaaaatttttttagggccgaaggcggccggacaaggttttttggtcaaaggcgggggtcacgttccacagggtgagaggatcaaatttgggtnnnnnnnnnnagggnnaccaccgggacactgttaagtttattctagggtgagtgggtgcccaaggggggcagtgagtatggccgaggtcacctggtggcagggtgctcagggatggccacaggttctatagggccctgcagggcctgagtctctagtcagttgggatgcttcaccttctgccccaccccaagggggttggggcagtcatggatgtagtagttttcgtaattcgcagggatcagtgatgggcactgagcaggcttgattctcacacacatatgcagtggcctggtcttccaaccgtcggagggtactcaggaaaggcagctggcgggacaggaagctcgaggggtccccatcagccagaatcagcaccttgttaggaatgtagacagagtggacgcactgcaccagggccttggtgtccttggcctgacggtctccacagatcacgatctgcttgagggtctgctgctgggctgagagggcgcggaccatctcgggcaacgccaccgggacacgacgcatgcgctcggaaaaggcggtcaataggcacacacacttgtccatccagtccttgtggcccgtgaagccatgcagccggagcaggttgtgggctgacacggaattggcgctgggctctgctccatcctggtcgtccttcagacgcaggggcaggccagcccccagctcagcctcactgcagaagtagccgccaccctgggagtcccaaaagagcctgtcctgtgtgtcctgcagccgcagagcccactcgagccacgcactctcctgtgaggcctcatacaggtccagcaggccccgcaccacgaaggcgtnnncctccaggganncccagcaggggtgggttgctgtgctccacagtccccccagggccggtgtagcaggtccgcatcaggcggccactggccacatcaaacatgtgccgcttcaggaacttggcaccattggtggcatagttgatcagcctgtcttggcccaggacagccccagtcacagcatagcctgacaccatcaagccattccaggcagccagcatcttgctgtccaggtgcggcttgggccgatgcttccgggcctggaagagcttctccagccctgaattgagcaaggtccgcacggcctccacatccaagccaaagcgggcagcagtcagctccagcgagtaccggacggtcagcacattctggccctgcagctcccccttggggtcctgactggggctgatgttaccagcctctgtgaggccgtagtgcttcatgaggagctggcctgaggtcagcggctcggtggcacccaacacaggctccgggaggagctgctgaacctctttgaccgtccacacatagtaggcgccctctttgggccgctggccccgctctgggggcgagtctgcatcttctgcgctatagaagcctccggaccggtggctcaggctccgagccacgtactgcaggatcctttggccacgtcagagtagaattcatccctcgtgccgaattcaaacccagcctcgtacctagccgtaagtt

SEQ ID NO: 433595 - DNA, 783 bp, Homo Sapiens
agagcaaacaccaaataggtcagggtagcgaggcctgggtggtgaattcggcacgagggcgctgcgtctcgcgcccggatccctcaggcggctgcaggcttcagcctgcgctggttggtgaaacagagatgtcagaaaaggagaacaacgttccctgccactgcccaagttcatccctgtgaaggccctgcttctaccagaacttctccgacgagatccccagtggacgcaccagggctccatggtgcaaggaggatctacgcgggtgtggagtgttttacgtgcgccacccgtcggcgtcggagctcattgcctgcctggcctggtggatcgtgcggattgctcggtggaccaatgttcggccttggccttcgtgtggctgcttcctgttcacgccttgcggctacgttgtgctggttctcggcttgtctacagaggccttccgagccgactagctcctttaggtttcatggcgttttctcttcatcttcggagcccaggtttgtccatgaccggtcagtccaggctgattggcttctccggctggggcgcgtgcgagctggctgtcggccattggattcttccagctacagcccgggcgctgccgtggtcatgctgcttccagccactcatgttctcccgtgtctggctgccatgatggccatcgcgatcatgaaggtgcacaggatctaccgaggggctggcggaagcttccgaaggccagacggggtggaccgggccttggcggaacccccgtcagggaggcccgtcaccacttctcag

SEQ ID NO: 433596 - DNA, 1034 bp, Homo Sapiens
  misc_feature (58)..(134): n is a, c, g, or t
atgacccccggggtttttggtggcccccttgccagaaaggggggccgtttccctgggnnnnnnnnnnnnnnnnnnnnnnnnnnnnnnnnnnnnnnnnnnnnnnnnnnnnnnnnnnnnnnnnnnnnnnnnnnnnngcccaggggtagcagcagggaatgaagggggaggaggttgttgggccgttgggggccagggccaggctcccttttaaggcccactggcccctgcccggggtagctgggcacagtggggtactcgggccaggctgttgcttgagaagttgttgtactgggcctccctcgacggtgggttccgccaagtgcccgtgttccactccgtctgtgcctttctggaagcttccgccagcccctcggtagatcctgtgcaccttcatgatcgcgatggccatcatggcagccgacacggagaacatgatggctggaagcagcatgaccacggcagcgcccgggctgtactggaagaatccaattgccgacagccagccgcacgcgccccagccggagaagccaatcgcctggatgacggtcaggacaaactgggctccgaagatgaagaaaaacgccatgaaattaaaggagctgtcggctcggaaggccttgtagacaggccggaaccagcacacgtagccgcaaggcgtgaacaggagcagccacacgaaggccaggccgaagttggtccccgagcctccgccgatccaccaggccaggcaggcaatgaggttgacgccgagggtggcgcagtaaaacatccacagccggtagatcctcttcaccaggacctggtgctccactgggatctcgtcggagaagttctggtagaagcagggcttcacagggatgaacttgggcagtggcgggaagttgttctccttttctgacatctctgtttcaccaaccagcgcaggctgaagcctgcagccgcctgagggatccgggcgcgagcgcagcgcttcgccaagtcttagcaaccggcccggccctcgtgccgaattcgccacccaggcctcgctactt

SEQ ID NO: 433597 - DNA, 1492 bp, Homo Sapiens
tttttttgctttccagcttttatgaaaattaataacattaatagctcacagacatatacatacacacacattgctatgtacacagtcattaagttattaattaggctctgtaaaaaaaaggtttctacattagtgttccgggctaggcccgatcagtccttggcatattcacagtggcagccccagggcttggccccacaggcaggcagaggggaggcaggaggccacagagcagccggccccacagtgagcacagcaagtgtcctgggccacctccttgagtcttcagttcccttcctagcacctgcagtccagctgctcagcaagccggcagacaggtcctgatcccttctgtggccttctgcatggtggcttcgggcaacgtggcgggccctagaggatgctagccagctctgtggagtctgtttctgagcagccagagctgctggcctcgtccctcagtgcctgcagggccttcttattctgccgccgcctctcctcatcaatggggtacattttgaagagcagcaggcccagcaggatgagaactatgggagccatggtcacgagcatgttcagtgtaaacttgacacgttccggctgcgagcagccacgggtctggtaccctgcaaagtccagactgagggtagaaatgcccagtgacactccagaggcaaacttggtgaagaagacatagaaggagaagaagatgggctcggttccatggaagtggggctgcttcagatggaagtcgtcaatgacatcaggcagcatggacctgcgcagagtagtgacagccatgaggactgacccacctaacgggcctctgtgttaatgagaagaggtggccctctggaagcttgcagtaccatgggtacacagctcagtgaggatatgggaccttcacatgaataagaaaaggcctcttgctctaagaggaagtaaccctgcctggaggtgctcagcgtggcaagtggagcccaggccagattacagcccccatttttcactccgactaggtgttcttgcaaagctcactacctgtacaactgtacaggacagacctcccccactcctaacctggacccacagaatggcctgtgggagaacactgcatagaactctccctaaggagcttcaaaactggggactaggggctggagatacccgaggaggggggcctgtatatacctaccagggtagtaagaaggcagctgccacactgatgccagctgccacagctaccgcatatgtaatgatgaggttactctccatgagggccaccaagatgagaaatggcactgctgactagggaagggggtgcaggaagatgaatcagctgggaggttcccaccagacatcccaactcaacccaggctctgctcttcaaccccactcactgagatcccaacatatacagctgtcttctgccaaaccgggtcaagaaccactgccagatgggaatggttaaagtggccgagagctgtggatg

SEQ ID NO: 433598 - DNA, 1717 bp, Homo Sapiens
  misc_feature (825)..(825): n is a, c, g, or t
gtacatttgtagcaccagtgccatcaggatgtagatcttgtgaccttgctcactgaccattgttcatgttaaactgacacgttccggtcttcgtagcagccacggtctagtatcctgcatagtccagtctgagggtataaatccccattgacactccagaggcaacttggtgaagaagacatagaaggagaagaagatggctcggtgttccattggaagtggggctgctttcagatggaagtcgtcatgacatcaggcagcatggaccagggtagtaagaaggcagctgccacactgatgccagctgccacagctaccgcatatgtaatgatgaggttactctccatgagggccaccaagatgagataatggcactgctgactagggaaggggggtgcaggaagatgaatcagctgggaggttcccaccagacatcccaactcaacccaggctctgctcttcaaccccactcactgagatcccaacatatacagctgtcttcttgccaaccgggtcaagaaccactgccagatgggaatggttaaagtgccgagagcatgatggccaggagtagattctggaattcattgcggaagcccaaggtgtaggtgcaaacaagacaaagttcccctccaccagcatgaaagccaaggaggtgaagaggaagccagtaataagtttgatgtatgggccgtggctcatggccagccgtaggccccggaagtaggcgattggctcagactgctgggcttcatagggttctctcttgctcccgcacgcccaggatcaggatggcagcccagattatatagattcagccaatgncccccgctgccagcaggtatgccttttgcgtttccctgtgtgaggtggtgccatgtgtatggttggcactttgtgaagctactgtagagctattgaggtcctggaaacaaggcgtgtctgcttggcccacgatttgtccctggatcgccgtgcccagcactgtgcccagcacttccacagtcatccgataggcggtggcagaatcccgctcagtctgctcggtgctgatgaacatggtgagagccgagtagggaacatggaaacacgtgaccattgtttcaaagaggcaatagaaaagcaggtaccaataggtctggccgtgtgggaagtcgggcacgaaccagatgaggaagtaggcaatgacggccaggggcgtggagaagatgatccagggcataaggcgacccaggcaggtccagggggatttgctgatgcagaggcccaccagggggtctgtgatggcatcccaggctcggcccacaaacaggatgatggaggcagagaaagggcccacctgagccacatccaataggtagatctgaaggaagaaacccagggcacagcccgtcacctggtagggggctcccccaagtgcatagcaaagcttgttgcaaacagacaactgttgtttcttctttttcggttctttcttcacctgggccgggcgttcagtgctttggaggatgctggtgggtagcagccccgccgcggagccgctctcggcgccttctcctttggccatgacccgcgggccacgccgcttgggacctggtagacgggatgctcctctgccccgcaggccgctgctcctcccaagctcgcttcgtagcagccttagccacggccgccgcgcgctagccaagccggctggcagacgaggaacgcccccgct

SEQ ID NO: 433599 - DNA, 980 bp, Homo Sapiens
  misc_feature (50)..(87): n is a, c, g, or t
  misc_feature (524)..(554): n is a, c, g, or t
ggaggatacgactcactatagggcgaaccgcaggtcacgcggtggcggcnnnnnnnnnnnnnnnnnnnnnnnnnnnnnnnnnnnnnnatcaggccaaatcggccgagctcgaattcgtcgagagcggggggtttcttttattactcagaaaacaaaagtggttttttaaaaatctcatggagagggtctgtggcagctttctggactgattcttcgtgtcacgctgagcagctgctttggcatccaaagctgtgggatcacagaaagtgttgcttcaggtgtggatgccagccactcgtcatgctcgtcactcttaaaagattgagacacccaaccttaaaaatgctccaataatccattcagaaaccaaactcatatgcacaagatgtcaaggaggcataaagtcaattcttgcttgtttttttcatttcttaatgtaaaaacagccaaccagaaatttctaaaactggctatgctaattcagatattttctttctcacgctatctgccaggttgtctaattnnnnnnnnnnnnnnnnnnnnnnnnnnnnnnnccgtccattgtaatagaggaaaaccttccaaaccaggcagagtacgtaattatcaaaacaccaggacctattctacccttgcatttccaagttacctccaccatcaccatctgatgacagatgtgccctaaataagagcctgagataaagccactggctgcatcctgcaccccagcttctcaatgtggtaacgaggcgccagacgcctgtagacacctgctccagggctgatacatttaccactcagtccacatgacttagggaatagccatttccttttgtgagagaagctggatccatccttcctctaaacagtattaacatgcacagggagagagcggatggtcatattaacatgtggtagtcccgtgcaccgaaaggatgctcctgagaagagggtgtagacctcgtccctgggaagagaca

SEQ ID NO: 433600 - DNA, 1217 bp, Homo Sapiens
  misc_feature (691)..(691): n is a, c, g, or t
  misc_feature (693)..(695): n is a, c, g, or t
  misc_feature (699)..(699): n is a, c, g, or t
  misc_feature (725)..(728): n is a, c, g, or t
  misc_feature (735)..(735): n is a, c, g, or t
  misc_feature (782)..(782): n is a, c, g, or t
  misc_feature (832)..(832): n is a, c, g, or t
  misc_feature (842)..(844): n is a, c, g, or t
  misc_feature (846)..(846): n is a, c, g, or t
  misc_feature (1030)..(1030): n is a, c, g, or t
gattccgagcttgctcgcaaggcgagacgttccgtggaggcggagtttccgatgtatccaagtctgccggccccagaaacgggtgtgcagggcgcccattgggtccgcggtatgactgcagaaagagcctgggagatcgaggggcgcagagtggggccggaccaggggcgtttttagggatcccagtagttctcgtggtgctgcgcggcgatgatgatgactacggtgaggatggtacagagcaccatggccgcgatgcccacggccagggagatgaaggagaagttccgggcctcgcgtgaagcgatctcggccgacaccatgtctccgcgggccaaggccgtgcgcacctgcacggccttgaagatggcaatgatgccagtaggccagaagcaacagatggtggtcagcaccgcgatgggcatgtagtcgtgtggcgggcgcctcggctccagtagggccagccctgggccctggggcggcggggggagagtggaggtcactcctgttccccccggggtcccgcctgcatatggcgtgcccaccgggtagaccggcacgtaagcagtgcaagtctgcagctgcagggggtatccgggcgctacgtagccccccagcggcagcgtgcccacagtccccgcgtgcgtgggcaccacgaagccaggggcctgggcactctacctcccccccncnnncccnccccggcggcagcgggcggcggcggnnnntgtgggncctcgaagcgagtctcctgcaggtaagggtcgggtggcatgcggggnaaggtagcgcagccgggtgggggtgccccggcagcagggccgggaggggngtggtggggnnntntcggcagcgtggcagaggaggagggaccgcgctgagcggtggccgcggaagaggccaggccccctgcccctaagcgcgggagggtggcggtgccagactgatggtagtggtggtggtggtgatggtgtgaggaaggggctgcctgtggcggtggggctgggggttcggctggaggctgaggggnattgtagggcggcggagaagtgtgagggactgagtctgggagtcctgacttttcggatgacatgctgcggtctcgctgggacagggtccctgcagccggagtgggggtcctcggccggtgctggagtctgggtgctggatggcgcagccggcagaagcgcagagatggagagatgaaggcagcggcg

SEQ ID NO: 433601 - DNA, 881 bp, Homo Sapiens
  misc_feature (70)..(70): n is a, c, g, or t
  misc_feature (73)..(73): n is a, c, g, or t
  misc_feature (78)..(78): n is a, c, g, or t
  misc_feature (82)..(82): n is a, c, g, or t
  misc_feature (86)..(86): n is a, c, g, or t
  misc_feature (92)..(92): n is a, c, g, or t
  misc_feature (98)..(98): n is a, c, g, or t
  misc_feature (113)..(113): n is a, c, g, or t
  misc_feature (116)..(116): n is a, c, g, or t
  misc_feature (119)..(125): n is a, c, g, or t
  misc_feature (283)..(283): n is a, c, g, or t
  misc_feature (322)..(322): n is a, c, g, or t
  misc_feature (328)..(373): n is a, c, g, or t
acctcacgccttgaagatgcaatgatccagtagccagagcaacagatggtgtcagcaccgcgatggcatntantcgtntgcnggcncctcgnctccantaggccacccctggnccntgnnnnnnngggggagagtggaggtcactcctgttccccccggggtcccgcctgcatatggcgtgcccaccgggtagaccggcacgtaagcagtgcaaggctgcagctgcagggggtatccgggcgctacgtagcccccccagcggcagcgtgcgccacagtgcccngcgtgcgtgggcaccacgaagccaggggcctgggcagtntgggtnnnnnnnnnnnnnnnnnnnnnnnnnnnnnnnnnnnnnnnnnnnnnngtgggccctcgaagcgagtctcctgcaggtaagggtcgggtggcatgcggggcaaggtagcgcagccgggtgggggtgccccggcagcagggccgggaggggcgtggtgggggggcctcggcagcgtggcagaggaggagggaccgcgctgagcggtggccgcggaagaggccaggccccctgcccctaagcgcgggagggtggcggtgccagactgatggtagtggtggtggtggtgatggtgtgaggaaggggctgcctgtggcggtggggctgggggttcggctggaggctgaggggcattgtagggcggcggagaagtgtgagggactgagtctgggagtcctgacttttcggatgacatgcctgcggtctcgctgggacagggtccctgcagccggagtgggggtcctcggccggtgctggagtctgggtgctggatggcgcagccggcagcagcgcagagatccgctctcgacgaattcgagctcggccgatttggcctgat

SEQ ID NO: 433602 - DNA, 1383 bp, Homo Sapiens
ttggaaaacccacaatctcagaagctttttagcaggaagcctataaaggatgaatatcaatgtaacttgccctgctgtcaacctctgcacagcttagtcacagaaatggacagggaagagactctgaaaagaagaaatcctcttagagccttggttcaagtcttagccctgtgtcacctcctgactatgtgatcttgcacaagggatgcttcctctctgaatctcagcttccaagtctagagaaaagaagtgaaaatcctcacctccatgggatgtgagtatagaatgagatggggcacatggcaagcctttgaaagccatgaaattctgtgtggttgcgaattaggctagattcagcatttgcagggaaggaacctcacttagtgaaaagcttttcaccagaagatttaggtcccagctaagccaggctggtgagcatctatgtgtctgtgatgctgactgaccgcacaagacatacctaatagccagctcctgggagcaatgcaacatccttgaggcattgctggataaacaactgctagttcctgcctgaggatgtgaactccccagcctcaccatatggctggtcatgagcaagaggatagcaaaaggatagcaacccagtggttgcaaaccagtggttgctatccccagcaagaggatagcaacccagtggccttgctacctccaagggcccagtagagcttgggaccaagctctattgatcagcatcccccagagttttcacctgcagagaagcaggacaggtgggcactcaggagtgaggagcatgctgcatctctttcctgcagatgcaattcccctgccccgggctcagcaatcatttcctgctcccaccctgggctgacagcacctgtgtactagactgttttcaccggcagttcaagaggaaatcaactgtcactgcacgtcaaaggtaatttctgatcacaagtacaggagaaagacctgatgaagaagcaagattaatttttccggcagtcaaagcatgcagctgtatagctcatggatccaaaattgggaagcaggcattggaaagcagaaccagcacacttggaagatgttgaactacctggcagatctaagatttggggttagaaaaagcctctcaaacagagcatgcctggcacatttttaggcatttcgtccataaattatgtctgggtgcctaaacagtggccaggtgagccttttcttctagctctttctgattctgtggcagtgaaggaacaagtccagttctgaaactaaccccaatccagaaacgaactaccaagatacggaatatacactagtttcactctttgcaaaccttgctttttcctgtccctgaagtcagcacccaaccggagtaagtatgta

SEQ ID NO: 433603 - DNA, 1025 bp, Homo Sapiens
tttttttacagttgcaccttttattcactgtcagtggggaaagaaacacaccacacagcacagggttgagcagtgagggcagtcactgagtgcacagccagaagcagcacatctggaggggatagggggctacactggaactggcctccttcccctgctacccagaccccccccttccccaagcctcctttctactgctgcttagaaggccctgggcctgactggcctccaccaagcaggaagggctatacaccctggcaggcccagtcctgcccccacactctggcaaaggtaaaaagaaaacctcgaaaattccagaaagaaaatcccatatttttctgactttttaattccaaggtttgaattatttcttttttcaagaatgatgaataaaacatgtaagacattcttgaccccacagtgatctctaaagtcagctcaaagcctcacccagggtggatcttcaggaaatatttgttgcttcaatacatttttgtgtaaaaaatatttagtgtcagcttactaccctgcctggggaccccagcttcttctctttcttttctttcccccatcccacgccattccttctctctctgcagcaaggcaaatttctacctctagagactctgccattgtcaggaaaggatttagtgcctttacttatgaactaactttttcttcacttttgatatacaggtaagttaaataatcctgactacagctgaaaggactaaagtggccatctgaagtagcctttgctgataatttttagagataagaaataagatgctcatcaattagcccaaaaggatgaatgagggtagagtatgtgagaaggcagattctgggaccttgcaattcacagagttgttgcaataagattggaatttaaaggagagtttgaatatatcaatgttttgattgtctgtatatttttgtgtctgtgcaagtcatacataaatctctgccagccttgtgctttgtggcaagtctctctcagctggtgcagggacgggagacctgtg

SEQ ID NO: 433604 - DNA, 777 bp, Homo Sapiens
  misc_feature (11)..(11): n is a, c, g, or t
  misc_feature (75)..(75): n is a, c, g, or t
  misc_feature (223)..(223): n is a, c, g, or t
  misc_feature (635)..(635): n is a, c, g, or t
gctgataattnttagagatagaaagtaagatgctcatcagttagcccaaaaggatgaatgagggtagagtatgtnagaagcaagattctgggacttgcaattcacagagttgttgcaataagattggaatttaaaggagagtttgaatatatcaatgttttgattgtctgtatatttttgtgtctgtgcaagtcatacataaatctctgccagccttgtgctntgtggcaagtctctctcagctggtgcagggacgggagacctgtgtctcttctcaaggcagggccagtgctctaccacagtgctcctgagcacacagtccctgggacacccaggagtatgcaggagcatgtcctgggccacctgttgttccttccatcagcaagatggtggtcccagttcctggcctggcattgtgtgttcacactgctgggctgtctgagaatattgggcctgaggagcaaaaatcacccatgggtatgtgtgtccagaagcctggagtaatcaaacacgccttcatgggtaggcatgtttctcttagtgacgatgatggtgggtaaagacaatgcaggatgcttcgagggttctgagtcagaggactcccaggacagcacttgagctgttagcacagctgngcagaggcagaacactgagtgcttgaaaatgtggggacttcaaccaagctcctattttttttggaagaccacaatctcagaagctttttagcaggaagcctataaaggatgaatatcaatgtaacttgccctgctgtcaacc

SEQ ID NO: 433605 - DNA, 512 bp, Homo Sapiens
  misc_feature (456)..(456): n is a, c, g, or t
  misc_feature (482)..(482): n is a, c, g, or t
ccagaaagaaaatcccatatttttctgactttttaattccaaggtttgaattatttcttttttcaagaatgatgaataaaacatgtaagacattcttgaccccacagtgatctctaaagtcagctcaaagcctcacccagggtggatcttcaggaaatatttgttgcttcaatacatttttgtgtaaaaattatttagtgtcagcttactaccctgcctgggggaccccagcttcttctctttcttttctttcccccatcccacgccattccttctctctctggcaggcaaggcaaatttctacctctaggaggactctggccattgtcagggaaagggatttaggtgcctttacttatggaactaactttttccttcacttttggatatacaggggaaggtttaaataatcccggactacaggctgaaagggactaaagtggggccatctgaagnagggcctttgccggataattttaggnggataggggaaataggggtgcctcatcaat

SEQ ID NO: 433606 - DNA, 1643 bp, Homo Sapiens
tccccccctgcgcaggggggcagtgggggacccctgagaagcctcccacgggttggggccccacgcccaggcccatcttttcttaaaccagtggttcaggctctgtcccccaaggtgtcccaatactctggtcactcacctgacgtgcgctggctgcgccagggtcccagggccctgctggtctcgcggtgtcctgcacaggcggcagggggtaccgggatccacaggcaccgggaacaggcgccggttgacacggtaacagtacacgcctgcgaggcccatgagaagccacagctctccctgagccaggaacccaggtccccaggctccgtgctgccctcagcggcccccaaccacacaagctgccaatccctctgggaagcccttcggccccatttcctcctaaacccctttcttccccagaacctggggcccacgccctaaggggtggggagggacatcctcctggggccctcaggagctgggatggagtcccaccagcacaggggcactgctggggagggtgggatggtgccacacagggcagcccctaattcggtggccaggccttagctcactccacccctaccagggcttggccaccctgtccagactgcaggcctccctccatgagtctcaacatctcaggggcctccccaggccccaaacctcaaatgggactgctctggggcaggggaggccagggcagcgcgaggctggactactcagcggcctagccgagggcccgcactcacattcatggtcttcctccacgccgctgccactgctctcacgcaggcctggcaactggggttcaggatggctgcagatacactcctccttgttggtttcccgaaactcctgcagcttggagaagaaggcctcaggctggctggtgatggaagagctggtgtccagagaccctgcaatccagtcatagcccaggtatggcctgaggcgccagctcctcttaggaactgcagactcctcagagaaggtcaccctgggcttggacagcttgctctgttgagccaggatggacctcggggtctgtgcctcctggggtcctggatcacccagcctccctgagggctctgggtccctcaggcttgaggtgcccagcgagggtgctgagtggggtctcggtcggcccagggactcctggtgctggcatttggcaggtgggagagaggccacccccgatctggccacatcacggaggtcccctcgacaggcatctggtgggccccacacggaggaccggccccgtgggcaggaggtgctcaaggaagttgaggacgtctctggggtcgatggagtctctgagttgtagctgctgctggattccaggcttgactccgaggctgccctggccactgaccgccgcacagcatcctgccccacccacagctgcctcaggagctccagattgagcagccgcagctgtgccagttcctcagcctccaccatcctgggcctctctcagcaggtgtcacttgcccctgggccgcaggatgtcctcagggctgggttccaggcccagctcttctacccggcagaatcccctagcatgcgccgccgtagcagccgcagccgcctgagccgttccaggggcctcggctggccgtcttgattggtccgct

SEQ ID NO: 433607 - DNA, 902 bp, Homo Sapiens
ttttttgagctgcagagcactgagctttatttacaaacttccacagaatccctcaccctccaccccagggtcctccctctctggaactcaggcagcagacaagcttgggtccacccacctgcccaacctaggacagctgggcctgagctgggcgggcaggggattccatctcctgggtgcgcctgccagaggggagaggctggaggcggcgggaatgctgttctcccccaggagtcagtcctcagggcttctgccgtgggacgtggggccgagggacctggggcactgaccaggtcggggtcgggggcagcatctgcattggtgaggccgggtgaaaagggctgctggtgccggacagcttctggtgctgggcctcagcggagacagaggaccagaggtccaggttcctgggggctgagcttttctcagacttcggaggaaaaatgtcccagcccagcaggcagtgccggggcagggccagtgtgtcagaggcgtcaaagctctttcgccggtggatgtggtaccggtgcgggggctccaggatcgacagcgggatgctcaccctgacgtgcgctggctgcgccagggtcccagggccctgctggtctcgcggtgtcctgcacaggcggcagggggtaccgggatccacaggcaccgggaacaggcgccggttgacacgttaacagtacacgcctgcgaggcccatgagaggccccagcttctccctgagccaggaacccaggtccccaggctccgtgctgccctcagcggcccccaccacacaagtggccaatccctctggaaaccccttcggccccatttcctccttaaccctttttctctccaaaacctgggccccacgcccctaagggtgggggagggggccttcttcctgggcccct

SEQ ID NO: 433608 - DNA, 677 bp, Homo Sapiens
  misc_feature (518)..(570): n is a, c, g, or t
aaactcaggggcgagctgcagcgtggacggcaccagtcgcagtgaagagggaggccgggtgggagagctcctgcccagggggcagggccccatagggccccggaaggcagggcaggaggtcattccgaaagtcaagcttgtgggagtcacccttcattttctcctggtgtttcaggatcatgtaagccacacgcacagtgcatggcacaccacttgcctggtttcctcaaaggtggccggaaatggtcggggatctgtgtccccttctgggagagcccgctcggcaccggccccagtcgtggtggcagctcagggttcgtgatcttgggctggaaggccccttgcagggagccaaaggagacggccggcgggaggcccggaggcagcccgggcactgcgggagggaaggccgtgtacggattatgtcggaaaaggctttccatctttcctggatatttctcaaacatgtgggggccgtggggtggcagcaggcccgggggataaggggtgaagtgctnnnnnnnnnnnnnnnnnnnnnnnnnnnnnnnnnnnnnnnnnnnnnnnnnnnnnaaggccaggggccgggccgagccccttgcccccaccacctcagggccaccctgggcattcaggtagcgagagttcaggcccggccgatcaggtcctgctcagaaagg

SEQ ID NO: 433609 - DNA, 500 bp, Homo Sapiens
tttaacatctgtgaaccaggctattagtcctgctaaagcgccaatcctgctgtcagagctcacccccttcctaagacaggtagaaaaatgtaatgtagctttttccacaagccagttccctgtcccttcagtctcaggagccctaggagagtctaagctggggcatcccctggcccagaggactcccgtggtgggcacagttctaagtggatcaggctgtcttgggtgcactggacttggagcactaccttgagaagtcaggttgagaaagtagttgatctataaggcaacaagtgggcatgtgttccccagcacattacccaggccagcagagccaaacctatgagagggcagtgggtatattctctgccccaggcagccatgacatacacataaataccccaatcactcagacttacggcaacaagtgttgtctcactatggtgatctctaagatccacatcactggatgcgtagtcatcccagtcatggtaccctgt

SEQ ID NO: 433610 - DNA, 2143 bp, Homo Sapiens
gtcgggggctcaataaaaacttttaattacatttcagagacttcgtacagtgcaacagtgaatattcactgttaattttcacaagagtccatttcatcaaacgttcagagagtctgccttttcattcccttgttcctcagtgctccaatcaggtttccagtctcccagaggtttcttttagttttgattaccgaccaaaactccagtttagggagaatggaagtccaccgtcccatccccaccaaaacatatttcagtcaaacccaatcccagtccctaaagaattaggaaagtatgggccaagggtccttttaattatacacacatcacccttaaaactgcgtgtgtgtacgagaaataaagaaaaacacaagaggggctgtaaaatactgcacaagacaacaaaacagaaggaaagtcttgagggagaaacactaagacgcgagcggcaggatcctacctcctgtccgtgacactccccattgacaccttccccactgtgccatggcggggaaggactaaagtcgagtctctagggtctctagaggtcttgctaggatgagcttaaagagatggggtgagggtggggggaactgcttccattatatttgtggttctcagggttaagcagtgaggaggggcaggaagattcagaatgatccgtgggtccaaccctttggatgtgaacattcctggatagaaactggaggactctcttgacaaagtgcaggaagggataaacaaaaataagatcaagtgaaatgggaaaaccctcaaagagatcaagatgggcagtggtggtggtgaaggtagagaagtggttttcagaacctgttctggccaaggtggaagaatgtgcggcagccatgaagaaatatcaaggcttcaggtagctagcacctttcaaactggcaccatggcctttcccagggggtgggaccaatagggtttggaggatcatccaggtcacacgtctcaggtagaaatgcagggtttgacatgccttctctatttgctgcacctctctacctgcaacacaggcttggggagagtagcggtagggaggaaggagcactcctctcctagctcctgaggagagcatcagataatcttggcagtatcaggctggtaaatgcagtggtcctggtattgggtgactttctgaactgctctttatgttcttccagcattcctccacagggtaccgtgactgggatgactacgcatccagtgatgtggatcttagagatcaccatagtgagacaacacttgttggcgtaagtctgacagttgggaccgctgaagcccaacccttgtgtcaacggcggcacctgcaaagacatgaccagtggctacgtgtgcacctgccgggagggcttcagcggtcccaactgccagaccaacatcaacgagtgtgcgtccaacccatgtctgaaccagggcacgtgtattgagcgacgttgccgggtacaagtgcaactgcctgctgccctacacaggtgccacgtgtgaggtggtgctggccccgtgtgcccccagcccctgcagaaacggcggggagtgcaggcaatccgaggactatgagagcttctcctgtgtctgccccacgggctggcaagggcagacctgtgaggtcgacatcaacgagtgcgttctgagcccgtgccggcacggcgcatcctgccagaacacccacggcggcataccgctgccactgccaggccggctacagtgggcgcaactgcgaagaccgacatcgacgactgccggcccaacccgtgtcacaacgggggctcctgcacagacggcatcaacacggccttctgcgactgcctgcccggcttccggggcactttctgtgaggaggacatcaaccgagtgtgccagtgacccctgccgcaacggggccaactgcacggacttgcgtggacagctacacgtgcactgccccgcaggcttcagccgggatccactgtgagaacaaaacgcctgacttgcacagagagctcctgcttccaccgcgttggcacctgcgtggacgggcattcaactcgttcaacctgccctgtgtccaaccggcttcacgggccagctactgccagcaacgatgtccatgacgtgccactcacaggcctgcctgcat

SEQ ID NO: 433611 - DNA, 966 bp, Homo Sapiens
  misc_feature (109)..(109): n is a, c, g, or t
  misc_feature (149)..(149): n is a, c, g, or t
  misc_feature (183)..(183): n is a, c, g, or t
  misc_feature (274)..(274): n is a, c, g, or t
  misc_feature (285)..(286): n is a, c, g, or t
cttcctcgctgggggtgccttaaacgaagccatggccccctccaaaggattttgttccagcgccccccatccggcagcagaaatcaggccctgtgccactgtcgtcgtntgcagcatggcagggatgagcccccccttccttgggccancagctccctctgggctgctgagccgattttgacnagggcgcttgtggcagcagcaatggatttagcagcttccaagatctgttcctcaaagtccagggtctcatccgcttgttttggtttgctcntggctcagtgnnctctaacttcttagcagcagcttcgatggatgctgcagcccccagtaactctgtttctgcaatgacagttgggtcttctggatccacccactctgttcctttcatggcttccgccgcctggatgagctctgtcacagcgccggcgactcgcttggagaaagcggccagctgctgcttgaattctggggttggtttctgaagaatcaccaagacgtgctccaggaggtccaagtagccaagggtgcactccgtcccgaaacgcaaggctctggttctcacctcgtcactgacatcggggtggaaggatgcttgcttgcaagccgtcaacatatctgacacggctttccggctcaggttggcagtagcaatcacgtcctcctgtctacatgagttcccagctgccacggctttggctgttgccatggtgatgcctttcgtcatccttatggattcttcaggtgatgatgtcttttcaggtacgtcttttgactggaacaccgtaagctcctgctttatgcattcaattgtggcctcaagcgccctggtgccccgggtggcctcatcctccactgcctttacagtcttgaggagcgaggtgacattggtcaccatcaccttggcagcccccttgagctggtacatggaagggtcgtccactggcttgctggcagctccttggt

SEQ ID NO: 433612 - DNA, 675 bp, Homo Sapiens
gattctccttgccctggacgtggtctccccttccttctctggtgaactcacgctcacccttaacgctagcccgaacatcctttctcgggaagtctctcctcacagtcctatgtactcacagttgcagaaacgcttccttcccctggagtttcaggtttgctacctgagtcgacccctacctgcctctcccaccagactgcagggcaccggaaccgtgggcatgcccagctcttgctcacggtaccagcaggtggcgctgcagctggtatagaaaggtggatgtgtgtgtgtcaagtgaatagatagatgaacagccccaaggcacagatgataacctcatggttctgatggggaaacaatctcagatcaagtcactggcccacagtgactcagcaaagaaggtgcagaactgggctgtcactgccgtctgctgcaaaacctgccttctcaagcgctcctctatctcgcactgcctggaaaagcttccgtgaggcagggctgagttctgtatagaaaagaggctgcagggagacattcttatagaagcaggcagcggaccaggcacctgccatgtcacaggcacagggcagctagactagcctttcctatattcaggtcatgacccagaaatgagtcccatcatcaatctgatgggttgcaaccaacatcttaaga

SEQ ID NO: 433613 - DNA, 1851 bp, Homo Sapiens
  misc_feature (1036)..(1036): n is a, c, g, or t
  misc_feature (1815)..(1816): n is a, c, g, or t
  misc_feature (1833)..(1833): n is a, c, g, or t
  misc_feature (1835)..(1835): n is a, c, g, or t
  misc_feature (1841)..(1841): n is a, c, g, or t
gcacaactacctgggtctgaccaatgagctcttcagccacgagatccagcccctgcgtctgttccccagccccggcctcccgaactcgcaccagccctgtgcggggctccaagagaatggtcagcacctcagctacagacgagcccaggagaccccaggcggccacccgatcccaccggggccccgctgcctggacctacaggggaccctgtgaagcccacatccctggaaaccccctcggcccctctgctgagccgctgcgtctccatgccaggggacatctcaggcttgcagggtggcccccgctccgacttcgacatggcctatgagcgtggccggatctccgtgtccctgcaggaagaggcctccggggggtccctggcagcccccgctcggacccccactcaggagcctcgtgagcagccggcaggcgcctgtgaatacagctactgtgaggatgagtcggccactggtggctgccctttcgggccctaccagggccgccagaccagcagcatcttcgaggcagcaaagcaggagctggccaagctgatgcggattgaggacccctccctcctgaacagcagagtcttgctgcaccacgccaaagctggcaccatcattgcccgccagggagaccaggacgtgagcctgcacttcgtgctctggggctgcctgcacgtgtaccagcgcatgatcgacaaggcggaggacgtgtgcctgttcgtagcgcagcccggggaactggtggggcagctggcggtgctcactggcgaacctctcatcttcacactgcgagcccaacgcgactgcaccttcctgcggatctccaagtccgacttctatgagatcatgcgcgcacagcccagtgtggtgctgagtgcggcgcacacggtggcagccaggatgtcgcccttcgtgcgccagatggacttcgccatcgactggactgcagtggaggcgggaacgcgcgctgtacaggcagggcgaccggcttcgactgcacttacatcgtgctcaatgggcggctgcgtangtgatccagcgaggcagtggcaagaaggagctggtgggcgagtacggccgcggcgacctcatcggcgtggtggaggcactgacccggcagccgcgagccacgacggtgcacgcggtgcgcgacacggagctggccaagcttcccgagggcaccttgggtcacatcaaacgccggtacccgcagtcgtgacccgccttatccacctactgagccagaaaattctagggaatttgcagcagctgcaaagacccttcccaggctctgggttgggtgttcccccacactcggaactcaccaacccatccatcaacctggcaactgtggcaatcctgcctgtgtgtgctgaggtccccatggtggccttcacgctggagctgcagcacgccctgcaggccatcggtccgacgctactccttaacagtgacatcatccgggcacgcctgggggcctccgcactggatagcatccaagagttccggctgtcagggtggctggcccagcaggaggatgcacaccgtatcgtactctaccagacggacgcctcgctgacgccctggaccgtgcgctgcctgcgacaggccgactgcatcctcattgtgggcctgggggaccaggaggcctaccctcggccagctggagcagatgctggagaacacggctgtgcgcgcccttaagcagctagtcctgctccaccgagaggagggcgcgggcccacgcgctcgttgggagtggctaaatatgcgcatgggtgctcggggcactgcacctgcgctgtccgnncgcctcttttcgcgcgnancctgcnaagctgatga

SEQ ID NO: 433614 - DNA, 2123 bp, Homo Sapiens
tccaagagttgagtttattgggggaggggctggtcaagtcatcagtgcaacactgcatccccgctcagggcaggtcagtccagtgtgtgggccgcgggggtcacaggcatagcagcaggagggggagtgagctacccccacggggccacccccagcccagtccaggggtgggagggagggggtgacccctgtcgaggtcctcaggcatctgtggctgagccgggcggctcctggggcagacagcgtcgttgccggagaatcgacttctcctcctccatctcggaggcagtgctggggcttgcgccctcgggggaccccccttcatccctcgagcagtcgggtccggcgtcctcctcatactctgtcagacaatctgactcctttccgtcagcacagccatcagagacatagctcgtggggggctcaatccgggacacaatctctgccaagtcagtgaagccagagcttgggaaggcaagcacgtctgcacggcggctctcattaaggtctgtagaccgccggtctgtgagcattttctcaatgacgttgccacggctccagcctccaaacaccgccttcccgtactggtagcccacatcatagatctggtcgaacttcccaaagtccatggtcttgaagcagtcgatgggcgggcgcaggtactcgcagtaggagctggacttgacaacctctagctgccgcacacaggacacgtaggccaggcgggactggatttcagccatgtctggaacctttaccttgtcagcccagggattcagccgcttccacagcagccaccagccggacaggctgtccccgtaggtgctgaggtccgtctcatcctggctccccacgtcaatggcgatgaccgttttggcacccatgctgcgggcgatgtccgctggcagattgttgatgtagccgccatccatgagtaggtgcccgtccttggggtcgcacagcgggggcaggtagcccgacagcgtcatgctggcgcgcacgtaccgccacagggagccatctttgtggactcgcatggctgaggcggtgatatctgtggtcacgttgaagtaaggcagccacaggtcctcaatctgcttatcctggaagacccgatggatgctgcggttaaaggcagacccagtgaacatggaggtgactgggtacgtgaggtccaacacaggttccagcaccgaagtcatgctcttggcccactcccgggcccgctgcttcgtgcggctgggctgcgctcctccgcgtacaacgctccgatgaaagagccaatggacgtgccgcccaccaggtccacggggacccccgcctcctctaatgcctttagtactccgatgtgcgagcagcccctggccccgcccccgcctagcacaagggcaatggtgttccccgtgagcaccctcgccaagcgggagaagtcgctgtgccggtccgcgcgcctggagaaaaccttctcgtagagctcatgcagcttggcagggctgcggcgcgaaaagaggcggcgcggacagcgcaggtgcaggtgccccgagcaccagctgcgcatatttagccactccacggtgcgcgtggggcccgcgccctcctctcggtggagcaggactagctgcttaagggcgcgcacagccgtgttctccagcatctgctccagctggccgagggtaggctcctggtcccccaggcccacaatgaggatgcagtcggcctgtcgcaggcagcgcacggtccagggcgtcagcgaggcgtccgtctggtagagtacgatacggtgtgcatcctcctgctgggccagccaccctgacagccggaactcttggatgctatccagtgcggaggcccccaggcgtgcccggatgatgtcactgttaaggagtagcgtcggaccgatggcctgcagggcgtgctgcagctccagcgtgaaggccaccatggggacctcagcacacacaggcaggattgccacagttgccaggttgctggctgggttggtgagttccgagtgtgggggcacacccaacccagagcctgctcggaagggtccttgcagcagctgcaagcctcgtgccgaattcgccacccaggcctcgctaccttataccgcggtttactgc

SEQ ID NO: 433615 - DNA, 471 bp, Homo Sapiens
  misc_feature (395)..(395): n is a, c, g, or t
  misc_feature (435)..(435): n is a, c, g, or t
gccatttccaagaggcgagtttattgggggaggggctggtcaagtcatcagtgcaacactgcatccccgctcagggcaggtcagtccagtgtgtgggccgcgggggtcacaggcatagcagcaggagggggagtgagctacccccacggggccacccccagcccagtccaggggtgggagggagggggtgaccctgttcgaggtcctcaggcatctgtggctgagccgggcggctcctggggcagacagcgtcgttgccggagaatcgacttctcctcctccatctcggaggcagtgctggggtttgcgccttcgggggaacccccctttcatcccttcgagcagttcgggtccggcgtccttccttcatacttcttgttcagaacaattttganttccttttccgttcaagcacagccattcagagacattagnttcgttgggggggtttaattccggggacaaaatttt

SEQ ID NO: 433616 - DNA, 1829 bp, Homo Sapiens
  misc_feature (7)..(7): n is a, c, g, or t
  misc_feature (17)..(17): n is a, c, g, or t
  misc_feature (24)..(24): n is a, c, g, or t
atttttnaagacttgancacctgnagaattaaatacaaaagcaatcaaaaatcatcatattttctaaaaacagttttccatttggggcttgcggccctcttcaataaaatcattctgaagatttaaagaggtttcagcttcaaattctcagaataaagactccttttgagaggggctacagaagcccccatgagcttcctgctcctcaaaactaacaggcaaaacaacaaacctcctagaaagcaaatatgacccttctcaatacagagcttttcccaccctaatttgtagtttttcagaaaagactggggaagcaggtaacagcgagccagtcatcttgtgaagaaggtcctggagcgagccctggagcgggggctccccaggagggcccgagcagcggagacttctcactccacctctccagtctctgatcagcacacagtcggtggggcgctcacacttggaaaagcttccaggaggcagctcttcagtagtgaccaaggcacacgtggtccatggacaattttatcctgtgaagcggatacggcttctcacaaaggttgaccagcacgtacaaatgtctcaacgcatactcgtaatccagatgccgctggatctcctccgtgagctgcctggactcctccagatcattggtgttcatcagtttccttttcatgatggtgagaggcacatcagggctgggggtgaggtcaaggtgtgtgactggaggtagggggacgggagaactggctttgcgtttcataccctgaaactgcatcactttcatggtggagattgttttgtttccatactgcatgacgtggctggtgttggtgtgcgattttaccaggtggtactgcttgtgcagggtctctttagtcagatcttccacgtccgagtcttccatccagttgacgctgtaccagtcccccaggtacgtggacctcttctcatcatagtaacaggcgtaggacgactctctggggttggcagcagtagttgcataaacattgatgttatccggcaggtggttcatcatggacccagactcacaggcttcaatgtagaacaccatctttcggtacattttgtgtttgtacatgtaatggatggtctcattcaggtcctttacatgaagatcttcattgggaaaaaccagtattccagtagatccatggtcagtgaagtaaatgaacacgtgatcctgggggccactcttcaggactttgccggatcctatgcccttcactgcttctgcatcgcctctcaacacagcaaggaaattttgtggggtaacatcctctccagtgtagtccttcgggactccctgatagacatctgtgccattgggcctgttgatcacaattcctggagtgggattgtcttcagagtaagcaatgtcatcgtacatcatcacaacgatctgttcgtcaggaatcccattgcggtgaatgatctggtaggcatggcacgcgtctgcctggtgcctataattataccagccatttgaacctgccacgatcaccacccagtgcttgcctccatcttcaggatcatctataggaacggcaccaatgcccagggccacactgaggaatacagctactttccaaaccattctgcaccttggagttcaattgcagacacctgtggcaggcgaccgtggtggcagtggtggcggcggcggcggtgagtgaccgcggtggtggcgccggcgggaccgtgagaactcgcggcggctcgcagcctcacaccaaacacccacgacgtcggcactgctgtgattgctgcgggcgccgccgctcctcgcttaagggccaccgtccgct

SEQ ID NO: 433617 - DNA, 888 bp, Homo Sapiens
  misc_feature (846)..(846): n is a, c, g, or t
tttgggttctgttataaatctttattttttaagacttgaacacctgcagaattaaatacaaaagcaatcaaaaatcatcatattttctaaaaacagttttccatttggggcttgcggccctcttcaataaaatcattctgaagatttaaagaggtttcagcttcaaattctcagaataaagactccttttgagaggggctacagaagcccccatgagcttcctgctcctcaaaactaacaggcaaaacaacaaacctcctagaaagcaaatatgacccttctcaatacagagcttttcccaccctaatttgtagtttttcagaaaagactggggaagcaggtaacagcgagcaagtcatcttgtgaagaaggtcctggagcgagccctggagcgggggctccccaggagggcccgagcagcggagacttctcactccacctctccagtctctgatcagcacacagtcggtggggcgctcacacttggaaaagcttccaggaggcagctcttcagtagtgaccaaggcacacgtggtccatggacaattttatcctgtgaagcggatacggcttctcacaaaggttgaccagcacgtacaaatgtctcaacgcatactcgtacgttggggaagtgccagttgaagcagtgggtccggaagtgcagcagggcctctgggtagcagctgtgccccgtgagcggggcttctctcggacaggagctgctccacctcagcctcggagcgctgccagcaaggagacgatcttacgcactgacttctcaatgaggtgcctggcatccagatgccgctggatctcctccgtgagctgcctggactcctccagatnattggtgttcatcagtttccttttcatgatggtgagaggcac

SEQ ID NO: 433618 - DNA, 1028 bp, Homo Sapiens
taggaccaatcctggcggtcggaggtagcacctttccatggactggtgtatgaacctgtttttattacttgtcttctcttgatgggcaatggttcatcgatcccctcttcttggcatttctctctccagagaaggttgtcttcagccaaatttctccagtagcgacatgtctgagctgcttgtagcaggtctttgggttccaggaatgaaagcacatagagtgccaactctttagggagcaatgaaatgaagtctcgttgaaactggggttctatcacttgcatcatatgttttacttgtgttggttcacaactatcaatgagttcatctaaagcaagcgatttctctggtccactccagctctgaaacatttttagccattcctggaggcctgtaggtggctggacagatgtaattcggcgtcgttgttgcccttggccattggctgctctgaggtccccaaaagttgttggtgttgctgaacatggtacaagcccagtggtacttgtatattctgagactttgcatggtttctttcccaaagaaaaagagcggacctcagaaccatggtccaactttcttttcattttgtaaaaaatcatttttaatgtgccgtagaaacccatattttctgtatttttccccttcagtgattctgtgcccccgtgtgtccggctgcttggcagtctctgacaatataaacctttttcaggtaggtatgtcacagattctaatgtggacatgctcaggcacgtcagaaaaggaagattagggagcagaaccggcaacaaaactccacagtaaaggcaaatgcagctcagtatcaaaccgcttctcgggacacacatacatacatgcagcttgactgagaagaactcgagggaataatgagagagaacggagaagattattggaggagactatgccctgtcgaagcccttgactgaacagattcctccctcagcagcagagggatcagattacattttcccttgaacacagaatggtgcagtccaggattcagcaat

SEQ ID NO: 433619 - DNA, 703 bp, Homo Sapiens
gtgctggaacgtggaggctcgccaccgtccagggcagtcagcacgagcgtatggtgattctgttgctcgcggtccagagccttctggatgaccagttctgggaacttggtgccgtcgccgcgggacttaacgtccagtccaaagaggccgtgatcgtcgcgcgtgagcaggtaggtgcggagcccattctcgccggcgtcggggtcatgtgcgctggtgagggggaagcgggtgcccggagcagcgttctccgagatgtccatttcgatctggtccgaggagaaggagggcgcgttgtcgttgatgtcctggatctctaccttgatcatgcagatctccttgtcgttggcgaacacctcgagggacagctggcacttggcattgtggcggcacagggactcgcggtctatgcgctgcttggtgtagaggagcccgttgtctgcgtccacttccagcaggtgcggtgcggatttctccagcccccggtagctacccgacttgctgcgccctccgccgccgcgctttgcaggcggaagcccaggctgcattcgagcatccctgccgatgttcccgatcaccgtgccggccctttgctcctccggcacggagtagttgaggttcttgagagtgagggcaggggcccatagaagaaagcagcaacagatggaaaggtacatcccagacctgtaaggtgggggcagga

SEQ ID NO: 433620 - DNA, 700 bp, Homo Sapiens
attcacaataggggaaaagacagagacaatgggaaattgtgcttccgatggggtggggactgagaaggagaggacagacagacagacagacagggggttgtacagaagaggtccggtttcttgaagcagctggaagtcctggatagttcccacctgaaagtctgtttgcaaaggcaatgcgcactcaggcaccagagggcagaggacagaagcttttcctcaaaggtgcaaaaggagcaactgtgttgaacaggggctcaagttccagggttttaaggtgcttggaactcccaggagcctggcaaaccttcatccagaacctcttcctcaagcaagacaaaaagctgctaagcactgctccctccgtctctgtgaagagaccagcttctaacagacggtgccgggctgaccccccatcatgccaggctggctcaccctccccacactctgccgcttccttctttgggccttcaccatcttccacaaagcccaaggagacccaggtaagaccccagcccaggccagaatctgggggaggcttggggagactgcaagggtggggaaaggggaaagggcagtcctgttgcaggtacccagggaactgaaagtcattgctgagaaggcaatggaggagagggttggggggctctggagaagcatttggggagcagggtctgatgggcacttggggcagtgagga

SEQ ID NO: 433621 - DNA, 1134 bp, Homo Sapiens
  misc_feature (954)..(954): n is a, c, g, or t
  misc_feature (963)..(963): n is a, c, g, or t
  misc_feature (967)..(967): n is a, c, g, or t
  misc_feature (969)..(969): n is a, c, g, or t
  misc_feature (981)..(981): n is a, c, g, or t
  misc_feature (1001)..(1001): n is a, c, g, or t
  misc_feature (1024)..(1024): n is a, c, g, or t
  misc_feature (1027)..(1027): n is a, c, g, or t
  misc_feature (1044)..(1044): n is a, c, g, or t
  misc_feature (1057)..(1057): n is a, c, g, or t
  misc_feature (1060)..(1060): n is a, c, g, or t
  misc_feature (1062)..(1062): n is a, c, g, or t
  misc_feature (1074)..(1074): n is a, c, g, or t
  misc_feature (1078)..(1078): n is a, c, g, or t
  misc_feature (1080)..(1080): n is a, c, g, or t
  misc_feature (1084)..(1084): n is a, c, g, or t
  misc_feature (1106)..(1106): n is a, c, g, or t
  misc_feature (1114)..(1114): n is a, c, g, or t
  misc_feature (1122)..(1122): n is a, c, g, or t
  misc_feature (1125)..(1125): n is a, c, g, or t
ggaaaggacagacagacagacagacagggggttgtacagaagaggtccggtttcttgaagcagctggaagtcctggatagttcccacctgaaagtctgtttgcaaaggcaatgcgcactcaggcaccagagggcagaggggctcaagttccagggttttaaggtgcttggaactcccaggagcctggcaaaccttcatccagaacctcttcctcaagcaagacaaaaagctgctaagcactgctccctccgtctctgtgaagagaccagcttctaacagacggtgccgggctgaccccccatcatgccaggctggctcaccctccccacactctgccgcttccttctttgggccttcaccatcttccacaaagcccaaggagacccagcatcccacccgggcccccactacctcctgccccccatccacgaggtcattcactctcatcgtggggccacggccacgctgccctgcgtcctgggcaccacgcctcccagctacaaggtgcgctggagcaaggtggagcctggggagctccgggaaacgctgatcctcatcaccaacggactgcacgcccgggggtatgggcccctgggagggcgcgccaggatgcggagggggcatcgactagacgcctccctggtcatcgcgggcgtgcgcctggaggacgagggccggtaccgctgcgagctcatcaacggcatcgaggacgagagcgtggcgctgaccttgagcttggagggtgtggtgtttccgtaccaacccagccggggccggtaccagttcaattactacgaggcgaagcagggcgtgcgaggagcaggacggacgcctggccacctactcccagctctaccaggcttggaccgagggtctggactggtgttacgcgggctggctgctcgagggcctccgtgcgctaccctgtgctcaccgcacgcgccccgtgcggcnggccgaggncggncncgggatccgcanctacggaccccgcgaccggntgcgcgaccgctacgacgccttntgnttcacctccgcgctggngggccaagtgttnttngntgcccgggcggntgangntgtntgaagcccacgcggcgtgcggngacgcggngcgtggtngcnaaggttggg

SEQ ID NO: 433622 - DNA, 1014 bp, Homo Sapiens
ttcccgggatgtttcttgaggcagctggaagtcctggatagttcccacctgaaagtctgtttgcaaaggcaatgcgcactcaggcaccagagggcagaggggctcaagttccagggttttaaggtgcttggaactcccaggagcctggcaaaccttcatccagaacctcttcctcaagcaagacaaaaagctgctaagcactgctccctccgtctctgtgaagagaccagcttctaacagacggtgccgggctgaccccccatcatgccaggctggctcaccctccccacactctgccgcttccttctttgggccttcaccatcttccacaaagcccaaggagacccagcatcccacccgggcccccactacctcctgccccccatccacgaggtcattcactctcatcgtggggccacggccacgctgccctgcgtcctgggcaccacgcctcccagctacaaggtgcgctggagcaaggtggagcctggggagctccgggaaacgctgatcctcatcaccaacggactgcacgcccgggggtatgggcccctgggagggcgcgccaggatgcggagggggcatcgactagacgcctccctggtcatcgcgggcgtgcgcctggaggatgagggccggtaccgctgcgagctcatccacggcatcgaggacgagagcgtggcgctgaccttgagcttggaggccggggccggtaccagttcaattactacgaggcggaacaggcgtgcgaggagcaggacggacgcctgggcacctactcccagctctaccaggcttggaccgaagggctggactggtgtaacgcgggctggctgctcgagggctccgtgcgccaaccctgtgttcaccggcaagggccccgtggggggggcccaggccgggccgggaatccgcagttaccggaccccccgaaccgggatggccgaaccgctaagaaacccttctggttcacctccgcgcttggggggcccaaggggttcttttggggcccgg

SEQ ID NO: 433623 - DNA, 1214 bp, Homo Sapiens
  misc_feature (577)..(629): n is a, c, g, or t
  misc_feature (1075)..(1075): n is a, c, g, or t
cggtccggaatttccgggatggtttcttgaagcagctggaagtcctggatagttcccacctgaaagtctgtttgcaaaggcaatgcgcactcaggcaccagagggcagaggggctcaagttccagggttttaaggtgcttggaactcccaggagcctggcaaaccttcatccagaacctcttcctcaagcaagacaaaaagctgctaagcactgctccctccgtctctgtgaagagaccagcttctaacagacggtgccgggctgaccccccatcatgccaggctggctcaccctccccacactctgccgcttccttctttgggccttcaccatcttccacaaagcccaaggagacccaggtaagaccccagcccaggccagaatctgggggaggcttggggagactgcaagggtggggaaaggggaaagggcagttgttgcaggtacccagggactgaaagtcattgctgagaaggcaatggaggagagggtttggggggctctggagaaagcatttggggagcagggtctgatgggcacttggggcagtgaggattgggggttcctgccactgtnnnnnnnnnnnnnnnnnnnnnnnnnnnnnnnnnnnnnnnnnnnnnnnnnnnnnattccacgagggacattccctcctcatcgggggggccaacgggcaacgcctgcccccggcgatcttggggccaccccccaccctccccagccttaacaaggtggccctcttggcacccaaagggtggcgataccctgggggtagagactcccgcggagaaaaaacctaaaatacctcaagtaacgccatagggtccttgcccacgcacccatggcgggaacaagtagctcccacaccgacatatatacacctagacacgagccaggcgttgacaaccatcctacagtcagccaacgcccatctggcggacgtctaggtctgttgcactccgcgtccaatgatacaatgagactggtgcgtaaacacgagataccagtgttactagcgagtgtggttgtgccgcgcgccccgccgaggattgaacgagacacgccacagcgccgcgncgattaagagcacacgcacttcgcctctcgtaatactagatgcaagagtgctgtcggaagtgagtgtgagacgaactggcggaacattacgtactcgaacgcaaacatatgacacacgtcacggacatcatacaaatat

SEQ ID NO: 433624 - DNA, 1131 bp, Homo Sapiens
gaattcccgggatgggggttgtacagaagaggtccggtttcttgaagcagctggaagtcctggatagttcccacctgaaagtctgtttgcaaaggcaatgcgcactcaggcaccagagggcagaggacagaagcttttcctcaaaggtgcaaaaggagcaactgtgttgaacaggggctcaagttccagggttttaaggtgcttggaactcccaggagcctggcaaaccttcatccagaacctcttcctcaagcaagacaaaaagctgctaagcactgctccctccgtctctgtgaagagaccagcttctaacagacggtgccgggctgaccccccatcatgccaggctggctcaccctccccacactctgccgcttccttctttgggccttcaccatcttccacaaagcccaaggagacccagcatcccacccgggcccccactacctcctgccccccatccacgaggtcattcactctcatcgtggggccacggccacgctgccctgcgtcctgggcaccacgcctcccagctacaaggtgcgctggagcaaggtggagcctggggagctccgggaaacgctgatcctcatcaccaacggactgcacgccccgggggtatgggcccctgggagggcgcgccaggatgcggagggggcatcgactagacgcctccctggtcatcgcgggcgtgcgcctggaggacgagggccggtaccggtgcgagctcatcaccggcatcgaggacgagagcgtggcgctgaccttgagcttggaaggtggtggtgtttccgtaccaaccccacccggggcgggaaccagttcattactaccaaggcgaaacaggccttgcgaagaaccagaacggacgcccgggccccctaactcccgggttctaccaggctttggaacccacggggtcctggcactgcgggtaaaccccgcactggcttactccaaggggtatcccggcggctacaccgaacgatcaccccccattaatccccgcggcggaggcgacccaacgccacgtaccggttacccccataaatttatgcgtcccactcgccccggttatgtccttccccatgctccccaacccccaatccccgtaatcccccataaagggtt

SEQ ID NO: 433625 - DNA, 1044 bp, Homo Sapiens
  misc_feature (49)..(49): n is a, c, g, or t
  misc_feature (887)..(887): n is a, c, g, or t
  misc_feature (894)..(894): n is a, c, g, or t
  misc_feature (898)..(898): n is a, c, g, or t
  misc_feature (940)..(940): n is a, c, g, or t
  misc_feature (947)..(947): n is a, c, g, or t
  misc_feature (960)..(960): n is a, c, g, or t
  misc_feature (962)..(962): n is a, c, g, or t
  misc_feature (968)..(968): n is a, c, g, or t
  misc_feature (973)..(973): n is a, c, g, or t
  misc_feature (1000)..(1000): n is a, c, g, or t
  misc_feature (1008)..(1008): n is a, c, g, or t
  misc_feature (1022)..(1022): n is a, c, g, or t
  misc_feature (1025)..(1025): n is a, c, g, or t
  misc_feature (1032)..(1032): n is a, c, g, or t
ggaccggtccggaattcccgggatcgccagggcgagaggcgggagccgngagaggtgaggcaggacccgggctccactgccgcctctccgagctcttgtgacgcggacctcagtgccaggatggctcggggcgagcggcggcgccgcgcagtgccggcagagggagtgcggacagccgagagggcggctcggggaggccccgggcgacgggacggccggggcggcgggccgcgtagcacggctggaggagtggctctggccgtcgtggtcctgtctttggccctgggtatgtcggggcgctgggtgctggcgtggtaccgtgcgcggcgggcggtcacgcatgcactccgcgcctcctgtgttgcctgccgactcctccagccccgccgtggccccggacctcttctggggaacctaccgccctcacgtctacttcggcatgaagacccgcagcccgaagcccctcctcaccggactgatgtgggcgcagcagggcaccaccccggggactcctaagctcaggcacacgtgtgagcagggggacggtgtgggtccctatggctgggagttccacgacggcctctccttcgggcgccaacacatccaggatggggccttaaggctcaccactgagttcgtcaagaggcctgggggtcagcacggaggggactggagctggagagtgactgtagagcctcaggactcaggtacttctgccctccctttggtctccctgttcttctatgtgggtgacagatggcaagggagtcctactaccagaggttggggccaagggggcagttgaagtttatcagttggcacacccgttgaactttggtaactttccgctttacacttttgccacccacccagtccaggggatacanccccaantatngcagctacaatgtcttctggacttcaacccaggactgccctnctgacanaaatgtaaaaatncnctaaanactgnttcacatcggccccagggcctcccttnaactactnggcttcaaatcctnaantggaggnaaagtcaattgg

SEQ ID NO: 433626 - DNA, 1048 bp, Homo Sapiens
  misc_feature (25)..(27): n is a, c, g, or t
  misc_feature (35)..(35): n is a, c, g, or t
  misc_feature (37)..(37): n is a, c, g, or t
  misc_feature (39)..(40): n is a, c, g, or t
  misc_feature (51)..(51): n is a, c, g, or t
  misc_feature (60)..(60): n is a, c, g, or t
  misc_feature (65)..(65): n is a, c, g, or t
  misc_feature (71)..(71): n is a, c, g, or t
  misc_feature (79)..(79): n is a, c, g, or t
  misc_feature (91)..(91): n is a, c, g, or t
  misc_feature (93)..(93): n is a, c, g, or t
  misc_feature (103)..(103): n is a, c, g, or t
  misc_feature (106)..(106): n is a, c, g, or t
gggccgatctaaccagcttttagcnnntttacatntntnncagagggcagnctggttgangtcangagacntgtagctncatacttggggntnatcccctgantgntggtgcaaaagtgtaaagcgaagttacaagttcactgtgtgcccactgataacttcaactgccccttgccccaacctctggtagtaggacttccttgccatctgtcaccacatagaagaacaggagaccaaagggagggcagaagtacctgagtcctgaggcttctacagtcactctccagctcccagtcccctccggtgctgaccccccaggcctcttgacgaactcagtggtgagccttaaggccccatcctggatgtgttggcgcccgaaggagaggccgtcgtggaactcccagccatagggacccacaccgtccccctgctcacacgtgtgcctgagcttaggagtccccggggtggtgccctgctgcgcccacatcagtccggtgaggaggggcttcgggctgcgggtcttcatgccgaagtagacgtgagggcggtaggttccccagaagaggtccggggccacggcggggctggaggagtcggcaggcaacacaggaggcgcggagtgcagcgtgaccgcccgccgcgcacggtaccacgccagcacccagcgccccgacatacccagggccaaagacaggaccacgacggccagagccactcctccagccgtgctacgcggcccgccgccccggccgtcccgtcgcccggggcctccccgagccgccctctcggctgtccgcactccctctgccggcactgcgcggcgccgccgctcgccccgagccatcctggcactgaggtccgcgtcacaagagctcggagaggcggcagtggagcccgggtcctgcctcacctctccggctcccgcctctcgccctggcgaccaccgtccggttagcgacacctgccagccagcgcctgcgccatccgccatcccgaacgcgtgggtcgacagatatcccgggaattccggaccggaccagcctgcttt

SEQ ID NO: 433627 - DNA, 1017 bp, Homo Sapiens
  misc_feature (7)..(7): n is a, c, g, or t
  misc_feature (27)..(27): n is a, c, g, or t
  misc_feature (31)..(31): n is a, c, g, or t
  misc_feature (33)..(33): n is a, c, g, or t
  misc_feature (37)..(37): n is a, c, g, or t
  misc_feature (39)..(39): n is a, c, g, or t
  misc_feature (43)..(43): n is a, c, g, or t
  misc_feature (46)..(46): n is a, c, g, or t
  misc_feature (67)..(67): n is a, c, g, or t
  misc_feature (71)..(71): n is a, c, g, or t
  misc_feature (73)..(73): n is a, c, g, or t
  misc_feature (78)..(78): n is a, c, g, or t
  misc_feature (80)..(80): n is a, c, g, or t
  misc_feature (88)..(88): n is a, c, g, or t
  misc_feature (112)..(112): n is a, c, g, or t
  misc_feature (115)..(115): n is a, c, g, or t
  misc_feature (784)..(784): n is a, c, g, or t
  misc_feature (969)..(969): n is a, c, g, or t
cccttcncttcactgaagtttctcaancctntntaancntcancangctctccaggcctggtcatanactncngccantntggcaggnttgattcctcctgcctgggcactnctnattcaaacacaaactttatggaaatgggaattttcagggtcacctgctgtatcaagaactgcccctgcccttgcccacttggacctctgtcctcccacttcagggatcctggcaagccgaggtagcgttcaggggaggcccctgggggccgatgctgaaaccagctatttaggcgactctttaccatctctgtcagcaggggcagtcctgggttggaggtccagaagacattgtagctgccatacttgggggctgtatcccctggactggttggtggcaaaagtgtaaagcggaagttaccaagttcactggtgtgcccactgataaacttcaactgccccttggccccaacctctggtagtaggacttccttgccatctgtcaccacatagaagaacagggagaccaaagggagggcagaagtacctgagtccggtgaggaggggcttcgggctgcgggtcttcatgccgaagtagacgtgagggcggtaggttccccagaagaggtccggggccacggcggggctggaggagtcggcaggcaacacaggaggcgcggagtgcagcgtgaccgcccgccgcgcacggtaccacgccagcacccagcgccccgacatacccagggccaaagacaggaccacgacggccagagccactcctccagccgtntacgcggcccgccgccccggccgtcccgtcgcccggggcctccccgagccgccctctcggctgtccgcactccctctgccggcactgccggcgccgccgctcgccccgagccatcctggcactgaggtccgcgtcacaagagctcggagaggcggcagtggagcccgggtcctgcctcacctctncggctcccgcctctcgccctggcgaccaccgtccggttagcgacacct

SEQ ID NO: 433628 - DNA, 1149 bp, Homo Sapiens
cgccgggtggggctgagtggcagcaggccccgggagctgcgaggaggccgggcccacgggcggacgctgacgcggggaggaggccgagtgccgggctccgggccgcttgtcgctgcatctggagtctggcgccctggccgcccggcccgaggccgcccctccgctccggcgacaccgagcccgccatcgcggctgcggagccctggcacggagatggagcgcttgggggctgggccggggaggcggaactggagcgcgatgtcatccttcggtccctcgttgccggctgacctgaactgatgtctactctgttgacgtttcgtccctaagctttgtgttttctggctgaccagccgtgaggttttcatgagcagcttattggcctggtgtagacccgccgtgttaaccacacaaaataaggttttcttgtcccgggttaacgtgtttctctaattgtacgatccttaaatttagagcaatcgcaggcgctggctcagtcaataaaggatccgggcccaacacgcacattcacagtagttcccagggcagcagaaagtactgaaatcccaccttatgtgatgaagtgtccgagcaatggtttgtgtagcaggcttcctgcagactgtatagactgcacaacaaatttctcctgtacctatgggaagcctgtcacttttgactgtgcagtgaaaccatctgttacctgtgttgatcaagacttcaaatcccaaaagaacttcatcattaacatgacttgcagattttgctggcagcttcctgaaacagattacgagtgtaccaactccaccagctgcatgacggtgtcctgtcctcggcagcgctaccctgccaactgcacggtgcgggaccacgtccactgcttgggtaggtcagagttcaaggacatttgtcaacaaaatgtttttctccaagtttattgaagggactttaactagaaatttgcgagtcaagttacttaattagaaacatttatcagcagctctttagatgtgccaagcatcatcaataaactcaacgtactaaagtaaagcatccagaaaattgcagttctttttaaatgtaatatttgataaaataagaaaaacatttgaagtataaagcataatacacagtaattgacctttaccc

SEQ ID NO: 433629 - DNA, 1128 bp, Homo Sapiens
  misc_feature (62)..(62): n is a, c, g, or t
  misc_feature (82)..(82): n is a, c, g, or t
  misc_feature (124)..(124): n is a, c, g, or t
  misc_feature (1046)..(1082): n is a, c, g, or t
acttgggcccaattccaaaacccaaaagttccataggaatttaaatggatttttcaatccanctgtattaattcatttctcnctggcttaaagtacgtattaatttttttcacagaaaaaaatnatatttcagggcaaataaaaacaaattccagattagcatagttcagcgtttcatttatcttacctttatcaaggcaaacaaagtacagatgctgtacattaaaaacatagaaatatatcactcacaccacatcaactcctacggacaaaagggctttttctaagccctgctcctttctgaagcacacaccacagctaaatgtacaaagagccatctgctggtccaacatagccaactccaatgagcaggacgtctatcagcgtccatattcccaggccaccgaagctgaagagcttgccgaggccttcccgccactggcccaggtagaaacggtctgctccaaacccaccgagggtgatgcttagagccagagccgtagaccacttatagcctccagtccaattgcaatatagcattttgggaaaagtacggttacccaagcagtggacgtggtcccgcaccgtgcagttggcagggtagcgctgccgaggacaggacaccgtcatgcagctggtggagttggtacactcgtaatctgtttcaggaagctgccagcaaaatctgcaagtcatgttaatgatgaagttcttttgggatttgaagtcttgatcaacacaggtaacagatggtttcactgcacagtcaaaagtgacaggcttcccataggtacaggagaaatttgttgtgcagtctatacagtctgcaggaagcctgctacacaaaccattgctcggacacttcatcacataaggtgggatttcagtactttcaccgcccgacagaatgcagaactgcgagaggaagagcagcacgcgacacaaggcgcggaggcccctcagcgggcgcacccctcccgccatcttgccagcgcctgcgcacttccgctctcgacgaattcgagctcggccgatttggcctgatnnnnnnnnnnnnnnnnnnnnnnnnnnnnnnnnnnnnncggccgccaccgcgataagctccattcccctatagtgagtctatca

SEQ ID NO: 433630 - DNA, 1404 bp, Homo Sapiens
ttttttttcttaacttgcaattttattaatttttcagtactcttaccttttatatactactaagaaaatttaaaccataactagacataaacattctgcagtttaattcaaattttcatatatacagaccagactacatatgtattacactgcaaaacttacacatgactgaagctgagcctaataacttcaattagccaacaacagaaacactcccacttcctgcagtcacagcaattagctaacaataaaaacactcccacttcctgcagtcacagctgaaagacttttcaaggcagactacatttgggctggagatacaagtgatgtagtttgacttgggcaatacaaaacaaaagtcataggaattaaatggattttcaatcactgtataattcattctcctggcttaagtacgttttaattttttcacagaaaaaaatatatttcaggcaaataaaaacaaattccagattagcatagttcagcgtttcatttatcttacctttatcaaggcaaacaaagtacagatgctgtacattaaaaacatagaaatatatcactcacaccacatcaactctacggacaaaagggctttttctaagccctgctcctttctgaagcacacaccacagctaaatgtacaaagagccatctgctggtccaacatagccaactccaatgagcaggacgtctatcagcgtccatattcccaggccaccgaagctgaagagcttgccgaggccttcccgccactggcccaggtagaaacggtctgctccaaacccaccgagggtgatgcttagagccagagccgtagaccacttatagcctccagtccaattgcaatatagcattttgggaaaagtacggttacccaagcagtggacgtggtcccgcaccgtgcagttggcagggtagcgctgccgaggacaggacaccgtcatgcagctggtggagttggtacactcgtaatctgtttcaggaagctgccagcaaaatctgcaagtcatgttaatgatgaagttcttttgggatttgaagtcttgatcaacacaggtaacagatggtttcactgcacagtcaaaagtgacaggcttcccataggtacaggagaaatttgttgtgcagtctatacagtctgcaggaagcctgctacacaaaccattgctcggacacttcatcacataaggtgggatttcagtactttctgctgccctgggaactactgtgaatgtgcgtgttgggcccggatcctttattgactgagccagcgcctgcgattgctcaccgcccgacagaatgcagaactgcgagaggaagagcagcacgcgacacaaggcgcggaggccccgcagcgggcgcacccctcccgccatcttgccagcgcctgcgcacttcccc

SEQ ID NO: 433631 - DNA, 526 bp, Homo Sapiens
  misc_feature (13)..(13): n is a, c, g, or t
aaccaaggttgantcccttaaaacccaaaaccccttaaacccaccttaataccctccaatcccaattgccaattataaccattttgggaaaaaattacggtttaccccaagcagtggacgtggtccccgcaccgtgccagttggccagggtagcgctgcccgaggacaggacaccgtccatgcagctggtggagttggtacactcgtaatctgtttcaggaagctgccagcaaaatctgcaagtcatgttaatgatgaagttcttttgggatttgaagtcttgatcaacacaggtaacagatggtttcactgcacagtcaaaagtgacaggcttcccataggtacaggagaaatttgttgtgcagtctatacagtctgcaggaagcctgctacacaaaccattgctcggacacttcatcacataaggtgggatttcagtactttcaccgcccgacagaatgcagaactgcgaaaggaagagcagcacgcgacacaaggccggaaggccccgcagcggcgcacccct

SEQ ID NO: 433632 - DNA, 389 bp, Homo Sapiens
ttttttttcttaacttgcaattttattaatttttcagtactcttaccttttatatactactaagaaaatttaaaccataactagacataaacattctgcagtttaattcaaattttcatatatacagaccagactacatatgtattacactgcaaaacttacacatgactgaagctgagcctaataacttcaattagccaacaacaggaaacactcccacttcctgcagtcacagcaattagctaacaataaaaacactcccacttcctgcagttcacaggctggaaaggacttttcaagggcaggacttacatttgggggctgggaggatacaaggtggatggtaggtttggacttgggggcaattacaaaacaaaagttcatggggg

SEQ ID NO: 433633 - DNA, 1865 bp, Homo Sapiens
tttttagcattattaacaaatttattgaacaactagaacttgacaagcacttgcccagtagaggggatacagtggtgagcaataatagtgatgataatgaggagcagttttccctagcaggcagcagttgaaaggaatatgggtttaacatccaccaatgaccaggagtggacagatccttttccaggagactgagtccatagtgggattaaaaacatccctgtaattcttctagcttccttcatccaaattaccaatattacagagaatctctagggtatttgctctgcctggaaaccttgactgaaggaaggctggctctggctgcacgatcacttatcacatttgttgggtgggaacacatctgtgccccattattaactgagtgtggcctctagtctctttcaaagtcacatgccctgtgggaactgcaacgttattctctcaaccaagacactctgcagagccaatccaaggagtgctgggtctaaggctctgataatcagctgggaaggagtccataggggtcttaactccacaaccacttacagtgatctctatcctggagctgtcctgggaagggaacctcagggctacatgtgggctcttcctatgggggaagaaatcaggctggaaaagaacgggcaattggccagggactgaagctgaacatctcccaactgcacaaattactgtatgagttatgtaagttacttaatgttgccctgcctcagcttccatacttgctaaatgagactacccgacagggtgttgtgaggattaaaggagtgacacccaccaaagctcataacacagcactcagaacgttttaaattctccattaatgttagtcattgttgttcagatcccagctctgttgttcactattcctgtctgctttgtaaagtcaatacacttttctacaccccagtttccttatctgtataaaggggccaataaggtggcaccaaactcaaacaactgtcctatggaataattgaatgaatatcagtaaagtgcttcagtgtgtgcctgtagctttatggttctgactggctgttgtggagggtgagacccttagctccaggctgggcagggagaagcagagatgttacttcagcctgaggctccccactttcattagctaagcccggggtcagtggtgtctccagggaatgatcaggcactaggtcaggatcgggggaactctctacttcttttcacgttgggcaaatggtcagggccgtgggctccaaggtcaaaattctgaaaacaggatatagagcctcagaggaggaggcgtgcaggaatgtgtggatatgcgatccatccgtggcattgtagaatgagatatgtccagtctcatagtccaggatgacccccactttcttagggggcttaggaagtttcaggttggttctgggctcagttagagtccgatacttattcccatcagtcaggcccatagtccagaatccattctcaggtgtcattttgacccagccttttctctgcacattcttactgcacacccctatatgccactctttcctgtcccctacctccacctcccagtaatgtctccctgatatgaagctctcacagccgagaacacaataatgccaattaaatctctcagggttgtctggcagatcctggggctccttggcacgctgcacactcctctggtcctcagaaacaaggaggatggggtttgctgtttttggatccagaatcacatccgcaggcttgaagagggcctttttccattcattataggctgaatgtctctctccccgagatgcatactggatacttctccatctgagttcctccaggagcttcactcttgtgctttgttcttg

SEQ ID NO: 433634 - DNA, 806 bp, Homo Sapiens
gtcttacacggggatcagaggaggacgcgcctaggatgcattcgcagctactgagcatgcgcacagggccagctccggcggcaccgggtcggtgctccctcagggtggagaccggaggacgagaagccggagctcccgcaggccgtgtagtggcgtcatctgggtgttgtgctgactctggccggagaggagggccccgaggaggagccgcggtaaacgggagatgtgggcgagagtttaatcggactggtcgggtccccagtttggagcttccaaagcagctcttcattggttcggctcaatctcttcttctcctgggtttccttctcaacatattcctggaggttagcattttcctccgacagctgtctggtgacaactgtgttttggtcaatccttgctttgaggtcttcgttctgctgttggagaacctggatcttttcttctaggataatgttcttttctgccagcttttccagctcaagaatcttcttttcttgctcgtgtatttgctgattcttcatttctaatacctgcttcagactcttcatgtcttcttccaagtgctgataaggagccaatgcaatctccagctgctcctctgtgttcttcctcaaggcctcttcgaagcggcgggctctgtcccgcagagactggctctggaaggtcagcgtgtccacctggtcctgcaatgacagccgcagtttttcaaaattttcttccaattctttcttttcaagctcatgagtggacatcaattcttggactttgtggtcgtggtcatcctgcaggattgtgatgcaact

SEQ ID NO: 433635 - DNA, 1583 bp, Homo Sapiens
ggtaccgaactgtgggagagcagctgttaaagtctcaatcagctgacccatttttgaaccttgagatggatgctggcatctccaacatccagcgaagtcagagctggctcagcaacattggccccacccatcatgagatagacacagcttcatcccatggaccacaaatgcaagatgccttcttgtcacctttatctaataaaggtgatgaatgcagtattggttcagccacagacttgactgaaagtagctccatggtggatggcgactggacaatggtggatgaaaatttctctacactcagtttaactcagtcagagctggagcacatttccatggagttggccagtaaagggcctcataaatcccaggtccagcttcggtatttgctacacattttcatggaggcagggtgcctagactggtgcatcgttataggcctgattcttagagaatcctcaataatcaatcagattttggttattacacagtcttcagaggtagatggagagatgttaccagaacataaagacagggctccatgcagtggaccgatgggcctctacagactgtcctggatataagccatttttaaacatcattaagccaccacttgcggaagctcagtgagataacagaagagcagggtccagcccagatgcccttccaaccaattaactatgggtaagactccagaacagactagcccccgggcagaggagagcaggggctcctccagccatggaagcatcccccagggtgaagttggaagcagcaatatggtcagccggaaagaggaggacacagcccaagcagaggaggaagaaccttttcaggatgggacttacgactgttctgtgtcctaacagtgaggttccatcacaaaggggcagtattaattagcagcagcgtgcagctcagtacgttgtaacatagttggatgatttaacaggagaactcagttcagagactcttcggtaagtattagtagattttaactaattctttcttgtctaagaaatctttttgactccataaaaatgtgatataaagcatctttcataaaaaaattttaagctgcagtgaaaagtaaatattgtacagatgtacatgagaatattttggttttactcaaaggttggtagctcttaaaccacaggaattgttttgccccaggtgagcttactttttcactacttacatcttctcacatttcccggttctgcattatgtccagattgctttttaaaaaataaatgctaaggtgcttgctatagtctgtcaggtacttgagctacctgtttgctcccttggatacagctggactctttaatcagtcctcctgaatagattgctaccctggggcacaatatgtgccaggtgtgatggaaacattctccttggctttactagccagtcaaatcccagtccagaattgatgggaagctatttacctgtgagttaatgtgcttgttttaggcaagcttggattcccattaggaccaatgtggggcagaggtctgagggggggttctttctccatttttgccggttagggtaccccttaaaccattttggtattt

SEQ ID NO: 433636 - DNA, 1458 bp, Homo Sapiens
  misc_feature (1245)..(1245): n is a, c, g, or t
  misc_feature (1312)..(1312): n is a, c, g, or t
  misc_feature (1379)..(1379): n is a, c, g, or t
  misc_feature (1391)..(1391): n is a, c, g, or t
  misc_feature (1413)..(1413): n is a, c, g, or t
  misc_feature (1434)..(1434): n is a, c, g, or t
  misc_feature (1441)..(1441): n is a, c, g, or t
ttgcatcttccatttttctgttttggtggctctgccttgctggcatcatgaacgcgtcctgggtaaagccatcctcatgagctggcattgcggctctgggagtcacctcccggccaagagcaggtgcaacccaggctcgagactccacacccggaaccctcaaaaccgggaacgctgtagggctgcggctgcatggggaatgggatctgggagggacttcctgtcttccctactcccagtctccacccaactcccccgcccgccccgtgcaggctgtggagactcccttcccgggggagggggcccccactgccgcaggtgccccctctgcctccaccccggctcctggccagaagctggagggggcttggccaaaaagagggagaaacaactcagctgttctttctagctctgaaatagaaaatgtctgcagacggcggaggcatccaggacacccaggacaaggagacacccccggaggttccagatcgtggacatcctcatcaggaaatgccttctaagctgggggaggcggtaccttcaggggacactcaggagtcactgcacattaagatggagcccgaagagccacactccgagggggcatcgcaggaggatggggctcaaggtgcctggggctgggcacccctaagtcacggctctaaggagaaagctctcttcctgcctggcggagccctcccctccccccggatccccgtgctttcccgagaggggaggaccagagaccggcagatggctgcagcgctcctcactgcctggtcccagatgccagtgactttcgaggatgtggccttgtacctctcccgggaggagtggggacggctggaccacacgcagcagaacttctacagggatgtcctgcagaagaaaaatgggctgtcactgggctttcccttcagcaggcctttctgggcccctcaagcgcacggcaagggtgaggcctcgggctccagccggcaggagggagatgagaaggagtggagaggcgcgtgcacaggagccgtcgaggtggggcagagggtgcagacctcatccgtggcagcccttgggaatgtgaagcccttcagaaccagggcagggagagtccagtggggcgtcccgcagtgcgcgcaggaagcagcctgcggccggagctcagggccgggcaaagactccgggcagccggctgagccagatcgcacccggatgcagctccgccagaccccagtcccacggagcccccanggagtaccgcgtcccggagaaagcccaacgaggaggagaagggcgccccgggaagagtggcgaggangggcctggccctgacagtgaggtgggcaggaagagctaccggtgcgagcagtgcgggaagggttcanttggcactcganctggtgacgcaccggcgcacgnacacgggcgagaaagcttaangccttgnacttgacttgcgggaag

SEQ ID NO: 433637 - DNA, 925 bp, Homo Sapiens
tgtttctgccgactgcttcgggtccgattggttcacccgttcccggattcttggccgtccttgagctccggcctgcggctgctttcttgccgcgctagtgcggacgccccaatgggactctccctggccctgggttccgcaagggcttccacagtccccaaggcttgccacggatgaggtcttgcaccctctgccccacctcgacggctcctgtgcacgcgcctcgtccactccttctcatcgtcctgcctgcccggctggagcccgaggcctcacccttgccgtgagcttgaggggcccagaaaggcctgctgaagggaaagcccagtgacagcccatttgtcttctgcaggacatccctgtagaagttctgctgcgtgtggtccagccgtccccactcctcccgggagaggtacaaggccacatcctcgaaagtcactggcatctggggaccaggcatgtgaggagcgcttgcagccatctgccaggtctctggtcctcccctctcgggaaagtcacggggatccggggggaggggagggctccgccaggcaggaagagagctttctccttagagccgtgacttaggggtgcccagccccaggcaccattgagccccatcctcctggcgatgcccccatcggagtgtggctcttcgggctccatcttaatgtgcagtgactcctgagtgtcccctgaaggtaccgcctcccccagcttagaaggcatttcctgatgaggatgtccacgatctggaacctccgggggtgtctccttgtcctgggtgtcctggatgcctccgccgtctgcagacattttctatttcagagcggggtggaggcagagggggcacctgcggcagtgggggccccctcccccgggaagggagtctccacagcctgcacgggcgggcgggggagttggt

SEQ ID NO: 433638 - DNA, 1104 bp, Homo Sapiens
  misc_feature (31)..(31): n is a, c, g, or t
  misc_feature (41)..(41): n is a, c, g, or t
  misc_feature (46)..(46): n is a, c, g, or t
  misc_feature (54)..(54): n is a, c, g, or t
  misc_feature (56)..(56): n is a, c, g, or t
  misc_feature (64)..(64): n is a, c, g, or t
  misc_feature (75)..(75): n is a, c, g, or t
  misc_feature (89)..(89): n is a, c, g, or t
  misc_feature (104)..(104): n is a, c, g, or t
  misc_feature (109)..(109): n is a, c, g, or t
ttttgtaagaaactaaaatttagcatttaancctacacccnctttnaaaaatananagaatctntggtttttcangtccactggtccanaggagcaatggaaangggtntgagttctcagggaggggtccctgcccaccccaggtctcccagggcagggagagggtagctgttagtatcgactctcctcagagcggggaagggagctggtgcgacgacgttgagctgggctgcccccagggtcagcagccaacagaaggcgggcggtagggtgtggggggcagaggcgcaaggaacgcagcagctcctgctctggcacaaaggggcggaggggacctcgttctggtgagtttcccaggctgctggagcgggggggtgggtgggctggaggtgtggcgcggcgaggggccctgtttaggggccaaggaggctccacagctaccttcagaaattctcggtcactagaggagtatggcttgatgtctccctctgctctcttgggtggcagcttccttgctggaggatgttgatgggcaaagaagccttcaaagatcacaaagttgttcacctgtgggactgtggtctccagattgtagtgcttattcaggaatttcagcagcttctgtgagggtcggtcaattgccagttggtgcggttccactcgctccttctgcaacatatactggaagagttctcgcccatggccatggcgttgcacagactcatggatgtaaaagtccaggatgcaaagtggttctacctcattatgagcctcacgatcatccagtacaaagagcttcttgtatccaactttgatgaaaccaataatggctccttttccagccggtcgggctgaactgtctttgagaatataaacaacatggcggttactctgcatccttgatgcactagtgataggagcggaaagattctgggccttggcagaagccttgcccagttcatctataatggtcataatttgctgctgtagatcaacacgggccggcgttgtggttccgggtcggcgggctgggggcctcaggtgctggtccagcaccgtgatccgctccgggaacagcgcgtccacatcgaacgggaactccat

SEQ ID NO: 433639 - DNA, 1144 bp, Homo Sapiens
  misc_feature (1098)..(1098): n is a, c, g, or t
  misc_feature (1104)..(1107): n is a, c, g, or t
  misc_feature (1123)..(1123): n is a, c, g, or t
  misc_feature (1127)..(1127): n is a, c, g, or t
  misc_feature (1136)..(1136): n is a, c, g, or t
ttttttgggattctttttttcattgaaaatgtcaatttagaaaacacaaaagatttcacactttattcagacaacactgagagaagaaaagggaagagtgagtaggggagatggggagatccggctcccaaggatttcaggaaacacagtggggcacctgatctagcacacattcagagggtagggaggggaagggatctagctatactctgggcatggagcagggaaggtcgtccttgctatggaggaaaggagagaggaaggacagaggaagagtggtcccccatctcatctcgacaatctcacaagacaggagtatatcgggacctagctaccagggagggatggatgcaagaagggattccaggatctaacagatccttgacactctggatctactctcaagaaacaacctccctcagagaatctggatctgggggaaatggtggtgtcagccaatctcctttagagaccccaaagcaacaccagtttggggttccctgacacctacacaaaatgtggaaatgaagagtttggcaatggtgagtagatccctttgggaagctggtaagtccctgttctacctaactagactgctctgaagcagagcttgctcactagcggccattcgcaggctcaaagggcaagtgtggcaggcagcacaaagcagtattagagccaccagtagacactagagggaatatggggtttatcccatagataaaattccttaaaaagtttccctggcacaggatgcccttagaccttccatggtgttctaaagtttgacagcaagcaagagtgtgcttctctagataaatgtatgagccatctaaccaagaagtctggcaacagatcagacttcctgttgggaaagtattcagagcccaagttaggagagaaggggtgcttttgtgttaagaaaagctacaaagtgttaggcagtttgagaccctgacatccctgctgtctaagaaagtagaagagggaatctatgggctctgtcaggttccactgggtcctacaggatgcaatgggaggagtgggtctgagggtctcagggaggggttcctgcccacccaggtctcccaggcaggngaaggnnnngttaatatcactctcncaancggggaggnactgtgga

SEQ ID NO: 433640 - DNA, 1364 bp, Homo Sapiens
  misc_feature (21)..(21): n is a, c, g, or t
  misc_feature (52)..(52): n is a, c, g, or t
  misc_feature (70)..(70): n is a, c, g, or t
  misc_feature (187)..(187): n is a, c, g, or t
  misc_feature (194)..(195): n is a, c, g, or t
  misc_feature (199)..(199): n is a, c, g, or t
  misc_feature (202)..(202): n is a, c, g, or t
  misc_feature (269)..(269): n is a, c, g, or t
  misc_feature (278)..(278): n is a, c, g, or t
  misc_feature (324)..(324): n is a, c, g, or t
  misc_feature (348)..(348): n is a, c, g, or t
  misc_feature (353)..(353): n is a, c, g, or t
  misc_feature (424)..(424): n is a, c, g, or t
  misc_feature (505)..(505): n is a, c, g, or t
  misc_feature (565)..(565): n is a, c, g, or t
  misc_feature (567)..(567): n is a, c, g, or t
  misc_feature (578)..(578): n is a, c, g, or t
  misc_feature (584)..(584): n is a, c, g, or t
  misc_feature (1044)..(1044): n is a, c, g, or t
  misc_feature (1057)..(1057): n is a, c, g, or t
  misc_feature (1061)..(1061): n is a, c, g, or t
  misc_feature (1064)..(1064): n is a, c, g, or t
  misc_feature (1070)..(1070): n is a, c, g, or t
  misc_feature (1077)..(1078): n is a, c, g, or t
  misc_feature (1082)..(1082): n is a, c, g, or t
  misc_feature (1088)..(1088): n is a, c, g, or t
  misc_feature (1093)..(1093): n is a, c, g, or t
  misc_feature (1095)..(1095): n is a, c, g, or t
  misc_feature (1101)..(1103): n is a, c, g, or t
  misc_feature (1105)..(1105): n is a, c, g, or t
  misc_feature (1110)..(1114): n is a, c, g, or t
  misc_feature (1116)..(1116): n is a, c, g, or t
  misc_feature (1123)..(1124): n is a, c, g, or t
  misc_feature (1126)..(1126): n is a, c, g, or t
  misc_feature (1131)..(1131): n is a, c, g, or t
  misc_feature (1134)..(1134): n is a, c, g, or t
  misc_feature (1137)..(1137): n is a, c, g, or t
  misc_feature (1139)..(1139): n is a, c, g, or t
  misc_feature (1142)..(1145): n is a, c, g, or t
  misc_feature (1147)..(1147): n is a, c, g, or t
  misc_feature (1154)..(1156): n is a, c, g, or t
  misc_feature (1160)..(1162): n is a, c, g, or t
  misc_feature (1166)..(1167): n is a, c, g, or t
  misc_feature (1194)..(1194): n is a, c, g, or t
  misc_feature (1200)..(1200): n is a, c, g, or t
  misc_feature (1202)..(1202): n is a, c, g, or t
  misc_feature (1207)..(1207): n is a, c, g, or t
  misc_feature (1225)..(1226): n is a, c, g, or t
  misc_feature (1241)..(1242): n is a, c, g, or t
  misc_feature (1249)..(1249): n is a, c, g, or t
  misc_feature (1254)..(1255): n is a, c, g, or t
  misc_feature (1262)..(1262): n is a, c, g, or t
  misc_feature (1264)..(1264): n is a, c, g, or t
  misc_feature (1268)..(1268): n is a, c, g, or t
  misc_feature (1273)..(1273): n is a, c, g, or t
  misc_feature (1276)..(1276): n is a, c, g, or t
  misc_feature (1282)..(1282): n is a, c, g, or t
  misc_feature (1289)..(1289): n is a, c, g, or t
  misc_feature (1292)..(1294): n is a, c, g, or t
  misc_feature (1296)..(1299): n is a, c, g, or t
  misc_feature (1322)..(1323): n is a, c, g, or t
  misc_feature (1337)..(1337): n is a, c, g, or t
aatttagaaaacacaaaaganttcacactttattcagacaacactgagagangaaaagggaagagtgagngggggagatggggagatccggctcccaaggatttcaggaaacacagtggggcacctgatctagcacacattcagagggtagggaggggaagggatctagctatactctgggcatggngcagggnnggtngtncttgctatggaggaaaggagagaggaaggacagaggaagagtggtcccccatctcatctcgacaatntcaaaaganaggagtatatggggacctagctaccagggagggatggatgcaagangggattccaggatctaacagatcnttganactctggatttattcttaagaaacaacctccctcagagaatctggatctgggggaaatggtggtgtcagcnaatctcctttagagactccaaagcaacaccagtttggggttccctgacacctacacaaaatgtggaaatgaagagtttggnaatggtgagtagatccctttgggaagttggtaatgtccctgttctacttaattagactgntntgaagtagagnttgttnactagcggccattcgcaggctcaaagggtaagttgtggcatgcagcacaaagcagtattagagccaccagtagacactagagggaatatggggtttatcccatagataaaattccttaaaaagtttccctggcacaggatgcccttagaccttccatggtgttctaaagtttgacagcaagcaagagtgtgcttctctagataaatgtatgagccatctaaccaagaagtctggcaacagatcagacttcctgttgggaaagtattcagagcccaagttaggagagaaggggtgcttttgtgttaagaaaagctacaaagtgttaggcagtttgagaccctgacatccctgctgtctaagaaagtagaagagggaatcctatgggctctgtcaggttccactgggtcctacaggatgcaatggaagagtgggtctgaggttctcagggaggggttccctncccaccccaaatnaaancanttacanttataannttancaattnttaangncctctnnncntatcnnnnnanaaaaatnntncaacnaanttnanatnnnntncccccannntcannngccnncataattctttctttatttattttatntccccnanccccnacccaccgcagcacctannctggcaaaaagggannaaggggncctcnntctggtnantttnccaanctnttggtnccggggngtnnntnnnntggtggtgtggcgcggcgagggnncctgtttaggggcnaaggaggctccacagctaccttcagaa

SEQ ID NO: 433641 - DNA, 1953 bp, Homo Sapiens
  misc_feature (43)..(99): n is a, c, g, or t
  misc_feature (829)..(829): n is a, c, g, or t
gggaggcggcgcccccctatgttggggactgtttggattgttnnnnnnnnnnnnnnnnnnnnnnnnnnnnnnnnnnnnnnnnnnnnnnnnnnnnnnnnntttgtgtttttccggggataaaaataaatacttttattggtctggttaaaagatacaaatgacttgaatctgataagcctgctgaatgaatgaatgaatgaatgtatccatctattatgagggttgggctttggctctttcctgtagtgagggagaaataatactttgaagatgtttgacggggctgcggtcaccaaggcctggtgctgcgacgttcctgcaggtttcgaatgaacctggcgttgagtatgtccccacccactgtccaggactgggctggcggggccggggcctgtggaggagctgtgtgcatgggcttctccccagacccatcctgtgacaaggcctgctcctcactggcagacctgttctttgtttggtgttgtccctgcttgggttcttggtttcctgtattgggggattaggatttcagcctcttcatggtgtctgtggcagcagttttggtgtaggagacctgatgggtgtgccgctggtgcgattagtgctatgttgagctttgctgcctctcagggaatccgtattccaaagggaagtgcgggcgttgagggtgtggggggcaggggcttgcaggatgtaaggtagcaggtcttgctctgggacaaaggggctggtgtggagttcgttctggtgagatttccgagtctgctgtgagtgggggtgttgttgggctgggggtgtggtggtgcgtggggggctgtttaggggccanaggggtttcgacctcacctattctttgtttcctgttctccctgcttggagtcttggttgcctgtattgggggatgaggaattcacccccccatggcggctgtagcagcagctttgggctaccagacctgggggagtcccctggtgcgacgacgttgagctggctgcccccagggtcagcagccaacagaaggcgggcggtagggtgtggggggcagaggcgcaaggaacgcagcagctcctgctctggcacaaaggggcggagggacctcgttctggtgagtttccccaggctgctggagcgggggggtgggtgggctggaggtgtggcgcggcgaggggccctgtttaggggccaaggaggctccacagctaccttcagaaattctcggtcactagaggagtatggcttgatgtctccctctgctctcttgggtggcagcttccttgctggagcagcgggcgtgggatcgactgcagcagcacgagagtgtcgagttgccctcagagagggagcagggggccgatgttgatgggcaaagaagccttcaaagatcacaaagttgttcacctgtgggactgtggtctccagattgtagtgcttattcaggaatttcagcagcttctgtgagggtcggtcaattgccagttggtgcggttccactcgctccttctgcaacatatactggaagagttctcgcccatggccatggcgttgcacagactcatggatgtaaaagtccaggatgcaaagtggttctacctcattatgagcctcacgatcatccagtacaaagagcttcttgtatccaactttgatgaaaccaataatggctccttttccagccggtcgggctgaactgtctttgagaatataaacaacatggcggttactctgcatccttgatgcactagtgataggagcggaaagattctgggccttggcagaagccttgcccagttcatctataatggtcataatttgctgctgtagatcaacacgggccggcgttgtggttccgggtcggcgggctgggggcctcaggtgctggtccagcaccgtgatccgctccgggaacagcgcgtccacatcgaacgggaactccatggcccattgtgcgcgatc

SEQ ID NO: 433642 - DNA, 459 bp, Homo Sapiens
ttttgtgataaaaataaatacttttattggtctggttaaaagatacaaatgacttgaatctgataagcctgctgaatgaatgaatgaatgaatgtatccatctattatgagggttgggctttggctctttcctgtagtgagggagaaataatactttgaagatgtttgacggggctgcggtcaccaaggcctggtgctgcgacgttcctgcaggtttcgaatgaacctggcgttgagtatgtccccacccactgtccaggactgggctggcggggccggggcctgtggaggagctgtgtgcatgggcttctccccagacccatcctgtgacaaggcctgctcctcactggcagacctattctttgtttcctgttctccctgcttggagtcttggttgcctgtggaaatatcaggcatgggaaggcaggagtagacagtgaatgtggcctacttgatcct

SEQ ID NO: 433643 - DNA, 968 bp, Homo Sapiens
  misc_feature (583)..(583): n is a, c, g, or t
  misc_feature (585)..(585): n is a, c, g, or t
  misc_feature (637)..(637): n is a, c, g, or t
ttaagtattttttgtcacaacaaaatttagaggcatccatgtgacacggtactgtttttgatggggacggggaaaacttcttgataactagatgtgtgaatgctactgcaatgcttactgggaaaataaaccagcaccttatggagatgtgtatgagcctgttccgcacccatatccccattgccctaacagacttgtccagcccaggttggcttgatgctagaacttccaagataggcgcaacctgtctgcaattccagggaaccagaccctccccaagcaccctctttgtcttacgcctaaccctgagtcccttccctgagatggtgccccaaaggtaccctcttcacagacaccagtgtttcccagagggttgtatttgtacctttggtggtgtgctaaggtttgaggcagtatgaggacaaacacttgttttaaaagttttgtctctaatacgcattttgtacagaagccgataagtgcaggcatcgctgcttggctaggacacggtttatttaggttaagagtgtttccatttaaagtagtccataggatgattcacagaggctgttcccgaagaggnanacactggagtatcagaagattgggaaccgacaacacccagctcggctggatncccagccccccttccccagcggtcctcaccggtccacgctcgcggttggaaaatcatttcccacctcctatcctgggctcaaggatgcgctacctcccccaagcccagagaccacaccggttcccagactttttagcggaccccccttttggagccggggtcccacggaattagccacctccctccctctgctcccacggcctcaggaaccccccacccgagggggattggggggcgtcactgagcacgattctcgatgcaacgattcctatgcaaggggcattttgagtcccccccatccttccctcggaccctaaaccctgggtgaagc

SEQ ID NO: 433644 - DNA, 2397 bp, Homo Sapiens
  misc_feature (1502)..(1569): n is a, c, g, or t
  misc_feature (2186)..(2186): n is a, c, g, or t
  misc_feature (2217)..(2217): n is a, c, g, or t
  misc_feature (2219)..(2219): n is a, c, g, or t
  misc_feature (2301)..(2301): n is a, c, g, or t
  misc_feature (2377)..(2377): n is a, c, g, or t
cggaagatggtccgaatcaactggataggattgttaatttccgaaggcacgagctcgcctggcatccgcaaatgtgacccgcaatttagagaggaagaggagcgcagaccctacctgtccggagtaacggtcaggagagaggtggggaagggctgggcccctctcggtgtcccgggttcccggcagaagtctccaggactgaggcagtctgcagacacggagtttccgtgccagaggagagggtccacgcggacaggcagttccagctccgggacatactttattcagctgggtgctgaaaaagaatcttggaaattaggaaactgaatgaggcctcatttcacactcagaatgtgggttgcaatagtcacttcctctgctgctgggaaagaaagaattatactaccttttgaattttggattaaggagagaggtgttggcttgtcagactaccatgtattcctcaagacatatttttgtggctttataaaattcaatatatatgtctaaattcaaaaatattttgttgcgatctggcccttggacaaagtgaggcccatagacaagtgatgtttatggctttccgtagaacctttcagataaaatttacacagcattttactgcagctatttcacacaaagcagaggattttgccacaaaactgaaagaaaaaagaaactgcattcttaaatttttcataaatcaaaaggtataaaaatatctacctaaacgataaaggagatgagaaaccccacccatgatgggaagaaagcctatttcagttttgcctttacttcaagttcttttttccatatctggaatgcaatcagaattttaatcttgccttgggttcctcctggatttggggagaagacaaaacctgaaaatctctaatctgcatgtgttcagctgcgtatcttctggatacggaaggatcacactgcacagagtgctggacttgcaggagccccgcttctcaacctccatcgctttatgaatgaattcaccagaaagaaaaggaagaatcaacactttcagagatggagcctgttgagccacagtaccaactagtcaatgctgaatcgacttctccctttctacattgcctgagagaagtcattggggaatactctgtacacgaattttcactgttggggaaaacagagagtcaagggattggattgtggattgcattggtggttttcctcagtttcctcatcttctccacaagtttctacatatcgaatgcagagcagcccttcttcaaaggacctcctacggaagctgctaaggaactcagtctgtagctctgcgtggagcccatgtgtaaacactgaactgagacctgccacctcctactacctaagggcccattttcatctgatatcatcccccagaaacaaactcatgatgacttccatgttttttttcgattagatacatggagaattttcctttcccttagaattaaaatcctgcattctaattttcagtaagcttnnnnnnnnnnnnnnnnnnnnnnnnnnnnnnnnnnnnnnnnnnnnnnnnnnnnnnnnnnnnnnnnnnnntgtttttatttagagtgatgttcccaggagaaatgataatgcagcaatggacaagaacaggaacaagagacagtcttaccatcttcttacaatttatagatgggacagtggaaagagaagccacatcggggttgggcatgcagagacctggtcctaaatctgtgtgacttttgcgaaatccttttgcctcacagagctctaggttcttatctgtcaaacaggaaccagaccatcagatccgtagagatccaaccaatgaaggagacttcgaaaacttcacattgccgtgtcaatgtgaggttgctggatggttatgacaagaaatcacattaaattcactggggtaacattgttcatgaaacgggataatgtgtttcagcgatgaaccacccatggccttactacagacatatttccactttgaaaatgtgtgtgagtgtacatgtctgtgtgtgaggcagagattagaaagtgtaaatgtgtgcgttttcattttacacatcttacattttcctttaatttgtttgaaagcctgttttgtttgtggcttccattcctggaagtcccatgagttgttagtggtgaagatggaacagatgtgtccaacccgggggacncctgccctcagggactgagcagctgcaaacntntctctcatctgattccactgtttcttccacatgtacacatcatgagaaatattgttcaatcaatatcttcccttaaatcaantcatatgcttatttacatgaatttacctaaaacagaaacttgatatcacttctgtaaatgaaaaaattaaactttntggctttaaataaagcataa

SEQ ID NO: 433645 - DNA, 1175 bp, Homo Sapiens
tggcagtactcctacgggtataggtagcgaggctgggtggtgaattccggcacgaggaggccctgcgccggttcagccaggcccgacacccgctgccgctgtccccgagggcacggcagccgagggcgctcccaggcaggaaaactgtggtgcccagcaggtccccgcagggccgggcactagcacccctcccagcagccccgtgcggacctgcgggcccctgacggatgaggacgtggtcaggctgcggccctgtgagaagaagcggctggacatccgtggcaaactttacctggcccccctcaccacgtgtgggaacctgcccttccgacggatctgcaagcgcttcggggcggatgtgacatgtggagagatggccgtctgcaccaacctgctgcagggccagatgtccgagtgggccctactcaaacgccaccagtgtgaggacatctttggcgtccagctggagggcgccttccccgacaccatgaccaagtgtgccgagctgctgagccgcaccgtggaggtggactttgtggacatcaacgtcggctgccccatcgacctcgtgtacaagaagggtgggggctgtgccctcatgaatcgctccaccaagttccagcagatcgtccgtggcatgaaccaggtgctggatgtgccgctgactgtgaagatccgcacaggcgtccaggagcgtgtgaacctggcgcaccgcctgctgcccgagctgcgggactggggcgtggcactcgtcacgctccacggccgctctcgggagcagcgctacaccaagctagccgactggcagtacatcgaggagtgcgtgcaggccgccagccccatgcccctgttcggaaatggggacatcttgtcatttgaggatgccaaccgcgccatgcagactggtgtcaccgggatcatgattgcccgtggcgccctgctcaagccgtggctcttcacggagatcaaggagcagcggcactgggacatctcgtcgtccgagcgcctggacatcctgcgggacttcaccaactacggcctggagcactggggctcggacacgcagggcgtggagaagacccggcgctttctgctcgagtggctgtccttcctgtgccggtacgtgcccgtggggctgctggagcggctcccacagaggatcaacgagcggccgc

SEQ ID NO: 433646 - DNA, 1192 bp, Homo Sapiens
ccctcccaccccggggtgggggcgtttaaggatgggggcccccctttgggggcaattttgggcccctgcaagacaggttggggccaagaagggccatttttttccacatgttcaccatccgcccccgaaagcccttgacagatccctccggaaggggcaggttcccccccctggtgagggggggccaggtaaagtttggcccggatgtccagccggtttttcttcccagggcggcagcctgaccacgtcttcatctgtcaggggcccgcaggtccgcacgggctgctgggagggttctagtgcccggccctgcggggacctgctgggcaccacagttttcctgcctggagcgccctcggctgccgtgccctcggggacagcggcagcgggtttggggccctggctgaaccggcgcagggcctgctcagctcgctcgaagcggacctcgcgcttccgcagctgctgctgcagggctttgtccagcccgttgcggatggacgggggctgggtcccgcgggccgccaactcctcctgcaccaggttctgtccctcgggcctcaggtgggccccagcgaagcggcaggtcacgccgtaggggcaccggccgaaggtctcgaagagcacgcagcgggggcccaggtcggccggcttggtctccaggtagcgccccacgtcgtgcagaaagcggcagcgatcaccgaagaaacacttagcagccgactcctggattagggagggacacagcctgttcttgtcgtagttcgtgggcttcacatggggccggcccttgttttgtccccgggccctcttctgagtctgtagctgctccccgggctctgctgcctcctccgtctgcccgtccgccgtctgtccatcctccagtcggatccgcttagcctcaggctcagccagctcattgccagcagggtctcctacctcggtttcccggcaagtcttctcctgccctttggcttccaggaattggtgaaactgctccttggtggtgaggtattgacgcttaatgggcgccactcctcgttccaaagctccggctcccgagtcgccaccaccaccattctctagaggagcctccgccgttccctccgccatcggcgcccctcacatccgctctggagtgtggcgggaagaccttccgggtcacgcgtgtcttccctgattgtgcatcccggga

SEQ ID NO: 433647 - DNA, 1105 bp, Homo Sapiens
agacggtggggtccaggaggcccatttttcaccacggttgtacattcccgcccgggagggcccttgccgttcctttggaaggggcaagtttcccacacctgggtgagggggcccaggtaaagtttgcccacggatgtcccagccgttctttttcccaggggcgcaagcctgaaccaggtcttaataccgttcagggccccgcaggtccgccccgggcctgctggaggggtgctagtgcccgggccctgggggggacctggtggggcacccacagtttttcctgcctgggagcgccctcggctgccgtgccctcggggacagcggcagcgggtgtggggccctggctgaaccggcgcagggcctgctcagctcgctcgaagcggacctcgcgcttccgcagctgctgctgcagggctttgtccaggccgttgcggatggacgggggctgggtcccgcgggccgccaactcctcctgcaccaggttctgtccctcgggccccaggtgggccccagcgaagcggcaggtcacgccgtaggggcaccggccgaaggtctcgaagagcacgcagcgggggcccaggtcggccggcttggtctccaggtagcgccccacgtcgtgcagaaagcggcagcgatcaccgaagaaacacttagcagccgactcctggattagggagggacacagcctgttcttgtcgtagttcgtgggcttcacatggggccggcccttgttttgtccccgggccctcttctgagtctgtagctgctccccgggctctgctgcctcctccgtctgcccgtccgccgtctgtccatcctccagtcggatccgcttagcctcaggctcagccagctcattgccagcagggtctcctacctcggtttcccggcaagtcttctcctgccctttggcttccaggaattggtgaaactgctccttggtggtgaggtattgacgcttaatgggcgccactcctcgttccaaagctccggctcccgagtcgccaccaccaccattctctagaggagcctccgccgttccctccgccatcggcgcccctcacatccgctctggagtgtatcccgaaattccggaccggtccac

SEQ ID NO: 433648 - DNA, 1378 bp, Homo Sapiens
  misc_feature (151)..(151): n is a, c, g, or t
  misc_feature (1198)..(1198): n is a, c, g, or t
ctgacaatcccggcttcccgaggcggctaagaacaggcagtttgtgtcggctggctgcagatacccagaggcacaaagagaccgaagccacccggagacgccacggacggacagatggtaggcgcgaacccgagaggaccggcggaggctnagcaccgagagccgccaaggaagagaaactaaccacagccaagttaccccgccggctttccttcgctgcgctaaggaatgaaacccttccagctcgatctgctcttcgtctgcttcttcctcttcaggtcaagagctgggcctccagaagagaggatgctgtctggtgctgggctacatggccaaggacaagtttcggagaattgaattgaaggccaagtcttatttcctttcagccagcagccccagggaccaggtggtggtgtcgggacagccagtgacgctacttgcgccatccccgaatacgatggcttcgttctgtggatcaaggacggcttggctctgggtgtgggcagggacctctcaagttacccacagtacctggtggtagggaaccacctgtcaggggagcaccacctgaagatcctgagggcagagctgcaagacgatgcggtgtacgagtgccaggccatccaggccgccatccgctcccgccccgcacgcctcacagtcctggtgccgctgatgaccccgtcatcctggggggccctgtgatcagcctgcgtgcgggggaccctctcaacctcacctgccacgcagacaatgccaagcctgcagcctccatcatctggttgcgaaagggagaggtcatcaatggggccactactccaagaccctgcttcgggacggcaagcgggagagcatcgtcagcaccctcttcatctcccctggtgacgtggagaatggccagagcatcgtgtgtcgtgccaccaaacaaagccatccccggaggaaaggagacgtcggtcaccattgacatccaaggcaccctccactggtcaacctctcgggtggagccacagccagtgctggaggaacaacgtcgtcactttccactgctctgcaaaggccaacccagctgtcacccagtacaggtgggccaagcggggccagatcatcaaggaggcatctggagaggtgtacaggaccacagtggactacacgtacttctcagagcccgtctcctgtgaggtgaccaacgccctgngcagcaccaacctcagccgcacggttgacgtctactttgggccccggatgaccacagaaccccaatccttgctcgtggatctgggctctgatgccatcttcagctgcgcctggaccggcaacccatccctgaccatcgtctggatgaagcggggctccggagtggtcctgagcaatgaga

SEQ ID NO: 433649 - DNA, 2358 bp, Homo Sapiens
  misc_feature (30)..(30): n is a, c, g, or t
acatattttttgttttgggggctcttgggngtttcccagagaaacgaatgcattttattttaggtaacaaaagtagagtcaagtattttttcaaagttcatatacaggcacagtctcagtgaactggcgtcagggcctcgtacagtctctgtgcagccagctccaccatttctcggagggattcatcgtcttcacttccctcttcacattctacagtccgtgtctccaagttaaggttggcagttttcccgtccactgtgacgctaagaactagatgctcatacctttacacttacagcagtcttactccataatatgtcctggagcatgatctccaacctcttgactgtaaacgctgcattatctaattttttagaaaccttctgtactgcaccttttcttattttggggatttgactgaacttccaatatcacagttgttactgtatctgcatacatatcattagaagggtatgccagccattctaataccaccatgcctggttcttgtattcacagtaatattttctgaacgactttcagagcaggttgtttcttgaatttctaagtatacttccacatcacctgtcaatttctgcagactggtaacagagcaaattaaagggaccagtatatggaatagtcttgggtctgcttcaccgtgctcatggccagggtcagtataattggacaggtcgcaaggagaaaagtatggtgataaattaaagtttcttttaacaagtattcctgagacccgcctggcccttgttctggttttttgtctgctaaaaatccccataaccttggctagtttttctcctctgaagtttaaggtcactgcttctgtattccgaggattatgaacctctatgtgaacttcatcgttatcttcatattctcgaatcagtgctgctttcaatctggccatttcattctgttctccatggactaaaatcacatgaggcggtttcaaagcacgaataaattcactggtttgctggtaatccgtgtgagctgagaaagaaatgtaatcaacagacattttcagtggtaacttctgtccagacatagtagtgatttcttcaggttcagacatgatgtgcttggcaagtgtcccttctacacagtatcccgctataatgacaccattcctcttatcagtacaccagctttcaaataattctctggataagccactttgcatcatgcctggggaggccattacaacactgggaccaatgtcatcaaaatgatccatgctcttgaggttactaatgtgtttgaaaacaaagggattattgatgttgatctgtttgcggattttgtcattcatggcatttacatatgtctggtacactgccatacacttcttgggccaaagatgatgcatagtatattggaatgtcatgtagttctgggtgattctgccagtactcatctagaatcaagagcagctcctgagcccttccaagagcaaagacaggaatgagacccctgcttcctctgtttacaatatcgtggacagtgttacagaatcttgcttctcgctcttcacgtttctcatggatatgggtcccataagtagattcaatgataagaatatcaggcttaatattaggaatttcagctgccattaagtgcctatcttcttgtcttgagaaatcaccagtgtacaaaagcttcacgcctgcgatctcaatcatgaacatggcggctcctaggacgtgacctgcatggtaacaccaaaacttgattcccgcaacttccttaacttcatgaaagttgatagtttcaattttgtccatgctttcttccaaatctgtctcggtatacagcatgtcgtctgctgatatgttactaactttgacataatcagaaagaagccatctataaatagcttttgtggcatgagtcataaatgttcttcctttgaaacttgtcttctgtagaaaccagggcagagctccacagtgatccaaatggaaatgactaattaataggagatcaatctcagctgggtcaattaaatcaatataaggaagagcatccattccttctaggccagggtggatcccacagtcgagcattatttttcttcctttgaactcgagaataatacatgatcttcctacttcttgcccagctccaaggggtcggatcagcagctggtcgctctcctcagcaggaatcgcagacatcccgaaagtgtgagggcgaagcgggggtgaggaacaggtcgccggggtcttcctaaattggaagcacagccaccggtaaataaaaaaggaagaaccccattcaccaagagcacaacttccgtcactccctcgtgccgaattcgccacccaggcctcgcta

SEQ ID NO: 433650 - DNA, 761 bp, Homo Sapiens
gggcgttttttgtggtcataagggcacgcgtctccctatttatgttttcctcaggctagtgtgggtggcctcatggtgggtacgacgaatggttgtatcgagatccttgcccctgtgcatagctcgcgggttcacacgtcatggatgtttgcctggttcgctggctccttatcatacatgttgtggttacagccttgtggattcgtccagttacacgttggtactatctggctgtggctctgcggtgagcgagcaaggttgggctgccgcagttccggatggggctagggtgcagggatcagaggggtgcctgagcgtgccaggcgtgccatgaagcagctgctcgagcctcctcgtctgttgcagtagttacacctaacagtagatgtattgatggctggatgccagggaaatgtgtacgggcagagtggggagctgctcgggtccccgcaatctgaggcgccatctataccaccgttccctggccagtgcccatcccaggtccttgcaccgtgcacctatctgtgggctcgtgccttctctgacaccaggcaccgagaggcctgagctctaaccacatagcttttattgttttacctcgggtagcggtggggactgttaccccaggggctttggcctcttacctggtgcaggcaactctcttgcctggtgatctgcaagatggagacatccctcacttactcatcagcgtggactaagccaagccagcctccgttcacggtaagaccaaacgtttcaaa

SEQ ID NO: 433651 - DNA, 1429 bp, Homo Sapiens
ggcctgggtggcgaattcggcacgagggtttcagaggctgagtcccccatcagctttagttcttggacttccctgtattaagcaagaattaggagaatggctgtccctgcaggcgcctcccgtaaatcctgagctctctggcgcaatctgaaacttctcttctgttttctttggctgtatcagccgaaccaggagaggcctgggctgcgactaaggagaaagaaatcgggggtttctgagagcagatggtgcctttgtgggtgcagggcttttgtggaaattgtcagcctctacgggcagagtccggcatcccctccccagactgcctgctgtcaaaccacggagcagctggagcctgccctgtccacggcccgtttccacccgggcatgttcgtctctcatgacttcggcagaggcccctggtggccttcagtttcagtttctcatccaggaaggtaaccttgggcattggcagtgggtttccctatggcttggatccagattagaattgatctttgttttcactttccatagttaataacatgcaaaataatgagaagaatttattttaaggtgacagctatactggtccaacatcgcctgcttattgtcagggtacagaagtttaatactttcttaatccagtttttcaaacttctccctgtagaccgtaaggatgaattccacaataggatcctttttaaaatcgattttaaattgttgcctagtcctgccaaggttattatgtgcatctgttatttttccaatacatgtaaacagttgcagcatgatgctttgtttaatgtcctgttcttaagctcgttagagccagttttgaaacgtttggtcttaccgtgaacggaggctggcttggcttagccacgctgatgagtaagtgagggatgtctccatcttgagatcaccaggcaagagagttgcctgcaccaggtaagaggccaaagcccctggggtaacagtccccaccgctacccgaggtaaaacaataaaagctatgtggttgagctcaagcctctcgtgcctggtgtcagagaaggcagagcccacagtaggtgcagggtgcaatgccctgggagggcagtgtgcagggatgggctctgtccccttggaactcaggcacagtcatgggggtgccggtcagccctgaagacaagctgatgagggtgcgctaggaaaagtgcagggcatcggcgaggcacacgaaggaggtggggaggtgacagatggacaagaagccgaggcagtggccatgggtgtggagcttcgcgctgtgggtgcccagctggtctgggaaaccgcaggaaatcccgcagctcaggtgcgcagtgcggaaggactcgctataccgtgggaaggcaggcaaaccttcccagggcaacgggcatggccgtgcgcctcatgtaaggcgaac

SEQ ID NO: 433652 - DNA, 1296 bp, Homo Sapiens
agcgggactggctgaccccctagggttggcagtagcccctgaccctcagtatggccaacactaccggagagcctgaggaggtgagcggcgctctgtccccaccgtccgcatcagcttatgtgaagctggtactgctgggactgattatgtgcgtgagcctggcgggtaacgccatcttgtccctgctggtgctcaaggagcgtgccctgcacaaggctccttactacttcctgctggacctgtgcctggccgatggcatacgctctgccgtctgcttcccctttgtgctggcttctgtgcgccacggctcttcatggaccttcagtgcactcagctgcaagattgtggcctttatggccgtgctcttttgcttccatgcggccttcatgctgttctgcatcagcgtcacccgctacatggccatcgcccaccaccgcttctacgccaagcgcatgacactctggacatgcgcggctgtcatctgcatggcctggaccctgtctgtggccatggccttcccacctgtctttgacgtgggcacctacaagtttattcgggaggaggaccagtgcatctttgagcatcgctacttcaaggccaatgacacgctgggcttcatgcttatgttggctgtgctcatggcagctacccatgctgtctacggcaagctgctacctcttcgagtatcgtcaccgcaagatgaagccagtgcagatggtgccagccatcagccagaactggacattccatggtcccggggccaccggccaggctgctgccaactggatcgccggctttggccgtgggcccatgccaccaaccctgctgggtatccggcagaatgggcatgcagccagccggcggctactgggcatggacgaggtcaagggtgaaaagcagctgggccgcatgttctacgcgatcacactgctctttctgctcctctggtcaccctacatcgtggcctgctactggcgagtgtttgtgaaagcctgtgctgtgccccaccgctacctggccactgctgtttggatgagcttcgcccaggctgccgtcaacccaattgtctgcttcctgctcaacaaggacctcaagaagtgcctgaggactcacgccccctgctggggcacaggaggtgcccggtcccagagaaccctactgtgtcatgtgaagcaggctggtaggcagacaggccgagcagaaggtcatggccaccgtgatggggccaacagcaacgcaggggtaggggcccataaggaagtcatcctttctgagctccagacacacaagtcctcg

SEQ ID NO: 433653 - DNA, 1387 bp, Homo Sapiens
  misc_feature (42)..(42): n is a, c, g, or t
aatcactgcagatcaatgataagttgcaggcagaatcacggntgacctctgactctcaagggaagaagtccagtgattggtctttccagggcctcaaggggccactcttcaacctgggatcctcgagctgggtgaaccgggtctggcttggtcaatgtgtggcaggcagattggtcgaccggcagacacttgggacaaaaggtggtgtgcccgggaaagctggggcaaactttccaaacagggaaaatttcttggcaaatgtgcagattctgcaaccagactggaaccacgattcccaatgcgcctgactccctttctcccactctagaactggaccaccccagaggaacagagatggcctgggagggccctgggtccagcgccatagcatcaaactggagataacaaaaggaaggggttggaaacaaaagagcagtttacatatcagatgttggtttcgaaacagtctttttgatctcaggaaaatggaggcagataccactggagaacctggctgtctgtctgtccatccgtctctcctggggggctctgaatacttcatatataaatggggtggtaccgtttgtggttgatctttttcctacaagttgggcaagtattagcattcttcagggaatcacggaggcactggctacagaagacatggccgcattctgtggaaacgatgagacgtccattctgcacgatctctgagtatccgtccatgcagatgggacaactgacagtacctgagggcctgaggcctgtagcgccctcatccctggcgtttctgggagtatgggtagtcacatatacgtctctgtccctggacaactcctcatcgtcactgctcaccacacagctgtcagcatggtcctggggcagccctcctagcattcctccttggtcttcttctttcgtcaacaatcacaacagagtcattgtgagtcagatcaaccaccacagtctctaaagattcacaagtgaggtccacaatttcatctccagcagtttccacgagttctatgggttctgcttctaaggagatctcgggggtggaggttgcttcccgagttcgcttctgagcttgtctagaatttattgctccaccacgacgctttcttgtactcattgtgctctttggtgcctttcctttcctacagaaaaggaagtgatctataccaaggtttgcagggaagtcaaatgttctcaacctttcatgccctctggttactcatctggcttgcaaaataatttggatccggacagatttccagtattttcaagtcctggagctagttaggtccgcaggcgccaccgccggcgcactccggagaagaagctccttcttcagccgcccaggagagctcctcgagaaagatgccgc

SEQ ID NO: 433654 - DNA, 931 bp, Homo Sapiens
  misc_feature (903)..(903): n is a, c, g, or t
acttctttttaaggccccgttttaaaagggaatttctgggggggagccccccgcccccttcaaaaagggaaaactgaaagttcaatttatttttacaaaagcccgaaaggggccccttttccggccccgaaagaagttttcccccgaaaaaggccggttttttgggggggagggccctcgaggaagggccgacagtggaagaggaggcatcccggcactgtaaggctctttgttaagccacccccaggcccctgtgctgtcagggggcagcttgggccacttggctgcccctgagagaaactgaggctccccgcgtacctgtggagcgaaggagaggttgtcatctgggcccctgtttcaccattcaaaaccctatggaagcattcagaagcccgaagcatcccaagcccagtggcccaggaagcttctgaaataaacggcactgggttgggaaggatgagaaagccaagacaggtgggcccaggttctccgaacatggggcaacagtgaccctgggcaaaagccctggaactgagcggctgataaggccacaattactgccaccacctctcagtatctacacgggggcagacgttaggcagtgggaactgaggactggagggcgtgtggcaaacacgggatggattttatcagaaaagagaggacacccaaacacgtgcctgccctatttatcttgcatgtcctgtgccaggtgaaggacgctggagcatgggtaaggttcctgagaacaactggtgggcagaaacgggctgggatgggcactgctccacaggcaacattaagcctctgagggggacactaatagtgctacatcttgtgggctgctgaaaagtaggtaacgaatggcctttattgcactttttcgttcttaggaaacagggnagtgccctgcagagtttctcttgatttg

SEQ ID NO: 433655 - DNA, 716 bp, Homo Sapiens
tggacaactgacagtacctgagggcctgaggcctgtagcgccctcatcctggcgtttcttgggagtatgggtagtcacatatacgtctctgtccctggacaactcctcatcgtcactgctcaccacacagctgtcagcatggtcctggggcagcctcctagcattcctccttggtcttcttctttcgtcaacaatcacaacagagtcattgtgagtcagatcaaccaccacaggctctaaagattcacaagtgaggtccacaatttcatctccagcagtttccacgagttctatgggttctgcttccaaggagatctcgggggtggaggttgcttcccgagttcgcttctgagcttgtctagaatttattgctccaccacgacgctttcttgtactcattgtgctctttggtgcctttcctttcctacagaaaaggaagtgatctataccaaggtttgcagggaagtcaaatgttctcaacctttcatgccctctggttactcatctggcttgcaaaataatttggatccggacagatttccagtattttcaagtccgctgctttcccgcaaagctcggcctaacctggagctagttaggtccgcaggcgccaccgccggcgcactccggagaagaagctccttcttcagccgcccaggagagctcctcgagaaagatgccgccgcctcaacagcaacccacttccgcttcccgct

SEQ ID NO: 433656 - DNA, 547 bp, Homo Sapiens
taagcctatattacattagcagtcatactaaagtgtagagggatacaaccttactttcctcttaatctaatggcttgttgaaatactttcttttgaagctggagatgaaattgtggacctcacttgtgaatctttagagcctgtggtggttgatctgactcacaatgactctgttgtggtaagtgttggagtgtgagagtcggctgtttcttgggtatgggtccctggccagtgccagcatctgacagccttggtcacagacttcaagtcaaggttacagcttatgctaaagaagttcatgcatcttgtggaattgagcttttagaaagaaaataaacagtaacaataataataacaaagaagttcatgcattcagtgacgagagcccaaaatgaaaaatgtttctggaaaatcatttgttatagccttgtcgcctatggagtaggtctgtgtaacctgaccttgccacacctgggcacaaaagtggtttggggagaatctcaagacccccacatctgtctgtcagtatccagaatacacactcata

SEQ ID NO: 433657 - DNA, 689 bp, Homo Sapiens
  misc_feature (601)..(601): n is a, c, g, or t
  misc_feature (634)..(634): n is a, c, g, or t
  misc_feature (657)..(657): n is a, c, g, or t
  misc_feature (668)..(668): n is a, c, g, or t
cagaaagagcagtgtgatcgcgtagaacatgcggcccagctgcttttcaccttttgtcccaagtgtctgccggtcgaccaatctgcctgccacacattgaccaagccagacccggttcacccagctcgaggatcccaggttgaagagtggccccttgaggccctggaaagaccaatcactggacttcttcccttgagagtcagaggtcacccgtgattctgcctgcaccttatcattgatctgcagtgatttctgcaaatcaagagaaactctgcagggcactcccctgtttcctaagaacgaaaaagtgcaataaaggccattcgttacctacttttcagcagcccacaagatgtagcactattagtgtccccctcagaggcttaatgttgcctgtggagcagtgcccatcccagcccgtttctgcccaccagttgttctcaggaaccttacccatgctccagcgtccttcacctgggcacagggacatggcaaggataaataggggcagggcacgtgtttggggtgtcctctttttttctggataaaaatccattcccgtgttttgccacacggccctccagttccttcagtttcccantggccttaacgtcttggccccctgttaggatantaagaaggtgggtgggcaagtanttttggggccnttattaaggccgttaagttcc

SEQ ID NO: 433658 - DNA, 752 bp, Homo Sapiens
caatgagaaaagaaaaaattttttttttccatgttggagccattaactccatagttactggagtagctattcaaagactccctttgtggggttctgaagagtggtctaggtcccctcagcagcccggccgtgggccccagcaccgccccctccaccgtccgctccccgccgctgtggccggcacccactgtgctggttgatgagcatgcggatggagatgcggctgaggtagaagcggtccaggaagtactggatgttctggttggagacggggtcatcgccgtaggtgtccttgtactcaagcacgccttgtgccatggtgggcaccacgtcgttgtgccggttccggatggtgaccagggcgtcagtgaactggctcagggtgcgatggtcctcgggatccttgtccaggaactccatgatgtccaggaggctctggacataccagctctgcaccagctgcacggagggtgtgctcagcactcggtcgggaagcaggttgatctctttcatgatgttggccaggcgcacaggcagctcctgcctgaggaaggtgaaggaggttttctcacaggcattggctggatctgaagtccagaaactgcttcatggacagcggggacggggagaacttgctgaagtgctctatgtactttggcgcccctgccagggacgccttctttagcagcgcccacacccagcgcatggctgcggcggccgcgactttggttgtggtccccgcgcgggcagcg

SEQ ID NO: 433659 - DNA, 3239 bp, Homo Sapiens
  misc_feature (120)..(120): n is a, c, g, or t
  misc_feature (397)..(397): n is a, c, g, or t
  misc_feature (3157)..(3193): n is a, c, g, or t
gggggtggggggacagatgaccgcgaagtagcgagtatcacatgcgctcggccggtcagatgtgagagagatcgtatcgtggtcgtgtgtgatttcgtagcgtgtatataattgcatgtngtacatcctatagttaggtggttgtctgcgtggtattaatgcccatgctgcgctcccgaggcaccattcgttaacggcgtcgtcctcatgtggcgccacctcttcagatttctctcgtcgactgtccttctttttgggggcttccgatgtctccttcgctcgctctatcgactgtgtgccgatgtttgacgatcgcaccacacgcggctgtaggtgcatactcgagatataagtcaactcgagttacccgtcccgtcgtcacgtcgcgcggaccgancatccgtgcccgcgcgcatggtttccacatggtgcgcatcattctgtcttctctacgtaggtacgtgtttcgctctcccgcgccctgcggtacggtgaaagtcatgtgtcgcgatcttctctggggtgtggtccgttccggggcgcgcctgttcccagtattttagtcgatggtgccgctctttccttctggcagtactttgggtgggccccggcatatgtgtgggaccttcaggttctgtccccaagggcgggggccctccggggtcttgttacagatgcttttgcgcagtgttgtttctacagtccgagctggggccggacgtcccccggtgcgtcatgtggtggtcactgtgccccgcagtgtgcgtgtgtacgtgcgcacgtgtgggtcccctcccccagggatgcagccaggccagtctcattcagtctcctctttactgtgggtgtgggtgtcactgtcactgccacagccactgggagggacacacagctttaacccctgtgtgcttaggggaagggtgggggcattcagggttataaaactaactatatacacagaaggtcctagggagaaagccaccctgagcacacatgtctgggcacagtgggggctgggggctggagctcaggcaggatggactaggcttgtggaggagcgggtgggcatgagcatgtgaggacatgctgggagggctcaggaggtggcacagacattgccaaggccactgcagggcctcgagcagcttggctggatggcaagctctcggtctaacaaggttcttccactttagagttgggccctgtgagagccaccccctccgccaccgaccttcaagccctgagcggagggagaggctgcaggaccagcctcattccccactcacgggtgtaactcctttccccactcagtccccaggtctggagggcacccaccctcttcctaacacttcagcaggccaaggccatggtgcctttgtgggctgggggaataaggcaacgggacatccacttggaaggcctgtgctgtggagggtgctgagggggacccagtacccctggcagaaaagtgacagccctggtctcagagaggaggactgccatgggaaaatgtctctgggacaccccatcagggtggagacatccctaaccctcaggcatcgcccacagagatagggaggccaccgaggggtctccacagagatggactggcacttagggaccatcacagacctatcaccgcagtgacttccatagagacagaacctggtcatcagggagaacccaccccctgctcccccaggaggatggtgaggggcaccacggtggggggacccagaggcggcagtccgtcctctcaggtgcagatgcacggcggcccttagctgacgcggtacgtggacgtgttcttgggctccgtgctgggcacacaccagtcgccggcctcctggatggtctggtagtggcgccaggctgacttgttgtagacaggcaggcgctccaccgagtccgtggacagggccttgagatagatgacagcatcggtcccaaagccttccatggagaagagctgcaggtctccctggaagtacttggcgtagaggcgggaaatggggagcccataaccaaagccagccagcggcgttcccccggtgccaggctggggggtgggtgctgtggagtacatgtagctgaagagtcgctcaatcttcctcaagggaacacccccacctcggtcactcatcttgatggacagatcttcctcacccaaggccaccatgaccttgatgggtgggagaatgaggctggactcatggctttccacagtcgccctcatggcattcttgaagagctcaaagagcatgtggtagaggtgggaggggacgtagaccatgtgaatcggctgtttggagttggctgcattgatctcctggatctccaggtcaggtgaggccatgtaatacttgtcacacaggagcttagccatgtcgtaggcatctttgaccacctcagagacgttgcagttggggtcgatgctgccgatgtgtttgggatgggctgggttggtgctgccatcaaagatgagggtgtgctggttgatgagcatgcggatggagatgcggctgaggtagaagcggtccaggaagtactggatgttctggttggagacggggtcatcgccgtaggtgtccttgtactcaagcacgccttgtgccatggtgggcaccacgtcgttgtgccggttccggatggtgaccagggcgtcagtgaactggctcagggtgcgatggtcctcgggatccttgtccaggaactccatgatgtccaggaggctctggacataccagctctgcaccagctgcacggagggtgtgctcagcactcggtcgggaagcaggttgatctctttcatgatgttggccaggcgcacaggcagctcctgcctgaggaaggtgaaggaggttttctcacaggcattgctggatccgaagtccagaaactgcttcatggacagcggggacggggagaacttgctgaagtgctctatgtacttgggcgcccctgccagggacgcattcttcagcagcgcccacacccagcgcatggctgcggcggccgcgactttggttgtggtccccgcgcgggcagcgctcgcgcacctttcggcccagcgacgcggttcggccgcctcctccctacccttgcctggcgggcatccgctctcgacgaattcgagctcggccgatttggcctgatnnnnnnnnnnnnnnnnnnnnnnnnnnnnnnnnnnnnncggccgccaccgcggtgagcgccaattcgccctatatgatctatcc

SEQ ID NO: 433660 - DNA, 930 bp, Homo Sapiens
  misc_feature (106)..(114): n is a, c, g, or t
  misc_feature (383)..(383): n is a, c, g, or t
  misc_feature (385)..(385): n is a, c, g, or t
  misc_feature (408)..(408): n is a, c, g, or t
  misc_feature (519)..(520): n is a, c, g, or t
  misc_feature (761)..(761): n is a, c, g, or t
  misc_feature (898)..(898): n is a, c, g, or t
  misc_feature (903)..(903): n is a, c, g, or t
  misc_feature (921)..(921): n is a, c, g, or t
gggatccgcggtggcggcggcggcctcgacagcggtagtgccttctactccgcttttttattttcctcctccccctcccgtgtgacgctgttgtgtggctgccttnnnnnnnnncgcaactttattgttcctcagccccacctccggctcggcgggcgtcctcaggatgcactgaggctgaggggaggggaggcggcggagggtcgaggtcgcggtccctctcctccgagcgcccggctggaggggagggagtcacgatgtctggtattcgccaggccgggtcgggctccgttgggacaagccccgggtcctcggcgggctcctcgttgacttccgcctcctcgtctttatcctcttccccgttgccgccttccgtggcggtntnggcggcagcgctggtgtccggtngggtggcccaggccgccggctcgggcggcctcgggggcccggtgcggcctgtgttggtggcgcccgccgtatcgggtagcggcggcggggcggtgtccacgggcctgtccnngcacagctgcgcggccaggcccagcgccggcgtaggaggcagcagctccagcctaggcagcggcacaggaagcgacctctcctcgcccccctctgcaacgggctcatcaactcctacgaggacaaaagcaacgacttcgtatgccccatctgctttgatatgattgaagaagcatacatgacaaaatgtggccacagcttttggaatcacatgcagcccaactacagattcttatggaatnctcaaggttgcaagaagaaataagagagaggaaatgagtggctttatactctcctgtcagtgaggatagcacagtgcctcaatttgaagctccttctccatcacacagtagtattattgattccacagaatacagcnaactncaggtttcagtggcagtntcagacaaa

SEQ ID NO: 433661 - DNA, 1271 bp, Homo Sapiens
  misc_feature (675)..(675): n is a, c, g, or t
  misc_feature (748)..(748): n is a, c, g, or t
  misc_feature (756)..(756): n is a, c, g, or t
  misc_feature (895)..(895): n is a, c, g, or t
  misc_feature (988)..(988): n is a, c, g, or t
  misc_feature (1150)..(1158): n is a, c, g, or t
ggaggttggctgtattttgcgggaatcaataatactactgtgtgatggagaaggagcttcaaattgaggcactgtgctatcctcactgacaggagagtataagccactcatgttcttccactgtcttaatatcctcttccaaaacacttagctccttctggatctgttccagttgctctctcttatttcttcttgcaaccttgaggaattccataagaatctgtagttgggctgcatgtgattctgcttccagttgtttcttcttctgcactagtaactccaacataagattgacattggccaaatcaaggttatcttggtcagttcccaaccaatcttgaaatatctgccacctgtggccattggtgctactcactgagtggtccaatttgaacctcttttcctcaaatctttgcttctgtttaagaatgagttcattcaccaagaaattaggatacagatggtcaatattgtccacaacatagttacacttgggacatctattattgtcctccaaactctgatgaatacacttgtagcaaaagctgtggccacattttgtcatgtatgcttcttcaatcatatcaaagcagatggggcatacgaagtcgttgcttttgtcctcgtaggagttgatgagcccgttgcagaggggggcgaggagaggtcgcttcnctgctgccgctgcctaggctggagctgctgcctcctacgccggcgctgggcctggccgcgcagctgtgccggnacaggccngtggacaccgccccgccgccgctacccgatacggcgggcgccaccaacccaggccgcaccgggcccccgaggccgcccgagccggcggcctgggccaccccgccggacaccagcgctgccgccgaaaccgccacggaangcggcgacggggaagaggataaagacgaggaggcggaagtcaccgaggaggccgccgaggacccggggcttgtcccagcggagcccgacccgnctggcggctaccagacatcgtgactccctcccctccagccgggcgctcggaggagagggaccgcgacctcgaccctccgccgcctcccctcccctcagcctcagtgcatcctgaggacgcccgccgagccggaggtggggctgaggaacaataaagttgcgnnnnnnnnnaaggcagccacacaacagcgtcccacgggagggggcggaggaaactaaaaaagcggagtagaaggcactaccgctgtcgaggccatcccgggaattccggaccggtaccagcc

SEQ ID NO: 433662 - DNA, 907 bp, Homo Sapiens
tatgcagtgattcatgacagcagggtcatagttcttagtctgtaatcttcgttggtaactcccatcaatgtctaattagtcaccaattcccggtcaaattcaatatttgagactatacttggaacccattatagagatcacttagcaatatgacaatgtggcttaaaggtcgtactgaattatatcgaggtaaacttggacaagcattcctgaaattcatccaactggcttgcagttcgactgtcatctgagatacgagacatccttgtagaaaagtaacactgctccaagtcttcaaaatgagcagtaagtcgttttcgtcttgatgctaacgtgctattataccaaggctgtttctttgtctgagaactgccactgaaacctggaggttggctgtattctgtggaatcaataatactactgtgtgatggagaaggagcttcaaattgaggcactgtgctatcctcactgacaggagagtataagccactcatttcttgccactctcgtaatatcctctgtccaaaacacttagctccttctggatctgttccagttgctctctcttatgttcttcttgcaaccttgaggaattccataagaatctgtagttgggctgcatgtgattcccaagaaattaggatacagatggtcaatattgtccacaacatagttacacttgggacatctattattgtcctccaaactctgatgaatacacttgtagcaaaagctgtggccacattttgtcatgtatgcttcttcaatcatatcaaagcagatggggcatacgaagtcgttgcttttgtcctcgtaggagttgatgagcccgttgcagaggggggcgaggagaggtcgcttcctgctgccgctgcctaggctggagctgctgcctcctacgccggcg

SEQ ID NO: 433663 - DNA, 245 bp, Homo Sapiens
caaagtaggcaattctttgtatattttaaggcaaataatcacttcacctctggtgccttccatgcgtcgcataagcactcttgtcaatcatggaattggaaaaaaagatgtacatttagttaaacaagataacactatttttgtagcatgattttagattgtgtccttttaatattgttttcaacaatggtagttttgaggttttggccattttctctttacacttcgtatgtattttaaagaag

SEQ ID NO: 433664 - DNA, 973 bp, Homo Sapiens
ggatctcccaactacccctggaaccttgataaagggagacaaggccatccggttgggtttcacagtagctgagaatgttaacctgtaagtctccaggaactcagtttcgagtgtatttaactactttgatgtcgcatctcagcctccaaaatgatggttttaaaatgaacattaagattcagaagaagagccagcagtactttccagcaaatgacttataaatttgagagttcaaaaaccttggaaaagaatctctgtgcattaaagtatatatctgaagttgggcatcttcatacatgtgaggattgggatccaacagatttctattgatcacctctctaactcgagaatcaagactgacctcttttggtgatagtatagaaatgtaatcttcatatatcatcctagccttttcttcaattacttttttgttctgctccttctttaagtcttcacaagcaagccagaaaagtaggttctcttcactgtattctgttcggaggaactctctgaaaaggtttcttcctgctggggccttcatcatcttgtcaaaattttgagaccaggacaagacttcctctgcagtggggttttggcattcctctaggacctgggtactctccatttttgtagtgtgtgtgggtcttcccgcattttcccctctttcttcattcctcacagtgaggcaggagcagctgcaacaacagcaccaacaaaagcaacaggtgttgttgggcctctggtttccaggcgcttgagacatggcaggtgttccttcattttgggactgctgcctttttcgcatttcagctacttcaggacccagttggccggtcgcctggaggtgtgggcagcgcgccgatgggtccgggggagcggggctgggcggctcggtcctctagcggagccggtttgctgccatccgcccaacttccgctctcgacgaattcgagctcggccgatttggcctgat

SEQ ID NO: 433665 - DNA, 1836 bp, Homo Sapiens
  misc_feature (1644)..(1644): n is a, c, g, or t
  misc_feature (1675)..(1675): n is a, c, g, or t
  misc_feature (1700)..(1753): n is a, c, g, or t
  misc_feature (1757)..(1759): n is a, c, g, or t
  misc_feature (1783)..(1783): n is a, c, g, or t
aagaaaagagctctttattccacgtcgtccgatatttttacacaagtaaaataaaatgcatatctctatataccgcgatctgggtgggaggcggcgttctggaacaaacgctgccgccgaaccctgtaaacatgatggggtggagatgggggtggcgggcggcaggcgtccatcagggaggacctggcctggcctgccccacgggtcggccgcccggctggcttggcggcgtggagagagaccccgtatgtacacacacctggctgctgagcacgctcttgtgtccgctgggggtcagcagggcccaagcactgtccacagcaccagcgccaggcccaggggggtgaggctgcaggtgaggctgggtagggcacctgagccttctgagtcaccagtcccgccacccccgctgcctgcctggcccagacggcagtggctgcgggtgcggttcttgcgtgaacagcctggcctccggcgagggcccgaggtggggaaccctggtggctcggagccctcgggccgcactgcagtgagcgggggctcagcagagccaggcagagtcccaaagggtgagtcattgatgtgccgtgggccagagccgttgcccggcgggctgtcaccgggcggcacgcgtcccttcagcgcattgcctgccgaagctggtcttccaggctccagtactgaggccttgtcagcggcatctggctggcagcacttgggaagccccagcggctcctcatcggtggccctgccggtccagatgggatggtaagggccggtggccacagcgcagccctgcaggtcattggcagctaggcgtttgaggtcacggccagccaggcgttgcgggaggctgcagggcacctcggaggaggagccgcggaacttctgcagccaggcccagagtgggcgtgcccggcagtcacacacccaggggttgtcgttgagcctcaggtactgcagggcacgcaggggggccagggcctcagtgggcagcgctgatagattgttggcaaacagatagagtgtcatgaggcggccaaggtcacggaaggcatgcgggtgcacatgggccacgcggttctggtgcagtaggagacggtcgaggctgtgcagcccacggaaggcgcgctcgggcacgctggagatgcggttgccgtgcaggaagaggtgtgtgaggttgcccaggtcgcggaaggtgtcattcaggcagtgcctgcagcgcgttgtcctgcaggtagaggtactgcagggcagccaggccgcggaacagccccgggcccagctcctgcaggccgcagcggtccaggtgcagcgtgtgtaggcggcccaggccgtggaatgtggcagggtccacagaccggagctgtgcattatcgctgaggtccagctgctccaggagggccaggccagtgaaggcagccgcatcaattcgggccagcacattcgagtgcagccacaggatggtgaggttgcggcaggcacggaagctggcagctggcacatgcgagatgcggttgccgtgcaggaagatgcgctggctggcagcagggatgcccacgggcacagcctgcaggccctgctgggggcagcttgtcgtcaccttgggctcattgtagcatacgcaggcacctgggcatgggngctgccacctgccatggcctgcaaccacagnacccatgccagcagccggctccctnnnnnnnnnnnnnnnnnnnnnnnnnnnnnnnnnnnnnnnnnnnnnnnnnnnnnntggnnnctgggccgcgcggcgggccggggngcgcaggccgggccgcaggaggcgctcagcccgcccggtgcaccggcgccgcg

SEQ ID NO: 433666 - DNA, 1152 bp, Homo Sapiens
  misc_feature (11)..(11): n is a, c, g, or t
  misc_feature (19)..(19): n is a, c, g, or t
  misc_feature (23)..(24): n is a, c, g, or t
  misc_feature (32)..(32): n is a, c, g, or t
  misc_feature (96)..(96): n is a, c, g, or t
  misc_feature (113)..(113): n is a, c, g, or t
  misc_feature (1138)..(1138): n is a, c, g, or t
ccaaaatggcntcccgcantcannccccaggntttcttgacctcagtactgcaggcacgcagggggccaggcttcagtgggcgcgctgatagattnttgcaaacagatagatntcatgagcggccaaggtcacggaaggcatgcggtgcacatgggccacgcggttctggtgcagtaggagacggtcgaagctgtgcagcccacggaaggcgcgctcgggcacgctggagatgcggttgccgtgcaggaagaggtgtgtgaggttgcccaggtcgcggaaggtgtcatcaggcagtgcctgcagcgcgttgtcctgcaggtagaggtactgcagggcagccaggccgcggaacagccccgggcccagctcctgcaggccgcagcggtccaggtgcagcgtgtgtaggcggcccaggccgtggaatgtggcagggtccacagaccggagctgtgcattatcgctgaggtccagctgctccaggagggccaggccagtgaaggcagccgcatcaattcgggccagcacattcgagtgcagccacaggatggtgaggttgcggcaggcacggaagctggcagctggcacatgcgagatgcggttgccgtgcaggaagatgcgctggctggcagcagggatgcccacgggcacagcctgcaggccctgctgggggcagcttgtcgtcaccttgggctcattgtagcatacgcaggcacctgggcatggggctgccacctgccaggcctgcagccacagcacccatgccagcagccggctccctccagcggacgccctcttcatcgtaggggttgggcggggcgcgtcggggactgaaagtcgtttcggggcgggcgcccgtctccccgcggccgggtccgcatccaggcgccgccgctacggcccggccccggcccggccgcgggacgaggctcggcgcgctccgctccgcccggctctggctgggctcgggccgcgggtgcgcagggcgcgcagggcgcacagggcgagggcggcggcggatcccgggaattccgaacccgtcaccgcccgcgggcgcgcgctctgggggcggctaagaggcctcgcatgcgtggcggcggctggacccgccgccccccgcggccgccgcggcggcccaanagtgaaaggtagta

SEQ ID NO: 433667 - DNA, 1144 bp, Homo Sapiens
ttttttgggccgcgcacaggggcccctgggttgtttgccccgtgggggtttttccccacgggtctcaaggcttgagattaaggggaggagatcccccaatctgaaggggccccgggccttctggaggagatatttttgtgggggcatgtgggggccgggttatctgctgggttttttccaatagcttatcccctgggctgtgggaaccttcaaggggttccttttttgtccacaagccttttcgttccctggttgccttcctgggcccccctgggggtgcccttttccttttccctgctgggtttcctgttttcctccaggccatggactcaaatttcgccttcagcccacgggcaccactagaagcagcttctatgggcgtcgtcttcttataagctgtggtcggggcctccatttcattgaagccgacagcgctcttatccactcggtccttctggattccatactggccaccaaagcccttggcataatctctctgggactcgtgtttctccgtctctcccttgtagtcatatcccagagctgctttgtcccatttatccttctccaccccgtaccggccaccaaagccacgagagtaatctttctgagatgtgtgcttctccacttctcctttataatcaaagccgactgctgacttgtctgccctgtccctctcaactccgtacttgcccccaaagcctttggcagcatccgtctgagaagagtgcttctccacctcggcaacatactcatggcccactgcactcttgtccattcggtctctttctactccaaaccgacctccatagccatgggatgctttgggccctgactccatctctttcttcctgagaacatcatgctcctctgatactttgttcctcagctggtggatgttgatgtgttctgtgcgtccagacccctcgatggtcttggctccccatcgttgctccttttcagagatgtcattcacaaagtcaggatctgtgtcccaatcatcaccctgggtctccacggaaacagacacatcatggcccactacagacttccacatctccacctgtgcaagcctctgttctaagcgcccggctcctcgcgtccacaccgactccctctctggctgctgccacttcggagtccc

SEQ ID NO: 433668 - DNA, 2278 bp, Homo Sapiens
  misc_feature (2194)..(2235): n is a, c, g, or t
tttcaaagtttaattcaattttattttccacttttagtatttttcaaattatacaacatgcagtctgccagagtacccatacatcttcattttagaacctagaagattaccaaaattttccgtgggccagaggagggtgacttccagatcttttgttacatggactatagtacagcatcgttattgatataaaccaccattctcccctcaaaccccccggacaagtttgtccacaatttttttaatgtgaaagctactgtacagatacataaagcccagagaacacacatctgcagtacacaggacacactttacaaactagacatgtataattctacagaatgccctattccccttatatctgcacacaatgaacagtatttaaaactgatacacaatttttaaataagtaagcagacttcatggagcggcgcttacttcggcagttatccagccattattcaatgcttggtttaaaaagtctaaattgttagtgttaaatgaagcaattttagattatgatggtttctttagcttgctcaagattctgggctagacaatgaagtgaaatcttccctccaccctctgcctttcccagtatgtcatatagctagagtccaaatgtctcctgccctgctttaaaaaaatgcacttcgaaagaggggattgttaagaacttttatttgctttgttatttctataagaactagagcttctttatgtaaacgttagggctttaaaaagtcactagatgctacattctagacaaacatttttatttcttcatttatcccaatatatctataaattctgatttcttaatcacgattctatttcctttaaaagtcttaacgcgaaactgttattgttctgtctactacctgctgtttaacaaaagcaaagtgtgcagcatttgaagagatgatatgtttgcacagaattctctagtaattgacaaaaacacatttggcattatatattttagttcccagacataaatcttgatatctcaaacaacattctcctaatttaccaatccaccatcctgcagataaagattattcatataaaccatctggctgttctcttagagcatcaaagagtaaactttcaagaagtagcatgaaatataaaattattcatagaggagaaaaagacacaatacatgctagtcaaaagctgcatataaccaaaatcatattcatgagcttagttgttcagaagtgtggtttttacatttaaagtacagggagcaatagtctaaaaacctgaaaattgcacatatgtggcttttttagaaagtggcctacagagaacatggtcctgatataataactggcttattatacatagcaatatttaaggatccatttgaataatccgttccaataatttgcctcccttttagtcacactataggaaaattagattagaagtcctataaagattgaagctaggtgaactgactggctgatcagcaactagcagaattatctttaagagacatcaaagccaactttctctgtgaataaaagtaaagcaaatgttgtcagtcccttgtagagatcaagtaaaatggaactacaagcgaatgtttccctttgaaacatgaaagtgccaagcaattctttagaagtagaaacggggtacccagggaaaaatcaccctggaaagaatctaaaacaatctattttatgatggatattaacaagagccaaaaaccattactgacctttgttcaatttccaaacaaaaagtaatggagagtagtggtaatgacaattaataattggcaatcctctcaaacaccaatgtttagcttcccaaatcagaagcaaacatatcaacaaggttatgtggcatatgttattacctgataagctttgcaaaacctgccccacaaggacccttttatcagaccgcaaataatggtagagcaggtatattgggctggcactgataacaaaattaaagaatgaaaaaaatttaaacaaatgcaaaattgccatcttcacaaaataaatacttcaatagaatttgtcgtcctctctctccttattccccaccaaaaacaaaacatacataaacaaagtgcaacatttaacaaataaattaagtcaaagcaggtttgctttgctagggaaattttgtacaagaaatgtttggatgtcaatgcacagttcttagcactttnnnnnnnnnnnnnnnnnnnnnnnnnnnnnnnnnnnnnnnnnntgataggataggagtttccaccgagattggtttggttgtcatt

SEQ ID NO: 433669 - DNA, 818 bp, Homo Sapiens
gggggttcttagcaccaaactcaaagaactcggcgaccccccagcgtggcgtggagcgtgtgctccgtggtgatggcccggtctcagcaggctggcgatgctctcggctttcgtgcgttcccggtaggcggcgatgacctgtaggttcccgcaagtgctgtgtgcggacgctctgctgcgccaacacgctcgtcccgcgccggcccaagtctcccccggcctcctgcaggcgcacagacctcatccgctccagcttacgcctgcgggtggcatccgactcgcggctgacgtcctggggccccttgccctgccgggcatgggtcagtagcatggcagccagctcactgtccacgtctgccagcttctgtgcttgcaccacgtgttttcgccttgagcttccagtcgtgaggaggctgcctccagagaagcggctggctccatcgtttgagatgacccgagatctggacggtggcaatgtgctacaacctctcactttctgttcacacgggtgacccacgttggccaaagtcaggtgcagccggcccttcaccaccgagtggacgccgatgggcttgacgcggccaaaccccagcatgtctccactcaccaccatgttgtcctgctcgtattcagttgccacgacctcaagctcgtgggaggcctgcacagccggccggccttggcggaggagatgattttacattttcccagctcttcctggtgaaaggttttgaagcaagaagacccagaatcaaagcaccccatatcctgatctctgaaatgtcatccccattcaggcagaccaggccccccccgct

SEQ ID NO: 433670 - DNA, 1114 bp, Homo Sapiens
  misc_feature (914)..(914): n is a, c, g, or t
  misc_feature (1010)..(1011): n is a, c, g, or t
  misc_feature (1013)..(1013): n is a, c, g, or t
  misc_feature (1028)..(1028): n is a, c, g, or t
  misc_feature (1032)..(1032): n is a, c, g, or t
  misc_feature (1036)..(1036): n is a, c, g, or t
  misc_feature (1045)..(1045): n is a, c, g, or t
  misc_feature (1048)..(1048): n is a, c, g, or t
  misc_feature (1052)..(1052): n is a, c, g, or t
  misc_feature (1057)..(1057): n is a, c, g, or t
  misc_feature (1062)..(1062): n is a, c, g, or t
  misc_feature (1064)..(1065): n is a, c, g, or t
  misc_feature (1068)..(1068): n is a, c, g, or t
  misc_feature (1082)..(1082): n is a, c, g, or t
  misc_feature (1090)..(1090): n is a, c, g, or t
  misc_feature (1096)..(1096): n is a, c, g, or t
  misc_feature (1104)..(1104): n is a, c, g, or t
  misc_feature (1106)..(1106): n is a, c, g, or t
  misc_feature (1112)..(1112): n is a, c, g, or t
  misc_feature (1114)..(1114): n is a, c, g, or t
tgggtggcgaattcggcacgaggacccctcccccctttcccaaggacaatctgcaagaaagcagcggcggaggagagctaagactaaaagagtggatcatgacccatgaagagcaccatgcagccaaaaccctggggattggcaaagccattgctgtcttaacctctggtggagatgcccaaggtatgaatgctgctgtcagggctgtggttcgagttggtatcttcaccggtgcccgtgtcttctttgtccatgagggttatcaaggcctggtggatggtggagatcacatcaaggaagccacctgggagagcgtttcgatgatgcttcagctgggaggcacggtgattggaagtgcccggtgcaaggactttcgggaacgagaaggacgactccgagctgcctacaacctggtgaagcgtgggatcaccaatctctgtgtcattgggggtgatggcagcctcactggggctgacaccttccgttctgagtggagtgacttgttgagtgacctccagaaagcaggtaagatcacagatgaggaggctacgaagtccagctacctgaacattgtgggcctggttgggtcaattgacaatgacttctgtggcaccgatatgaccattggcactgactctgccctgcatcggatcatggaaattgtagatgccatcactaccactgcccagagccaccagaggacatttgtgttagaagtaatgggccgccactgtggatacctggcccttgtcacctctctgtcctgtggggccgactgggtttttattcctgaatgtccaccagatgacgactgggaggaacacctttgtcgccgactcagcgagacaaggacccgtggttctcgtctcaacatcatcattgtggctgagggtgcaattgacaagaatggaaancaatcacctcagaagacatcaagaatgttcgtatgaatgaagccagagaggccttagaatccatagcccattcccttctggcttctgagtctctgnnantgcttctcccttggncctntgcnatctctccnggntccngcccngattncnnccnaaaaaacattaaanaaaaaggngggtgncatgggtncnagattntn

SEQ ID NO: 433671 - DNA, 2419 bp, Homo Sapiens
ttttcacagtgaccagttggcatttattagtgtagttacaatttgtcactgtagtaaaagtagtagaggaaccaagactctttgttatcacaaagaaataaataaagcttatttttaggaaaattctaactgagtaagtgatatctagcagtagcactagaggtgcccagccttgtgtgacagataaagctggggcagaagtcatgttaaattctacctaaaaggagctcccacccactgcctgctcctccagctcctggccagaactggtcatggctgcaaggtacagaataaaaggaaacctaatgaaaaaaacagctaaaacactgagaagatgtggacttattagggtgtgagctgaccatgatcaggtaatctattcccctcactccagagaggtttagacggcagcttccccggaccgcttccgggtgatgtgctccaggtgggcatggtctgaagtgtccaagtcaatctcgtacttggctaggattttgaggatgggcctcagtttcagccaccactgttccttggggattcgatgctcaaaatctgtctggtccttcagctcagccactggttggaagaccagagccctcttacgcatccccagaacacagcccgaatctggagtattggcaaagatccgcccattacggtaactctctttgattttcccagacatccagttcatagccttggcgcccatcttagtggcaaaattcctatcaaatggggttgggctcccaccctgctgcatgtgaccaagcacattcttcctgctgtcgaagatgcccttcccctcctcagagtacaggttgaaaatgaagtcagtggtatagttctcattgcacttttcattccttaacaccaagccccttttcacagttgttttcatcttttgcaccagatgttcaacatttgcctgcaggtctcgaatggtgaagggctcctcaaaaatgtaggcagcatcggccccagctgccagtccagccatggtagccaggtagccacagtagccacccatagtctcaatgataaacacccgacgcttggtgccagctgctgactgcttgatgcggtcacaggttgtgcagatagtattgagtgctgtgtcagccccaacgctgaagtctgagccagggacattgttggagactgtagcaggaatgaccacaaatgggatgcagagctcatcaaactgcttcctgccctccatcagttccaggccccctgtgtaagcctcaaagcccccaatgatgacaaggccctgaatgttaaacttagttatattggcactgatctgttcaaagctcttcttgggtagagtccttttagtcccaagtttagagccaccttggccagtccagcccccaacatagctccagccagcttcctctatctgccccttggccaggccctcgaaaccatcatggacaacgagcactcggttgccctggataaggccaatcctcacagtggagcgaacagcagcattcatgcctgcagccggagcccccacgttcatcacagccactgtgtgcgaaccactcttagataccgggggtctgacatgagctagaagcttgtacacctcccagttgttcatgaagctccggcctctcagcttcagggcttcgtcaaatttcttctcatccatggccttggtcacatctttggtcacctggacacattccatgaggggcaggcgcacagcctggttaccagagaggctcactacacaggctggggtatctggggtcccctccaaaagtgccatcactgcttccacacccatcctgctgcccagaattctgtcaaaggctgatggcgtcccacccctctgcacatgccccaagacagtaacccgggtgtcatatcccagacgcttaaccaccagattcttgatgtcttctgaggtgattggttttccattcttgtcaattgcaccctcagccacaatgatgatgttgagacgagaaccacgggtccttgtctcgctgagtcggcgacaaaggtgttcctcccagtcgtcatctggtggacattcaggaataaaaacccagtcggccccacaggacagagaggtgacaagggccaggtatccacagtggcggcccattacttctaacacaaatgtcctctggtggctctgggcagtggtagtgatggcatctacaatttccatgatccgatgcagggcagagtcagtgccaatggtcatatcggtgccacagaagtcattgtcaattgacccaaccaggcccacaatgttcaggtagctggacttcgtagcctcctcatctgtgatcttacctgctttctggaggtcactcaacaagtcactccactcagaacggaaggtgtcagccccagtgaggctgcccctcgtgccgaattcgccacccaggcctcgctc

SEQ ID NO: 433672 - DNA, 646 bp, Homo Sapiens
gctctggccagtggtagtgatggcatccacaagtgccaggatccgatgcagggcaggagtcaggtgccaatgggtcatatcggtgcccccagaagtcattgtcaaatggccccaaccaggccccacaatgttcaggtggctggacttcgtagcctcctcatctggtgatcttacctgctttctgggaggtcactcaacaagtcactccactcagaacggaaggtgtcagccccagtgaggctgccatcacccccaatgacacagagattggtgatcccacgcttcaccaggttgtaggcagcttggagtcgtccttctcgttcccgaaagtccttgcaccgggcacttccaatcaccgtgcctcccagctgaagcatcatcgaaacgctctcccaggtggcttccttgatgtgatctccaccatccaccaggccttgataaccctcatggacaaagaagacacgggcaccggtgaagataccaactcgaaccacagccctgacagcagcattcataccttgggcatctccaccagaggttaagacagcaatggctttgccaatccccagggttttggctgcatggtgctcttcatcctcgtgccgattcaaccacccaggcctcgctacctagccgtatagttgtt

SEQ ID NO: 433673 - DNA, 1078 bp, Homo Sapiens
ggcccgccagcttcccgtgcccgttgctttggcgagctctcctgtgaacccgcgtctctcagctccatgccggcagccgagtcccataggaatcctgcatacccagctcccttctggagctgattcgagggcttctcaagaaacaaaaaccttccaacatccccggggccccttccacttgcggatgttgggcagggtcggctggtttagctccgtgcagaacttttccaaggcctctctgtcaagcagttcttgcacagctagaagcttgatgctgttttccaggagtgtcatgcacaccacctctcgcaccccggggttgttggccttctccacggaacagccctgcaagttccaggtggccagcctcagcacaggcctcccatcccttgtgcctccaaaggcctccacggacggccgagtggagataatctgggtgggccccctggcggcaggtccaggtcctcactctgcaggctcagggaagtggggctcgggtgaggcttggcggtgaaggtcagtcccccgttcgtgtgggtggatgggggcctggacctctcagcaaacacctggtgccggatcctgtccaggaaggcggcattgataccatccatcctcactaggtcctcaacgctgcgaaagggcccatgctcacggcggaagtccacgatgctgagggccattttctccgagaggcctcgcacgctcatgagctgggccggggtggctgtgttgatgttaacacgtggggtgaggggcacagctgtggccaggtggtgaggctgctgtccgctagcaggtcccgccgcagggaactgggagagtgtgcgctgagctgcccttgctgctcacacagatctcaaacttgacctgctccagcttggtggcgcctacaccactgaccaatgccaggtcctccaccttcttgaagccaccgatatactctcggtactccacgatgctgcgtgccacggcacgcgtcaccccaggcagggtcatcagctcctcctccgtggcagtgttgatgttgagccgctcctgattcactagaatgttgctgaagttacaggctgcgctg

SEQ ID NO: 433674 - DNA, 1903 bp, Homo Sapiens
  misc_feature (1548)..(1548): n is a, c, g, or t
  misc_feature (1596)..(1596): n is a, c, g, or t
agcgggggggcaagcctggctccgcagaaggggagctgccgccgccgcggtggcactgcctgatgctcggcccagtgtgccggtgccccgctgggtgacagtggactcccagggcgcagcaggagcaggtgacagactgttggctgaaggtgagggtgtccaccctcgcaggcacacgttccagggagcacggcactcaagcagggccgtcagactgggctctggtgcccagaagctgtgcaggccggagagaagcactaccacccttcctgcgcgctatgtgtcaggtgcggccagatgtttgcagaaggcgaagagatgtatcttcaaggttcctccatctggcatccggcgtgtcgacaagcagccagaactgaagacagaaacaaggaaaccagaacttcctcagagagcatcatttctgtccctgcttccagcacctcagggtctccgagccgtgtgatttatgccaagcttggtggtgagatcctggactacagggacttggcagcccttcctaaaagtaaggccatctatgacatcgaccgccccgacatgatctcctactcaccctacatcagccactctgcaggggacaggcagagctacggcgagtcccctcagttgctctcgccaacgccgaccgagggggatcaggatgaccggtcctacaagcagtgccggacctccagcccaagctccactgggtcggttagcctcgggcgctacactccgacctcacggtcaccacagcactacagccgtccagctggtactgtgagtgtgggtacagtagctgcctctccctgtcccaacacccaagccctacatccgtgttcagacatcattacatcccctacttccgaggcagtgaaagtggccggagcacccccagcctctccgtgctctctgacagcaagccgcccccctccacctaccagcaggcacctcgccacttccacgtcccagacactggcgtaaaagataacatctataggaaaccccctatctacagacagcatgctgccaggcgatcggatggggaggatggaagcttggaccaggataacaggaagaagagcagctggctgatgctcaagggggatgcagacacaaggaccaattctccagacctggacacccagtccttgtcccacagcagcgggaccgacagagaccctctccaaaggatggcaggggacagctttcactcacaatacaagatctatccgtatgactccctcatcgtcacaaaccgaattcgcgtgaaactgcccaaagacgtggaccggacgagactggagagacacttgtcgcccgaggagttccaggaagtgtttgggatgagcatcgaggagtttgaccgcctggccctctggaagaggaatgaccttaagaagaaagcccttttgttctgacggctgccagcctgccccactggtgtgtgccgggcgccgaggccaggggcccctggcgagaaccgcacacacccctcccacacaccttgctctggcttctctgtgtccatggggtgggcgggaggggggncccccagcaggtgcggcccctgcacctgccggcgacactcctgccggnaggttagggccgagacggctagcttcacgccacccttccccgctgtggcttggtgtcagggagaggctgtatagtggctgtgttcggcatcagatggagcacaacaggttggtttgagcccagcccacctttctagcgtttctcgaggtgctcttgtgcccgttgcttggccacgtgggggaccagaaggtgcccggtcccgtcagctctgaagccttgttgattactgggcgttcacaccatctatcgggggtgcgtgcacccggtccctttaatgatccctggaagttctgttccttcaaaggca

SEQ ID NO: 433675 - DNA, 832 bp, Homo Sapiens
aggaagaggataaaatggaagatcaaaacattatccaggctccacagaaagaagtaggaaagggccgcgatcctgatgcccaccccaagagcacaggtgtcttccaggatgaagagctgcttttcagccacaagctccaaaaggacaatgacccagatgttgacctttttgctggcaccaaaaaaaccaagctgttagagccaagtgttgggagcctgtttggggatgatgaagatgatgatcttttcagctctgccaagtcccagcctttggtacaagagaaaaagagagtagtgaaaaaagaccactctgttgactctttcaaaaaccagaaacatcctgaatccattcaaggtagtaaagaaaaagggcatatgggaagccggaaacacctcaggcaaatttagcgatcaacccagcggccttgctgcccacagcggcttcccagatctctgaagtaaagcctgttttgccagaattggcttttccttcatctgaacacagaaggagccacggtctggaaagtgtgcctgtccttcccgggagtggggaggccggtgtgagttttgatcttccagctcaggcagacaccttacacagtgcaaacaagagccgtgtcaagatgagagggaagcgtagaccgcagacccgtgcagctaggcggctggctgctcaggagtccagcgaggctgaggacatgagcgtccccagaggacccattgcacagtgggctgatggcgccatttccccaaatggccatcggccacagctcagagcagccagtggagaagacagcactgaggaggccctggcagctgccgctgcaccttgg

SEQ ID NO: 433676 - DNA, 921 bp, Homo Sapiens
  misc_feature (572)..(572): n is a, c, g, or t
  misc_feature (587)..(587): n is a, c, g, or t
  misc_feature (609)..(609): n is a, c, g, or t
tgtgattgtgttccaataaaattttattaacaaaatatgacagtgggggggccacagtttgccaaactttgccttggaggacatgcagaggcaccctcagaattcagtgaaaacctgctcccatattgctaagactcatgaagtataatctctcaccttctttctctttcccctgcccaggccctaagttagggttcccatccatataacaaagacttctggtcaggtggcatttgctatctctgggattccctgcccatgaaagccacaaagagatttcttcttttacacaccctgaagcatattatggccccagcaaggctaactaaatcaaactgtggtttaaaaacaaaacaaaccaaccactgtgaaatatttatttttgttttgtagtattaagcatgattaaaccagtgcagaaaaatactaagtacattgggtaaaagatgagctagctgttctagtatttgctttttgtaatccagttaagaccatgagcatatacaatatcatcactaactcaacaatgtagctgcagggtaacctgtggataccctgtgtgctctactggnctccaaaggcattcnggggatcatcaaagatgttggncaccttgtgttcaaatcttggttcaggtgcggcctgtgcagatcggctttttggtttggttgtcttagcctggataccagtggagaagatgtcatccatatcatcatcaaatatagacttggcttccactttctttttggacttttcttttggttttacagttaagtcagcaaagatatcaatgttatcatcaaataaattagattccaatgttttctccttctctctggttttctgagagggtttaattgcttccgtagcaaatatatcatcctcaaaaatatcttgtgttgttaatatgacatcctgctg

SEQ ID NO: 433677 - DNA, 1693 bp, Homo Sapiens
  misc_feature (53)..(53): n is a, c, g, or t
  misc_feature (60)..(60): n is a, c, g, or t
atgctaaagactcatgaagtataatctctcaccttctttctctttcccctgcncaggccntaagttagggttcccatccatataacaaagacttctggtcaggtggcatacacaccctgaagcatattatggccccagcaaggctaactaaatcaaactgtggtttaaaaacaaaacaaaccaaccactgtgaaatatttatttttgttttgtagtattaagcatgattaaaccagtgcagaaaaataccaagtacattgggtgaacgatgagctagctgttctagtatttgctttttgtaatccagttaagaccatcagcatatacaacatcatcactaactcaacaatgtagctgcagggtaacctgtggataccctgtgtgctctactggcctccaaaggcattcaggggatcatcaaagatgttggacaccttgtgttcaaatcttggttcaggtgcggcctgtgcagatcggctttttggtttggttgtcttagcctggataccagaggagaagatgtcatccatatcatcatcaaatatagacttggcttccactttctttttggacttttcttttggttttacagttaagtcagcaaagatatcaatgttatcatcaaataaattagattccaatgttttctccttctctctggttttctgagagggtttaattgcttccgtagcaaatatatcatcctcaaaaatatcttgtgttgttaatatgacatcctgctgactactggattttgtctcattcttcttgactttctgatctgtaaagaggtcatcctcatcttccaggagaggaaagggatttgttttctttgctggttttggtttagcagactgaaagagatcatcatcactgctggcctcgcctagagcaggaaacatggggctctttgctttaccacccactggtgggttggcaggattctctgctatctttgccttgggttttgttctctccacggactgagatccagtgcccgtggaaaaaatgtccccagaatcaaaaaggtcagcctcccctctggaatgacccagagactttgcaaaggggcttgtgtccactccaggcacaggaccaccttcccaaggtgcagcggcagctgccagggcctcctcagtgctgtcttctccactggctgctctgagctgtggccgatggccatttggggaaatggcgccatcagcccactgtgcaatgggtcctctggggacgctcatgtcctcagcctcgctggactcctgagcagccagccgcctagctgcacgggtctgcggtctacgcttccctctcatcttgacacggctcttgtttgcactgtgtaaggtgtctgcctgagctggaagatcaaaactcacaccggcctccccactcccgggaaggacaggcacactttccagaccgtggctccttctgtgttcagatgaaggaaaagccaattctggcaaaacaggctttacttcagagatctgggaagccgctgtgggcagcaaggccgctgggttgatcgctaaatttgcttgtatcttcccgatccgagtggatggttctttggttttaaatggagcgagacctgatgagtcctgaggtgtttccggcttccatatccttttctttctacctgaaggattcaggagtttggtttgaaagatcctcgtccgaattgccacccagc

SEQ ID NO: 433678 - DNA, 452 bp, Homo Sapiens
tttttttttcactgtgaaatatttatttttgttttgtagtattaagcatgattaaaccagtgcagaaaaataccaagtacattgggtgaacgatgagctagctgttctagtatttgctttttgtaatccagttaagaccatcagcatatacaacatcatcactaactcaacaatgtagctgcagggtaacctgtgggataccctgtgtgctctactggcctccaaaggcattcaggggatcatcaaagatgttgggacaccttgtgttcaaatcttggttcaggtgcgggcctgtgcagatcgggctttttgggtttgggttgtcttaggcctgggataccagagggaggaaggatgtcatctttaggaaaggaaaaaaggaaaaacgggttgcttgaagaggggttgggggaaagggtacttttttagggcaccttgcaaggcaaaccacc

SEQ ID NO: 433679 - DNA, 1017 bp, Homo Sapiens
ctggctcggtaggacttcaggaggattctctcgaactttctctgagattgcagcctttaaagagtggtcgaatctgaggggtatcggaaaggactaggaagtctgggatccacaggacatcatcccgaaaaagggattctggagcatcttctagggtcttccatcatggccaggtggttaggaagcagcaggctgggtagctcagtctccatatctattcggatctgcagctgggcacggtggaggcgctccaagatggtgctggatgtcctccacgaggtactggcattgttgagaatagacgtggatcacaccgatctgaagttgggctgagagatagagggagaagcggggccgcggcaggccgggctgcgggggttgcactcgtaccagcacgtaattgaggatttcctcgcaggttttcaccacattcaccctcaggtattcgcgcttcaccaaccggctgccgcgagtcgccgccagccagatggtggcaaagcagccggtgtggcgctgaagcacgttgggatagtagaacattgtccctctggtctttcaccctcgattccaccagatccccgttcggatctgagtcggaattctttagggcacagaattcccaacaccaggataactgagacgcaggagatgggcgcccctctctgtggaccctcagtggatccgcacgccacgtgatgcgtcaaacttgagacttctgggttgggttccaggttggagatgcagagctccaaggggacgtccgggccggaatccagagcaggtcccgagggagcacggtgtcctccacagcaggcctcggtcctcgagcgctgggagcgatgtcaggcccctgggccttgcactggcttgggcggccgcggtgtggccccgggccgcctactgcaggactagatcgcaccgcgggaagcgagcgcttcggggcaccgcacctcgctcctcattagatggcggcttttgccctgacagccaatggggaacgggggtcgggtcgggaac

SEQ ID NO: 433680 - DNA, 1271 bp, Homo Sapiens
cgaatacctgagggtgaatgtggtgaaaacctgcgaggaaatcctcaattacgtgctggtacgagtgcaacccccgcagcccggcctgccgcggccccgcttctccctctatctctcagcccaacttcagatcggtgtgatccgcgtctattctcaacaatgccagtacctcgtgggtaaggctgggaaccctcaaaggtggggcgggctgagcagctgtctgctaagctggctgtctacctcgtcctccctgcccacagaggacatccagcacatcttggagcgcctccaccgtgcccagctgcagatccgaatagatatggagactgagctacccagcctgctgcttcctaaccacctggccatgatggagaccctagaagatgctccagatcccttttttgggatgatgtctgtggatcccagacttcctagtcctttcgatatccctcagattcgacacctcttagaggctgcaatcccagagagagttgaagagatccctcctgaagttcctacagagcccagggagccagagaggattccggtcactgtgctgccacctgaggccatcacgatcctggaggcagagcccatacggatgctggagattgagggtgaacgggagctcccagaggtcagccgccgagaactggacctgctgatcgcagaggaagaagaagctatcttgttagaaatcccgcggctcccacctccagctcctgcagagtaagggcaagaactcctagaccaggtagggtgtcagtgctgggaagggtctcctcatttctcttgcccatttcccctcagggtggaaggaataggagaggcactgggtcctgaggagctgaggctgacaggctggggaactggggccctactcatgggtgagtgcccaccatgccccaggggcttttctgggagtacctggatactgctgcagacaagggctttatattccaacttgctaaagggaggaccctgcagttacttgacctgtcatctgcaaggcgataggggcttatgttacagagtcccttgtatgttgtcgcttaggtgtcctcctcgtcggagcatgtttctgtatcctcctctcatttcactggttctcttcactcatcttctaactctcctcctgctaactccgtttcgctcctcacatgttctgccgcttaaagtccagtccatacgcttgtcttactcttctccttcttattctgcttttatccaattccttttctatgatgctcatatattgcctcctgccttcc

SEQ ID NO: 433681 - DNA, 2189 bp, Homo Sapiens
ttttaataaaagcagcttgttttctgcttgaacaatagctctgagagcaagaaggctggaaatgcacattcagaaatgaggtaagcaggacccagtgaggcacgacgtggtttactagaagtggccggtttcctggcagctttgtaaatggactctaacctcagtggaatctgggccccggctggatcaggaggcgaccatatggcttttcttgtttcacgtgaagaatctgttgcgctgagagcaccaggagcaggtagaagacccgggcagccatcctgcgggggctgagaggtgacaccaggctgctgaagtcgggctccctgttagcctgcagctccagtgccactgccctgtgcactgcttccagtgagggcagctcgagctctggggggcagcaccaaaggtgtctccatgggctgctgaggattcgggctccctgttggcctgcaggttccagtgcctactgccctgtgcactgcttccagtgagagcagctcgagctctgggggcagcaccaaaggcatctccatgggcacctcagggagttcaggcaccacgggcaatgcaggagcttctggcgcctccacctcagagccaggcccaccgttcttctggtgggatgaggctgatgcgggacttctcctcttcagctgcctctagggagatctctaaagacaccataaggggaacactgggctccagggcctccctcgggacctcaatctcacttggaacttcaatctttctcctttcctcctcagcggctgcctcctcaggcagctctcgcctgagggcttttgggggtggctgggcacaatgggtccagagacccagtagttcagggggtagccagccagagagagttggggttctgaacaactccgcagggcctctgatggtcctctcgggcggctgcaccatgggacattcccagcagtgggctctggtttgcagttgttcctggaatttctccggggagatctgagtctccttgtcccagaacagtaaccggcgacgacggcggcggcgaggaggtggggggactgggggcctcctctgttgagtggggagggcaggtaggggcaaggctgcccattactccttttcctgtcattctggtggactgctaacaggaccccacacccgcccctagaggaacctggagagggcttgtgcggggtctccatgcacttgagcagctcataccttgcataagggtacccatctgggaagcgtaggccagatacgatggggcgtagaaaggggcatcttttatcatctgcattaaggacccctgtaagctagcagtggccctgggcttggggaggcagtccttgtgggggagggcaaagaggaggaggaggaggattagaagggaggctactcacctctgggctgggtggggctggcagacgcagctcctccgggggggtcacctctgcaacaacacccaaggggctctgtcccataagccccttaccccttgcagatgccagggcaagaaactgcagggtcctccctttagcaagttgggatataaagcccttgtctgcagcagtatccaggtactcccagaaaagcccctggggcatggtgggcactcacccatgagtagggccccaggtttcctcagcctgtcagcctcagctcctcaggacccagtgcctctcctattccttccacctctgcaggagctggaggtgggagccgcgggatttctaacaagatagcttcttcttcctctgcgatcagcaggtccagttctcggcggctgacctctgggagctcccgttcaccctcaatctccagcatccgtatgggctctgcctccaggatcgtgatggcctcaggtggcagcacagtgaccggaatcctctctggctccctgggctctgtaggaacttcaggagggatctcttcaactctctctgggattgcagcctctaagaggtgtcgaatctgagggatatcgaaaggactaggaagtctgggatccacagacatcatcccaaaaaagggatctggagcatcttctagggtctccatcatggccaggtggttaggaagcagcaggctgggtagctcagtctccatatctattcggatctgcagctgggcacggtggaggcgctccaagatatgctggatgtcctctgtgggcagggaggacgaggtagacagccagc

SEQ ID NO: 433682 - DNA, 495 bp, Homo Sapiens
tcagtggaatctgggccccggctggatcaggaggcgaccatatggctttttttgtttcacgtgaagaatctgttgcgctgagagcaccaggagcaggtataagacccgggcagccatcctgcgggggctgagaggtgtacaccaggctgctgaagtcgggctccctgttagcctgcagctccagtgccactgccctgtgcactgcttccagtgagagcagctcgagctctgggggcagcaccaaaggcatctccatgggcacctcagggagttcaggcaccacgggcaatgcaggagcttctggcgcctccacctcaggccaggcccaccgttcttctggtgggatgaggctgatgcgggacttctcctcttcagctgcctctagggagatctctaaagacaccataaggggaacactgggctccagggcctccctcggtgtcctccacagcaggcctcggtcctcgagcgctgggagcgatgtcaggcccctgg

SEQ ID NO: 433683 - DNA, 846 bp, Homo Sapiens
ggattctcttcaactctcttctgggattgcagcctctaagaggtttcgaatctgagggatatcgaaaggactaggaaagtctgggatccacagacatcatcccaataagggatctggagcatcttctagggtctccatcatggccaggtggttaggaagcagcaggctgggtagctcagtctccaatatctattcggatctgcagctgggcacggtggaggcgctccaagatgtgctggatgtcctccacgaggtactggcattgttgagaatagacgcggatcacaccgatctgaagttgggctgagagatagagggagaagcggggccgcggcaggccgggctgcgggggttgcactcgtaccagcacgtaattgaggatttcctcgcaggttttcaccacattcaccctcaggtattcgcgcttcaccaaccggctgccgcgagtcgccgccagccagatggtggcaaagcagccggtgtggcgctgaagcacgttgggatagtagaacattgtccctctggtctttcaccctcgattccaccagatccccgttcggatctgagtcggaattctttagggcacagaattcccaacaccaggataactgagacgcaggagatgggcgcccctctctgtggaccctcagtggatccgcacgccacgtgatgcgtcaaacttgagacttctgggttgggttccaggttggagatgcagagctccaaggggacgtccgggccggaatccagagcaggtcccgagggagcacggtgtcctccacacgcaggcctcggtcctcgagcgctgggagcgatgtcaggcacctgggccttgtactggcttgg

SEQ ID NO: 433684 - DNA, 1611 bp, Homo Sapiens
  misc_feature (263)..(263): n is a, c, g, or t
cacaaaggtccaaaaacccaataattcaaggggttacccacccaaaaaaaattggggttctgaaacaactccgcaaggcctctgatggtcctctcgggcggctgcaaccataggacattcccagcaatgggctctggtttgcaagttgttccctggaatttctccggggagatctgagtctccttgtcccagaacagtaaccggcgacgacggcggcggcgaggaggtggggggactgggggcctcctctctgggctgggtgnggctggcagacgcagctcctccgggggggtcacctccatgagtagggccccaggttcccagcctgtcagcctcagctcctcaggacccagtgcctctcctattccttccacctctgcaggagctggaggtgggagccgcgggatttctaacaagatagcttcttcttcctctgcgatcagcaggtccagttctcggcggctgacctctgggagctcccgttcaccctcaatctccagcatccgtatgggctctgcctccaggatcgtgatggcctcaggtggcagcacagtgaccggaatcctctctggctccctgggctctgtaggaacttcaggagggatctcttcaactctctctgggattgcagcctctaagaggtgtcgaatctgagggatatcgaaaggactaggaagtctgggatccacagacatcatcccaaaaaagggatctggagcatcttctagggtctccatcatggccaggtggttaggaagcagcaggctgggtagctcagtctccatatctattcggatctgcagctgggcacggtggaggcgctccaagatgtgctggatgtcctccacgaggtactggcattgttgagaatagacgcggatcacaccgatctgaagttgggctgagagatagagggagaagcggggccgcggcaggccgggctgcgggggttgcactcgtaccagcacgtaattgaggatttcctcgcaggttttcaccacattcaccctcaggtattcgcgcttcaccaaccggctgccgcgagtcgccgccagccagatggtggcaaagcagccggtgtggcgctgaagcacgttgggatagtagaacattgtccctctggtctttcaccctcgattccaccagatccccgttcggatctgagtcggaattctttagggcacagaattcccaacaccttggagagaagtcaggatttggacttctctggtggcaaggtgggtgcaacactagaaagccaagttaatgaggcaacgaacaatgggcagatacacaattaccaggataactgagacgcaggagatgggcgcccctctctgtggaccctcagtggatccgcacgccacgtgatgcgtcaaacttgagacttctgggttgggttccaggttggagatgcagagctccaaggggacgtccgggccggaatccagagcaggtcccgagggagcacggtgtcctccacagcaggcctcggtcctcgagcgctgggagcgatgtcaggccctgggccttgcactggcttgggcgccgcggtgtgccccggccgcctactgcagcctcgtgccgattaacacccggcctcgctaccta

SEQ ID NO: 433685 - DNA, 2493 bp, Homo Sapiens
  misc_feature (2225)..(2286): n is a, c, g, or t
cccccttctgtgggccccccgggggtgtggggaactcccccgagaaacgcgcttttttctgggcctcaaaaggggcaattccattccccagggtccaccaggggccccccaaaaacaggaaggggggccccctctttcccggggagggtcaccgagggcccgggagggcccctggcacaccatttcccagaaaggccaaccagggtgtctctccctgaacccgctggtttaagaacgggttcccagaccccaaaatttagggtatgccagggccggaagaatgtttaaattctttgccccgggggccaatgcagacctgggattttaatatccatggaacttgctggggaattttcttcacaatccagatttagagtccagaatctccccccggcccccgaggaagagccctggttagctcctgaaatcccaaagatgcccttgatgtatccagtgaggccactcttggtcttctgttccaacttgtcctcaaggggtgggaaaagcccacatggtttgagggcccaggtcaaagaacaaaaggcttgccagggaaatgggctggaagccctggtgggaagtgccacaaggttggcttgcttggtgacaagggaagggtcccaggcagaatgtctcaaaccgttcaaccagaggcttattgtccttgacttgggaggaggaggtctctgtttgatgagcgtcgtttgcatcaaggatggctgcggcctgcagggagcacttctctgaccgcacttgagtgatgagctcttgcacatcaggcaggtcctttaggctgttcttgaaggcgccagcatcagaatttacttcatttgcatatttcaggactctgtcatacaggacaagggcttcgctccacttcttcaccagcacataggactgagcaatgaaaaaacacctgtaagctttgaacaccagagtcttgaggcctatctctttctggaaggctttgtcttcctctaaaccaggaagctggagcaattccaccagattctgtaagatgatgtcatagagtcggatcaggtcctggggccggggtgagcgcttgctgtcatcctctggctgctgctgcagcagagccctctgcagacctttggccatgttctcattacgcttgattgccgttgatagcttgatgtaagtcaggtagctatgcaagtattgaagattagacaccttccctggctctccttcaaggatataatctctctgtttctgatctggcttgagctcctcccgaaccacctggatggcgtcccgacactcgctgagcattgattcaaacaggcgctccttagtttcttcgctttcagcctggacaatagctgcttcgttatcagccagtcctaataagaaaatgcgcactttgtcaatcttcactggaaccgttctccctctccactccacttcactcatggtagctgcctgtttggctcgagtctgagtgatcaaagcctccaatttttcagccaagagaccttcagtgcccccagacctcaatctcatctgcatgagttcattgatggctgactggtccccaatattatatgcacaatagcggatgttgggtgaaatctcttccacacgttggttatacagcacagcctgctcctctgtgaaagcactggctagcttctcatagatagttttgcatttgttaaaagcctcaatggcagctttccattcttgatgttcaaaacgtagcattcctgagaggtaagctgtgtaagcctgagcctctaatttggtcttggcatccacgcgattgctctcacacaagcgttccaattcctctgcatgcttcacggctttgcgtaggcgagataacaagtgaaaccgttttcggggttcagtgttggcttcctgtttcagctgcatggcgtagctccaggctctttcagcatccatcagaaccagaagcaagtatctattatcggtcagaagctcttcagtcactttcttccctgtgaatttgtgtctgttacccatcttgaagttgagtgtttttcgaagacgtctttgtctacgggaacagtagcccctgtacctctgaaaatctccatgccgtaaaccatgctgctgctgggattccttaataatctgaagaatctccaaactcaggctatccccaaattctttgtttgccttcgatccggccgaagggcgttcgttttctttattttcttcccctccggcaccacgtccannnnnnnnnnnnnnnnnnnnnnnnnnnnnnnnnnnnnnnnnnnnnnnnnnnnnnnnnnnnnntgggacctgcttctcagcagccatcttgcccctgcgccgcagagcaagacgggataggggaggcgggacgacctgggcgggtgagagctggacctgcctggccgggctgatgggatagcggcggactccgccgccgtcggcccttgctgcagcagggcgccatgtgctggagcgcgcctgcgcgagatcccgggaattccggaccgg

SEQ ID NO: 433686 - DNA, 788 bp, Homo Sapiens
gtcccttgaagcccagccaaaatggccctgctgtggccttgccccaactcacccccggacttcctctgggtcagccccaactcgtagtgcagtcctcccagttcctctgctgtctctgagtataacttgagctgacgtgtggtgcattccacctacctgacttacatcaagctgtcaatggcaaatcaagcgtaatgagagcatggccaaaggtctgcagagggctctgctgcagcagcagccagaggatgacagcaagtgcttcccccggccccaggacctgatccggctttatgacatcatcttacagctgacccttgaggaccgggaaggcaagggcctgtcattttcctttgcctgtgtcagacacaaaaatgacttaactttgtatcatggaagggcttgtgacaagctggacctgttagtagctgggaaaagacaaaggtcttacaccagttccacagtctgtgagcccctacctctcagacatgctgatctgcagagaatagtgaccccagatcatcactgagcacttcacctgtgtaagatgctcccaggtgccatagagcatctgagacctgaatccatgccatctcggcccccagggagtttgtcagtcagtaggactgtgagacacacacagtcaaggcatctgagtagatgctaagcaaaataaaagctcagcgctggaacagatcccttccagctaagatgggccaagaagtctctgaaggcgggtgagcggacgcgtggtcgacgatatcccggaattccggccggtaccagct

SEQ ID NO: 433687 - DNA, 1499 bp, Homo Sapiens
ggggccccgcagaggtttgcccccgtggggccaggaatcttggggtcccggtgagcgcgtgtgttgacccaccggcgccgttgccgttgacccctgtttctgcccgcgcgccctctgtaggagttccctcgggagttgtctttttctttgttgtgtactttgtgtgttttgccgtcatctttgccttttaatataagatttggtttcatcatttctgagtgtaacatatttcttctaaaaatagagctctctgcttgtctgaaacttcttagcgttcactgggaggtgaaggggaataaggctgaccgtaattctggggtgacgttgccagtttcatagtcatagataaacttctcaagggctcctggatgctcacagcaaggatgagttcatttcaaatccatggtactgaagaagcatgacaaagcgtttcaaggccccatctgtgcctggtgtggactcctgaacgcattactgaccaaaggcaatcaatcacagctcacagggcaccagacagcagcggcccccttcccaggaggtacaggagacaggatgaccctgcacacatttaccagaagacaacagggtgctctcctgacacgctgcttaagaacgtgtacagacacaagatgtaggaatgcagggccgaagatgttaaactcttgccccgggccaatgcagacctggatttaatatcatggaacttgctgggattttctcacaatacagattaagagtcagaatctcccccgcccccgaggaagagcctggttagctcctgaatccaaagatgcccttgatgtatccagtgaggccactcttggtcttctgttccaacttgtcctcaaggggtgggaaagccacatggttgagggccaggtcaaagaacaaaggcttgcagggaatgggctggaagcctggtgggaagtgcacaaggttggcttgcttggtgacaagggaagggtccaggcagaatgtctcaaaccgttcaaccagaggcttattgtccttgacttgggaggaggaggtctctgtttgatgagcgtcgtttgcatcaaggatggctgcggcctgcagggagcacttctctgaccgcacttgagtgatgagctcttgcacatcaggcaggtcctttaggctgttcttgaaggcgccagcatcagaatttacttcatttgcatatttcaggactctgtcatacaggacaagggcttcgctccacttcttcaccagcacataggactgagcaatgaaaaaacacctgtaagctttgaacaccagagtcttgaggcctatctctttctggaaggctttgtcttcctctaaaccaggaagctggagcaattccaccagattctgtaagatgatgtcatagagtcggatcaggtcctggggccggggtgagcgcttgctgtcatcctctggctgctgctgcagcagagccctctgcagacctttggccatgttctccctcgtgccgaattcgccacccaggcctg

SEQ ID NO: 433688 - DNA, 577 bp, Homo Sapiens
aacttttctggcgtgagctgaagctggctgggggccatggagtctctgcaagccgctttgggccctgcgccaccctctgggcttcactggaccctgtctcagtggacacggcccgactggaacacctctttgagtctcgtgccaaagaggtgctgccctccaagaaagctggagagggccgccggacaatgaccacagtgctggaccccaagcgcagcaacgccatcaacatcggcctaaccacactgccacctgtgcatgtcattaaggctgctctgctcaactttgatgagtttgctgtcagcaaggatggcattgaggtgaggtcacccagctatgggtgttggggggaggtctggccttctcctttggtaggtgggcatttcctgtccctctggtggtgggcatgggcttggcatttctgcagggcagtccccagacactggggcctcccctagatgactgaggggtcaagaccaatgcctcaggcctcaggcctgcattgagggggccatgtcaggctctggctacatcctcagaagctactgaccatgatgcccacggaggaagagcggca

SEQ ID NO: 433689 - DNA, 1295 bp, Homo Sapiens
  misc_feature (11)..(11): n is a, c, g, or t
  misc_feature (15)..(15): n is a, c, g, or t
  misc_feature (19)..(19): n is a, c, g, or t
  misc_feature (30)..(30): n is a, c, g, or t
  misc_feature (39)..(40): n is a, c, g, or t
  misc_feature (42)..(42): n is a, c, g, or t
  misc_feature (44)..(44): n is a, c, g, or t
  misc_feature (47)..(47): n is a, c, g, or t
  misc_feature (50)..(50): n is a, c, g, or t
  misc_feature (55)..(55): n is a, c, g, or t
  misc_feature (68)..(68): n is a, c, g, or t
  misc_feature (70)..(71): n is a, c, g, or t
  misc_feature (79)..(79): n is a, c, g, or t
  misc_feature (84)..(84): n is a, c, g, or t
  misc_feature (90)..(90): n is a, c, g, or t
  misc_feature (92)..(92): n is a, c, g, or t
  misc_feature (95)..(95): n is a, c, g, or t
  misc_feature (106)..(106): n is a, c, g, or t
  misc_feature (109)..(109): n is a, c, g, or t
  misc_feature (137)..(137): n is a, c, g, or t
  misc_feature (139)..(139): n is a, c, g, or t
  misc_feature (144)..(144): n is a, c, g, or t
  misc_feature (148)..(148): n is a, c, g, or t
  misc_feature (158)..(158): n is a, c, g, or t
taccgttttcntccnaaangattcgaaatnaggacttannantnttncanttggnttttttcggggtncnnccccaaangaaanccattngngcnccagggccctntancatgtaatagcctatgaagggaagcagncnttgancttntctggatgancgctgatgttggccttgacagcatttcgggaccagatgggacggatgtcaaacagcttcctcagctcctcctccaccttccggtccacggggttagtgcagactctcctccacgtctgggctgcagcctccagtggctgcttgggcacctcctcatcctcaaagttgacaaagatggcattgtgggggcgccgggctctgctcaggccaatcagattctcacctgagatggggggattgttgtagccttcccggtgctgggtctctggtcggtagaagtagtccaccggggcgtccagccgggagaagatgggtggggggatgtagagcggcagctcctggtggaaaaaggcctccttctcgggccggagcatgagcaccttgtcatacattgacgtatgcttgccgcctgcttccgtatgcacagccaagtactggaagtcagacatcccctgaaatttgtaaatggtggagatgatgccaaggatctccatgtcaaatgtgacctcggagtgggcctcagtgcccagcacccctttctgccgcctcgttctcttcctgatgcggagcagcaggctgctggtactgaagcggttggcgcacactgggtggcagtatgggtccttgggccggaagtacagctccagcctcttggtggggtctgcgtagatccgggagacgccttcctcgccgcccagagtcggcagcatcttagccacatcacgcaccactcccgggtactccacgcacaccatgcgtcgctcccgcctcagctccacggggacggcggcccccagccccaaatcggccgcctccgccgccatccctgtgcgtctggcagggcccgccagggtccgtcccacaaagtactcccaaaggcctcgcctcaattgttccgcgaaggaatcgttccgggctccctcaccgctcgcgtcatcctaactccccgggctcagcaagacgcgagggcctccagggagcaaatggcccatgggagggcccatgtcttcgggaaaacgaccgccgtgtcctcgactttttatttaaaattaagcgagttagtccaccgggcggggcaagcaccagtctctcctactagccagcgagggacccggaggataataagacacaaacctcc

SEQ ID NO: 433690 - DNA, 1582 bp, Homo Sapiens
accccctcccatcgattttggtgcacttttgaaaccccgtgtgggttactataagcaggtgtcggtccggaatacgggatatgttgaccacgcgtcgcgaatcgtgtggaatgaaacacggttacgcccccagtgacttgcggtcaaagcaaagcgcagcacctacaactacagcctccccatcaccgtccaagaagacatcagccagcttgtcaccatgcatgacctgaagcagggcctgggcccgtcggggacgagtggtgctcggaaaccagctttcagcaagtacaagcctcaagtgggcgcccctggaggcaggaatggaggggaggacttccctcttggggccgggcaccttgtgggtgacacctggggggctgtgattagggcagctctgcccaccgggcctcggcaccttgcttccttttaggtcagccttcagacactgagggtgagaactcgggtgcaaagccccaggctgtgtgtgtggggacatctggcgaagaggtggtgacaagtctcagggaagtctggcaccagcagctgcatgtggttgtccttctcgagccctttgggagcctgggcccccactgagccacgtgaccactccgggaatgatcggaattgggcacacacaggaggacagagccagagcaggccatgtgggctgcagctgtggcaggagcctcactggctcacgtttccgtcagtgcggttgcccagcgggggttggcggtttccagagctgttcccacattcaggctcccgcaagccgctccacagccctgggggaggccgagaagggggcatcccgcacggtggaatcacctgctgagggagtgggtggcagagatgagtgcagcagagacgggtgatgcgagggacttgctgtcccccagtgtctggggccctgcctattttctaggttttttagacctttgctgccttcccagtgaggggcgatcatgccacagcctgtgcggccttccttctcgaggcctctcctaggaggccgttatccttactctagaactacatggctgggtacggaagggagagagcaaacactcactaagccctgcttttcccagaaaagatgtcagggcagcccatagggggacatagggtgacaaattagcagcagtgggtgagggatagggtcagagtgcaggagggcacagagagcagagcccggcacaaggctagtgccagccccatgccatgggcgccatggcctgctgcacgggcgggcttaccgtttccagtggccccaggagggcctgggtgctcctctgcctctccaagagctcttgggggaggtggacatttgttttttccccacctctccggggcttccagcctgttggccacctgcttttgtgaccagcaactcctgaaagaccccatgggggctcaatggggtttgaacttggagcccagggtttgggtcactttcctgttttttccccttgaaaagaatttgtaaaatttgggaggggcttgcccccttgcgggttttacacattgactgatggggaaagtttaaaaaattcccccatgcgggggaaatttccaaaggggg

SEQ ID NO: 433691 - DNA, 1440 bp, Homo Sapiens
  misc_feature (1095)..(1095): n is a, c, g, or t
gtgtgcaagtggtgagccccggggtcccgtcagtagggccagacgatccagtccgtgccgggtcagggaggcccaggccttggggccctgtcacacgttaggtccaggaatctctgtcgccagttgcggtttcacgtgccggtcggatggcttggagtcctccgtcctccgtcttgcgctcctcgcgtcgtcatcctcgtcgtcttccccagactcgtacgtcagctgctcttttccggccatcagccttggctgagctggaaaagagagcaggcctcttggagcggatggttctgccggatcatgagggacatggtgtccctgagctcgtcgctggtcttggggaggcaccacccatcccgttctgtgcaggaattctctgccccgtcattgcggtgaatgatcttctgcaactcttccacattcaagtggcataactggtagaacatctgccgttagggtggcaaggcccccttcccggaagatgtagacagagtccttgagcttgtacttgctggaagctggtttccgagcaccactcgtccccgacgggcccaggccctgcttcaggtcatgcatggtgacaagctggctggatgtcttcttgacggtgatggggaggctgtagttgtaggtgctgcgctttgctttgaccggcaagtcactgggggcgtaaccgtgtttcattccacaacggattcggaaatcgaggacttgataaatcttggcatctgggttttttcgggggtcatacccaaatcgaatccataggctgcgccaggggcctgttatcatgtaataggctatgaagggaagcaagaccttgagcttgtctgggtggacgctgatgttggccttgacagcatttcgggaccagatgggacggatgtcaaacagcttcctcagctcctcctccaccttccggtccacggggttagtgcagactctcctccacgtctgggctgcagcctccagtggctgcttgggcacctcctcatcctcaaagttgacaaagatggcattgtgggggcgccgggctctgctcaggccaatcagattctcacctgagatggggggattgttgtagccttcccnggtgctgggtctctggtcggtagaagtagtccaccggggcgtccagccgggagaagatgggtggggggatgtagagcggcagctcctggtggaaaaaggcctccttctcgggccggagcatgagcaccttgtcatacattgacgtatgcttgccgcctgcttccgtatgcacagccaagtactggaagtcagacatccccgggagacgccttcctcgccgcccagagtcggcagcatcttagccacatcacgcaccactcccgggtactccacgcacaccatgcgtcgctcccgcctcagctccacggggacggcggcccccagccccaaatcgccgcctccgcc

SEQ ID NO: 433692 - DNA, 1054 bp, Homo Sapiens
gattttttgcgattgagaccatatatagtgtcctattttggcccgcaattcatggggagtacccgtgttcatttcccagctgtttggatctggggttggataatctgtggcattggggttttttcggggataattccccaagcgaatcccatggtctgccccagggccggttaatcaatgtaataggctaagtaagggaatccagaccctggggcttggtctgggtggaccctgatttggccttgacagcatttcgggaccagatgggaccggatgtcaaacagcttccctcagctccttcctccacctccggtccacgggggttagtgcagactctcctccacgtctgggcttgcagcctccagtggctgcttgggcacctcctcatcctcaaagttgacaaaagatggcaattgtgggggcgccgggctctgctcagccaatcagattctcacctgagatggggggattgttgtagccttcccggtgctgggtctctggtcggtagaagtagtccaccggggcgtccagccgggagaagatgggtggggggatgtagagcggcagctcctggtggaaaaaggcctccttctcgggccggagcatgagcaccttgtcatacattgacgtatgcttgccgcctgcttccgtatgcacagccaagtactggaagtcagacatcccctgaaatttgtaaatggtggagatcatgccaaggatctccatgtcaaatgtgacctcggagtgggcctcagtgcccagcacccctttctgccgcctcgttctcttcctgatgcggagcagcaggctgctggtactgaagcggttggcgcacactgggtggcagtatgggtccttgggccggaagtacagctccagcctcttggtggggtctgcgtagatccgggagacgccttcctcgccgcccagagtcggcagcatcttagccacatcacgcaccactcccgggtactccacgcacaccatgcgtcgctcccgcctcagctccacggggacggcggcccccagccccaaatcgccgcctccgccgcca

SEQ ID NO: 433693 - DNA, 1000 bp, Homo Sapiens
cttcttctttcctgtctgccctccccgtctttcccgtccgttgttctcctgcctcctcctgctccaggatccggagtccattcgtccgtgcctccttccatcctaaatcacggctgcatccagcttcttgaccatggcatcagctttgtctatgtccaggagaaggttatcaaaccagccagtctgccatgagggacaggaagaccctcaggtcggttttgcagggccccccgggcctcctgccgacgcttccccacctcatctgggtggtacttagacggagaccactcctcatctttgtgcgccaggaagaaatcctgcatctgttgcctccggaaatccagcttgtagtcattatagcgcttgacggcctccgtctcatccaccgagtcatccagggagaggagaaactccttgaaggtcttcatcacgggcggcggcacacccaggtcaatctctgcaatgctgcccagcctggcctggataggcaggacatggtgctgcatgatgtggacgtcagggtggccccagggctgaggggggccataagttgggctcccaccccccccagcatagggcatctcatagccactgtggtatgggtcagagctgtgctcatcccagtctctcctcatgcgcttctgtggcgggctgagttcgtggcgaggtggcgagaagcgctctcgccgattccggtcatagtcccgatattcaccccgactacggcgctcacggccacggtcccactctctgtcattccaatcgtcccctcgacgtctttcatctctctcgcgggaacggtcgtagtcgctgcgctctcttctgaacttgtccctgcgccttcgatcgtactcgtcatcactgtcacccatggcacggtctgagggggccatcctaggcctgagaacgcggctccaacacctccactcgccccgagtttctccgcgcccgcccaccgtggaccccggttcctctcccgccccagaggggccccccaggc

SEQ ID NO: 433694 - DNA, 2715 bp, Homo Sapiens
  misc_feature (2659)..(2659): n is a, c, g, or t
  misc_feature (2684)..(2684): n is a, c, g, or t
cgaaggattatgtatgtgaaaataagggaggtattccgattggtgttatagaggtggtgggttttggtttccctgtggaagtgcttttattagcagtaaggctgatcgtacaaaaaattctcagagcttcataggacaaggtagtacaagtatggatgatacaggactgaggaacgggggacggctcaaaagaaatcaacatcgtctggggcatccaggtcccgatattccacaatggcccttgggtctccacgaaccatcctgttgcgaggtttcccaggataacctccctggcctcggaaggcatcatagttccctcgaccagcaccatacggggcatgggggtatggagggcctcctgtggggactgcagggcggacagcaccagctccatagcccaagatcgggggccggggctgaccatagggcatcaggccctggggagtctggtgtgggtaggggagtcctggggtcaaacctggggggagtatctgggcggggccaggtggctgggctggcttgatctcaggcagagctgggcgcttagcatcagtgaggaagttgttaaaaaacgcgacttcctttttcacttcctcaattttctctgcatgcttgttgaagatatgtttgcgcacaaactcaggacccttgaatttcttgccactgagaggacacagccacttatccttgcccagttcctgcgtgttggaggtgacgaacttctccacttcctgctctgggtctttgcgccccatcttctgggcctcttcctctgagagtgactcccgcacactcagcaacggcgtgagcttctcctcaaaagtcttctgccactccagcacttccccgtgactgatgcggttgggtggcatgggcccccgaacgtggatgatcccacagcgattgggcatctcgtcctcgttggggtactcacaggtgttgtaataatccaaggaatgcacgatgcgcaggtaaaggaggagcttgtccaagaccttaatcaacttctcatcccgctccacgttgatctctgccgggttcccttccttaggaggctcctcaggaggagcgcccccgctgctccccagcagctcctcctcctcggcgcttacttcctcgatcaggtagtcggtgatattcttcaagatcgggttttgcgagggcaggctcgtgggcaggggaggcgtccctggttctgaggcccaaagctgtgtcctgtcatccagcgtgtggatcagcttggccgccagcttgatgtcgttgcgcacaatctgcttgtgctgggtgatgccgttgatgttgcgaacgcgccgggtcaggtccctgttcacaccagggctcagctcacactcccggagacggatgttctgcaggttccaacagatctctttaatgttaacactgcggtcgaaggtcacccagccacgacggaaaaacctcctctctggctggggctctgagagcgccacccgcataaagcctgggtaccttttacaaagggagatgatctcggcccgggagatgttgggcgcgatgttgcgcatgaagagggagcaggtcttatgcagcggccgcggcttgcactccagccccgcggcgtccttgggcttctcccattcttcttccttgggcttctccttctccttgagcgcttcttcggcctcctccttctcctcctcagcctggccgctctctgactccgactcagactctgacacgctgccctcgtcaaagctgtcgtcaccactgtgcttccggttccgcttcttgctactctttttggcttccttctcggagtcttctttcttctcttccttgtccccatcaccctccgacttctttgttttgtcatcattagaactgtcattctcagcctgcttgccgtcttccttcttctcatccttgtcgttggttttgcgctccccgtcccctaggcctgctccagcccgtccttcttctttcttgctgggctccccaggctttcctgcctgctcctcctcctcctcctgctccaggatgcggagatcattctccgtgcctccttccatcttaatcacggctgcatccagcatcttgacaatggcatcagctttgtctatgtccaggagaaggttatctaaccagccagtctccatgagggacaggaagaccctcagtcggttttgcagggccccccgggcctcctgccgacgcttccccacctcatctgggtggtacttagaccgaaaccactcctcatctttgtgcgccaggaagaaatcctgcatctgttgcctccggaaatccagcttgtagtcattatagcgcttgacggcctccgtctcatccaccgagtcatccagggagaggagaaactccttgaaggtcttcatcacgggcggcggcacacccaggtcaatctctgcaatgctgcccagcctggcctggataggcaggacatggtgctgcatgatgtggacgtcagggtggccccagggctgaggggggccataagttgggccccacccccccccagcatagggcatctcatagccactgtggtatgggtcagagctgtgctcatcccagtctctcctcatgcgcttctgtggcgggctgagttcgtggcgaggtggcgagaagcgttcttcgccgatttccggttcatagttcccgatanttcaccccgattaagggcgttcaanggccaaggttcccattttctgttcatttcca

SEQ ID NO: 433695 - DNA, 821 bp, Homo Sapiens
  misc_feature (252)..(266): n is a, c, g, or t
gaagaaatcctgcatctgttgcctccggaaatccagcttgtagtcattatagcgcttgacggcctccgtctcatccaccgagtcatccagggaagaggagaaactccttgagggtcttcttcacgggcggcggcacacgcaggtcaatctctgcaatgctgcccagcctgggcctggataggcaggacatggtgctgcatgatgtggacgtcagggtgggccccagggctgaggggggccataagttggggnnnnnnnnnnnnnnnaggcatagggcatctcatagccactgtggtatgggtcagagctgtgctcatcccagtctctcctcatgcgcttctgtggcgggctgagttcgtggcgaggtggcgagaagcgctctcgccgattccggtcatagtcccgatattcaccccgactacggcgctcacggccacggtcccactctctgtcattccaatcgtcccctcgacgtctttcatctctctcgcgggaacggtcgtagtcgctgcgctctcttctgaacttgtccctgcgccttcgatcgtactcgtcatcactgtcacccatggcacggtctgagggggccttggtgcggccgcggccgttggactcgcgctcggacgggctagatttcagggcgacctgggtcgcgggcgcgcgacgaggacttcgaggagggcgagacggagacggagctcttgagtagaggaccgaagagaggcgaacaaaagtgggacaaccggggatgggcagtagcgcgcgcagcccgcgctgcgcctgcgtcacctcgtgccgaattcgccacccaggcctcgctc

SEQ ID NO: 433696 - DNA, 393 bp, Homo Sapiens
  misc_feature (11)..(11): n is a, c, g, or t
  misc_feature (95)..(95): n is a, c, g, or t
tggaataggcnaggaacatggtgcctgcaatgaatgtggaacgttcagggtgggcccccagggctgaagggggggccataagttgggcccccacnccccccagcatagggcatctcatagcccactgtggtatgggtcagagctgtgctcatcccagtctctcctcatgcgcttctgtggcgggctgagttcgtggcgaggtggcgagaagcgtctcgccgattccggtcatagtcccgatattcaccccgactacggcgctcacggccacggtcccactctctgtcattccaatcgtcccctcgacgtctttcatctctctcgcgggaacggtcgtaaggctgcgctctcttctgaacttgtccctgcgccttcgatcgtactcgtcatcac

SEQ ID NO: 433697 - DNA, 2005 bp, Homo Sapiens
  misc_feature (10)..(10): n is a, c, g, or t
  misc_feature (22)..(22): n is a, c, g, or t
  misc_feature (26)..(26): n is a, c, g, or t
  misc_feature (43)..(44): n is a, c, g, or t
  misc_feature (46)..(46): n is a, c, g, or t
  misc_feature (54)..(54): n is a, c, g, or t
  misc_feature (56)..(56): n is a, c, g, or t
  misc_feature (58)..(58): n is a, c, g, or t
  misc_feature (66)..(66): n is a, c, g, or t
  misc_feature (118)..(119): n is a, c, g, or t
  misc_feature (1137)..(1137): n is a, c, g, or t
ttccattcantcggcaaacttntgcnctgtacattgcacaggnncncacaggtngntntcaggcantcggaaatgaggtccccctcctgcactgctccccaggctcagctccagatgnntatagtgcaccccctcgtggtcaccagtgcagcccacccccggtggcatcgagaatgcagcgacccagccactcgtcagggcgcgcactgacgatgtcgttgcggcagccttccaggtgggggcgcagttgttgcagcagcatgcgcgacagcagcaccccaaagcctccgtggcagtagcggccgggggtgggctctccgccgatgaagtcctggggccggcccaggtacaggtgggcggcggaggccaggctgaggtggccagttaggcgtgccaggccgtgcgcctcggtgtaggtggtgtcaggcaccaggaagaaccagtcaaagtcgtcgccgtgctgctccagcaggtggcgcagcgccaggtgcaggtgtccaatgggtcgctcctcgcccagcgtcaccactgccatgccaggtggggcccggcggccccgtgcgcccgtcaggaacaccacacgctccagccggtgccccagcgtgcggttcacggccacgcccagcgtgggcagcgtggtctgagaggtcagcaccgccaccagcagcctctgcctgatgcccagctccgtgctgatgtagcgggtcctgacggcctttttggcggcctggccgggctgtgcagggtggtagggcaagacgcgcggctcccaattctccccggcgccttcgccggccccgggcttctcgcgctccgctccgggctgcaccgagttgggccggcgcgccgcgttggtgttgccgcgcggcggcagctcagagtctccaggttggggcgggcctgggccgcacggctcctccacccaggtgacgctgagcaggctcagggtgaagcccagggagatgcccacggccacgggcctgcgggccgcagcaccgacagcagcagcgatgcccgcatggcgcccggaccgcgggtccccggccccggcgaacccccagagcagccagaggagtctccgagggggcgggaccggggagggggcggatccggagggctcgggccccgcgggcgggnccgctggctccccgcagagcagagccagcggcccgagccgaatccccggagccgcgcctcgattcccctccagcagctgctctgggctgcgcagggttcttgcgctcggcactggagcctcagccgcggccgcagctgtccgacgtgtcactgcaagggccccgcccccggggtggggtctcgggctctcgctaccggagagggaggagaagggggaggttaaaggggaaggacccccggaagtgccccctcctcagtgcaggagagggagacgccgggggcggagtcccctgcctcccgcggcgtggttggtgcgtcccaggtgacgtcagaagcagcccgcccctgcctggatggcccagcccgagttcccggacgccgcgggactggagtgccagccggtgttggacgtggagcggcgccggcaccgcgccgacaccattctctccggcccagcagcccccttcctcgcacgacggactttccctggaccccagtcagttggagcctctggcgccccgcaaccccggcccctcgggcctctgcacagcctctttcactcagaagctcaggtcgcctccagcccagcactatgccggggactgtggcaacactgcggttccagctgctgccccctgagccagatgatgccttctggggtgcaccttgtgaacagcccctggaggcgcaaggtacccaggcacttgcggccctcgtctggcatcatgtgcctgttggttggaagtccgcctactggcttctttcggttaccgcgttctttcaaggccagtgctcttcctcaactgggttgctggttgggccggggggtcactctttctcctctgtacccagagccggtgttagaacc

SEQ ID NO: 433698 - DNA, 1409 bp, Homo Sapiens
ccatactcatagtccgcatctgtggtgagccatgaaggagctcaggagctcccggtctgccgtctcggaagctctggatatagctcggggagagacgtctccattgaagcgtttgatgggcactggcctgcgccgataagcgggatctggtggcccaggcctgggaggagcccggggacctctgaggggagcccgaggaggtctcgtttttccgccttttctccttgcgatcttcctgctgccgaatccgcatcagttgcacgcgtcggcgctgccggctgatgaccacttccgtgtgggagtccccctcagctgtcaccctccactgcaccagaacgcccatcaggctgagcaggggccagagtgccagcagggcccagcttcgccagcagagtgggggcacaggagcagcccggagtcgctccaccacgtagcgccccagcagtagcagctcggcgaagtagtcaggcggcagtgggcgatcagggcagccccagtccacggcggtggccagggtggtgagtgggcggggccagcgcagagtgagcagggcacagagcagcccgccccccagcaacagccccagtggaccccacacggagcctggctggtagtagggttcggagcccagcagggcagcagctgcgagcagcaggccgagcagcagccccaccaggaagaggcccacgctgcgcactagcatggccaccagcccgcagagcagcccgatgcccagagcgatgcccgcgctcgccccagcactcagctgtgtctctagcacccgctctcggtagcagaggaggaagatgaccaccgagccaaacagcaacccagtgaggaagagcactgccttgaagcagcggtaaccgaagaagcagtagacgactccaacaaacagcacatgatgcagacgagggccggcagtgcctggtacctgcgctccaggggctgttcacaaggtgcaccccagaaggcatcatctggctcagggggcagcagctggaaccgcagtgttgccacagtccccggcatagtgctgggctggaggcgacctgagcttctgagtgaaagaggctgtgcagaggcccgaggggccggggttgcggggcgccagaggctccaactgactggggtccagggaaagtccgtcgtgcgaggaagggggctgctgggccggagagaatggtgtcggcgcggtggcggcgccgctccacgtccaacaccggctggcactccagtcccgcggcgtccgggaactcgggctgggcctgaggaaggggaaggcgcaggagccggggctcgggccgccccagaaccgcggccccatgacctgagcccgcccgcggcctttggtgctgatggacagctccggcctctgctcctgacgtcacatcagggcgcaccatcca

SEQ ID NO: 433699 - DNA, 1197 bp, Homo Sapiens
  misc_feature (56)..(64): n is a, c, g, or t
  misc_feature (98)..(106): n is a, c, g, or t
  misc_feature (145)..(153): n is a, c, g, or t
ttctttttggacttccacggttattggggtgattattggatgtaaggataagcaannnnnnnnnagaaaaataggaaggaggcgggtaccaatggtcnnnnnnnnnaaaattttggacggaaaaaggggggccccaaaaaaagcnnnnnnnnnactgacaactgtaaggcccgcggccgttgcaattcggggaagtgggaaacgcaggggggagcaagaaaaccccgagtaggggcggtggccagggtgggaagtgggcggaccaaggcaaaggaaccaggccccagaacaggccggcccacagcaaccagcccccagtggaccccccacggaagcttggctggtatagggttcggagcccagcagggcagcagttgcgagcagcaggccgagcagcagccccaccaggaagaggcccacgctgcgcactagcatggccaccagcccgcagagcagcccgatgcccagagcgatgcccgcgctcgccccagcactcagctgtgtctttagcacccgctctcggtagcagaggaggaagatgaccaccgagccaaacagcaacccagtgaggaagagcactgccttgaagcagcggtaaccgaagaagcagtagacgactccaaacaaacagcacatgatgcagacgagggccggcagtgcctggtacctgcgctccaggggctgttcacaaggtgcaccccagaaggcatcatctggctcagggggcagcagctggaaccgcagtgttgccacagtccccggcatagtgctgggaatagaagggagtcaccctcccaagttaacctgggctggaggcgacctgagcttctgagtgaaagaggctgtgcagaggcccgaggggccggggttgcggggcgccagaggctccaactgactggggtccagggaaagtccgtcgtgcgaggaagggggctgctgggccggagagaatggtgtcggcgcggtggcggcgccgctccacgtccaacaccggctggcactccagtcccgcggcgtccgggaactcgggctgggcctgaggaaggggaaggcgcaggagccggggctcgggccgccccagaaccgcggccccatgccctgagcccgcccgcggcctttggtgctgatggacagctccggcctctgctcctgacgtcactcaggaagcaccatccaggcaggggcgatccggaaaat

SEQ ID NO: 433700 - DNA, 1700 bp, Homo Sapiens
cttccagggccagaaccaaccaggccaggggttgggccctgcggggggagtgtcccccagtttgcggcgccaccggcaaccaggcccgttgtcccctccccggggccaagctgtcttgcagccgtcctggcagagctgggggcagagcccgcagtcttgttcccagaggtctggagttgccgcaggtggtgttgcggtgccctctgtgcctgatgacccaggccgggggttcctgggtccggcccccacactcagaagaatctgctcggtgctggaggccgagatgtccaggagcccgccaggccgcgtaggggttgagctcgtcctggtctcggcagagcgcccacacgtacagcatccgcagcaccttgtccgggtcaccctccaccacctcgccttttggggttcctgaccaccatcaccagctgtgcctggaaggtgatgatcagcaccggcccctgctccatcatcttgcccatggccaggtcgacgttgtcaatgtctaggatgcgagaatggaactggagacccagtgccttggcctgctggatggggtgggccagctggctgtaagtagcttcatagcaccagtctttgagaatgtcaagctctccagaaatcatggcctccaggacattggggatgatgtcgttctcgcactgtttcagaaaccggtccttgtcaaaggccgggtccacccggaggatctccgtgagcacctccgacatctctgtcttggagaacaggccccccagcaagtcggtgaccttgtccgtaagggcccgggatgcccggatgaacgcgttgtcgctttcgtcatacttcatcttcatctcgaagaaccggttaaacaccacgttgttctccttgaagtccttccactgctggtaccacttggagtccttgtgcagcacgacccccagggcctcctcgtttggctcaaacactttctcctccttgaacttatctcccgcaaactccgttctcttccggagtcgctggggcctccggtagggcccggtctgtcccaggacgctgtcgtcaatttccttcttcacggactccaccccctgggagagggctctgaaggccgctgtcctgcccagcttctccccgcctttggataccgactcggccgactgcttggccgtcttggctgcttcctccacgccctccttgattttccggccgagatcacttttactgacttcgtgaaggctctccttcacggtgcccgtcagctccccaagcttcttccgtagcacctcgctcgtccgcacggtttctgactcgatggttttgtatttccttctggcctcctggagcacgtctgattcttctagccttctggcctcgtcacggaatttgtttatactttctttcatttctttgtttttggctaattcttgtttgacattatctagcaagccggacagaaagccttttctgtttccagaagaatatgatttggacagtggcagctctccgcccggccggcgcatctgataggtcgacccatggggtaggttgtggctggaaagaaattggattccactgccgaggcatctccgtggacagcggcaccagccactccgcagggccgccgccgccatgttggagaatcgtgtgaccttctcgcggcgcggcccggttgcgtcatccgccgcttcggcctagagccgcgcaagcctgagaaaagc

SEQ ID NO: 433701 - DNA, 2913 bp, Homo Sapiens
tttttttaaaggaaaacaaatctatgaactagttttatttgcatttaacatgattatacacattcatgtgtctaacaagatctgcactgttacattaaaaatacagtacaataacattcaacatgaggtacttcatatttatgtattttttccttcataaataatgctgtaagctactaaattcaagcacactgatgcacaagtgactacagtgtcttgaattagctgagcttatttaaacaccttaataaacaaaaaagttcagtgcaataattatgtagaaattagaccatttacttaaatactattttaagatatgcttaaagaatgtcacattagaactgctagcctagttcccctttatccccagaatgaacaacgacaaagactgccagccagatacgttggggaaaagcatctacagtgtattctgcttaataaagttgtgtttatagaataaagttgcctgctttgttagaacaatggtttctagttttaaaagctacaaaatccaagattacaaaagtaaataaagcaagcatattagccttcattccatttcattgaaaatgcataaaggacaatagggtttaaaatgtaaaatttcttattctaaatacaattttcaaattttacccacagctctcggtaccagccaatcagatggtagatatgttttaaagtaataacaattaacataaaattacattgttctatacacagtgtacaggatttcacacgactttcaccagcagctcactagtcacatggaggcagctagcaaacatgggcactgacagtgagcgttagtgaatgaacgcactgcacctgaagactatcacacccacctcaacaatctgataggatgcaattaaagtttcttctctggcttacaaacaagtgccttcttataaggtctaccaatttgcacagcagctatgagttactgaaatgtgtaaccataatttaaaaaccaaatcttttgtagaagtgtgctttttaattgaaaatgtacctttgtacttcaatgctttgccaaactacctgtaatctccccaataagaaataattgtacttttagaatgttgtcctggaaatactcatctataatcaccagtaacagcttttcatcatctatgctaatagatgtaggtaatggcaagagtgattaaaacatttccaataatccagtgttctcctccctcagggaagccggctgaaggcaacaagcccacatctacaggggaagaagtggcccagaggcacagtgaatacgtcagggcagtcactcatgggccttgctggggccagcaggaggaccattactgtcccacctcttactagccaggtagagaggagacagctcctgagctggcaaacacacttgcatgcgcatgggtgcgcaggcacacacacaccccaggactaactcctggctccagacaagccagtttcaggcttgcagagcaggagcaggaggcggccaaggaccacactctgggtggcggcggggaagccatctcaggatcacactgagcagaaaagctgcccagaaacacatggatacttcaactggaagtgaacacactggacactgccagggacacaggcactaaaccagcacaagccagcagcgaaggagaatttaataagtttttccctcctttgtttacattatctgtggacaagtaagggagctagatgtgatactgatgcagtgaatattaggtataataaaatgtgtcactccaggccattttttataaaccctgcaggcatatgttggcactttaagatgccaggggccagattctagcagtctaggaacaggacaaaattaaaattaacaaagaatatagtatacaatcaaagtggatcaggtaaagtatatttcaaatttaaaaaaatgaacaaaggtatctcattacattaaatgtagtgctacaaaactagttgctactccatttgtataaagaattgtttggtcctcttttaatggggaaaaagaaaatagaaattctacacagtatgacttatacaaataagcaaacagtggggatcaaaagctaagtggagagaagagtttggctttttcaaactgcatattcttatatgccatcaattaaattatttgtagtatgagtctttttcaggcttcctttttaaactgtcttagtttaaattagtaggagtttaacttttttctactgacaataaaatctaaaaatttacttctaaaagaagtatctgtattgaaattttttgtcttctaaactaaaagaaaagaaatctgcttgtagaagtcatggcctaaacaaatgcccccagttccttattttccaattttacattgatattctgaagtgtttaatacctaactatcttatgaatttagtaattttttaaatcccagaagcaacaaatgtaaaaggaataaaacgagagccaaacacaaccactgtctactttctaaattattactcattacaaggcaaaacttctttcaaaattgtacactgaggtttatctgttttggggggtaagaggagttctgtttaaaaataactcttgttatcaatttatttctgttcatcaaataacgtccaaaaggaaattcaaggtgatccaaaattattttcagagggacaaaactgagagggtggtgggacgcttgggaaagcacataatctccccaggttcatagatgcaactctaaaaaccacaaagccttaataagaacgttagctcttttaagcagatagttaaaagcggaatgctgcatttttgcctgtacataattaaaaggttaaaagaaattagaacctgcctaccgcttcattcattacaaattaccggcactgatcacatatttgcagatgagctaagcatcaggcaagttggaaccagatgtgc

SEQ ID NO: 433702 - DNA, 1350 bp, Homo Sapiens
  misc_feature (503)..(540): n is a, c, g, or t
gggcttcccacttaaggtttttcctttaaagaggttccccaaaaccttccccaccagggccagggatggccaagcaagcccttggcccccctccccctttggaacccaaggccatttttccatttttaccccatttttcccccaactggacccttccccattcccaaccaaggaccccaggtgggtttgcagagaggctgccaaagccctgggactgggattagacagctccctaccagaaaaggcaaagacccatcccacacttgcttccatacacaaaagcacacactgcgtggcatcgaaaaaacctaggaatcacagtgaaacaatccagaagccgtaccgccctctgctccctatgcaggggttaaagtgctttggctgcctgagggcaaacaagtgagcaggggtttttcccctggcctcctgtcgcaactgcgtggtccatgttcagcccaggagcccagcccattccatgaccaactccatggagtctctattcnnnnnnnnnnnnnnnnnnnnnnnnnnnnnnnnnnnnnntcagagcccagggggcctaccccaaccccactacaagctactccaagttggctactgggggaagcgaggggggaaattaggccagaggctcaacccccattctctggcagtgtccagaggcttcttctttctgtcttcagtgttgcagcacatgccttttaccctacccctcccctgccaccctgggcaggggaaggggctgcactctcagtacttattgattccaaaaatccggactccgtggagctggggcagcttggggataagcacgctcatcagggacacggtgttgagcacaaaatggatctggtcgtacttagtgtagaagctggtgaggaagtacagcacgatgggtgtgatggtcaagaacttccgagaggccgtgaactggaccccataatccatctgctcccagtgggttagcagcctcgccttgccctggtccggggtctcaaagggtgtccccttcaccgtgtgcaggaagatatacatgcccatgttgtgaatgaggttggtgagggtccagacgacagggacactcacaaacgggatgctcagcagcacgatgtggaggagaccgatggccagcacgtaggagagccagatgccacggctgttcatcacccgcgtgttggggttcacctcgctgtgcgctgtgcccacattcatcctgctgcccctctctgctgttcgtgtggggccgaagatcaacggcccgggaacggttcccgggagcgggggccgctgctgctccagcagctgtaacaacccgcggctgcagcctccccgctggcagctccggccgaatca

SEQ ID NO: 433703 - DNA, 969 bp, Homo Sapiens
  misc_feature (886)..(887): n is a, c, g, or t
gctgggtggcttttcaaaacgaggcagctgctggagcagttcgcgaccccgctcccgggaaccgttcccgggccgttgatcttcggccccacacgcagagaggggcagcaggatgaatgtgggcacagcgcacagcgaggtgaaccccaacacgcgggtgatgaacagccgtggcatctggctctcctacgtgctggccatcggtctcctccacatcgtgctgctgagcatcccgtttgtgagtgtccctgtcgtctggaccctcaccaacctcattcacaacatgggcatgtatatcttcctgctcacggtgaaggggacaccctttgagaccccggaccagggcaaggcgaggctgctaacccactgggagcagatggattatggggtccagttcacggcctctcggaagttcttgaccatcacacccatcgtgctgtacttcctcaccagcttctacactaagtacgaccagatccattttgtgctcaacaccgtgtccctgatgagcgtgcttatccccaagctgccccagctccacggagtccggatttttggaatcaataagtactgagagtgcagccccttcccctgcccagggtggcaggggaggggtagggtaaaaggcatgtgctgcaacactgaagacagaaagaagaagcctctggacactgccagagatgggggttgagcctctggcctaatttcccccctcgcttcccccagtagccaacttggagtagcttgtagtggggttggggtaggccccctgggctctgaccttttctgaattttttgatcttttccttttgcttttgaatagagactccatggagttggtcatggaatgggctgggctcctggggctgaacatgggaccacgcannttgcgacaggaggccagggggaaaaacccctgcctcatttggtttgccctccggcaacccaaagcacttttaacccctggac

SEQ ID NO: 433704 - DNA, 1142 bp, Homo Sapiens
  misc_feature (13)..(13): n is a, c, g, or t
  misc_feature (33)..(33): n is a, c, g, or t
  misc_feature (35)..(35): n is a, c, g, or t
  misc_feature (39)..(39): n is a, c, g, or t
  misc_feature (43)..(43): n is a, c, g, or t
  misc_feature (50)..(50): n is a, c, g, or t
  misc_feature (52)..(52): n is a, c, g, or t
  misc_feature (54)..(54): n is a, c, g, or t
  misc_feature (64)..(64): n is a, c, g, or t
  misc_feature (66)..(66): n is a, c, g, or t
  misc_feature (116)..(116): n is a, c, g, or t
  misc_feature (154)..(154): n is a, c, g, or t
  misc_feature (170)..(170): n is a, c, g, or t
aaacagaccattnacccggaatcagtcccaccngntgangaancacaaananangactgcacananagagtccagtgccgcctatgcccggtaaaggtcgtctccagcactgcagnattgtgagacttctgtagcacccagccatgaagatggnactctcattcacagtngctcacccatggcagggggcagcagtggtcctcgtctgagaagatggcacggtactgggtgatgatatcaaagagatggacacgggaggcctcgatggtttttgtaatatggaaatagggatcatcattaggaatggcagtcaggatggaccggagccaagcatctcgggcctgaagaaacttcaccctcaactcagcctcagtgaagacgtccatgcgccgcaggtagccaatgacacggaggcaggcaggaagctggatgttggtcctcagttgctggatcagctggctcagcatcagctgcatggactggcgcacttcgttcacgatgccctggatgacagggatggaagagtatttcctctccagtcggcgtacgtaggctgcaagctccagggcctcttcataataactgttccggacacaggtgtccatgagctgaggaatctccagtatttccaaaatttctgtgtgccggtttagggtcaggctattcatccggcggttggagctgatctcctcggcttccttcacaaagttcctgcagctctgctggaagctgggcaaacggtcgagcaggcggccgagcgacgcctccacgtcgccaaacaggcggtggatgcgctcggtgcactcggcgccgcggatgaaggtcttgtagttagcgaaggccaagtcgcgcgtctgctgcagcagctgcgcccgctcctccgccaggcgctcgggctcgcgccgcagccgctccagccccgagccgctcaactcccggaggtagcggcccacatcgggccgctcgcgccactgggcctcggggaagcggtcccggaacagcgacgccaggagcccttcatcctccacctcgccgagagccgctgctgtggccgtggctaccgatgggatagtcgccgcggtcgccatcttcccagcaacaacgtcacttcccttccggaccacaaggggcgccgccccgct

SEQ ID NO: 433705 - DNA, 1063 bp, Homo Sapiens
  misc_feature (19)..(19): n is a, c, g, or t
  misc_feature (24)..(24): n is a, c, g, or t
  misc_feature (37)..(37): n is a, c, g, or t
  misc_feature (39)..(39): n is a, c, g, or t
  misc_feature (41)..(42): n is a, c, g, or t
  misc_feature (62)..(62): n is a, c, g, or t
  misc_feature (69)..(69): n is a, c, g, or t
  misc_feature (80)..(80): n is a, c, g, or t
  misc_feature (83)..(83): n is a, c, g, or t
  misc_feature (86)..(86): n is a, c, g, or t
  misc_feature (90)..(90): n is a, c, g, or t
  misc_feature (99)..(99): n is a, c, g, or t
  misc_feature (993)..(993): n is a, c, g, or t
  misc_feature (1015)..(1015): n is a, c, g, or t
  misc_feature (1021)..(1021): n is a, c, g, or t
  misc_feature (1049)..(1049): n is a, c, g, or t
  misc_feature (1053)..(1053): n is a, c, g, or t
atttagtatgtgaattacncatcngtaaggcagtttncngnntttttgttctcttacctaangtctgtnctatctgaccnggnggncaancgccttggngacagcgatttaaatacggaacaatggtcttccaggaagacagttgcagagctgtgacaaagagctcttgctccccgctgctgacagagcagcctcttcagcgcgatgagaaggccatgattattttagttaccttggcaagggcatcttccaaggccccagtcacatcctgcgccagggccacagggcagcagaggcgcagatcattgaaggcaaccagaatattgttgagaaagcaggcgaggggtgggaaatctaggagcaccatgggtggctgcagcgtccccggctgggtggctggcacagcagcaggcatgttactggtgcccaggatggctggagccgagatgagcatgtaggagttcatttcttcctggaatttctccactgtttcctgaattgctttctggaaagtgctgatggccacccgcgtggtaaaacaggagccaacatgacacccggaaatcagctcgccaccacggctgaaggacagcccaaagtacatgcactggcccagagagagagtccaggtggccggcctatgccccggtaaaggtcgagtactccagcaacctggacaggaattgtgagaccttctgtagcacccagccatggaagatggcactctcattcacagtgtgctcacccatggcagggggcagcagtgggtcctcgtctgagaagatggcacggtactgggtgatgatatcaaagagatggacacgggaggcctcgatggtttttgtaatatggaaatagggatcatcattaggaatggcagtcaggatggaccggagccaagcatctcgggcctgaagaaacttcaccctcaactcagcctcagtgaagacgtccatgcgccgcagtagccaatgacacggaggcaggcagganctggatgttggtctcatttgtngatcantttttcacatcagcgcatggactggcgncttnttcagatgcc

SEQ ID NO: 433706 - DNA, 3067 bp, Homo Sapiens
  misc_feature (197)..(197): n is a, c, g, or t
  misc_feature (579)..(579): n is a, c, g, or t
  misc_feature (589)..(589): n is a, c, g, or t
  misc_feature (979)..(979): n is a, c, g, or t
ttgttgaggtcttccaccgcacccgcgtagaatgattaatgagatggtgtgtgacacacacattatcgcttacgtttctgtaagtatagattattattatactactagaatatgatattgcagacccacaagacaaagtgtgtgcttcttttagtaataagaggttgtcgttcaagcagggagggcggtccggggtntttgatcatctatatttggtgttattactacacggggggctgtcagcggtcgtctgcgtaatgaatagtatctaccgtagctacctcggggacgcgacggagtgtcgcgtccccccgcgagagaagagagtacgacgccgcctcctttgctcggaggaatagagtgcgtctgtacccctcgatcgtctgggtgagattggttcttccttctggttgttatcagagaagagaaggatcactgcctctccctgaggactgctgaggaaccctgttagtctatacttttgacccgtaaaggagaagtgcgctgtttttgtatattgtagtatgaggagattagggggagacgtcaggatatcatgatcctcggaaaaacaacccnttctgttgantttcatgttatttagtagcggagtggcggcggaataagtgctttacgatatcattctcggcgttcggagaggtgggacagccgacgaccgctcctagagggcggagtcgtcgctctttcgtataggaaagaaacacagacacttagtggggactcgccactcgttcgtgcgcgtctaaataataagaatgagttcggtcccgccggaaccgtttcaatatgaggaaagggggccgttggggacacctccccactcaaggggtccgaggggggatgaatcaaaagggagatttaagattgaaatatggtctactagcggctgacgatttgggggactgccttgagtgagatatattaatgaaatcaatcccgaatggtaaactgcgtcaangatgctcgcttgtaaagtttattgacaactgtttggtcccaacacacaaaacagcacttgaaccacaacaaaagtgttcaaacaaagtagacaactaagaaaaacatctctttcccccaaacccaatccaaaacaaacagtgcaagatgggaaagggggttttggtgataacttttgtcatttttttaaacagataaatttaatccggtatatctttccacccagaaataaagaattacattgtcttaatgctcaaacatcattttaccacatcatttaattaagcctctggataaaaaaatagatagcaattggactggccattgtggagtacattatgaacacaatgtgcttccgaagtcttctctctcattttcagacagcaattgttaagagtcacacacacgtcccagacctaagcagcaactccagtgaatggtactcagacacactcacgggacagcacagaacttgattcttctttgtctgttgcccaaagaacctgttctttgagtctgttccaggtgacttgtaatgatacctcttacggttttaaagtccaccactctttacatgctagcagaactgaagtccaagcgtgcaaactcagccttatgaaatcttagaataaggcaactgatgttctcaacaccaattattattactttgtttaaaagctcctttaaaaaaaattgcacatttgcatttcacttcctgtaacactatgtctgtagaggaaatgccttcaggaggattcggagagtgccataatacttacagggttttttccatggtgttctgtcttgactggggccatgtgttgagaactgggagtcactggcttcatttaaaagatttggggaacaaaaaatctgacttgtaaaaatctctctatagcccttattttgtggcattttatcaaaatgctatgaaatcagagtccattttctggctttctagaagttaccaaatataaacatttccccaaaagaaaccatctaactagtggaagaccttacgccaacaggttctttctgctctatgaatgaatccgccttttttgccggacaaatacaatccattgtaaatgtcaggtttctctagaggggggtgagaggccacccgtcagcggacacctcaggcacctagagaggaaggccattccacaccagacgccacaagaaacccagagatgcttccaacagcgagaagtaacgagagtaaaatcagacacgattaaaagatgctgagctgacatacacacacataaagcttcccagctaccgataccagctttaaaattacaataacaaggttaagtggatcaaccttggccttcctatgtgtaggtagaattcctgtctcttcccagtggaaatcgtattgatcccgctgctgctgaagcacctccccactcagctctgatttgtaatttatgcacttgatgcatattttagaaaatcaggctctttccaatgctgcctctcgacacacaataatgtgtgttgtaatccaaatgctgactttaaatccatgacatcgagaccatctccttttccttaacctaacccatatcaaactggaacacagaagggaagcttcaaacatcctcaactttctagaaagctcctaaatggaaccccaaagtagaaacgtttaaaaaaatttgtgatgaagccacttttgtcaactacagacatagtttaaataaaaaacaaggcacacttacaagtcacatgggaagccaggaaccttcacattccaacctgaaaatacactccgaacccctcgcctacccttctcctttggtgtgtgaacacacaggctagcgggacaggctttgcttcaaagacatgccacgcactgggttaatactgtcggaaacaccagtaagcaaaggctgagagactctattatgctacatgtaggatgacaccaccgacgtggctcaatggaagcaaaaccgcttcctgctagttgagtttttagtgctttcttcttttggaacaccattgtatttcataatagttactaaaaatttggtaaaatatattaaggattcttaacaaatgccacaagtcttcaaat

SEQ ID NO: 433707 - DNA, 662 bp, Homo Sapiens
tttggttccagaagccttacttccaaatgcatccccataaaggtctatgacacctgaagaatccacctttgctggcgaggcagtggttgcaggagatggtgctgcaaatgcatccacagataagaggtcagcagtgagagaactctcaggcacaggagaggccccttgtggtggagaggagaaagcatctgtactaaacaggtctatgctaggagcagcatctggcttaggcgctgcagcaacttcaggagtggactcaaataaatcaccaaagatatctagagcaggaggagcagtggtggcggtggcagcggaggtggtggtagtggtggtggcagcggcggtggcagcagtagtggcagcagcagcagctgcaacggcaggagcaggagaaggagcagttgcgggaaccggaggggctgtgctagctgtaggggtaactacaggaacactggtctcaggtggcttcattgcaaagaggtccagctcaggtgcagcctctgcactaccttcagacggggcaaaggggtcatttcctgaacatgcatcaagtgctgctgctacaggggttggggtagctggtgcggcggccccttcggatgctgcaggggcctccccaggagaagctgcaaaggcatctccaaagagatccaccagccgct

SEQ ID NO: 433708 - DNA, 584 bp, Homo Sapiens
tctagaggatcccaatgcagcggactcggcaccagcaccaccaccacctgctggaggagccactgcatggggagaccttttgggagaggattctttggctgcactttcctctgttccctctgaagcacagatttcagatccatttgcaccagaacctacccctcctactacaactgctgaaattgcaactgcctcagcttctgcctccactactacaactgttactgctgtcactgctgaagtggatctctttggagatgcctttgcagcttctcctggggaggcccctgcagcatccgaaggggccgccgcaccagctaccccaacccctgtagcagcagcacttgatgcatgttcaggaaatgacccctttgccccgtctgaaggtagtgcagaggctgcacctgagctggacctctttgcaatgaagccacctgagaccagtgttcctgtagttacccctacagctagcacagcccctccggttcccgcaactgctccttctcctgctcctgccgttgcagctgctgctgttgccactactgctgccgagtccgctgcattgggatcctctagacgaggga

SEQ ID NO: 433709 - DNA, 847 bp, Homo Sapiens
  misc_feature (827)..(827): n is a, c, g, or t
  misc_feature (833)..(833): n is a, c, g, or t
ctgagatgaaaacatgtccacacaaagccatttatgaatgttcatagcattattatccgcattttaaaaaacctaattgtaggcccagcccaatgtcctatcaactggtgaatggattaaacaaaatgtggtatatcccaaacagtgaacactaagtcagcaactaaaggaactacacgcaggtataagctgcaacatggatgaacctcaaaaacatgcctaagtgaaagatgccagatataaaagactaactgcatgattctacctctgtgaaatttctagaaagggtaaatctgtacagaaagcagatcagtgtggctgcgtggggctggaggcaggagcaaattaaccgcagagcagcaggagtaaattttgggggctgatggacatgttctaaaattggactgcacaactcttaagtttactaaaaacaattaattgtacatgtacaatgggtgaattttacagtgtgtaaattatacaaagcaattttttaagtaccattgtaacaaagtcttacaaatcactattttaaagctctggttcatagttcgttcatttgatatattcaacacaacgaagtctaatatactattagggattaaggaacattagcatttgcttgaaaactaaacacgctgctttcaaagggattccaagtacacccatctctaaatcttactggattaaatattgctcttttaggctataaggtcatggtaattatggtggacaaaatcactggttaacggatttaattaggcattggtcccttaggcccatttccattaattggggtcttccccccaaccttatggcccctaggnatttcnttttggtaaaatcc

SEQ ID NO: 433710 - DNA, 1063 bp, Homo Sapiens
aatttattttcctgcagcagcggcagcagggacggttgctgcaggttcggggtcggccggcctgcgcgtgggcttgcgaggacgctgttcgtcccctgcgctggggtgtccgacagcgaggaggagaacgacgcacggagcccgcgcgactggaaccagcaaagctccatctgtcggcagaggagaagggggaggaggcacggccgaggcaaacgagcggacgcctcgtcgccgggtgccggtatcaccccgctgcaacgccttccagcaaaagccaccgcggcccgggttgcagcagccggacggatgccaaggccacacggcagccacgggggcagccgtcgcagtcgccgtcccacacgggctgcggacaccaagggttgctaatgaagtgattgagaagaaacagtgaacatcctcatttcacagataagacaacatggatcagccttttactgtgaattctctgaaaaagttagctgctatgcctgaccatacagatgtttccctaagcccagaagagcgagtccgtgccctaagcaagcttggttgtaatatcaccatcagtgaagacatcactccacgacgttactttaggtctggagtagagatggagaggatggcgtctgtgtatttggaagaaggaaatttggaaaatgcctttgttctttataataaatttataaccttatttgtagaaaagcttcctaaccatcgagattaccagcaatgtgcagtacctgaaaagcaggatattatgaagaaactgaaggagattgcattcccaaggacagatgaattgaaaaacgagcttttaaagaaatataacgtagaataccaagaatatttgcaaagcaaaaacaaatataaagctgaaattctcaaaaaattggagcatcagagattgatagaggcagaaaggaagcgggattgctcagatgcgccagcagcagctagaaatcggagcagttactgtttttcgaagatcaactcaagaagcaagagttagcccgaggtcaatgcgaagtcagcaaacctcagggttgtcagagcagattgatgg

SEQ ID NO: 433711 - DNA, 503 bp, Homo Sapiens
  misc_feature (20)..(20): n is a, c, g, or t
  misc_feature (129)..(129): n is a, c, g, or t
  misc_feature (437)..(437): n is a, c, g, or t
gtgggaggaggcacggccgnggcaaacgagcggacgcctcgtcgccgggtgccggtggcaccccgctgcaacgccttccagcaaaagccaccgcggcccgggttgcagcagccggacggatgccaaggncacacggcagccacgggggcagccgtcgcagtcgccgtcccacacgggctgcggacaccaagggttgctaatgaagtgattgagaagaaacagtgaacatcctcatttcacagataagacaacatggatcagccttttactgtgaattctctgaaaaagttagctgctatgcctgaccatacagatgtttccctaagcccagaagagcgagtccgtgccctaagcaagcttggttgtaatatcaccatcagtgaagacatcatccacgacgttactttaggtctggagtagagatggagaggatgcgnctgtgtatttggaagaaggaatttggaaatgctttgtctttataataaattatacttattgtgaaa

SEQ ID NO: 433712 - DNA, 988 bp, Homo Sapiens
caaataagtttttccgggccctcttcccaccttcccaattaatacttgtaaccccctgttgaacccttaacccgcccctgaaaattgggtcccgcttgaacccgcctgaacataagtcccattgggaagctgccagggcctccgctggatctcgaaggaagaaggtgtcgtgctggtcacgggctgggtgctgctggggctggaagagggcgtcaaagttccagaaggagctctcaatgaagttatcagtcggcatctcggtgaaccccatctccaggaagatctgtcggaactgggagcggaccttgagcagcgggtgaaggtggccgctgtcggggaggacaccgtgggccaagaagttgtagggcttgaagggccggtcccgccaagagccactggagatcatctctgggctcagctctgtctcttgcttggagatgctggtactaaaggcactgcctttgctcacccagtaggtcttcagagtcacttcagccaacagcttcctcttcctcagctcgctcctctccttctcccccagcttctcagcctgtcccccccggaccagctggagccgccgctgcacctcatcctccatgctgtccaccactcggaacacccggggcccgtcagccgcactcttgtccacccgaatccacttgttggacatggccttgctgaagcccactttgccactgggcagtcgcataagctcgctctgggccaggccctctgggggaatgcttcgaaacacacgggcctcatggctgccctcccgggcaatctcctcgccctccgcagtaagctcccagtgcttggtggaccgaagttcagcctcgatgacctcgcccagcgcctgaaggctcttcacggcgcccaccaccgcttggtgctccatgcccagctcagccgccaactcggcgctgtccaggccgccatcagacgcctccagccgccggagcagcagttccgccacctgaccatccgc

SEQ ID NO: 433713 - DNA, 1717 bp, Homo Sapiens
  misc_feature (35)..(35): n is a, c, g, or t
  misc_feature (981)..(981): n is a, c, g, or t
  misc_feature (1060)..(1060): n is a, c, g, or t
gacaaggggattatagtttagaggcgcgttaaggnggaaagccaccagatgggggcaactgcccactttattagacaataggtggcccacaggtctcctcagggcccaccctcacagtagacacaccacacaggacaacagaaggaacctgctacccagtcctctgtccctgggattctggtcctgggacaggtgggaaagaggaaggtgggggctggcctcacagaggcctcataaatacaaggtcactggccagggatgcaaaggagcgcagcagcagggactcggggaggatgacctgtcctagagtggcccatgtcacgcagcctcctgtgtgggagggggcctcggctcggcatccaggcggcacaggggactgtcatacaccatctgcaggttcaccttgtggcccaccagctcccggatattgttgatgccatatttgatcatcgttgggcgctccagggagaggccccaggcaatgaccgacacgttctcgggaagccccatgggcagcagcatctctggacggaagacccccgagtttccgacctccacccacttcttcaggccttggtggtagctgaacacctccatgctgggctctgtgtatgggttgtaggctggcttgaagcggagttgcgtgatacccagcttggtgaagaactcccgcagaacgcccatgaggtggcccaaggtgagaccatgatccgccaccacgccctcgatctggtggaactcagccaggtgcgtggcgtccagggtctcattccggaatacgcggtcgatggagaagtacttgaccggagtgaagggcttcttctgggcaaggcggtagagcgcacgggcgctgggctgatgtggtgtgggttcgcagtaggtttttccgggcctcgtccagcttccagttatacttgtacccctgtgagccgtagccgccctgagagtggttccgcttgacccgctggacatagtccattngggagctgcagggcttccgctggatctcgaaggaagaaggtgtcgtgctggtcacgggctgggtgctgctggggctganagagggcgtcaaagttccagaaggagctctcaatgaagttatcagtcggcatctcggtgaaccccatctccaggaagatctgtcggaactgggagcggaccttgagcagcgggtgaaggtggccgctgtcggggaggacaccgtgggccaagaagttgtagggcttgaagggccggtcccgccaagagccactggagatcatctctgggctcagctctgtctcttgcttggagatgctggtactaaaggcactgcctttgctcacccagtaggtcttcagagtcacttcagccaacagcttcctcttcctcagctcgctcctctccttctcccccagcttctcagcctgtcccccccggaccagctggagccgccgctgcacctcatcctccatgctgtccaccactcggaacacccggggcccgtcagccgcactcttgtccacccgaatccacttgttggacatggccttgctgaagcccactttgccactgggcagtcgcataagctcgctctgggccaggccctctgggggaatgcttcgaaacacacgggcctcatggctgccctcccgggcaatctcctcgccctccgcagtaagctcccagtgcttggtggaccgaagttcagccatcccgggaattccggaccggtacc

SEQ ID NO: 433714 - DNA, 793 bp, Homo Sapiens
ttgaccaggagcatgacccccacacctcatcgtgacccaccagtgcttgctccaggtctcatccggatacggttcgatggagaagtactgaccggagtgaaggcttcttctgggcaaggcggtagagctgcacgggcgctggctgatgtggtgtgggttcgcagtaagtttttccgggcctcgtccagcttccagtttatacttgtacccctgtgagccgtagccgccctgagagtgggtccgcttgacccgctggacatagtccattgggagctgcagggcctccgctggatctcgaaggaagaaggtgtcgtgctggtcacgggctgggtgctgctggggctggaagagggcgtcaaagttccagaaggagctctcaatgaagttatcagtcggcatctcggtgaaccccatctccaggaagatctgtcggaactgggagcggaccttgagcagcgggtgaaggtggccgctgtcggggaggacaccgtgggccaagaagttgtagggcttgaagggccggtcccgccaagagccactggagatcatctctgggctcagctctgtctcttgcttggtggaccgaagttcagcctcgatgacctcgcccagcgcctgaaggctcttcacggcgcccaccaccgcctggtgctccatgcccagctcagccagcccactcggcgctgtccaggccgccatcagacgcctccagccgccggagcagcagttccgccacctgaccatccgccatgaccctcgtgccgagttaaccacggcctcgtacttagcctgt

SEQ ID NO: 433715 - DNA, 1171 bp, Homo Sapiens
gtgactcacgcaagtccttgcctcagggtcccattccgaatacccgttcgatcgaagaagttacttgaccgggagtgaagggcttcttcctgggcataggccgttagatccgcaacgggcgctggcttgatgtgttctggctttcgccagtacggttttttcccgggcccttcgttccaagcttccaagttattacttgttacccgctgtggaaccgtagccgtcacttgagatgtggttcccgcttgaccccgctggacatagtcccaattgggaggcttgcagggccttccgcttggatcttggaagggaagaaggtgtcgtgctggtcaccgggctgggtgctgctggggctggaagagggcgtcaaagttccagaaggagctctcaatgaagttatcagtcggcatctcgggtgaacccccatctccaggaagatctgtcggaactgggagcggaccttgagcagcgggtgaaggtggccgctgtcggggaggacaccgtgggccaagaagttgtagggcttgaagggccggtcccgccaagagccactggagatcatctctgggctcagctctgtctcttgcttggagatgctggtactaaaggcactgcctttgctcacccagtaggtcttcagagtcacttcagccaacagcttcctcttcctcagctcgctcctctccttctcccccagcttctcagcctgtcccccccggaccagctggagccgccgctgcacctcatcctccatgctgtccaccactcggaacacccggggcccgtcagccgcactcttgtccacccgaatccacttgttggacatggccttgctgaagcccactttgccactgggcagtcgcataagctcgctctgggccaggccctctgggggaatgcttcgaaacacacgggcctcatggctgccctcccgggcaatctcctcgccctccgcagtaagctcccagtgcttggtggaccgaagttcagcctcgatgacctcgcccagcgcctgaaggctcttcacggcgcccaccaccgcctggtgctccatgcccagctcagccgccaactcggcgctgtccaggccgccatcagacgcctccagccgccggagcagcagttccgccacctgaccatccgccctcgtgccgaattcgccacccaggcc

SEQ ID NO: 433716 - DNA, 958 bp, Homo Sapiens
ccccgagttttccgacctcccacccccttttttcaggccccgacccttggtggtaggctgaacactcccatgcttgggctctgtgtatgggttgtaggcctggcttgaaggcggagttgcgtgatacccagcttggtgaagaactcccgcagaccgcccatgaggttgccccagggtgagaccatgatccgccaccacgccctcgatctgggggaactcagccaggtgcgtggcgtccagggtctcattccggaatacgcggtcgatggagaagtacttgaccggagtgaagggcttcttctgggcaaggcggtagagcgcacgggcgctggctgatgtggtgtgggttcgcagtaggtttttccgggcctcgtccagcttccagttatacttgtacccctgtgagccgtagccgccctgagagtgggtccgcttgacccgctggacatagtccattgggagctgcagggcctccgctggatctcgaaggaagagggcgtcaaagttccagaaggagctctcaatgaagttatcagtcggcatctcggtgaaccccatctccaggaagatctgtcggaactgggagcggaccttgagcagcgggtgaaggtggccgctgtcggggaggacaccgtgggccaagaagttgtagggcttgaagggccggtcccgccaagagccactggagatcatctctgggctcagctctgtctcttgcttggagatgctggtactaaaggcactgcctttgctcacccagtaggtcttcagagtcacttcagccaacagcttcctcttcctcagctcgctcctctccttctcccccagcttctcagcctgtcccccccggaccagctggagccgccgctgcacctcatcctccatgctgtccaccactcggaacacccggggcccgtcagccgcactcttgcctcgtgccgaattcgccacccaggcc

SEQ ID NO: 433717 - DNA, 995 bp, Homo Sapiens
ggcctctagtccgggcagccagggggctgcgcctccacggacaggttgccatacagtgggattgggaccaggccctggtcccagcctccgtcgtcaaggagtggccggcgggaagcaggtcaggttctggcaggggccctgttcgtgggagtacgggatgcctagaaatcgatggaagccctgatgggggggcaggaaggccccctcaggccccaccgccaaggtgccacttgccggccattcctgtgaggtagcctcgggcagccaggacttcggccacggtcacctcctccaggggcaggcccccccgggagctgggcaccaggacgccagggtacatgcccatccgaaccgggagccggccggtcaggagggcggccctagagggtgtgcacagagacacaggcacgtagaagtctgtgaaccgcagccctcccgccgccagctggtccaggttgggagtggtagagctggggtgcccatagcagcccaggtccccatagccgaggtcgtcggcaaagatcagcacgatgttgggcggacgggcaacggccaggccagcagccagggccaggaggagggaccgcggtgcccccatggacatgggaccgaggggtctgtcccaagagagggagggctacttggctccagcaggctctttccgataccgcagacccaggcgccgcccttccctgagaccccggacccaaatactccccgaccctgacggccgcctcctgaagctccagagggccggggcccgacagtaccgggagaccgcgggctgggacggaactcctccaggaccagggcaccttcagattctcgagcggagatctgatcctcctcgcctagcggtccgggctcagggtcgggggcgtaagtcacttggcgctgaccagcggagtcgggccggggggaaggcgctagagggagcccaggaggagccggtaccgggctgcgggcgcttccgcctcggccccgccccgtgacct

SEQ ID NO: 433718 - DNA, 1051 bp, Homo Sapiens
  misc_feature (614)..(614): n is a, c, g, or t
gtaccggctcctcctgggctccctctagcgccttccccccggccgactccgctggtcagcgccaagtgacttacgcccccgaccctgagcccggaccgctaggcgaggaggatcagatctccgctcgagaatctgaaggtgccctggtcctggaggagttccgtcccagcccgcggtctcccgacccctcggtcccatgtccatgggggcaccgctggtccctcctcctggccctggctgctggcctggccgttgcccgtccgccccaacatcgtgctgatcttttgccgacgacctccggctatggggacctgggctgctatgggcaccccagctctaccactcccaacctggaccagctggcggcgggggggctgcggttcacagacttctaacgtgcctgtgtctctgtgcacaccctctagggccgccctcctgaccggccggctcccggttcggatgggcatgtaccctggcgtcctggtgcccagctcccgggggggcctgcccctggaggaggtgaccgtggccgaagtcctggctgcccgaggctacctcacaggaatggccggcaagtggcaccttggggtggggcctgagggggccttcctgcnccccccatcagggcttccatcgatttctaggcatcccgtactcccatgaccagggcccctgccagaacctgacctgcttcctgccggccactccttgcgaacggtggctgtgaccagggcctggtccccatcccactgttgggccaacctgtccgtggaggcgcagctcccctggctggccggactagaggcccgctacatgggtttcgcccatgacctcatggcctgacgcccagcgccaggatcgccccttcttcctgtattatgcctctcaccagacccactaccctcagttcagtgggcagagctttgcagagcgttcaggccgcgggccatttggggactccctgatggagctggatgcagctgtggggaccctgatgacagccataggggacctggggctgcttgaagagacgctggtcttttcactgcag

SEQ ID NO: 433719 - DNA, 932 bp, Homo Sapiens
gcaagtctccactggtgttattacgttatcaggcacaaaccccctccagacacctgagcctcccccacaggctcccagtgaggagccatcacatgcccaggccagccgaggggccctcaggcatggggatctgggcaatggcagcaagctgggcggggggtgcagccaggatgacagcagatctgcagggcggggtcctcgccccgggccacctggctggggccgaaggtcacagctgcgtctaactgggccttgagcagctgaagctgtttcagggcttgcagcacctctggggtggccccggccacaccccccagcaggttgtagttctcaccagggtccttggacaggtcatagagcagcgggggctcatgagcagtcagagagctggaggcgtggcaggcagggtctgcagtggtatcactgtgggcagagccctgggtgaagaagtgagccttgtactttccagtccgcacagcaaaaaccccacggacctcgtctgggtaggacgggtagaagaagagagactgccgagggctcttgcctgtgcccagcagcagggggctgaggtcaaagccatccaaggtgacattgggcagtggggccccagccagggctgccagggtaggcagcaggtccagggagctggccagctcgtgggtcacgccgggagcgatatgacctggccagaaggccaaggcaggctctcggacaccgccctcgtaggtcgttccctttccacaccgcaagagaccggagcagccgcctcgggacatacgcatggtctcaggtctgggacacaggaggcgctcatgagccatggagccacagcctctgagccaccgagggtgaccagtggccccacacctctaagtcacaaagcttgcccggaggtgcccagcacgagcccgcacctcccaggggtgatcctt

SEQ ID NO: 433720 - DNA, 1080 bp, Homo Sapiens
gccctcttcatgtggtccggggagctggcagctcgtgggtcacgccgggagcgatatgacctggccagaaggcccaaggcaggctctcggacaccggccctcgtgaggtcgttcccctttccacaccgcaagagaccgggagcagccgcctcgggacatacgcatggtctcaggtccattgtctgcagtgaagatgaccagcgtctcttcaagcagccccaggtcccctatggctgtcatcagggtccccacagctgcatccagctccatcagggagtccccaaatggcccgcggcctgaacgctctgcaaagctctgcccactgaactgagggtagtgggtttggtgagaggcatagtacaggaagaaggggcgatcctggcgctgggcgtcggccatgaggtcatgggcgaaagccatgtagcgggcctctagtccgggcagccaggggggctgcgcctccacggacaggttggccaacagtgggatggggaccaggccctggtcacagccaccgtcgcaaggagtggccggcgggaagcaggtcaggttctggcaggggccctggtcgtgggagtacgggatgcctagaaatcgatggaagccctgatgggggggcaggaaggccccctcaggccccaccccaaggtgccacttgccggccattcctgtgaggtagcctcgggcagccaggacttcggccacggtcacctcctccaggggcaggcccccccgggagctgggcaccaggacgccagggtacatgcccatccgaaccgggagccggccggtcaggagggcggcccgggagaccgcgggctgggacggaactcctccaggaccagggcaccttcagattctcgagcggagatctgatcctcctcgcctagcggtccgggctcagggtcgggggcgtaagtcacttggcgctgaccagcggagtcgggccggggggaaggcgctagagggagcccaggaggagccggtaccgggctgcgggcgcttccgcctcggccccgccccgtgacctcgacgcgtgggtcgacgatatcccgaaattccggaccggtaccagccctt

SEQ ID NO: 433721 - DNA, 420 bp, Homo Sapiens
gcctggccccaccaccccaacgttgatggcgaactgagtgactgaccagcctcctgcccccaggcgtgacccacgagctggccagctccctggacctgctgcctagcctggcagccctggctggggccccactgcccagtgtcaccttggatggctttgacctcagccccctgctgctgggcacaggcaaggtagggccggtgacccctgatcccagatccttggcccctgtcctggccttcccctggggtgagtgtgggcagtgcctgagagtctgtgcctcagtgcctcctgcactgagtggcatcacaagtggcgccacctctcaggttcctgggtgggcaagaagcggtgcacgtccagggccgtcccaccagggctggcagctccaggtatgtgcagtacttgggcgctcgtacc

SEQ ID NO: 433722 - DNA, 365 bp, Homo Sapiens
  misc_feature (43)..(51): n is a, c, g, or t
gctgggattagaggcatgcacaccacgccagctaatttcgtannnnnnnnnagtagagaccaggtttctccatgttggtcaggctgatctcgaactcccgacctcaggtgatccgctggcctcgcgctcccaaagttttgggatcactggcgtgacccaccatgtccagcctatcctgttctttataggtatttattatagcagtatccctagcctctacccactagatgccagtagcaccccttcacccacagttgtctcaaccaaaaatgtctctagacattgccaaatgtcctaggggtggggaggagagaggcaggattgtccccgttgagaagtactggtctaaaggcattcaaactcag

SEQ ID NO: 433723 - DNA, 721 bp, Homo Sapiens
caactcaggaaaaatttttatggggtcacatcttggggatggaagagggacaggaaaagaaacctaagacaaaagaactgatggtcttcccaacccagaggcttcctgagttatcacccctgagagaggaagaacacaatctctctccttaaggcacccagataagagtacaggcaaactcttcacttgcccagtgcctgggtgagggagcaggcttaagaggcagaagaggcccagccctgtaggcactgggtactccctgctaccaaccctgaacccccggcagttgtccctgaggtctggggagtagcagaacccagtgtagaagccagcagacccagtgatgcccttggagaccctctgctgccttcccttattctctgtgggttttgagaggttcgtttgctgccatttcccacgaagggaaatgcgtggagccatcaggcgtggatccattctgaccacccagacctggacggtgatacaacccggtcactgtattcccgtagaacccccacgccagctggatgcccaggagacttaacaccaaccacagcagcagcagcttgaagagggtcacgcgcatgtcctgcgcctcccactcccgcaagaactcgctgcccagcgcgcccagcaccgtggccggcagagcctgcaaggcctgcccagaccaggactccgccatgactggccctcgccccacccggggtactgtcaccgt

SEQ ID NO: 433724 - DNA, 1065 bp, Homo Sapiens
  misc_feature (69)..(69): n is a, c, g, or t
  misc_feature (343)..(344): n is a, c, g, or t
  misc_feature (872)..(976): n is a, c, g, or t
  misc_feature (991)..(991): n is a, c, g, or t
  misc_feature (996)..(996): n is a, c, g, or t
  misc_feature (1003)..(1003): n is a, c, g, or t
  misc_feature (1008)..(1008): n is a, c, g, or t
  misc_feature (1011)..(1011): n is a, c, g, or t
  misc_feature (1013)..(1013): n is a, c, g, or t
  misc_feature (1015)..(1015): n is a, c, g, or t
  misc_feature (1019)..(1020): n is a, c, g, or t
  misc_feature (1037)..(1037): n is a, c, g, or t
  misc_feature (1040)..(1040): n is a, c, g, or t
  misc_feature (1047)..(1047): n is a, c, g, or t
gctgggtggcgaattcggcacgaggatggcggagtcctggtctgggcaggccttgcaggctctgccggnccacggtgctgggcgcgctgggcagcgagttcttgcgggagtgggaggcgcaggacatgcgcgtgaccctcttcaagctgctgctgctgtggttggtgttaagtctcctgggcatccagctggcgtgggggttctacgggaatacagtgaccgggttgtatcaccgtccaggtgaggcttcctacgaacctccgtgggctggccgcccccgcccccaccctctcccgactgtaccattgggttccccactatcctgcaagaggctcatcagaannacttaacattggttcacggccttactaccctgaacgcatctgacctcggaagctaagccaggtctgggtggtcagaatggatccacgcctgatggctccacgcatttcccttcgtgggaaatggcagcaaacgaacctctcaaaacccacagagaataagggaaggcagcagagggtctccaagggcatcactgggtctgctggcttctacactgggttctgctactccccagacctcagggacaactgccgggggttcagggttggtagcagggagtacccagtgcctacagggctgggcctcttctgcctcttaagcctgctccctcacccaggcactgggcaagtgaagagtttgcctgtactcttatctgggtgccttaaggagagagattgtgttcttcctctctcaggggtgataactcaggaagcctctgggttgggaagaccatcagttcttttgtcttaggtttcttttcctgtccctcttccatccccaagatgtgaccccataaaaatttttcctgnnnnnnnnnnnnnnnnnnnnnnnnnnnnnnnnnnnnnnnnnnnnnnnnnnnnnnnnnnnnnnnnnnnnnnnnnnnnnnnnnnnnnnnnnnnnnnnnnnnnnnnnnaaacccatctctatnaaaanacaaaantagcnggngngngggnnaccagtatccagctatnagnggtgaanagggatttgttgacctgg

SEQ ID NO: 433725 - DNA, 543 bp, Homo Sapiens
attcttgtgccgtttctcggaaaagcttttcagtaaatgcactcatgctgctccaggagctcttctctggaacaagccacccatctgccatcaacaagttaagaccaagagaactaacggctgcggaaaggagactgaagctttgattaagccagctgagcagttagaggtggagaaatttaataacttatattcaaaactgatttagggatcagagcaatcacagaaaatgaaaccaatgctttccagagggatatcctaaggaaaaaacaactcgtcctggtggattcaattttacttggaaagcctgggacacagaaaacaggaaactggtcaaaggctcctacatgttagagccttttacagactcactgcgttgagtctaacaaccgcgactgaatgcagcctccaatgtgctcagaagaatggctgtcatctctgcacccagagctcttctatggccttcggaagctgcagaccttgcatttacgttccaactccctgcggactatcccagtacgcctgttctgggactgtcgtagt

SEQ ID NO: 433726 - DNA, 1683 bp, Homo Sapiens
  misc_feature (1532)..(1532): n is a, c, g, or t
  misc_feature (1629)..(1629): n is a, c, g, or t
  misc_feature (1662)..(1662): n is a, c, g, or t
agtaaatgcactcatgctgctccaggagctcttctctgcaacaagccacccatctgccatcaacaagttaagaccaagagaactaacggctgcggaaaggagactgaagctttgattaaccagctgagcagttagaggtggagaaatttaataacttatattcaaaactgatttagggatcagagcaatcacagaaaatgaaaccaatgctttccagagggatatcctaaggaaaaaacaactcgtcctggtggattcaattttacttggaaagcctgggacacagaaaacaggaaactggtcaaaggctcctacatgttagagccttttacagactcactgcgttgagtctaacaaccgcgactgaatgcagcctccaatgtgctcagaagaatgggcttacatttcaagtggccattaggggcccctatgctggcagcaatatatgcaatgagtatggttttaaaaatgctgcctgccctgggtatggcgtgtccacccaaatgccgctgcgagaagctgctcttctactgcgactctcagggcttccactcagtgccaaacgccacagacaagggctctctgggcctgtccctgaggcacaatcacatcacagagctcgaaagagatcaatttgccagcttcagtcaacttacttggctccacttagatcacaatcaaatttcaacagtaaaagaagatgcttttcaaggactatataaacttaaggaattaatcttaagttccaacaaaatattttacttgccaaacacaacttttacccaactgattaacctgcaaaatttggacctgtcttttaatcagctgtcatctctgcacccagagctcttctatggccttcggaagctgcagaccttgcatttacgttccaactccctgcggactatcccagtacgcctgttctgggactgtcgtagtctggagtttctggatttgagcacaaatcgtttgcgaagtttggctcgcaatggatttgcaggattaattaaactgagagagcttcacctagagcacaaccagctgacgaagattaattttgctcatttcctacggctaagcagtctgcacacgctcttcttacaatggaacaaaatcagcaacttgacatgtgggatggagtggacctggggcactttagaaaagctagacctgactggaaatgaaatcaaagccatcgacttgacagtgtttgaaacgatgcccaatcttaaaatactcctcatggataacaacaagttaaacagccttgattccaagatcttaaactccctgagatccctcacaaccgttggtctctctggcaatctgtgggaatgcagcgcccgaatatgtgctctggcctcctggctgggcagtttccaaggtcggtgggaacactccatcctatgccacagtcctgaccacacccaaggagaggatattctagatgcagtccatggatttcagctctgctggaatttgtcaaccactgtcactgtcatggctacaacttatagagatccaaccactgnatatacaaaaagaataagctcatcaagttacccatgtgggagacaaagaaatcccaactactgcaggcatagcagttactaccgaggaacacttttnctgaaccagacaatgccatcttcactcaacggntaattacgggaacaatgggtt

SEQ ID NO: 433727 - DNA, 2384 bp, Homo Sapiens
  misc_feature (658)..(658): n is a, c, g, or t
cccagggtgtttccagaagagaaatttaatctaatttacatacttctaggtacatcgataaccaaaatgtggccactgaaaaaagttaaaaggtcaatcagctcctggcttctagctggcccaggattgcaaaataaaaagatccacgttccttattctctacacaaaacgcgtttttaaaaaagtgaaaggtctagggagctatacatagaaagcaacagtgaaaagggagagggagcaggagtgggggaggagagtcccaccccccaaccccaccctccagggccccagagcccctgaggctctttggggggccttgacatggcaggaggcagctgtcagctctgagctcttcccagctgggaaggcccctctcgggggcagccaacaaggatttccgtggcattgtgggctcagtggggggctcccaggccccagcaggccccacagagggagcgtggcttcccctgagcaagcaccgtggcatgatgtggtcgttcaacccaggaactgggggtccggggcaggtcccgggtctcacgaggtgcgtgttgtgtgtgttcgcatgtacatgtgtgtgagaggatattcatgggaggagagagggaaccagaacaggggtctttggggtctttgcaaatggccacggatggcaganatcgccctgcctggctgctagacgggggagtgctgtcctcccctgtgaacagaccggctgccatcagagacctggctgctgcccctgctggaccaggtgggcatgggctgaaggaagacaccctgtggccccagagtcctcgggctgggggaagggcagctagctggctcccggcgccctggctgtagtgtgcccggcccccaaggggcgccggtttgaggttttggcttgctcctttggaaacggaaagaaagaggaagagggacgaggacacagaggaggaagaagaggagacagaggtggcacgagaggggatctggaatgcttttgtgttagggagcctctgccgccgctgtctgtgcctgcggggcctgggactcctcaggtggggggtccgctttggagaagttcatctccaggatgtgccgctgtaagtgccgcacccactcttcctggatggagagggggccctggaattccacctcacagaacctgcatttgagggtgtagatgttgcccacgaacttgacaagtgatgtctgggggggccggggcaccagggaggggactggccggactcggggtgggggttgccgcacctcctccagcttctgctgtaggtcattggtgtcctcgcctccccgggctgcggaggcatctggagggcgggcttgtcggcgttcaaatttgttgatgttctgccgctggtgctcctcagccttcacggtgcctggcgggctggctgccagaggccgctcaccaccgtcggctgcccggccagcctcgggccctggctcccctccggcactgcggccgaccacggccaggcccccgggtgccagccccagggacggccgcttgtcactgtcacggccatggccggcactgcggaacttcttggtgaaggggcggccgccctggatgtagctgcggtaggcgcccaccttctggggccggtgtttgatccactcgctcagtgtctcgatgggcgagccattgacgcaccactcggtcacgccgaactgccgcaggtgtgcccgtgcgtggctggccagggccttgcggttttcaaagtaaaggccacacagctcgcagcaggcctcggtggaggagtgggaggtcttctcatgaagggtctttgccttgaagggcagttcagtctggatgtaggtcttggccttgacctctgctgggaggaggcggtcctcctgcaggggccgcttggctgccactgagcccaggtagccagtggctgagggcttggccccagtgatgggcgtcaggctgagctcacgaggaacctgggccggccctgcacctggtttgcctggccggccagccaggggcgacagcggcagtggggactgcacgggcccaggggccacggtgggaggcccgtcctcagccagggcaggggccaggtctccagccggtggctccttcttgatgaggcacggcttggacttcttcttgaggatctctcgcagtgtgtcgatgggcgaaccattgacggaccactcggtcacacccatctgccgcaggtgtgagcgcgcgtgactcgacaggcccttgcggttctcgaagaactcgccgcagaactcacagcggatgtcgcgcaccggctctgcccgggacgacaggttcaggggtgtcatcctcgtgccgaattcgaacacccagcgctcgctacctagccagttagttgggtcgtgtgtgtgggtgcgca

SEQ ID NO: 433728 - DNA, 1611 bp, Homo Sapiens
  misc_feature (1560)..(1568): n is a, c, g, or t
ttttttttgagtatgatgtttaatgtaagatccagtggcttggcagagttggtgcaaaactgtaaagtaccagattaagttctagtcagtgagttagcagcctaggcacttgggcaaaaaaattggccctgctgtcccaagtcctccaaagccctctccgtatcaccagctaggagctccaagactgatatgccactacttggaggcttgagtagaatccacgcgtcctcagtttccaaagtgacaagagactggccccagccatcaaagcagtagaattttcaggacagggttgaggacagtggggacagaactggacatgggggcctgagctgctgaacatttgctacatgcagtagtctaagagggctcacagctgggagaggttagcctgtccaccttcccacccatgtgtggtagggaagaaggtgaccatctagttaaagaaaaaaagatccttccaaagctgtatttggcataagctaataccactgctagtgctgccactggccaggcacagatacagaaggccctgaggagttgggaggaagggagaacaatgtgcaggcaaagcaggaaacagccagctcaggtccccgccccaggggcccagaaggataaaggccgtgcagtaaagggaacatacggttcttctctttggtcaggcaaaggcccgaatatgggcctgttaggtgaaagggctgaagggcacaggctctgcccttggaccctagctttaggctcatcacattgaggcggtgatggagcgagacgaaggcaggaagacagagcagtcaggctgggactcgccagctcctaggagctgcccttgtccttgttgtccatcaggtcataccaccgggctacaccctgggaaaggtctgtctcagctaggtccagctgcaccttccccagcagctcacgctctcttgacatgaaggaggaattagacttgacagagacatccagctttcgtctctgggcctcatccagggggagttcccactcaaaccgttcattaaattcaggactcagggtcctcttcttctgtgaggtcctcctcttggtgcctcggttcttgtctggcagtagcaacagtgacacatagggatcaggaggatcacgtccattctgtcgaagggaccggcaaccatgaacaatgctgaccagctttcgttcttcactgtagtaccacagagtcagtttcacctggcccagaggcccggctggagcctcaaggggactgtcaacatgtgttaggcgctgccggagctctggggctgaggaggtgatgtgagggggtccccccgagagctcttgttcttcgctcagcgatgaggagctgtggctgtagctgtggctatgagcttccactcccgagtgctgggacaccaggatccctagctgtgctctcagtagcacctgcccctgaccactgctgagtgtaaaccagcggtcctagcagaactggtcagccacgaaaagctttgagaggggcagggattatgagcccagcacgccagtggcctcacccccgaacctgtaactttaggctctaannnnnnnnntctcctgaggagaaaggaggcacttttatcccatacaggggct

SEQ ID NO: 433729 - DNA, 2344 bp, Homo Sapiens
  misc_feature (9)..(9): n is a, c, g, or t
  misc_feature (16)..(16): n is a, c, g, or t
  misc_feature (18)..(18): n is a, c, g, or t
  misc_feature (20)..(20): n is a, c, g, or t
  misc_feature (27)..(27): n is a, c, g, or t
  misc_feature (32)..(32): n is a, c, g, or t
  misc_feature (34)..(34): n is a, c, g, or t
  misc_feature (37)..(37): n is a, c, g, or t
  misc_feature (41)..(41): n is a, c, g, or t
  misc_feature (56)..(56): n is a, c, g, or t
  misc_feature (58)..(58): n is a, c, g, or t
  misc_feature (72)..(72): n is a, c, g, or t
  misc_feature (83)..(83): n is a, c, g, or t
ccgttcatnaattaanantngaggccntcttntnttngagncccccttttgtgccncngtttttttgtgcantagcaacattnacaacatagggatcaggaggatcacgtccattctgtcgaagggtaccggcaaccatgaacaatgcttgaccagctttcgttcttcactgtagtaccacagagtcagtttcacctggcccagaggcccggctggagcctcaaggggactgtcaacatgtgttaggcgctgccggagctctggggctgaggaggtgatgtgagggggtccccccgagagctctggttcttcactcagcgatgaggagctgtggctgtagctgtggctatgagcttccactcccgagtgctgggacaccaggatccctagctgtgctctcagtagcacctgcccctgaccactgctgagtgtaaaccagcggtccaagcagagctggtcagccacgaggagctctgagaggggcagggataatgagcccagcacgccagtgccctcaccccgaacctgcaactctaggctctcagtgtgtggtttcctgatgagaaaggaggcactctcatcccagacaggggctgaagtttgcgaaatagtcttggttttatgagaactatctcccacagtgagagtagcataagggctgaggtgcttggtgccttttcgcagcgggaggtcctctgcccgctccatatagatggatagcagggccgcagccagctccgcactcttctgagtctggatcaaactattcacctgcagcacctcctctaactcagcagcagtgggacggggggtgagacgctccaggcgcaagtgcaggcggccagatgggacatcctccagggtcagccactcatcaaggaagccactgtttaagactgtggtgagacgcactttacacctgcccagaaaatcatccttgtccaagtccttgtcaaagacttcaacctctagctcttggcctggaactgatgtgacgatcacctcaaaaacctcattccagcggggattgagatcttcccgaacaacatggctccggaagcttcgtcctgccaactttagtttgacataggggtctgacttgcccttcaccagtccccccaagaaacggtctttggcaatcaggtcctgggcctctaatacatggatccgaagcacatgctcagtcccaaactggctatcaggagtcgtgtgacagggtcgaggtggggcatccacactgctgcctctctggggattctcactgtccacgtcccaagcaccaggacaaccaggcaccgtggggaagcatatttctgatgaatccaagtacaggatcctcatgactagtttcatatagagtctggagtttggaccagagctgctgagctggaaccactggtccaggatgagttctggggcagtcagcaggcgggccagaggcagcgtcagtgctcctaaagtcagggccctggaatcatccttcacttgcacatcgagctcctggctttgagggtcttgtaggaagaaccggaacgcttcctcccacactgggcagttggtactgtagacagccttgctctcctgagtcacatcctgaattgacagttgtaccatagggttgggttccttgttccccttcttcagaggaagatcctgggcccgatccaggtagacaactaagatggcagctgacgggggatctggtcgagaggagactccccaattccactgtagaacctgctccagtttctctgcatctgacaaaagtgacagccattctagcctcaagtgaacttggccttgcccaccttgtagagggaaccaatcatccagaacgctagcctgtaacaccttccctacatccagcttcattctgcccagaaagtcatctttatctggatccttgtcgaacacctccacttcaatctcctgccctgggacctcgtgtaccatcacctcataagtctctccccactgtgggttgagttcttcatcaatgacacgactgcagaatgtctgggtacccaaacgcacaagtgcatatgggtctgacttgccctcaatcaggcccttcacatatttgtccttggaactcagccctcgagcagccagcaggtgaattcgaataatgcccctgggcagaggggaacgcaactgagccacatcttgaaggtcaggcacaaggggcaccagtaatcggttgggcaacacgaggaaggcagcaatggagtccatgatcatggtgtcagagagtgagctaagtcctgggatatccagcaggttggtcatccctgtccagttgatgtctagcctcgtgccgaattcgccacccaggcctcgctcc

SEQ ID NO: 433730 - DNA, 1982 bp, Homo Sapiens
  misc_feature (534)..(535): n is a, c, g, or t
  misc_feature (538)..(538): n is a, c, g, or t
  misc_feature (546)..(546): n is a, c, g, or t
  misc_feature (561)..(561): n is a, c, g, or t
  misc_feature (565)..(565): n is a, c, g, or t
  misc_feature (567)..(569): n is a, c, g, or t
  misc_feature (572)..(572): n is a, c, g, or t
  misc_feature (592)..(630): n is a, c, g, or t
  misc_feature (667)..(667): n is a, c, g, or t
  misc_feature (791)..(791): n is a, c, g, or t
cagcttttcagaagttttattataaagagatttgagagaagcactgggcaccaagacagacactcgccagggccaggaaacagctgcaaacgacgtcaagaacccaaacccaaacgaaaccccaaaaccacacacacggtaggataagctgtaacttcgttctcaaggtttcttcataaatagacaaaagtcgtcgccggcaatttaaaatagatgaatacatgattaaaaggagagcagtgctccggggtggctagcaagcgtccggtccttgctgtgaggatgacgaaacggtttggcagccgcttttgtgcgcgtctcccttaagataaaacttaaaaatgtgctaaggatcatataaaatgctttttaccttaaaggaaactacttttttcccccacaaaatagtcttacagatgtcttcagcacagttctaaaacacgtagtcaactacttacacggaaccaacagtttctaggtttcgtaatcttttgttcacactggaaaaccgatgtgcacatctatgccgggggnnggncctctggnccatgcatctggggngggngnnngtnggtaaggcgagcccgccagnnnnnnnnnnnnnnnnnnnnnnnnnnnnnnnnnnnnnnntgtccagacatagggtaccgtgcgcagggcgaggacngggtccacagttaccctggagcaagcaggtcagcgggcggaaggttcctgcaggttctttgggctggtggtgggcagtgggctgcctctgcagagtctggtgggaggttgaggaagagactcanccccgggcaatgggtgtgtcactgctctctccgatgggctaccctgcctctggccagggcctcttttctgctgtcagcccttcaggctctgagcagtgccttccagcgagcctcaggggatggtagggaggggggattaggtgaggtagagcgatttgtccctggggagccggctgcaggtgctgatggcacactccccactggggtagctgctgtcccagtccccgctgctggtggggttggatgggccaggtgagcaggatcccgagctgctggggaactcagagatgtgcgggaagtcctgcttctgttcctctcccaggctgtcccacatggaggccacgattttggacacgtcaccgaaatgtggcactggggttctgacccttgatggcggcctgagtgtctctgaagaagagtgcgtaggccgacacaggcttctgcggctcattggggtccttctttttcttcttcttcgggttcttggccttttttcctgggtcggctgaaggtctcttttctcccgagatcttgaaatgcacttccgactcctcttcctgagtggagctggagggagagggggtcgctgacttgctccccggcggtgatggggagctgtgggcgatgctgctccggatgcccatctgcgagatgagctgggactggctgagggcactcatgtggctggccagcattgccgggcgacccagcaggggcccgggccggcccgagtcataggcagccacttccgagtggaccatctcctggatcgtgggcagctggcccgacagcaggtggctgtcctgtgctagcatgttggacaccatgatggctgggaggtccatggcctgataggagtaggcagggagcagaccgttgggggtgaggccgtggcacagcgagtggtagctggcttcgtggtcccccaggtgcaggagggatggctccgggaggttgggaggtgttatcggggggatctcatagtcttcgttgttctcgctctggccgttgtaggtctggctggttgacaggagctctgggtttccgtcactcatccccacgtaggcactgtcaccatcaaacccgcatcgccacggagcccacgcgtctgcgccagggctgcgggaaacccacgcgcgctgttcaatcatccgtagaattccggaccggtaccagcctgcttttgtcaac

SEQ ID NO: 433731 - DNA, 1007 bp, Homo Sapiens
  misc_feature (970)..(970): n is a, c, g, or t
  misc_feature (989)..(989): n is a, c, g, or t
  misc_feature (992)..(992): n is a, c, g, or t
attctttcgattgcgcggcgcatgcgtggcccggggtctcggggcgttgctgggaaacatctgccgttggttgcggcgggcaccggccgacatggcggcagcggtggcggctgcgctggcgcggcttttggcggcctttctgctcctcgcggcccaggtggcctgtgagtacggcatggtgcacgtggtctcccaggccgggggccccgaaggcaaagactactgcatcctctacaacccgcagtgggcccatcttccgcacgacctcagcaaggcatctttcctgcagctgcgcaactggacggcctccctgctctgctccgcagccgacctccccgcccgtggcttcagcaaccagatcccgctggtggcgcgggggaactgcaccttctatgagaaagtgaggctggcccagggcagcggagcacgcgggctgctcatcgtcagcagggagaggctggtccccccggggggtaataagacgcagtatgatgagattggcattcccgtggccctgctcagctacaaagacatgctggacatcttcacgcgtttcggccgcacggtgagggcggcgctgtatgcgcctaaggagccggtgctggactacaacatggtcatcatcttcatcatggctgtgggcaccgtcgccatcggcggctactgggccgggagtcgggacgtgaagaaaaggtacatgaagcacaagcgcgacgatgggcccgagaagcaggaggacgaggcggtggacgtgacgccggtgatgacctgcgtgtttgtggtgatgtgctgctccatgctggtgctgctctactacttctacgacctcctcgtgtacgtggtcatcgggatcttctgcctggcctccgccaccggcctctacagctgcctggcgccctgtgtgcggcggctgcccttcggcaagtgcaggatccccaacaacagcctgccctacttccacaagcgcccncagccccgtatgctgctcnggngctcttctgcgtggc

SEQ ID NO: 433732 - DNA, 409 bp, Homo Sapiens
  misc_feature (164)..(164): n is a, c, g, or t
  misc_feature (216)..(216): n is a, c, g, or t
  misc_feature (312)..(312): n is a, c, g, or t
  misc_feature (323)..(323): n is a, c, g, or t
  misc_feature (335)..(335): n is a, c, g, or t
  misc_feature (361)..(361): n is a, c, g, or t
  misc_feature (375)..(375): n is a, c, g, or t
  misc_feature (398)..(398): n is a, c, g, or t
ggggcggttccttgcgcttcagtcccccccgggtcccctcctgctcccgggttttctgccccgttcccccgggtggctgtgggctcccgagcccgttgtcggccagccggcccagggcccacgaccccatggtgtctcccaagaaggtacatgaagcacaagcncgacgatgggcccgagaagcaggaggacgaggcggtggacgtgacgccggtnatgacctgcgtgtttgtggtgatgtgctgctccatgctggtgctgctctactatttctacgacctcctcgtgtacgtggtcatcgggatcttctgnctggcctccgncaccggcctctnacagctgcctggggccctgtgttacngcggctgccctttnggcaagttgcagcgcccgcaggnctcgtattgct

SEQ ID NO: 433733 - DNA, 1359 bp, Homo Sapiens
  misc_feature (1095)..(1095): n is a, c, g, or t
  misc_feature (1098)..(1098): n is a, c, g, or t
  misc_feature (1252)..(1252): n is a, c, g, or t
  misc_feature (1256)..(1256): n is a, c, g, or t
  misc_feature (1302)..(1302): n is a, c, g, or t
ctggaccggtccggattcctcggagaagaaagtccctgtggctggcactgtcagcctcctggctcctgcttgtcctgctgggaggcttctcccttctccgcctggatgcagagctcctgcagagcttctcccagcctggagagctcccagaagatgccgtttcacctcctcaagcccctcatggtggcagctgcaactgggaatcttgctttgatacctcaaagtgcaggggcgatggccttaaggtattcgtgtacccagcggttggaaccatctctgagactcatcgcaggatcctggcttccattgagggctctcgcttctacacattcagccctgctggggcctgcctcctcctcctcctcagcctggacgcccagactggagagtgcagctcaatgcctctgcaatggaacaggggcaggaaccatctggtcctccgtctccacccggctccctgccccaggaccttccagctgggacaggctatggtggctgaggccagccccacggtggactccttccggcccggctttgatgtggccctcccttttctccctgaagcccacccgttgcgaggtggggctcctggccagctgcggcaacacagcccccagcccggggtagccctgctagccctggaagaggagaggggtgggtggcgcacagcagacactggctcctctgcctgcccctgggatgggcgctgtgagcaagaccctggacctgggcagacccagcgccaggagacgctgcccaatgccaccttctgcctcatctctggccaccgtcccgaggctgcctcgcgcttcctccaagccctgcaggtcctggctgccctccaggagatgtcccctgcacgggtcctcgccctgcgtcagcagacccagtttctatgggatgcctacttctcctcagtggagaaggtcatccataccactctggaggttattcaggaccggatttttggaacatcagctaacccctcactgctgtggaacagccccccaggggcgtcctggccctgtctactttttccacaagcccccaggacttccccttctactacctgcaacagggctcccgcctgatggnagnattcagcgccctgatctgggtggggcccccaggcagccccctctgaagctcatccaggcggtggcaggctcccagcactgtgcccagatcttggttctctggagcaatgagaggccactcccatccaggtggccggaagacagctgtgcccttnacantcattgatgggcacaggaaggttagtgatcggcttctacccatatnagcaccatcagaacagatgccatcctcagcctcgatgcccgcagcagtctttccaca

SEQ ID NO: 433734 - DNA, 1898 bp, Homo Sapiens
  misc_feature (741)..(741): n is a, c, g, or t
  misc_feature (1349)..(1349): n is a, c, g, or t
  misc_feature (1770)..(1770): n is a, c, g, or t
  misc_feature (1777)..(1814): n is a, c, g, or t
  misc_feature (1830)..(1830): n is a, c, g, or t
gctggtacggtccggaagttttgggatatgtcgaccacgcgtcgcggacgcgtggggttgacggccctgtcttggatccaccaccaggacgctgtgctcggtcatggcgcgcctcccccaagggctcatctgtgcaacaaccacatgccaacaatagctccaggtgcctcagccccgtgccctgacccggggaccacagggacaccctctgagacgtgctggccccaggaggatacaggcacacgggcacccagcccctctcagagccaggcgtgtcttgacggtatctgctgacgggaacaagtcattctgaaaggtccctctgacccaggtcaccaaatttgggccagaactggcacttccgagtgcccactggtgctggcgtcctcaaagtgccgggcgccaagttcagccccaggtgcgtttgcctaggcagtggtggctgccatccctcggggcccaggccctcacccgaagggctgcctcactctgtggtgtcaggcactgggctgtgtcctgattcctcagagtatggggacctgacatctttgggtccccaagagttggctcttggatgtggaggcttgatgctgcggttgggggctgcactacctgcgtccgtggaagcctctgcctcagcggggacggcctcctgctgcaggtcctgggcagcccacagtagtgctagctgaggcccagaggaacgggaggaaagggaggcagcgccggacgggcagctgngccaagaggcgggcggggccagaaatacctcatgcccctgcaccagcccctccgtctccaggccccaggcctctttgtggacccatcttcctcctctgccaccccgatcttcactcggatacctcttgatttctgtggataagggaagcggccacttctccctccctgagacccgaggatgcccctggtgggggtggccttctcaggactcctgggtggcacagcagcaggaccttgtcatgggactgatgctgagcagggagggggctgccaggctggctgccgatgctccgttcacataagccagtgtggttctggggacctgaggagccctgtggcacccacagggggcacctatgtctgccgtggctcctcgggtggtgccctgtgtgacaaagcccaacagcaagggtgactcctggcaggtgggggcagcaggagggcagagggcagagctctggccacttctgcccacttcattagggtttgtgaactttgtccttcacctcttttcgtgccctggttgtgagattgcctctaacaggtaatgccaggggcccttcactccgcccccatgactgggaagaggcctgtggcagcgccgctgngaccctaggaggctcagagtcagtggtgtgggagccctgtctgcaaggacgcagaataagcagtgagggcggctgcaggagaggaaggggctcccacagcccccactgatgccgctgcaggcccctgtcgagctggggtcccagccaggtgcccccgcatgccctcctgcagttgctggatggatagggacaccaggaagaggacaaactgcatggactcaagcgagctggagccatcttctccatagcattacggacttagcataagagtaaatgactgtgaacgttgtagtaaacggcagcttaagataagtaagcagagacagtgttaaggacgagtttgtgtctgtgggtagcttttaggctgcttcctaaccccccatttattgccttctgagaggtgggtgaggacaagcatgtncctgttnnnnnnnnnnnnnnnnnnnnnnnnnnnnnnnnnnnnnncacgcacatgcgtgtntataagcccacctgagtggggctcgtgcaggagaactgaggcatgaaactttggctcaaaccttagga

SEQ ID NO: 433735 - DNA, 685 bp, Homo Sapiens
  misc_feature (32)..(32): n is a, c, g, or t
  misc_feature (37)..(37): n is a, c, g, or t
  misc_feature (72)..(72): n is a, c, g, or t
  misc_feature (91)..(91): n is a, c, g, or t
  misc_feature (98)..(131): n is a, c, g, or t
  misc_feature (632)..(632): n is a, c, g, or t
ttaaggacgagttggtgtctgtggtagctttnaggcngctcctaacccaccatttattgccttctaagaggngggtgaggacaagcatgtncctgttnnnnnnnnnnnnnnnnnnnnnnnnnnnnnnnnnncacgcacatgcgtgtggtataagcccacctgagtggggctcgtgcaggagaactgaggcatgaaactctggctcaaacctaggaattgagagcgtttctgtcttttgggagagtacttttctccacgagccctctggccactgtgggagggaaggacaagggttcccttggaaatgtgaagggtcttggcctcatccctcaggtccccccacagcacttcccactactgcttctgtccctgctggcagcctctgtccctccagaacggctaaccagagcacactgtccccaccgcctcccctttctctctggaaagttgaagtatctccaaaggccttggaaatggcacaaaggtgataaggagcaggtgctttgctgcagtctcccttgcaaatgtataattaaggcctttcttcccaccccaagtccaagaacaaatgccagccacgtcctccgccacttgggagagatgaggaacccagttggggtcacgttaaaggnatttgcaggtcggtgaggagggacaagagggggattccctgtttctaaggcac

SEQ ID NO: 433736 - DNA, 1156 bp, Homo Sapiens
  misc_feature (443)..(443): n is a, c, g, or t
  misc_feature (446)..(736): n is a, c, g, or t
  misc_feature (1105)..(1105): n is a, c, g, or t
  misc_feature (1107)..(1107): n is a, c, g, or t
  misc_feature (1109)..(1109): n is a, c, g, or t
  misc_feature (1112)..(1112): n is a, c, g, or t
  misc_feature (1133)..(1134): n is a, c, g, or t
  misc_feature (1138)..(1138): n is a, c, g, or t
  misc_feature (1148)..(1148): n is a, c, g, or t
tattagcattcctttattttagaagttcacacctataattttataacaatcgtgaaaatgttactcagaactagatgttttgatgacacatagcagaaatctgtggttcaagatggtcattgcaaacttaaccaatctcagcattctattctgccttttgttttgattgcacagaatcaatataattctgattcatatggaaaataacttaatatcttaacctccgctcaggatcttcatcataaatgtaggtcagtacatacctaaaaattgtcaatgatccaacatggtcacatgtgacatgctacacttgcacctagtaccaaacaagctgatacttcaatgagatctggttggcatatacacccaagccttgtctgtcccctcagagcactgcacacagatagtgaaagaacttgtgtacaataagaaattcacagggntgnnnnnnnnnnnnnnnnnnnnnnnnnnnnnnnnnnnnnnnnnnnnnnnnnnnnnnnnnnnnnnnnnnnnnnnnnnnnnnnnnnnnnnnnnnnnnnnnnnnnnnnnnnnnnnnnnnnnnnnnnnnnnnnnnnnnnnnnnnnnnnnnnnnnnnnnnnnnnnnnnnnnnnnnnnnnnnnnnnnnnnnnnnnnnnnnnnnnnnnnnnnnnnnnnnnnnnnnnnnnnnnnnnnnnnnnnnnnnnnnnnnnnnnnnnnnnnnnnnnnnnnnnnnnnnnnnnnnnnnnnnnnnnnnnnncaacaaagatattcacaaggatgaatttaaataggtaaatggcagtgtagaactacatccttcctagtcaattacacctttaggagactttaaataggcatagaaacgacaaagggcttatactgagaattgcacaaaaatgagttacttggcagcacaaggtagggattgtatgtgtcacaagagtatatagactgttctaccttcatgctctactcgttgccatatcccttcgtggttcctgagactcaggtgaaattaccttccaatattgcctggagaagggctcctcctcctcagctgcctcataatcctttattagtacaataactgcagaaaccaggggctgggcatcctctggcagattancncnctncgattgtttgtggatgcccannatgnttggctaggnggctgatt

SEQ ID NO: 433737 - DNA, 2111 bp, Homo Sapiens
  misc_feature (45)..(45): n is a, c, g, or t
  misc_feature (103)..(392): n is a, c, g, or t
gaaacctggtttgcatatacacccaagccttgtctgtcccctcanagcactgcacacagatagtgaaagaacttgtgtacaataagaaattcacagggatgannnnnnnnnnnnnnnnnnnnnnnnnnnnnnnnnnnnnnnnnnnnnnnnnnnnnnnnnnnnnnnnnnnnnnnnnnnnnnnnnnnnnnnnnnnnnnnnnnnnnnnnnnnnnnnnnnnnnnnnnnnnnnnnnnnnnnnnnnnnnnnnnnnnnnnnnnnnnnnnnnnnnnnnnnnnnnnnnnnnnnnnnnnnnnnnnnnnnnnnnnnnnnnnnnnnnnnnnnnnnnnnnnnnnnnnnnnnnnnnnnnnnnnnnnnnnnnnnnnnnnnnnnnnnnnnnnnnnnnnnnnnnnnnnncaacaaagatattcacaaggatgaatttaaataggtaaatggcagtgtagaactacatccttcctagtcaattacacctttaggagactttaaataggcatagaaacgacaaagggcttatactgagaattgcacaaaaatgagttacttggcagcacaaggtagggattgtatgtgtcacaagagtatatagactgttctaccttcatgctctactcgttgccatatcccttcgtggttccctgagactcaggtgaaattaccttccaatattgcctggagaagggcctcctcctcctcagctgcctcataatcctttattagtaccaataactgcaagaaaccaggggctgggccatcctctggcagattaagctctctgcgaattgttttgtggactgccccagcaatgacttggtctaggcgggcctgattcacagcatctctctcaattgctcctctctgtaccagcttctgtaacaaaggctccagccttagtacataagccgacaacttttcctcatccttctggtaagtggttagatatttgacctgcaactccctaggattatctgtaaccccaaatacctcctcaagagcctgcagacattcatcgacagtaattaaaggattgtttatcttgaggacacgaataacatcaagtgctgggcctcgaaggctctctagcaatcgccttctcttctctacatctggcacctgccacgcctttatcatctgagtagtatgaaacatccagcgtccaaattcttcttctcctggttctggagactccctgcccgagaacactctcagctttttatacttcaagcattgcagggcaggctgaagagcctctaatgcctgtgccaacataggggcccacatttccgggatcatgccctgctctgggtctaaggagccattttcatgtccaagagctctgctcaactcacccactgtcatgccctctcccgctaaaaattcatttaatctgcttaaaaatgtattatctgggtcagggggcttaaagatcactctccagatacccccttttcccggtatctccttagggaccagggcgtgactagtctccgcagtaagccctactaaggctactttcctgttctcatccctcctgaacatccttccaagcagtctgtactcccccaagggagctaaaccagcctgcagagcctcctcgatttctgccacactgcagctctgggagatgccggcaatcaatagcgctttccgagggttcatgtccatccccctgcaccagtcttctaaaagcctcaaagtcatggtgcccgaaataatagacttaagttctaaatatgccagaccacaggcgaccaccgaaattcaaagtaatcctccgcggtaccccagagaaatcttgtcaacgtgccgaggtccagcagccgtgatctagtgctcgtgcccgcgtccgtgcgccggcggccaaggtgcctggccgggccccgacgaggcgcgggagggcaggctcccctaggctctgacggacactcgggggccacagcgaccgatgccggtactccaggtgcctgtggtactgtctggagggacgtgccgccacccgcgccgccggagctccggctccagcccggattccacctgttttggtctcgctcggggaagctgcgcggcgggcggcgccgctctcgacgaattcgagctcggccgatttggcctgat

SEQ ID NO: 433738 - DNA, 676 bp, Homo Sapiens
  misc_feature (285)..(328): n is a, c, g, or t
cattttcatgtccaagagctctgctcaactcacccactgtcatgccctctcccgctaaaaattcatttaatctgcttaaaaatgtattatctggctcggggggcttaaagatcactctccagatacccccttttcccggtatctggagagtctccgtcgaactagttcgacggagactctcaaagtctctggtttgtcatctttaaaacaggaataacaataagctgattaaaatgctcaagtaaaaaaacttgacagccgagcgtggtggttcatgcctgtaannnnnnnnnnnnnnnnnnnnnnnnnnnnnnnnnnnnnnnnnnnngagaatgcttctttaacacataaatgattttagctcccttatgtctgagaagctttccatgacctcatcttccacttctgtaatctggcaggtcattagaaaagacactttattagtgtccctctcaatctgcaggagatatttcaagcttcacatatcagcttcacattttgttacctttgacttgactttaactcctcccacctttgcctctccccacctactctctattccaacaatgttggcctgctttctatttctgaaacatgctggggaatttcccactccagggctattgtatttggattccctctgcttagacagctcttcctctaaatataggcatca

SEQ ID NO: 433739 - DNA, 971 bp, Homo Sapiens
  misc_feature (886)..(922): n is a, c, g, or t
  misc_feature (937)..(937): n is a, c, g, or t
catttccggatcatgccctgctctggtctaagagccattttcatgtccaagagctctgctcaactcacccactgtcatgccctctcccgctaaaattcatttaatctgcttaacaatgtattatctggctcaggggtcttaaagatcactctccagatacccccttttcccggtatctccttagggaccagggcgtgactagtctccgcagtaagccctactaaggctactttcctgttctcatccctcctgaacatccttccaagcagtctgtactcccccaagggagctaaaccagcctgcagagcctcctcgatttctgccacactgcagctctgggagatgccggcaatcaatagcgctttccgagggttcatgtccatccccctgcaccagtcttctaaaagcctcaaagtcatggtgcccgaaataatagacttaagttctaaatatgccagaccacaggcgaccaccgaaattcaaagtaatcctccgcggtaccccagagaaatcttgtcaacgtgccgaggtccagcagccgtgatctagtgctcgtgcccgcgtccgtgcgccggcggccaaggtgcctggccgggccccgacgaggcgcgggagggcaggctcccctaggctctgacggacactcgggggccacagcgaccgatgccggtactccaggtgcctgtggtactgtctgcaacgagaagtgatggggcgatgacagtcgcgagcgggcaccagggggcaaggctgaggagcgctgagtcgccagacccagagagccacccacctggagggacgtgccgccacccgcgccgccggagctccggctccagcccggattcccgctctcgacgaattcgagctcggccgatttggcctgatnnnnnnnnnnnnnnnnnnnnnnnnnnnnnnnnnnnnncggccgccaccgcgntgacccgaggtcgcccatataggtctatctgcct

SEQ ID NO: 433740 - DNA, 420 bp, Homo Sapiens
tgagcccagcagaagcagcacaagacccccaagcatcgctgatcctgatccctctgacctaccagttgaccgagtagccaccaaagccctggggatggagcccagtggctctgtggctggcctgggggagctggacccgggggccttcctggacaaggatgcagaatgtagggaggagctgctgaaagatgacagttctgaacatggcggcgcaccgcccgacagcaaagagaagatgcttgggagacattgccgcttcactggtgactcgggcattgaagtgtgtgtgtgcaaccggggccaccatgatgatggccttaaagagttcaacatgctcatcgctgatgctctggatgggcccctggacttctgcgacagctgccatgtgcggcctcctggtgatgaggaggaaggcctctt

SEQ ID NO: 433741 - DNA, 1600 bp, Homo Sapiens
  misc_feature (13)..(13): n is a, c, g, or t
  misc_feature (35)..(35): n is a, c, g, or t
  misc_feature (50)..(50): n is a, c, g, or t
  misc_feature (177)..(177): n is a, c, g, or t
  misc_feature (528)..(528): n is a, c, g, or t
agcagcatctttncttttgcggaggagggtcaccntgagctcaccagganctgggaatgtcggctttggaccctccctgatcccctggttgtgagatttccccttgtgtctcaaaagccttgagccagtgaagtatctctccaggattttctttcccaatcagtcagcagtcaactntcctggaagaatgtcctttctacccaatctgcccaggagggcgggaatgtggccggccctcaggaagggcctctgggtggcctctgcatccctggctggagaatgcgcacagtttgcagaggctcagaactcccaatcgtccacctccagctcttccaggtttgttaccaggccaaagattccactgtggtcctgagactggctgccctcaaaattggtgatgggggtgacaggacgaagcaattcgggcaaagcctctgaggcacgtcgcttgatctgcttgaagaaagagtggttcaggagggtgctggcactgggcctggcatccgggttgcgctgaaggcactgctnccacaaagtggtggaagtggggggagaaggttcggtggtaggggtgggagggcgagtcaccgttggagggccggggggtgctggtggtcaggctgtcactcaggccagagttggccactgagcgcgaagggctcatggtcagctcctcagcggggatggtgctggtatccaacaggcagggcactgtgccgttcagtttctctagcagcatctgggtggcaggcatatccttaaaggggacatggccgttggccagttcacaggctgtgattcccacactgtagatgtcagacttggcatcataaccctggagattctgtgtacatatccccatgtggtggatgtagtggagggctttcagcaccccctgcaggatgtaagcaatcgccagttcattcatgccatccatgaagtgtgtacagatgagatcttttgcagaaccgtatgccatgaatgatgtgacaacccacagctcattgtctgcaataaaagtggctcgatatggcacgatattgggatggttgaagagtttggagacatgcagctcgccctgcaagaatgttaccatctcattggaacaagcttctaggttaatcctccgtacagtcacgtactctcctgttggtttgtaccttgctagattcacagtcatcaggtcctcaaatcctttgcctatcacagtgagcagctcgtaacaccctccctctggcagaaagctactcatgacctcctgtttagagaaggatgctattgactctgagctcgcatcattggtaagaaatgacatgagttcctactgtgtaggcctacttcagtttcaaaaacttaaacctgttcctggagttagcaagcagccccgaccgtcttggctccgcctcctcagttttactgccgcgccgccgccagaccggttgctgggaggggagtacgcaacgtgccatgcgcagtggggcgaccgggaggactgatagagcgctccgccccaccccgccctgcggggaagtcccgccctttccgagtggccgcggctgcggcaggccctagcagccgccgccgcgccatcccgggaatt

SEQ ID NO: 433742 - DNA, 2656 bp, Homo Sapiens
  misc_feature (205)..(205): n is a, c, g, or t
aaggtagcgaggcctggggtggcgaattcggcacgagggcctgagggactgggagaagggtaagggatgtgccctggaagcactgcagggagcctcagatttgcaccccctggctcacactcgctggtcgccagccagcatggcagggatgggcggggactggttcttaggtttcctgcgtctttgggtgctaggcgacccaggngtataggagacagcccagtgtcgcgggtctgcaagtacaaagcaccttctaccgtcctgttcctgaccaaaggccaccagcatcctctgcctcaatctcaagtcttggaagctttttagctccaaagtggtttgatgaccacaggctaaaattcatagtcttaaaattgtagatagttaagagacagatctgttacaggttttcaaataaactggtctatctagtgtaagaggtcactgctgagcttcagtgagcacccgcatgggcctgctcttggatggtgggacagctctcacctggggcagcacggccatccctgcaagcacacacaccaggaagcagcctgtagcccctgagctgacgcagacacagagtgccattctccagcagcgtctctgaaaattttaatttgttctgacaacgaaactaacacagcataaggacttaagccctcaagctaggcaagacactgatggcccttggagaaagcaccagggcagctggcaggaggcgctaagatggattcttggtgggaaaggaatgaggcacacacataaaccgtgggaaagacttaggtgtcagggcccaagccagaagagggataaggatggactgttccagccttagtctgtgcttaaaaagacagaaatgcccttctctggaattatgagggagaggtctgagggaagggaggcaggcagcttactacttgccctttcactgacctatagcatctgaggcatctgagagcaaagttaaatagaatgaggctggtcgcaagcactgggaagaggtggcggtcctcgggtttaaggagccaaaccctgggcttggaattcagctcccagggccagagcagcatctctcttctgcggaggaggtcacctgagctcacaggactgggaatgtcggctttggaccctcctgatccctggttgttgagattcccttgtgtctcaaaagccttggagcagtgaagtatctctccaggattttctttcccaatcagtcagcagtcaactttcctggaagaatgtcctttctacccaatctgcccaggagggcgggaatgtggccggccctcaggaagggcctctgggtggcctctgcatccctggctggagaatgcgcacagtttgcagaggctcagaactcccaatcgtccacctccagctcttccaggtttgttaccaggccaaagattccactgtggtcctgagactggctgccctcaaaattggtgatgggggtgacaggacgaagcaattcgggcaaagcctctgaggcacgtcgcttgatctgcttgcgggttgcgctgaaggcactggtccacagagtggttgaagtggggggagaaggttcggtggtaggggtgggagggcgagtcaccgttggagggccggggggtgctggtggtcaggctgtcactcaggccagagttggccactgagcgcgaagggctcatggtcagctcctcagcggggatggtgctggtatccaacaggcagggcactgtgccgttcagtttctctagcagcatctgggtggcaggcatatccttaaaggggacatggccgttggccagttcacaggctgtgattcccacactgtagatgtcagacttggcatcataaccctggagattctgctggaggacctcggggctgagccacggcagaaccttgacactgtacttgggaaaatcgtggaccactcgctgccgctgcccatggcttatcatgctgagggttgctgcgcaaaccagacaggtagaccttcccatccacagagatcaggatgtggctggctttgacactcctgtgtacatatcccatgtggtggatgtagtcgagggccttcagcaccccctgcaggatgtaagcaatcgccagctcattcatgccatccatgaagtgtgtacagatgagatcttttgcagaaccgtatgccatgaatgatgtgacaacccacagctcattgtctgcaataaaagtggctcgatatggcacgatattgggatggttgaagagtttggagacatgcagctcgccctgcaagaatgttaccatctcattggaacaagcttctaggttaatcctccgtacagtcacgtactctcctgttggtttgtaccttgctagattcacagtcatcaggtcctcaaatcctttgcctatcacagtgagcagctcgtaacaccctccctctggcagaaagctactcatgacctcctgtttagagaaggatgctattgactctgagctcgcatcattggtcctgattcgctctggtttacttacaagaaatgacatgagttcctactgtgtagacctacttcagtttcaaaaacttaaacctgttcctggagttagcaagcagccccgaccgtcttggctccgcctcctcagttttactgccgcgccgccgccagaccggttgctgggaggggag

SEQ ID NO: 433743 - DNA, 1026 bp, Homo Sapiens
tagaggacccggctggtatcaacaggcaggcactgtgccggttcagtttttctagcagcatctgggtggcagggcatattcttaaagggggacatggccgttggccagttcacaggctgtgattcccaccactgtagatgtcagacttggcatcataaccctgggagattctggtggaggacctcggggctgagccacggcagaaccttgacactgtacttgggaaaatcgtggaccactcgctgccgctgcccatggcttatcatgctgaggttgctgcgcaaaccagacaggtagaccttcccatccacagagatcaggatgtggctggctttgacactcctgtgtacatatcccatgtggtggatgtagtcgagggccttcagcaccccctgcaggatgtaagcaatcgccagctcattcatgccatccatgaagtgtgtacagatgagatcttttgcagaaccgtatgccatgaatgatgtgacaacccacagctcattgtctgcaataaaagtggctcgatatggcacgatattgggatggttgaagagtttggagacatgcagctcgccctgcaagaatgttaccatctcattggaacaagcttctaggttaatcctccgtacagtcacgtactctcctgttggtttgtaccttgctagattcacagtcatcaggtcctcaaatcctttgcctatcacagtgagcagctcgtaacaccctccctctggcagaaagctactcatgacctcctgtttagagaaggatgctattgactctgagctcgcatcattggtctccaaatagttccaaatctcttaagccctcaacaatgaacttttccgagacccaccgcctgattcgctctggtttacttacaagaaatgacatgagttcctactgtgtaggcctacttcagtttcaaaaacttaaacctgttcctggagttagcaagcagccccgaccgtcttggctccgcctcctcagttttactgccgcgccgatcccgggaattccggaccc

SEQ ID NO: 433744 - DNA, 1020 bp, Homo Sapiens
  misc_feature (229)..(229): n is a, c, g, or t
aaccagcttttgggggggcagggcatatccctaaaggggggccatggcccttgggccagtttcccaggctggggatttcccccaccgttagatgtccagactttgccttcataaaccccggaagatttttgcgggaagaacctcgggggttgagcccagggcagacctttgccactgtacttgggaaaatggtggacccctcgctgccgctgcccatggcttatcatgntgagggtgctgcgcaaaccagacaggtagaccttcccatccacagagatcaggatgtggctggctttgacactccggtgtacatatcccatgtggtggatgtagtcgagggccttcagcaccccctgcaggatgtaagcaatcgccagctcattcatgccatccatgaagtgtgtacagatgagatcttttgcagaaccgtatgccatgaatgatgtgacaacccacagctcattgtctgcaataaaagtggctcgatatggcacgatattgggatggttgaagagtttggagacatgcagctcgccctgcaagaatgttaccatctcattggaacaagcttctaggttaatcctccgtacagtcacgtactctcctgttggtttgtaccttgctagattcacagtcatcaggtcctcaaatcctttgcctatcacagtgagcagctcgtaacaccctccctctggcagaaagctactcatgacctcctgtttagagaaggatgctattgactctgagctcgcatcattggtttttctccgagtgtcacccggaggctgctctccaaatagttccaaatctcttaagccctcaacaatgaacttttccgagacccaccgcctgattcgctctggtttacttacaagaaatgacatgagttcctactgtgtaggcctacttcagtttcaaaaacttaaacctgttcctggagttagcaagcagccccgaccgtcttggctccgcctcctcagttttactgccgcgccgccgccagaccggttgctgggaggg

SEQ ID NO: 433745 - DNA, 901 bp, Homo Sapiens
  misc_feature (214)..(214): n is a, c, g, or t
  misc_feature (455)..(466): n is a, c, g, or t
tttttttagaccaatgatgcgagctcagagtcaatagcatccttctctaaacaggaggtcatgagtagctttctgccagagggagggtgttacgagctgctcactgtgataggtatgtgcaggggccgtccttactctcctgctttctgctccaggggctgctgcagctttctcagcagccccagatgtgtgtacagcagaggccatccactanttaggaggattcatgggcacagacttgcttctgtgggtcttctctgtttttttctgccaagtatgggaagagatcaaacttccaggaaagaagctcttttgccatctttcctttgtggctgccatgtttccggtgtcctggccatagtgagtcagaaaggttggctgagaaggaactgatgagagaaaaatcaagaaatgtgagccatgaacataacagttaaattctgctgggaaaaggnnnnnnnnnnnngtaacagtagtgaacaatttaacattaagtttcttttgaaatcaagtcccttttttaaaggaaaattttcttaaaaccttttgttgttcttgtcgttgcgtatggcattccctttttcttttaggcaaaggatttgaggacctgatgactgtgaatctagcaaggtacaaaccaacaggagagtacgtgactgtacggaggattaacctagaagcttgttccaatgagatggtaacattcttgcaggtaataaaccatgagtgtgtcacatggagggagggtgggctcttggctctgataggaattacaaggaattacaaagaaatgaagggagactaaacgttcggaagttatggaagctttcagtggagaatcctggccatttggcactaaggattgggctgaaatgctgctcagcctaatttatatttccct

SEQ ID NO: 433746 - DNA, 1881 bp, Homo Sapiens
  misc_feature (225)..(225): n is a, c, g, or t
gaatgggcttccccccccggttagaaagggggcctctgacagaagtccaacaaaagtgcccccctggctgcccggggggtgacatgagacggtacagccgccgcctggaggtttttagctctccgggatggcccaagatccccctggaaagcaaagccagcacgggggtgggtccaggatggccacgaggtgctgggaggccagtctgctcaccagggtgggcancaggtcctcggccctcccgcagtggaactccacattactcaactcattgtcctgggcgttcacccgggcgtccctccacagcctctgggcatagctcgaccccaatgaccctctttaccttccgggccagggccaggccaatggtgccggtgccacagcacacgtccagcaccatgctccccgcatccaattgggcccagtcctggatgactgtgtagagcacctcggctgcgggtgtgttcacctggaagaaggcgtgtggagagatccggaaggtcagccctagcaggtcctcgtggatgcaccggtccccagccacatgctccaggggcaggccctcctggctaggagtctttcgctgtccctcctccacgaagtagaggcaggtcactccactggccctgcctggccctgctgtgaagtgctgcgctagggaggtcttcagctctgccagctcctcagggctcagcttctgggggtggaagtaggcaatggccatggcctggtggcggcggctggtgcgcacagtcagctgcttccagtggcctgtgtacgtctctgggtcgtatgccgagtatggagtggaccggatgaactcctggaaggccttcaccacctgcttggtggcttcggggatgtgcacggtgtcaaacggggctgccacagcacacgtcccgcccttgtacttgccgagccgacagcccacggtgttatcctccccatccaccccgacgccaaccagaaactcacacttattacgatactcagtctgctggggtgatggcctgaccccctccagcgggcagcaggccttgttgtgcttgtgcctttgctcgagcagccagggcagcaaggcacggttggtgctcccgatttccttggcaagtttctgcagcacctgctcgcactccagctgcttccgctcaagctgctcagcatagggcactgtccatagaggggtcaccacgtcggccactcgtgttactggtggctcactctcaccctcctgtcgcctcctcctggccatggggtcggccttgggccgggccaggcgcacactgacgtgggcggcctttccagagggcaccatgcaaaacgcgcagggccttgtccctctctgcagcgctgcggaatgtcacaaaggcgcagggtggttgcccaaagagtttggttttgtggggctgcagaccaaagcggcccaggaagcgccggacgtcgctgaagctggcgtggcgaggcacgttctgcagctccagtttaaagatctcagaggtaaacaagtcatccctgatgtagctgtagagcccgggctgaggccccggccctgtagccgccccagcgccctctttctccacctcctccagggctgccggggctgcagggggcaccgagacggtagggcagctcagggcactgctgctctcctggccacagctctccatgggcttcgggccctcgttgtcgaggttctcactcatcgcccaggcggttctccgcctagaccagggacgccatgggggccgcctggccacctcgtcctgggcctgcgatgctcaggtccgggtctcaggcttggggctgtaccgcccgcccgccaggggcccgcgccgaccgctcgcttcgccagccactcttagtccgccagcgcgtgcggcg

SEQ ID NO: 433747 - DNA, 847 bp, Homo Sapiens
ccataggcacttgtccatagaggggtcaccacgtcgccactcgtgttactggtggctcactctcaccctcctgtcgcctcctcctggccatggggtcggcccttgggccgggccaggcgcacactgagtgggcggcctttccagagggcaccatgcgagacgcgcagggccttgtccctctctgcagcgctgcggaatgtcacaaaggcgcagggtggttgcccaaagagtttggttttgtggggctgcagagccgaagcgggcccaggaagcgccggacgtcgctgaagctggcgtggcgaggcacgttctgcagctccaggttaaagatctcagaggtagacaagtcatccctgatgtagctgtagagcccgggctgaggccccggccctgtagccgccccagcgccctctgttctccacctcctccagggctgccggggctgcagggggcaccgagacggtagggcagctcagggcactgctgctctcctggccacagctctgccatgggcttcgggccctcgttgtcgaggttctcactcatcgcccaggcggttctccgcctagaccagggacgccatgggggccgcctggccacctcgtcctgggcctgtcacaagggaagtggcctgtcacaagggaagtgctcagaggggaggtgctcacagagccggtgcaacgccgcgaggtcgccgccacccccggcttcgccccaggcggggcgggactcgaacctgcgatgctcaggtccgggtctcaggcttggggctgtaccgcccgcccgccaggggcccgcgccggccgctcgcttcgccagccactcttagtccgccagcgcgtgcggc

SEQ ID NO: 433748 - DNA, 870 bp, Homo Sapiens
ggtccccattcggccactcttgttactggtgttcacttctcccctcctgtcgcctcctcctgccatggggtcggccttgggccgggccaggcgcacactgagtgggcggcctttcccagagggcaccatgcaaacgcgcacggccttgtccctctctgcagcgctgcggaattgtcacaaaggcgcagggtgtttgcccaaagagtttggttttgtgggtctgcagaccaaagcggcccaggaagcgccggacgtcgctgaagctggcgtggcgaggcacgttctgcagctccagtttaaagatctcagaggtaaacaagtcatccctgatgtagctgtagagcccgggctgaggccccggccctgtagccgccccagcgccctctttctccacctcctccagggctgccggggctgcagggggcaccgagacggtagggcagctcagggcactgctgctctcctggccacagctctccatgggcttcgggccctcgttgtcgaggttctcactcatcgcccaggcggttctccgcctagaccagggacgccatgggggccgcctggccacctcgtcctgggcctgtcacaagggaagtggcctgtcacaagggaagtgctcagaggggaggtgctcacagagccggtgcaacgccgcgaggtcgccgccacccccggcttcgccccaggcggggcgggactcgaacctgcgatgctcaggtccgggtctcaggcttggggctgtaccgcccgcccgccaggggcccgcgccggccgctcgcttcgccagccactcttagtccgccagcgcgtgcggcgagcccctcggccgattacaccagctcgactagcctaattgttgtgactctt

SEQ ID NO: 433749 - DNA, 1595 bp, Homo Sapiens
  misc_feature (11)..(11): n is a, c, g, or t
  misc_feature (20)..(20): n is a, c, g, or t
  misc_feature (22)..(22): n is a, c, g, or t
  misc_feature (39)..(39): n is a, c, g, or t
  misc_feature (82)..(82): n is a, c, g, or t
  misc_feature (90)..(90): n is a, c, g, or t
  misc_feature (134)..(134): n is a, c, g, or t
  misc_feature (194)..(194): n is a, c, g, or t
  misc_feature (200)..(200): n is a, c, g, or t
  misc_feature (252)..(252): n is a, c, g, or t
  misc_feature (272)..(272): n is a, c, g, or t
  misc_feature (282)..(282): n is a, c, g, or t
  misc_feature (368)..(368): n is a, c, g, or t
  misc_feature (451)..(451): n is a, c, g, or t
  misc_feature (460)..(460): n is a, c, g, or t
  misc_feature (468)..(468): n is a, c, g, or t
  misc_feature (475)..(475): n is a, c, g, or t
  misc_feature (550)..(550): n is a, c, g, or t
  misc_feature (554)..(554): n is a, c, g, or t
gcatgtgaaangtggcagtnanctcagcatcaggcctgngtatctttgccctgttgagaagccaagatctcagctgtactantcaggtgntttttcagacagcaagtagaagaggtggtggccaacttccagtngctgtatcctggaggaggtccgggtcagcactgggcaagtaaggtagctagctgcctganccctantctggggttggaacttctgtttgccttagtaaagggatgtcagtcctaaganttctccacattgtgtctttnttctgcagtngtaaaaaggctggtctctttaattgtccttcatggtaccctaaggcaggcccactggctctttttgatcaaggattctgagaaaanctgcccttggagcgcccttgaaataacattacgggagcagaatgagtgctcgagtcgtggctgacacagtccagctcacactnccatcacanaggctgantgagctntcacccagggagggggctccctagctcattccattcccatggggcaagttactagaaggtaagagcacccgagtnagcnagtgccttcctgtatccacacccaggaataccttccagttgtccatgcagccgtagttgttaggattcctaaatacctgcacaggaaccagaggtagacaagactcttgtgagtcatcctttctcgaaaggagaaggtgggtggtggggtctggtgataagtctcaatggcagcataagcctcccggaaaaggtcccaacttccatagctgcagtagacacagcccagagtcatgaaaaagcagaaagagaagaagtaccgatggttatagtggcccacacaattgtttagccaggggcagtggtgatccatcttcagcacacacctgttgcagatgctgcagtggtgtgttcgggctggcttggggtaaatgcacttcttacagatggagacggtggcgatatcattcctgccctggggtgggtacccaggcggagtggtgatggcctggtagtagtggaagacaatcaggatcagattccagtggctatagaagaaatgccagcagagtcgtggcactgagtaggttcggaggatgagaggcaggacacacaggtaggcgatagctacaatggagcctgtcagcacgatcaccaggaccacgaacaccactccaaaccagcggatcacgttgtctaccagccagtagacaggctcaaaggcagcatcaacagcggtgtcactgcccccaaaggagttgtagagcagggagcgcaggcagaccttgccgtagcgccagcgctgtactagaccccggagtagaggtggacagcggcgcctgtaacccagcagcagaaggaggcggaggcagaggcgggccgggcccagcagcaggctccgctggcctcgcatggttcctgccgcctgccgactccccagtcagccaaaccgagccccgtagcctctgccgccgctcactgccaccccctccgactcggcgccccggccgggcccggctcaatccaaaccaccatggcccgccgcccgcagcgccaggcagcggacccggacccgccgccagcccatcctcaaccacacgcg

SEQ ID NO: 433750 - DNA, 1440 bp, Homo Sapiens
aggaatttccagtccctaaagattttcctcccccataggggtcttttctttcggccagtgggaaaaaaggggttggtccctgaaattgtccctgcctggttaccttaagggcaggccccactggctcttttttgatcaagggattctgagaaaaagctggcccttggaggccccttgaaataacataggggagccagaatgagtgctcgagtcgtggctgacacagtccagctcacactgccatcacagaggctgagtgagcagtcccccagggaggggggttcccaggtcattccattcccctggggcaagtgactagaaggtaagagccccggagtaagccagtgctttcctgtatccacaccccaggaataccttccagttgtccaagcagccgtagttgtaaggattcctaaatactctgcccttggcctgtagccgacgtctctccttcttgttgatgtgcctttcgatgctagtctcacctcgactgatgagaacagcatgccatacagttagggcacccagggcaagtgccacagaactaagaaaagaggggcgaagactggtgggtagtttagagagggctggaggaagtatgtggcagtggtgatccatcttcagcacacacctgttgcagatgctgcagtggtgtgttcgggctggcttggggtaaatgcacttcttacagatggagacggtggcgatatcattcctgccctggggtgggtacccaggcggagtggtgatggcctggtagtagtggaagacaatcaggatcagattccagtggctatagaagaaatgccagcagagtcgtggcactgagtaggttcggaggatgagaggcaggacacacaggtaggcgatagctacaatggagcctgtcagcacgatcaccaggaccacgaacaccactccaaaccagcggatcacgttgtctaccagccagtagacaggctcaaaggcagcatcaacagcggtgtcactgcccccaaaggagttgtagagcagggagcgcaggcagaccttgccgtagcgccagcgctgtactagaccccggagtagaggtggacagcggcgcctgtaacccagcagcagaaggaggcggaggcagaggcgggccgggcccagcagcaggctccgctggcctcgcatggttccttcagatgattattcctcaccaaagaacagccaatggaggaatgagtacacagaatgtggatcctgtaccgaggtatttcctggtgctatttaagtcttggcaaaagatactcttcttcctactccctctgggctgatgtcacaggctagccaactcaacctggtagcaggagattccctgtctcctgtcaggacagccagctaccccttgcatgacagaaaatgctttgtctccaattccattcccagccccaccccaaggaaatggtagccaag

SEQ ID NO: 433751 - DNA, 940 bp, Homo Sapiens
cagggcagtgccacagaactgcacaggaaccagaggtagacaagactcttgtgagtcatcttttctcgaaaggagaaaggtgggttggtggggtcctggtgataagtctggttggcaaccgcctgtagtttgttcttgtcgagctgtttcattttctcaatggcagcataagcctcccggaaaaggtcccaacttccatagctgcagtagacacagcccagagtcatgaaaaagcagaaagagaagaagtaccgatggttatagtggcccacacaattgtttagccaggggcagtggtgatccatcttcagcacacacctgttgcagatgctgcagtggtgtgttcgggctggcttggggtaaatgcacttcttacagatggagacggtggcgatatcattcctgccctggggtgggtacccaggcggagtggtgatggcctggtagtagtggaagacaatcaggatcagattccagtggctatagaagaaatgccagcagagtcgtggcactgagtaggttcggaggatgagaggcaggacacacaggtaggcgatagctacaatggagcctgtcagcacgatcaccaggaccacgaacaccactccaaaccagcggatcacgttgtctaccagccagtagacaggctcaaaggcagcatcaacagcggtgtcactgcccccaaaggagttgtagagcagggagcgcaggcagaccttgccgtagcgccagcgctgtactagaccccggagtagaggtggacagcggcgcctgtaacccagcagcagaaggaggcggaggcagaggcgggccgggcccagcagcaggctccgctggcctcgcatggttcctgccgcctgccgactccccagtcagccaaaccgagccccgtagcctctgccgccgctctctccctcgtgccgaattcgccacccaggcc

SEQ ID NO: 433752 - DNA, 964 bp, Homo Sapiens
  misc_feature (34)..(34): n is a, c, g, or t
acatggttttttcatttttctgttgtgtttgttntcaaaatcgaatacctttatttgtgctcccttaagcagcatgtgagaagtggcagtgacctcagcagcaggcctggtatctttgccctgttgagaagccaagatctcagctgtactagtcaggtgttttttcagacagcaagtagaagaggtggtggccaactccagtgctgtatcctggaggaggtccgggtcagcactgggcaaggtaggtagctagctgcctgacccctagtctggggttggaacttctgtttgcctgagtaaagggatgtcagtcctaagatttctccacattgtgtctttcttctgcagtggtaaaaaggctggtccttgaattgtcctgcatggtaccctaaggcaggcccactggctctttttgatcaaggattctgagaaaagctgcccttggaggcccttgaaataacatagggagcagaatgagtgctcgagtcgtggctgacacagtccagctcacactgccatcacagaggctgagtgagcagtcacccagggagggggctcccagctcattccattcccatggggcaagtgactagaaggtaagagcacccgagtaagccagtgccttcctgtatccacacccaggaataccttccagttgtccaagcagccgtagttgtaaggattcctaaatactctgcccttggcctgtagccgacgtctctccttcttgttgatgtgcctttcgatgctagtctcacctcgactgatgagaacagcatgccatacagttagggcacccagggcaagtgccacagaactgcacaggaaccagaggtagacaagactcttgtgagtcatcctttctcgaaaggagaaggtgggtggtggggtctggtgataagtctcaatggcagcataagcctcccggaaaaggtcccaacttccatagctgcagtagacaccc

SEQ ID NO: 433753 - DNA, 859 bp, Homo Sapiens
  misc_feature (99)..(99): n is a, c, g, or t
gtcccatctttccaggcaccacaaccttgtttggcaagatgcttgccagtgggtgtgtttcgggggctggcttgggggtaaaatgcactttcttacagnatggagacggtgggcgatatcattcctgcccctggggtgggtacccaggcggagtggtgatggcctggtagtagtggaagacaatcaggatcagattccagtggctatagaagaaatgccagcagagtcgtggcactgagtaggttcggaggatgagaggcaggacacacaggtaggcgatagctacaatggagcctgtcagcacgatcaccaggaccacgaacaccactccaaaccagcggatcacgttgtctaccagccagtagacaggctcaaaggcagcatcaacagcggtgtcactgcccccaaaggagttgtagagcagggagcgcaggcagaccttgccgtagcgccagcgctgtactagaccccggagtagaggtggacagcggcgcctgtaacccagcagcagaaggaggcggaggcagaggcgggccgggcccagcagcaggctccgctggcctcgcatggttcctgattttgccctgaggcagccagggagggctttgtccttgacaatcccactgacttatttaacaggtagctcaaaacccaacagaaactggaggaggctgctccactgcagggatggtttcaattcggtaactggagtattgtactctccttgcaccctggctcatccccacaaaagacctgccgcctgccgactccccagttagccaaaccgagccccgtagcctctgccgccgctcactgccaccccctccgactcggcgccccggccgggcccggctcaatc

SEQ ID NO: 433754 - DNA, 1540 bp, Homo Sapiens
agcgggattttctgctccggttggtgagcgcgcctgcgcgttgacggcgattttgcgttctgaggctgcagcgtcggcatcttgagctgccggttcgcgagttcgaggccaggttccgcctgtcgtgggttcgcaccccggacgcgatgctattcgacaaggtgaaagcgttctcggtgcagttggacggcgcgaccgcgggcgtcgagcccgtgtttagcggcggccaggccgtggcgggccgggtgctgctggagctgtcaagcgccgcgcgtgtgggtgccctgaggctgcgcgcgcggggccgcgcccacgtgcactggaccgagtcgcgcagcgcgggctcgagcacggcttacacgcagagctacagtgaacgcgtggaggtcgtgagccaccgcgccacgctcctggcgccagataccggggagaccacgacgctgcctcctgggcgccatgagttcctgttcagcttccagctgcccccgaccctggtgacatccttcgagggcaaacacggtagtgtccgctactgtatcaaggccaccctgcaccggccctgggtcccagcacgccgggcaaggaaggtgttcactgtcatcgagcctgtggacatctgcccgcgagccctggtgacctccttcgggggctcgggacacggtagtgtccgctactgtatcaaggccaccctgcaccggccctgggtcccagcacgccgggcaaggaaaggtgttcactgtcatcgagcctgtggacatcaacacgccagccctgctgccgcctcaagcgggggctcgggaaaaggttgcccgatcctggtactgtaaccgtggcctagtctccctttcggccaagatcgaccgcaagggctacaccccaggagaggtcatccctgtctttgccgagatcgacaacggctccacacgtcctgtgctgcctcgggcccagttggtgcagacacagacgttcatggcccgaggcgcccgaaagcagaaacgggcagtggtggccagccttcgcagggcgaagccggtgggcaccagggcagcgggccgctagtggcagggacgggcactgcgagatccaccccaagtgggatccttaccatcactgacactgccgcagttctaccacgtggactactgcactcaaggtcctgtgatggatatccccaggcacgtacaagagcttgatgcttgacaagcatgcacacataggatgaatccggccaccaatatcacatatggacacccattatagcggaacccggtatacctacccaagacgatgggaaccaagccaaaagacacaagataacacaaggggcatgggaaccatggacagggagccatgggagcggcaccaattaggacgagacaagccgggaccatgacagggaataccctacaccgtgcacgataccgtcggaacgagagtgaacaaaccccgcaacacctatgacaggaagaggaagacccaacagagaaagccaacaaacacacacataaccagaataacaccgcagggaaccccggaacat

SEQ ID NO: 433755 - DNA, 1401 bp, Homo Sapiens
  misc_feature (82)..(82): n is a, c, g, or t
cttgggacagtggtgcctgggcccagtagcgggcagtcttctcagagcagacgtgcccgcaaggtgcaaaggcatggctagncggccaagggtccaggcagaggcggccctcctggccaagccatagaggcacataaggccccacaaggcggcagagaggacattcgcgctcctgggggccccgctcccgccggcagccccagccgtggtagccatggacgtgcccgcagcggacgtagacccagggctgctgtttgtcgggcgctgtgcggccacgggctgggctggggaaggccagagtgctgaggcccacggggcactggggccgcgctgcatttgcctcctgccgctgggcctccagttgcttcagtgtgggagcccgcagcagccccgccggtgtgcgccacagcagtgtggccccacacaggtcgatgagagagccgtcctgcagcacgttggactcgttttccaccagcttgccccgctgctgggctgagcggctgtcccgcaatgtgtacacattcccacagaccgagatctcccgccagacacccggggctgagtcctcggagaagccgcctgccgggtgcatcaccaggactccattggtggtcagtccatccatcaggccatctggggtccgccatttggccgctcgctctccaaggaagatgttgctagaggcatcgaagccagcggcatagatgcgggcagtatagggtggccggcggtcacagaggatgcggcaggcatagcgggagatggtgctctgggcagaagggccctcggcagcccctcctccaggggacgtgtctgttaccacgaagtcaatcatgttctctgtggagcggccaatctggaacatgtctgtgtcgctatcatgtgtatactccactatgaccgagtggctccgggacagtgtatacgagatgctgtgctgaccacggttactcagtgccttggagacgagcggcgtggagatgtggtgcatgacgtctggcttcaccccgttggcgtgcgaccggcggctcagtgccaggcggcttcgccggcggcccttgtccccacttgccagacaaccattgtagcccaggacgatgagttcaccatacttgatgggctcctcgcctggctgcgcatcttcaccgggagaggagagaacgcaagagcccttgttcccccggtgctggaggtctgaggttcggggggaccccacttcagggtttccttccagcaccattctggccacgctccgggccccgctgggcgccgctccctccccgcctagcccctgctcggccccgggccgctgcggcgggatgggcccggcccgcggcggtccgcgctgcctcgtcacgggacacccagggccgggggaggggatgagcgcgaacagccacg

SEQ ID NO: 433756 - DNA, 778 bp, Homo Sapiens
ggtgccggcggtcacagaaggatgcggcaggcatagcgggagatggtgctctgggcagaagggccctcggcagcccctcctccagggaacgtgtctgttaccacgaagtcaatccatgttctctgtggagcggccaatctggaacatgtctgtgtcgctatcatgtgtatactccactatgaccgagtggctccgggtacagtgtatacgagatgctgtgctgaccacggttactcagtgccttggagacgagcggcgtggagatgtggtgcatgacgtctggcttcaccccgttggcgtgcgaccggcggctcagtgccaggcggcttcgccggcggcccttgtccccacttgccagacaaccattgtagcagctgtgtgcccttgggccagtcacttcccctctctgagcctcggtttcctcacctccttcctcacagcatcccaggacgatgagttcaccatacttgatgggctcctcgcctggctgcgcatcttcaccgggagaggagagaacgcaagagcccttgttcccccggtgctggaggtctgaggttcggggggaccccacttcagggtttccttccagcaccattctggccacgctccgggccccgctgggcgccgctccctccccgcctagcccctgctcggccccgggccgctgcggcgggatgggcccggcccagcggcaggctccgcgctgcctcgtcacgggacacccaggcacgggggaggggatgagatccaatatattccagaccagtaccagcctgcc

SEQ ID NO: 433757 - DNA, 745 bp, Homo Sapiens
  misc_feature (31)..(31): n is a, c, g, or t
  misc_feature (64)..(64): n is a, c, g, or t
  misc_feature (73)..(73): n is a, c, g, or t
  misc_feature (155)..(155): n is a, c, g, or t
  misc_feature (524)..(560): n is a, c, g, or t
ttgcccagtctcctgcttgaagagctcatcnaaactgcagcatcttgtggcgaagtaatcatgnaaggccttncagccggggcagcacctggctcaggagatgcaggttgttgtagacctggcccttgccgtcccgccgcatgtagctgctgggntcccagaagatgaacacggtgccctggctcacgttgagcaggtcatggcggttgcggaggatcctctggatgctggaatgcgcgatgaccctcaggctggtgcgattgcccacgttacgcccatagccgcgtgtgggggcgtcattcatgcggatgacacactctgtctggtcaatctgggagccttgccgactgtgcagcagatgccctgagctggtcaccagggcacagtccctgcagtgcattttcaggggcttgtggtccgccactccgaggtatccgtccagtggccgcggtcccgcggggaccccggggcgctgctgggtgctgctctccgccgccggctgcgagctgccggtggccgacgcnnnnnnnnnnnnnnnnnnnnnnnnnnnnnnnnnnnnngggggccgctccttctggccgccgaggctgctgtacactagcaacaagctggtgcacatggtggtgagcgctaaacacactgccagaccatggcgcatcagggtcttcattttgggcacctcttttgtgcagaatcctcaggctcgcgcgtccggggccactttttcctggggggtttccatgat

SEQ ID NO: 433758 - DNA, 1420 bp, Homo Sapiens
cgggactctggccgcctgttttttttgcagccgcgctgcgcgcaccgcgggctccgggctcagaagtgcggacgcccggctcccggcgtggacgccatggtgctgtgcccggtgattgggaagctgctgcacaagcgcgtggtgctggccagcgcctccccacgccgtcaggagatcctcagcaacgcgggtctcaggtttgaggtggtcccctccaagtttaaagagaagctggacaaagcctccttcgctactccgtatgggtacgccatggagaccgccaagcagaaggccctggaggtggccaaccggctgtaccagaaagacctgcgggcccccgacgtggtcattggagcggacacgatcgtgacagtcggggggctgattctggagaagccggtggacaagcaggacgcctacaggatgctgtcccggttgagtgggagagaacacagcgtgttcacaggtgtcgcgatcgtccactgctccagcaaagaccatcagctggacaccagggtctcggaattctacgaggaaacgaaggtgaagttctcggagctgtccgaggagctgctctgggaatacgtccacagcggggagcccatggacaaagctggcggctacgggatccaggccctgggcggcatgctggtggagtccgtacacggggactttctgaacgtggtgggattcccgctgaaccacttctgcaagcagctggtgaagctctactacccgccccgcccggaggacctgcggcggagtgtcaagcacgactccatcccggccgcggacaccttcgaagacctcagtgacgtggaagggggggtggctcgggagcccactcagagggacgcgggcagccgcgatgagaaggccgaggcgggagaggcgggacaggccacggcaaaaggctgagtgtcaccaggactcggggagaccctgcctccgttcccgacacgcctcctggagctgattgagggctttatgctatccaagggcctgctcaccgcttgcagactgaaggtgttcgatttgttaaaagatgaagcaccccagaaggctgcggatattgccagcaaagtggacgcctctgcgtgtggaatggagaggcttctggacatctgtgctgccatggggctcctggagaagacagagccaggttacagtaacacagagacagcgaacgtctacctggcatcggatgggcgaatactctctgcacgggttcatcatgcacaataatgacctcccatggaacctctttacttacctgggagtttgccatcccgagagggaacaaacagcacccccagggccgttgggggaaaaaaggcgggaaaatctgtttccgggaatgcgtactaccagacccccggaaaacccggcctggaggttcattggggggccaatggacggg

SEQ ID NO: 433759 - DNA, 1194 bp, Homo Sapiens
  misc_feature (136)..(136): n is a, c, g, or t
  misc_feature (192)..(192): n is a, c, g, or t
  misc_feature (359)..(359): n is a, c, g, or t
gggaaagagccccctggtttgatggagagctggggttccctgttcattcggaggggaggaggctttttgtccctctggcggggggcccccaggaattaaggtgaagtcgttggaacccagacacccagcctttttngggcccctggcccccgcacggaggttgtatcggctccagagcccctctcctttcanctccctgcaagggatccttggaggtctgggggataaactgaggcctcagcaggttcaaagggccccagtgcgcagggcatagtcagtgctgagggccatggtgtccacccagtggccgtggccttgcagagtccggcacagcacaccgtcatgagctctccagactntgatggtgcggtcctgggaggcagagtagagaagcccgtcccctccccaccggagacaggtgaccgactgggtgtgcccggtgaggatgcgctcacagcggcctgcagttgtgtcccagatccgcacactgccatccttggagctgctggccacatagcggcactcagggttcgcatggaggggctcccagctcaggcctgtgatccacttgctgtggccagcgagggtcctgcccacctgcttccctgtgcttgggtcccagaggagaatctggccattcttgcagcctgaggccagcttcttgccatctggagaccaggatatactaaggacccagtgtctgtgtcccttgcatgtgaaatgtggtgtctctgtgctgagatcccagaagcgcacggtggtgtctccagagccactggccaggtactttcccgtagggctgaaggccacagaaatgactgcctcactgtgaccctccaaggagctggtgcagcgagtcacagcccggactctgaagatagcctgtggctggtagatgatgtctaggaccttctctgtctccactgcctgggactccaacgtcttccccagtgaggagacgatctcagcatcgtggacaaagaaagccagtggcaggggatcctcctgggccagtagcgcgttgcacacgagctgcagcctgtccggggtgatgtccacgggcacgtcgaacggggaacccagcagctgcccgccctcatcctggaactgcactagcaaccgctgcacatcgcgcgccaccgcctcgtccgccactgctgccgccatcctgcgtccccacgtggaggagaaaga

SEQ ID NO: 433760 - DNA, 841 bp, Homo Sapiens
tggtcgttcctgggagcaagagtagagaagcccgtccccgtccccaccggagacaggtgaccgactgggtgtgcccggtgaggatgcgctcacagcggcctagcagttgtgtcccagatccgcacactgccatccttggagctgctggccacatagcggcactcagggttcctggccattcttgcagcctgaggccagcttcttgccatctggagaccaggatatactaaggacccagtgtctgtgtcccttgcatgtgaaatgtggtgtctctgtgctgagatcccagaagcgcacggtggtgtctccagagccactggccaggtactttcccgtagggctgaaggccacagaaatgactgcctcactgtgaccctccaaggagctggtgcagcgagtcacagcccggactctgaagatagcctgtggctggtagatgatgtctaggaccttctctgtctccactgcctgggactccaacgtcttccccagtgaggagacgatctcagcatcgtggacaaagaaagccagtggcaggggatcctcctgggccagtagcgcgttgcacacgagctgcagcctgtccggggtgatgtccacgggcacgtcgaacggggaacccagcagctgcccgccctcatcctggaactgcactagcaaccgctgcacatcgcgcgccaccgcctcgtcctgcgcgagcaagtggggcgggagtcagtctggtcgcccgcccagaagggccccacttcgcctctctcaggcctcagggacccgggccctagcgccccgcggcgacgccccccgcccccatccacgcacacccaccgccactgctgccgcc

SEQ ID NO: 433761 - DNA, 1806 bp, Homo Sapiens
ctagcggttcctggtttcggatttattcggcctctttaggggaccgcgcgttttccccctcttggccaagaaattgggtctcggaccagctttggcccatggcccgttccggtcgcgtctttgctccgcactctggcaatggtcgccctcgaagtttcttgtgttgtttttttaagtacttattggtcatagaacctgggatctgaccctgttacagagctgacactaggggcccactcatagagcctggctgcccaccacccctgtctgtaccagcaaggtacagagtagcagacacgggccaagttcagtgacaacttcctgtgaccttcgatttctggctctggggtgtgccacaggcggggatctgtgggaaaaccccattccggtctatcgaggacagcaggccacacgcattctcaggtccccactggtggggagggtgtgtgcactgccatctcagcctttgttctctggcagggaaggcagctggcagaggccgagtcgaggtgggggtcagagagaacttcgggccgtctcatctcctccatatccggaggcatttgtccttcccaccacttgccactctctggccatctggactccagtcaacagcatatacctcatccgcgtggccgggcaggtccatggccagcttctgggccttcacatcccacaccttcagtgtgctgtcactgctgccgctgaccaggagccgactgtcagctgaccacgcaatctggtacacggcagccacgtggccgcgtagggaagccaggtacttgcccgtcctgccatcccacagcttgatggacttgtcaaaggaggcactagccacgatgcgggagtcaggagagaagagcacctggttgatgagagcttggtgtcctgtcatccgagtgagaggctttttgtcctctgctggggaccacaggaataaggtgaagtcgtcggagccagacaccagcctctctggaccctggccccgcacgaggttgtatcggctcagagccctctccttcaactcctgcaaggatccttggaggtcttggggattaactgaggcctcagcaggttcaaaggccccagtgcgcagggcatagtcagtgctgagggccatggtgttcacccagtggccgtggccttgcagagtccggcacagcacaccgtcatgagctctccagactttgatggtgcggtcctgggaggcagagtagagaagcccgtcccctccccaccggagacaggtgaccgactgggtgtgcccggtgaggatgcgctcacagcggcctgcagttgtgtcccagatccgcacactgccatccttggagctgctggccacatagcggcactcagggttcgcatggaggggctcccagctcaggcctgtgatccacttgctgtggccagcgagggtcctgcccacctgcttccctgtgcttgggtcccagaggagaatctggccattcttgcagcctgaggccagcttcttgccatctggagaccaggatatactaaggacccagtgtctgtgtcccttgcatgtgaaatgtggtgtctctgtgctgagatcccagaagcgcacggtggtgtctccagagccactggccaggtactttcccgtagggctgaaggccacagaaatgactgcctcactgtgaccctccaaggagctggtgcagcgagtcacagcccggactctgaagatagcctgtggctggtagatgatgtctaggaccttctctgtctccactgcctgggactccaaccctcgtgccgaattcgccacccaggcctcgcttcctt

SEQ ID NO: 433762 - DNA, 2752 bp, Homo Sapiens
cccactttacttttccccggatcggggttttgggtttttcaatcccccaagcccagagccccagggggctggcccttgggtggcccgccccagggagaaaaaccccccagggccgggcacctttcaacaacagtttcccatttgtacattcccaggaaagcccccagtttgaaaaaaccaaaacccccgccttgtaaacctgagttgggatgaaaaagagcctgcccttgggggtggggaggctaaagggaactgtttcacggtctttctgggtggggcctggattccccgcacttctggagcagtcctcagacagccaagggatccatcccacgggccagggcttcccgaggctgtctccacggtcgctgggtctcaggagtcgtcctatcacctgagcgtgctcgctacttctgctaccattatggccacaatgacttcccataaacttaagtcattgagaccatggaattctgttcccatccgattcctgttgatggacattcgctgttttggcgtcatgggaactcctcggatggtaagtcagtttaaggacaaaagcgtgagtccatcgttcctgggacagtttccagtggccctggtcaggccacgtccacactggagaccccttgtgctggacaggagacgcaggccgctctgtcggagaccacgctgtccaaggcccgcatcaggatgtctggcatgtggtcggtgagcatcttcggacctatgagtattttgctgaattccgcttcgtgtgaccacttggcgctatagtgagcagcagagcagcagccaaaccgccccgaggcgccctcctcctgcaggtggatgatcctgccgggagggtagagaggggggtacttgggagaagagtccagtggggagtcgctggagaagctgtaggccggggaccagcgcgtcagtaggctctgctcccccagaagaggctgtgtcaggacttcctggtcgcccccgtccagctccgtgggcaagttgttggggtttcctccaaacagttcgtaccacaaaccgtgcagcaagatcttgtacttgggtttattgcagtgcgcgaccactcgcaagattcttctcttcagatcttccaagttggtcacactgagcctgggaatcacatccttccccaggacgagtgacacgatgaagctctgagaatattcctgcagagctttgctccacagcccccggggtggggagaaggcgtagcacctgacctgcgggtaggcggctctgaccatggtggccagcagggcggccgccccgcccccgaggctgtggcccactatgaccagccggtactcaggagcaatgctgaaggcttggctcaaaatcccgtcgttgatgagtcgttggtaaacgtatctggcagcttgagaaatacccttgtgtgccaggcggtcctgcacctcacactccacgtccagcacctcactctccgctgacaggtccgtaaggacatcctgcagagacatggtccccctcacagcgaccacaacagactctttcctgtgatccagagccactaaaaacggcagctcgtaaaccttgtcatggaagctgacgtggatgaagtccctgtactgcagccctgtggtgtgcaggatggagccgaagtgacagttgagctgatcgcctccgaccaagtcatagtctgtggttctgcttctgcagcagtcaccaccaatcctgcacagccccgtgagggggtttctgtagatgtagaggggccacccataggccgctgctgcaaactgcatgtaatgatggcagttttctaattctgcatccagatcagcttcctgggagctccctggggcatggcagaccacctgggcaggctcttggttgttcctgatattgtcctgttgctgatgaagcagggcgaggcccgccgcaatgtcgctgggcaccagatctgtgtctgaaaagtaggttgagaaaagctctgccgtactcgaaaaagcaacccgagtatggtcgtctttcccaatgcaacagcacaagagcttgattctggtttcccacacgcttgtagctgctgtcttgaggccattaagtaactggcttgaatcatgactatccaggtggctggggccggcagaggaatatggagccattttccccccaagagggtcaaagacaatgataatggaaaccactgtggcagcgatgatgatccaactgaccacgacggttgcgatgatgccgtttacaactgtcctgtcgcactgaacaccatctgccacccaggcagcccccagagaggcccagaccatctctggaaaaaacagcgccaggcggatgtaaagcagcttagacatagacttccgcggtccagggttacaaatcgttcctctcatgctgacacacatgatggctgacacagtacatatgacaactgccaggagaatcatgaggacgatcaagtaactgctgagcaaggctccaccagcacagtccagctttcctctgtgcatgagatacaacgtcagaatgccaatccaccacagcactcgcacgaccagctcgaagaaccctgggaagaccaagtcgtcgctggcgatggcccagcgccggccgaagagtaccatccccggcatggcgaaggtcccgtagctcgcactcaggagagaccccgcgcgccgttcaccgagaacaaaccagcaccctccggacgccgccaccaaattatcggcgctcaagcgcaaacgcagcgagggcggggacctgc

SEQ ID NO: 433763 - DNA, 472 bp, Homo Sapiens
  misc_feature (36)..(38): n is a, c, g, or t
  misc_feature (41)..(41): n is a, c, g, or t
  misc_feature (48)..(48): n is a, c, g, or t
  misc_feature (226)..(226): n is a, c, g, or t
cctgtctggccaccatgacacagagccgcctacccnnnttnaaggatnctacgccttctccccaccccgggggctgtggagcaaagctctgcaggaatattctcagagcttcatcgtgtcactcgtcctggggaaggatgtgattcccaggctcagtgtgaccaacttggaagatctgaagagaagaatcttgcgagtggtcgcgcactgcaataaacccaaggtnaagcgggtgcccttgttgagagggtccagcaggacacggggcctgtccctgagatcctgtggagagccgggaggaattgcaccctcagtgcagggcattctatgctgttgctgggaagttctccttccaccatctgatcagattctgggctaggactctgtgatgtctaagaaagcaaatggctgcagcaagtgcgggaaatgtcacagggaggaaacaggatctgggctgggagcagtggtgtat

SEQ ID NO: 433764 - DNA, 1687 bp, Homo Sapiens
  misc_feature (976)..(976): n is a, c, g, or t
  misc_feature (1213)..(1240): n is a, c, g, or t
aaaacatcccctaccggataatttatttttgttggtccaataataaaaaacggccataagcattcgatccaaaccttgggtaggtaaccagtgttccaaaattcagtaaaggcttctgacaataaactttgccaacccttaaaatcaatttttaaatgccaaattttcttctcatttttacttactagattaggcgtaaaatccaaatgcatggctgactaaaaaaacaaggcctgtccaatggaatacaacattccagaacagggtaagctggggacacaaaagcttcagaaatgtacagtggaactgaagtcctgccctaaagcaggggactggatgagatgacttcaagtaaaggtaacaactccaagctctgaacaggcattcccttagctgagttcacaaaataccataaaagtgatgcataacctttatcttgtacaaaataatgagaatttggccactactatataagcaatatctatttaaaatcatagtgtacagaactcccctataaagaaaacatgtggagtgcttaattccttcctttgttagacacatttaatagacagagaattaccataatgtacatacacttcaatggatacaatcagaaagcaggcagactgtcagcttacagaccctagaccgttagtcaggcaacacccaaattttactatagtctatctatcagtcagcacacagacactactacagtctgtcagtgacaaacagatcctactagagtcaatcagcacacagatcctcctggtctaccagttggtcaacatatagacactactagagtctgtcagtcagcacacagacactaaagtctgtctgtcagtcagtcagcacagagatccaactagagacagtctcctggacagtatgggtctaaattaaatccctggacacaattctgacatctgtgtcaccttcagggaaagtcgattctaccccaccagtgttgcancccgactcagttgttacatattttcaataagtcaaaatacatagaaaagctgggtaaatctatcaaatttcttaacaatgaacacaacatggcttctgggcttggcaaagacaatggaatgtgcataagattacataacccagatacaattcttctgattactggatactttttcccgtgcccattggccactccaaccaccaatgagtttctgtcaattaagatctcctgctcatnnnnnnnnnnnnnnnnnnnnnnnnnnnngtaacatagatgaatttatttccaaacagctatatcatatgtttcttcaaaatgccagtgtctctgaagaccaaatgtgggttgcaaagaggattacccagatcctcatatggaatactcacccattcagtctaggggtacaaatatattgtgtccttaactccaacttctttggaaacaaacaaacaataacaacaacaacgaaacaccagaggcaaagatatagggcagatccctagcacaatgcaagtttttagaagcttttcttattctactttaaaactcaatgtaaaaatcatccctttaccaaaacaaaacaacaatacagataagagctaaattacaatttagggattaggagataagaagagaagcaggttctctaaatctgctttagaattctctttcaaatctgtcatagtcttgaagcaagaataagaaaacagc

SEQ ID NO: 433765 - DNA, 926 bp, Homo Sapiens
  misc_feature (806)..(854): n is a, c, g, or t
ttttttttcacagtacaactcaacactttattccattgtgattggtatacatgtaagattgagacatcaagagactaaaaatcagtgcagaacttctctgaactaaagggccgtgaaaggcatgattggttttggcacacagagtggataaccatacattggctggaatgaggtggtcaggaaaataaaatgcacaaatctaacaccatgttgaaatcatgtctgagttctggagaaagttaaagtgtaaataattacaaagactgacatgcaactctttaccttacattattcatctacagactatttttctcccttagagatgaggagatggccttagtaatctgttcagagtagctgaaaagaccaatcaatacacattagaaagatctgcctgatttctatagcaattcattatagctgaagaaataatgctaaataatgtattttctctatatcatcctttaactaaattgaatcacatcacccaagtaattctgacttaacttttacttagttaaatataatttctcctgtcttttaatgtcaaaaagcagtttccgttagtttatccattggtgtatatcacaacagatgaggaaaacttatgtgatagtatctttccttttcaaaaataacattatgctaatgagaacatcaaagaagtaatactatgctgcaagtaatttaggttttcacatcatctatcatatagggagtccaaagaagccagcctagcaggtaacatagcagagcagaatgcaatgtagaagaggcacacagagtctaagtgatttctccagacnnnnnnnnnnnnnnnnnnnnnnnnnnnnnnnnnnnnnnnnnnnnnnnnncagccttctgcagaacaaattgttacaaagaaaaatctatttgcttgcaattgattaaacataatagagaag

SEQ ID NO: 433766 - DNA, 1415 bp, Homo Sapiens
  misc_feature (275)..(320): n is a, c, g, or t
cctgtcttttaatgtcaaaaagcagtttccgttagtttatccattggtgtatatcacaacagatgaggaaaacttatgtgatagtatctttccttttcaaaaataacattatgctaatgagaacatcaaggaagtaatactatgctgcaagtaatttaggttttcacatcatcaatcatatagggagtccaaagaagccagcctagcaggtaacatagcagagcagaatgcaatgtagaagaggcacacagagtctaagtgatttctccagacannnnnnnnnnnnnnnnnnnnnnnnnnnnnnnnnnnnnnnnnnnnnnaacagccttctgcagaacaaattgttacaaagaaaaatctatttgcttgcaattgattaaacataatagagaagagttctttgatttgggatgatagaagtaaagatattaaaaattatatgctggtaagcctaaactggcagattgggccatttttcctgtggttgtatttgagatgttgagctctcacagggagaatttttgcttttgccaaggaagggccagatttaacccaaaaggacaaccttgagaacattttttctttgttaacttgggcatgtggctaacattcgttctctctctggtaaaaagatattattcatctctgatgagatggttcaaaatatgacagtgaccaagacgtggtttattcacaggatgcacataattggatatctgcatatggcatgaattaaaaagttaagcaacaaggaagagaaggaggagaaaaaaacttttgcaaatttctgacataaaataatcaaataaaagggaaagatagtggttaaggatgttttcattttctcagaggtttctcacttccatctgctacgggggaaatgaaatgaatgaaagtaattctctttaggtcaccaacataaggaataatttgactgcaaacatagaagtgagcagagcaagatttgaagtgatacttcttaatctctttgattcttaatcttaaacaacaagccacaggcaatacaggaaaggtggagatgactaggaagtgtgataatgtgcctggatcagttaccattcattggaaagtaccgtttcccctgcctgttaataggctgattcctgcaggtttgagtaaaggaatcatctcttccttcagtgccgcattgttctttgtaagagatccgtgtcagttcaaagttgtgtaatttaaaggctagagaagaaagaagtttaaattggatcccacagtaaatattcacggatatttcaaagtagaattgtccactgtctggggttgggttcaagcatcaaggtgatcgcttcctgaacatgttcattgaccatgaggagctgtttactctggctcatattagactaccagtaattattctcagacatgatgtctctttt

SEQ ID NO: 433767 - DNA, 1199 bp, Homo Sapiens
  misc_feature (262)..(343): n is a, c, g, or t
  misc_feature (1159)..(1159): n is a, c, g, or t
agaatcagtacttttgtatattctatgagaacaaacacaattccaaacacatttagaggtgcacaaaagatattactttaaatgcactggtttatattcagtacatagctcattaacacaggaaaagaaatatttctctacacaaaggcaatggtgtgaaatatatttcccatgaaaagtggaatgatgaggctgttcagtgctgcgctcttaggctgagagctgtaagggagtttagagggctgtccaggctgatcctttnnnnnnnnnnnnnnnnnnnnnnnnnnnnnnnnnnnnnnnnnnnnnnnnnnnnnnnnnnnnnnnnnnnnnnnnnnnnnnnnnncttgaccctggggttttgcagactttttggctatgattccaagatgaacataacacattcttccatgtccttgtgagacacttgacaagggagcaatggctatggataaaaacactagcctgtgaaattctttgatttatgctgccattagagctttgagattttcctgcttctttggccccaatttttctcaggatatacattcaatgggtatattgtacacaaatctgtgcctttggtttgatgaggttagagctaaaacaaatttagaattggttatatttgttaatatatcacacttccctcaaaaagtcatagattctttatacagttaaccttttactggactgcttttaaatttagggattcaatgaggtatcttgatattcataaactattaataaacattaaatttttagaaatctcctgcataaagtatgaattttcgtcgtatttagtcaacagagactgaaagcatagttgaaaataagaccaccactattaactgaaacgtcacactactaggaccgcacagcccgcagcttgtgtctgccttggcgcaggagggcagcccctcttttcaggcccctgggtagaggggaggtgggcagtggctgccggggtcactccggtacaaactcatacaaactcacgtgcgccaaacatccgagacagaagccggtgcctccatcgggggaaagcgcctttgggggagggagctaggcatttagaagcttagttaattatttgctaaaaaaatccatttttttcttctcaccatgtatttgtagctttcatttcaaagattttcccctnatatttgcatcccggagaattccggacccgggtaccaagc

SEQ ID NO: 433768 - DNA, 485 bp, Homo Sapiens
  misc_feature (175)..(175): n is a, c, g, or t
  misc_feature (441)..(441): n is a, c, g, or t
  misc_feature (475)..(475): n is a, c, g, or t
ctgattttcattctttggagggatagaggacagagtgtttgttgatttttcgtttcggtttcagtttggttgtcattggtttttgttttttgctaattttgccccaccctataaaaagcagtgccacccagaggcaggggagggccctgaggagcacggggtcgccgtgcacctncattcctacttccttctccacctgtcccagctgcttcctttggttaccatctccaaatctgagggtaaaggagggggtgagggagaagtttcttgttgcaccaagaggcactgcttccagggcctgggagctctgaatgacctgtgtccccattctcaggtctgtgccagcacagccccctggggacggagggacactgggcaggatacaggccttttccacgtttgggcctttttgcagctgcaccccagggtgttagaaaggcnttgagttggggttttgaaggttcaatttctaccntgatttcttt

SEQ ID NO: 433769 - DNA, 810 bp, Homo Sapiens
tcacctggccagaggtgtggaggatgcagagacctctgaccggactggccacgctcgccgtcacacccttgacctgcggccacccgtgcaactggaagctgaggaggcaggtgctgagccaggtgggtgtcagaccggggacttagaatcctgtgaggccttcattcaagtttccacctgtccgcgtgggagacttggctgaggcagaggagaaagtcagcagacccgcaggtgttcgtgtgcgaggtgcacagggggctactctctggggcatgagacaccacctgggacttcccaggctcacagcagcccctggggagagaggccccacatgtgcacacaagagccatggggatcttctccttaaacaagctacgtgactctcctgggacaggcccacccgcccagagctcccactgggaaaggacccctgacaggaaggacaggaaagccctgaggctggttctgtggtcgccagcaacaggagcctggagggaagtcaggaaaggcgcaggctggggagcaggctcgggaagacggcctggaggatgggggctcccctctgggagctgacggccatgatcctagctgcccctctgccccctcagccgagggcttatagtaccagggagagtctgacggccacactcaggcggaggccatgtctctacggccagcccgaggacgtggttgatgcgtcccctgaggttgcacacacagcccgtgtggctgcacagaagcatccgagtgagggagaggcggcactgccaatggaaaccagggtgactcagtgacagacggcccaggaag

SEQ ID NO: 433770 - DNA, 954 bp, Homo Sapiens
  misc_feature (27)..(27): n is a, c, g, or t
aaaccccaaacatctgccgctgcaacnagcttgccgtaaaagcccgccctggggcaagcaagctgctggtgggtgccctgctgcactacgcggcccttgtccagcaccacaatgaggtgcgcgtgctccacggtgctcagccggtgcgcgatgatgagtaccgtgtgcttctgcaggttgccatggatggcctgctggatcagatactcgctctcggcatccaaagcgctggtggcttcatccaggatgaggactggggggttccgcaccagagcccgggccatggccacccgctgcttctggccacctgacagctgggcgcccttctcccctgtctctgtgctgtagccgtcctggagttccatgatgaagccgtgggcattggccttctgtgcggcctccaccaccatctcgaaaggcacagtgggcaggccgtaggagatgttatccgtgatggagcgggcgaacagcacgggctcctggctcaccagggagatcacacggtgcaagtacttgtggtcgtaggcgctgatgggcttgccgtccagcagcacccggcccccctccagggggtagaagttctccaggatgttgacacaggagctcttcccactgcccgagggccccaccagggccgtcaccttgccgggggacaggctgaaggagacattctccatacaatctcccaggacaaactcgtagatgatgaaggcgatgaggttgccgctggtcatctggcctgagatgacaaggtggcccccgtagtagaggatgctgacctggaccaccagcagtgtgagctggggcagagggagaggggatgtgggtcgaggggaccttagatcccccaccatccccattcctgacccatcccaggctgcagggggaggtgagggcagacccagccacaaactgaaatgccggccgttgcaggggtgtcttccaaggcttgtc

SEQ ID NO: 433771 - DNA, 865 bp, Homo Sapiens
ccccaaagaatccaatagggggtggactcatttttattctacatttttcattgcctcagtgtgtccctgccccccaccaccccctgccaagggtaatgtatgaacagcagagttgcagtggattggggggtgggaggagatttgtccaaatgacccaggcacactgctgttcatgccaggctcatccatatagacatataagtacaacacagacaagaggcaggcatctccatcccaaacaacatgattcttggcaccaagtagcaccagtgcccaagaaagaaatcagtatgatggggtaagatggggagatgaggaaacccttcagctcacagttatgcaggaagtcagaaacaggaggactcggggagcgagccaagcagtgtctggactaaatgcagacacccctccatcctctctctctagttgcccttcccaactccccactcacataatgaaaccaaggagtacatccattcatcagccctgctgccttccaattctcatagaaaatagaggaaggatgaaagggtctgcggacaatttggagaaagcatatctagtcagtgtcatggtgccatgggggaactgcaggaatcacactagccccaatgcccaaaatgacagggaagtgatccaattttagggcaagctctggagctcccagatctaagggctggagcactaattatctgctgacacacagcccacccccggccccagcccattccctgcctcacactcagaaaacaggatagaaagcttaaacagggtcagtctctgcaagctttgggatccttaacccttagtagcccttcagaacaagaaagcagactgggctctgagttggcagctcagaggcaga

SEQ ID NO: 433772 - DNA, 2477 bp, Homo Sapiens
  misc_feature (2191)..(2252): n is a, c, g, or t
  misc_feature (2351)..(2351): n is a, c, g, or t
ttgtacaggggaagtgggcggggttttcccgtgtatagcacgaccggggggggatttctctagctgtttttcccggggggtggtgcccagggtggtgttacctggggtttttatcggagaaagtgtggtttccccagaggcaatgacccccattgggggaactttgtggttgttataagaggtccaatccccccggattgggttattggccgggaaaaggaacccaaaggaggttttcttggaggtttgtccacaacgcgcttgggggggcgccacatagggggagaagcgctacttggggagggggtttaccacctaggtcaattagtaaaccgagttccctgccaaaggccctggagaatgggccatctaataaaatttggggggactgggacccttttcggtttaaagggtggttcttgggctgggccatgattctatatttggatctttccctcacaattattttccagccataatagtacttgaacagtccaatatccggaagggagggaaggattataagaccctcccactggtgagctcaaatcgatcataggtgacccaaaagcctttccatcatatcctgctgcactagtaatcgtggggctggaaggagtagaggatgtgctgttggtagttgatggggttccctgtccactgctgatctgccactgttttatggcttgttgagccaagaaagccatctgtagggggtttggctttattgcttgtcgtggtatgttctggtttggtggatatctcagttgttgaggatgaggaggaagaactggtccattgggtttggggctgtgattctgaaagtttatcaaacgtggaggcggttgctgttgctgcatatgctggagccgtaattgagctaggctgatctgtgttgggaacttggataactggtttgatgataaaccacttggtggctgtgaattctgttccacgacaggattctgcttaggcatttgtggctggctctctttatcctcgattactaaagaacctaagttgatgatattttgagcccagaaactaggatcacagtgaaattggatggtgttgttggtccctggggatgcatcacaccttgcacgaaggaggtgccgtaaccggtatgtaatcagtcgtttgctataaagtcatgctgtactgctgccactggaaactagcccatttagcaaaatgcatgtcatgctcccattgtttagagagtccagccacttcctgttgttgttgcataagtttcatgcgatggtcctttgcaaggctctctaactgatgcagtagagcttttccttttttatttatttctaccatcagtgtaaatatagcaactttaatatcctgttccacctgcttttgattttgatttacttcaataattctgttttggatctgatttcctgtgaattttatgtattttgttttttccatcagtttggtgattagtgtatctatgatcactttctgattctgaaaagcttcttctataaattggtatctatgctctttatgttctaacaactgacagtctcgacatgtcagtttgtcacatgtctcacagtacagcttcagctgctcctttttatgaaaaggacaaaacactggtcgctggctggtgacaccaactgcctctggagatacttcctctttctgtctgacagtgtggtcttttgtgaactttaccctctgatgagctctgatacacgtcttgcagagccattcaacacactctacacaaaaccccattggcttctgcgttgtcctcacagcttgtacatacctgatttgacttttctactgtactgctgggaacctcagtagtgtccttcacaaaaaagttatctatgatgtgtctctctgcacattcttggctgcaaactgggcaacgaatgactccaacttgggtggcgaacggcgacgagccgctgaccggcgagccgggggcagggacgggtggcggggtctcggccgagcccagcatgggcgcgggcagcatgaggtagcgctggggcgcgggcaggcagcgttggcagaaagagtgcaggcagggcagcagcttgggcgcccggctctggatgttctggtggcacacggcgcaagtgtccaacaggttgagccgggccgcctcgccgccgcgctccgagtccgggccctgccgactctcggcctcgttctnnnnnnnnnnnnnnnnnnnnnnnnnnnnnnnnnnnnnnnnnnnnnnnnnnnnnnnnnnnnnnaccgccttctccaccgccacctccattgtcctgcccttgccgccgccggggaagcgagagcgcggtctccgcccgccgcccccgacgacctcctcctcntcctgcggctgctcctcagaggccgctcggtggactcgcggcagcgccagcgagggagggaaagcaaaccgggcgggggaagcctcctcaggcccacgggatccgcctcccgagtggcgatcccgg

SEQ ID NO: 433773 - DNA, 1138 bp, Homo Sapiens
cttttttttgcacacacacgaatacaaagagccatacgaccttcggatgccggaaggtccttctgaatcccttccctgttccttaggttgcactagtcgggggttccatgctggggggcagaaggaatgctctctaccgtctgaaaccgttcatcaggaaggccttgatttgtgatgtgctaggagagcacaggatctgcaaatagaaggcacctgtctcccttctgcaggccgaggagaggccgccatggactgtgtgcttcttcatggcttgtttactcttctttcacagaccctacagcttggggcctgggctcctctgaccatcctcattgagaaaggaaagtgagtccagagaagttgatgcttcctacctgttggagcggcccagcagtgtaagcgtggttgttactgccccatccgccatgtccttcagtgccaccattctcttctcccctcccagtggcagcgaggccagatgctgctgctgcgcctgtaagagtgagactaatggaggcaacacaggctcccagggtgggaatcctcctcccagcacccccatcacagtgactggacatggcttggctgttcagagctcagagcagctcctgcatgttatctaccagcgggtcgataaggcagtgggtttggctgaagctgctctgggtcttgccagggccaacaatgagttgttaaaacgtctcccaggaggaagtgggtgacctgaggcaagggaaagtgtccatccctgatgaagatggggaaagccgggcacatagttccccacctgaggagcctgggcctctcaagaaagtcccgggggaacctttaaggctctgtctgcccgtggaaaggagtgtgacagcgtgggcacggcctgcaagtgggtgattgaggagctgccgccactgggaagcaccctcaaggggggcctgggccctttgggcttttcccgcaattcaaaaggaacttggcggctccccggggggacctttggcttgccaggaaagggggcccccctgtttcaaccttcgggggggagaataccagcggccctccgaaggggccattaacgcgtgctttcgcgtccctacactttcgaataagagagtttccattgaccacccccccgtgattt

SEQ ID NO: 433774 - DNA, 1030 bp, Homo Sapiens
tttttccccaaaggggcccattttttcccaagggcccaaggcaggcggccaattggaggccatttcctcttaagggggccggggttgggttgccaagcttgtgttcccaatttttctggtccctgtcttcgggggtttggccccgttgggattgcccatttgtgtgggcttggtgagatttgccttggcataagccggggacccagaactcgctgtactgcccctccagaggcccacgtaatcatccaccagaggattgagcaggggggcccgcctcgttggcagccagcgtgcaccctgggaggccgcatgtccctctgagttgctgggaagcccaaaggcccaggccccactgaggctgctcccagctgccgcagctcctcaatcaccacctgcacgccgctgcccacgctgtcacactcctcttccacggcagacagagccttaaaggcttccccgggactttccttgagaggcccaggctcctcaggtggggaactatgtgcccggctttccccatcttcatcagggatggacactttcccttgcctcaggtcacccacttcctcctggagacgttttaacaactcattgttggccctggcaagacccagagcagcttcagccaaacccactgccttatcgacccgctggtagataacatgcaggagctgctctgagctctgaacagccaagccatgtccagtcactgtgatgggggtgctgggaggaggattcccaccctgggagcctgtgttgcctccattagtctcactcttacaggcgcagcagcagcatctggcctcgctgccactgggaggggagaagagaatggtggcactgaaggacatggcggatggggcagtaacaaccacgcttacactgctgggccgctccaacaggtaggaagcatcaacttctctggactcactttcctttctcaatgaggatggtcagaggagcccaggccccaagctgtagggtccgaaggtcgtatggctcttcctcgtgccgaattcgccacccaggc

SEQ ID NO: 433775 - DNA, 507 bp, Homo Sapiens
tggccaattgtttggaaaatgagaggagtccccctgaatggatgattgctgtttcaggaccgggattagaggctgtgatagactgtgcagtggcaaaagtattaacaagagtggcgatgaggatggcagttggggcgtccaggctgctgactgagtgcccgcctgtcggtacagccagccaggccttcgacaagcacctgcctggaaaccgggctcgctgtcctgaaggcctggactggatgtcacgatggggagaacgggatcgcgatacccaagctggggcacaggcgagccagggacactggtttactggggtgataacacccagccctgctatcgcgatccgtttgcactgtggtcagctgtctccacgccgtggttggagagggcttgtctccgggcgccactgctggtgtgtatggtctgtcttagtgtcccctgcaagttgcatttgagattgctgggtggcagggagggaaatgggaagagaatctgttggggtcatgg

SEQ ID NO: 433776 - DNA, 2235 bp, Homo Sapiens
  misc_feature (1646)..(1667): n is a, c, g, or t
  misc_feature (1980)..(2068): n is a, c, g, or t
gctccattcacgttttttactaaagcacccacacaagtttctgtgcaatgtacaaacacaagccggccctggggctcctgcctcctctctcagacagggaggcgggaaccagacttactgatccaagccccacctgcctcccatgcaaaggccaaccccaagatcccaggcagcgacacagcatcccctctggtcccctcctggggctgctcctcagcagggggcgcaccaaagcttgccccctacaatgttgaatgaaaaaggtttcccctcccctgggagcaagggggttcccaagagctgagaattccccctggaagagacactgccccctagacatacctcccacccttccaggccctaggggactcaagggggggaaactgaggcacagagaggtggagtgacctagcccaggccactctgcgaggcagtgcaggggctggcccgaccctgacagtgactggggctgggctagggggagggggtcgggaaggagggttgactccaaagagggccacacttgaagagcctgcccaggcaggaggccccccaaagtgggttctgaaacttccaggtgtagctagggggcctagtgaagacccttggaaaacagagcccagtctcagtcctggaggtcctccacagagcagctgccagccaggctgtggtcagtcctctggcaggcaatcttcggcaccgagagcctctgtccattagtgtcagccccgagggggccacgacggaggccgcccaatgtccactgtgatattggtgaagagtggttgccgagacacctccaagacctggtaccgcactgacccaatgccgtcccgcttcatggtcagcttcgtgttttgaatcttggtaaacctctgagggttaggttcgttatgcttgtcgcggtcgtgcttgatcatgcggtagcggccgattcggatgtctgggcgtgagatcttcatcccagtcagggagatccggttgaagatgtcatcatcctcgccaccccagccccagtactcattggggaagccattgattctcagaaactgagccttactcaggcctgacacacctccaaagtagccagcatagggaagccggaagccaaacttgtccatggcaatggcaaagtggcggggttggtcgccgcagcggtataggttgcggtcatccatggggaccaggtccacatcgctgaagatgaagcagtcataggcggcatcctccttcagcgcctctaggaagcccacgttaagcagcttggcccggttgaaggtgtcctcaccatgctggttgatgacatagacgccgtagcgcagccgctgccgcctcaagatggggtgtagatagtggagccagtagcgcaggtggtgttcccggtgtctaaaggggatgatgaccgccaccgtctgggctggggtgcagtcgggcggtgtgtatcggccgcccatgagcacgcctgggttctccctctgcacccgctccaggggcatgggtgaggtgaactcgatcagcagtctgcccacaagaccaggtggcgagtcaggacagggtggcagcgtgggagccgtgggaccgggcagggcactggggacctcagggagcccggagctagaggcggtggcgttgggccgggagcagtnnnnnnnnnnnnnnnnnnnnnnagcagctgggtggagggcatgggcagggcctcgggcactgaagcggctgaagaaggccaggtgctgggcgtagacgtcaaagtagaggatgacggccacgaggaagtgcagcaggcagagaaggagcacagccttgcagacgcgctccagcgtcccccccagcagtctgctcatcccgcaggcggccactggcccgcccagtgggcccgggcatccggctgctggcccggcgctcggggctcagcaggggacgccgctccgacttgggcagggctcccggctccggcggctgcggacggttccgtcccccatnnnnnnnnnnnnnnnnnnnnnnnnnnnnnnnnnnnnnnnnnnnnnnnnnnnnnnnnnnnnnnnnnnnnnnnnnnnnnnnnnnnnnnnnngggccatggagccgagccgccccggggggcagggcggggccgggcggccgggcagacccacggaccggcggacccacggaccacagcgccgccgccatcccgggaattccggaccggtaccagctgctttttggcccccgctctcgcgggcgccccccccacacccc

SEQ ID NO: 433777 - DNA, 390 bp, Homo Sapiens
ccgctgggcgatcaaggattgggccacttggggtcaagagttggggatattgggaagttgcctctggggagtaaggggtgagggtgctggggtcacctctgagggttaggttcgttatgcttgtcgcggtcgtgcttgatcatgcggtagcggccgattcggatgtctgggcgtgagatcttcatcccagtcagggagatccggttgaagatgtcatcatcctcgccaccccagccccagtactcattggggaagccattgattctcagaaactgagccttactcaggcctgacacacctccaaagtagccagcatagggaagccggaagccaaacttgtccatggcaatggcaaagtggcggggttgatcgcccagcgtggtaccgagc

SEQ ID NO: 433778 - DNA, 1282 bp, Homo Sapiens
  misc_feature (183)..(183): n is a, c, g, or t
  misc_feature (233)..(233): n is a, c, g, or t
ggccttccgagtcgtgcgtgcggtcatgcggggtaaacgtgggctcgtaggcgggtaacttaactcgtcgggccgctggaggacgggaccaccggctatatccacagcggtatgaatgcgagagtagcagggggaatggctcagtatcgccgagatacggcattcgagttcgggatgacgganagggagaggcgtttgctagaagtataaggagtggagagcgagaggtgggnggtgcgggcgactaccatccaggtcaatgcgtcaagatgcgaccgacacccggtgcgagggccggtagagaatagcccatgaaagcgcaatagcacagactggtacgcctcgcggcccaccgagaaccggggcgtgggaatctcgggcggtattaacgctgggcggagtgggtgggatggagaatagggcgggtacggcgcgggcgggatgctgctactacacctcggcagagggcagggccacgctcagccaggtcctatgaaggtggcgggggggagcttagagcatttttttggacccggcttcgtttggggggggactccaagcgtggagggaatggtgcctgggtggggtttctggggttccagaaaaagccttgaaaggtttggttcagtttaggctcgctccaggaaccttctgtactttgatatggttagcacagaatccactgtacagtttaaagtggtccgcgtaataaaggaaagagcctccaagggaaaacagtaattttctaaactgtgagggggtttctagggtgttaaagtcagatgatgctgaaatcccatcctccagggtctccagaaacaccttctgaaactcaagcatctctggcaaacttccaaaaagtgactccatctcatcttgggtaagaaaggtctcattctgaagtggctccaagtataattcaaagaggcagctcaaatccttcacgtaggacttctctgtgtccacaagctcctggatgactttgcggaggcggtctgcatcagacaggtggcgggccagaggcctcggaggaggatcctgattctcccgcggtccttccatgccgttggcctgactgtcgttaaaactcctgcacagtgcagtgatctgctcagcactatgctgtacataaaaaggaaaagttcaaagaaacctgctccctctgggagaacggatcacatctaagtcggctgttgggagatgtgtaagacacacgttgtctctccctctcatccccaggcaatgaaaaaaatcccaaactgctcttccaagtcacattcac

SEQ ID NO: 433779 - DNA, 844 bp, Homo Sapiens
ggccgctgctgataagagcctgcgggtttgcagagaagcgcagcagcgcgcaggtcctcaccagagctctggtggccacctctgtcccgccatgctgctcaccgacagtggccaggcccacagcaccaagaggcttgggccacaaagtaaagggtcgcggagcctcgccggccgccatgtggagctgcagctggttcaacggcacagggctggtggaggagctgcctgcctgccaggacctgcagctggggctgtcactgttgtcgctgctgggcctggtggtgggcgtgccagtgggcctgtgctacaacgccctgctggtgctggccaacctacacagcaaggccagcatgaccatgccggacgtgtactttgtcaacatggcagtggcaggcctggtgctcagcgccctggcccctgtgcacctgctcggccccccgagctcccggtgggcgctgtggagtgtgggcggcgaagtccacgtggcactgcagatccccttcaatgtgtcctcactggtggccatgtactccaccgccctgctgagcctcgaccactacatcgagcgtgcactgccgcggacctacatggccagcgtgtacaacacgcggcacgtgtgcggcttcgtgtggggtggcgcgctgctgaccagcttctcctcgctgctcttctacatctgcagccatgtgtccacccgcgcgctagagtgcgccaagatgcagaacgcagaagctgccgacgccacgctggtgttcatcgggctacgtggttgccagcactgggcaccctctacgcgctggtgctactctacccgcgtccgcagggaggacacgcccctggaccg

SEQ ID NO: 433780 - DNA, 1853 bp, Homo Sapiens
ctttctttggtttatttatattctttagttttgtgcacactttgaggaattgatttaggacaggttcatactgaaaaaaacctcagctgatgttatctgtgggggctggggagggtgtcagggacatttggtggctgaggagagcgcgtcactgctattgaatagctccatttaacaccagccatgtctccgcgtctcaggcacttctgtgaaatgttctcagaaccctgtggtgactgcggcacacccggcaggccttgctagcacacgccgcccactggcagggcccggccaccctggctgttgccattctttcgtagggttttgttcattttactatttgtcatttttctaggaaacatctgtttttgtaaaacaaacaagggggaatcaagtattttaaccacaaagtataaatactggctctaagctttcatcacttcattgacaaactgaatgctgaggaggctgaaggcgaggaggcttttgcagatgtggaccttgagctgcgtgtttgggagacgcacaggcctcggggagactcaagccagatgccagccacggggaccacagccttggcccaagagtggcatttgtgggaaaaaggaaacttcaagaaaaacacccctcctgcttctcttccagcagctcgtctccttctggaaggatgtggggagcgtccagggtaactaagtgctctgcgtccaccagagtcacgtctccccaggagggctgggccgcctacgccagcacctgctgcacccccatgtggtccggggagcagtgccggtccccgcagggcagctttttcatcagccgttggagcttgctggggaagctctggttcatgtagcggtagagaagtggtgtcacaaagctgctggagaaggccaggagtttggagaaatccttcacaaagtgcagtagccccaggtagtgtgcgtccacgggcttccctcgcgagatgatgaccgtgtgccccagcaggatcagatagtgtggcgtccagagcccaaactgcgtgcacacggtggccaccagcagcctgtgtgccgagggctccagccggcccgtgtcccggtccaggggcgtgtcctccctgcggacgcgggagagtagcaccagcgcgtagagggtggccagtgctggcaccacgtagccgatgaacaccagcgtggcgtcggcagcttctgcgttctgcatcttggcgcactctagcgctgcgggtggacacatggctgcagatgtagaagagcagcgaggagaagctggttcagcagcgcgccaccccacacgaagccgcacacgtgccgcgtgttgtacacgctggccatgtaggtccgcggcagtgcacgctcgatgtagtggtcgaggctcagcagtgcggtggagtacatggccaccagtgaggacacattgaaggggatctgcagtgccacgtggacttcgccgcccacactccacagcgcccaccgggagctcggggggccgagcaggtgcacaggggccagggcgctgagcaccaggcctgccactgccatgttgacaaagtacacgtccggcatggtcatgctggccttgctgtgtaggttggccagcaccagcagggcgttgtagcacaggcccactggcacgcccaccaccaggcccagcagcgacaacagtgacagccccagctgcaggtcctggcaggcaggcagctcctccaccagccctgtgccgttgaaccagctgcagctctcacatggcggccggcgaggctccagcgacccggcttgctgggcggcggccggcgcagtcgccgccaggagcgggcagctcgggctggcggaggcggcggggctcacggcgcg

SEQ ID NO: 433781 - DNA, 947 bp, Homo Sapiens
  misc_feature (136)..(150): n is a, c, g, or t
  misc_feature (154)..(154): n is a, c, g, or t
  misc_feature (159)..(169): n is a, c, g, or t
  misc_feature (171)..(173): n is a, c, g, or t
  misc_feature (178)..(179): n is a, c, g, or t
  misc_feature (181)..(182): n is a, c, g, or t
  misc_feature (187)..(257): n is a, c, g, or t
  misc_feature (259)..(259): n is a, c, g, or t
  misc_feature (262)..(262): n is a, c, g, or t
  misc_feature (264)..(279): n is a, c, g, or t
  misc_feature (281)..(287): n is a, c, g, or t
  misc_feature (622)..(622): n is a, c, g, or t
gtgggggaggtcacacacgcccttgtttttggccccgggggtttttcttttgggaacacggggattggccggttttttcttttctttctgtggggccccgcccgccccgaagaaagggtgtgagaaaaattttttnnnnnnnnnnnnnnnccgnccaannnnnnnnnnngnnnggggnngnntgggnnnnnnnnnnnnnnnnnnnnnnnnnnnnnnnnnnnnnnnnnnnnnnnnnnnnnnnnnnnnnnnnnnnnnnngnggngnnnnnnnnnnnnnnnntnnnnnnnggccacctaaaacactatattttatttttaacttttctattgttttggtcacatgtaaagaataaaaatgaaaacacactactgtgtcacatcaagaaataactttatccaaaaggaattcaaatgtaagatatatttagcatcaattcatatattagtaacttacacatgtattgtcaagtatgacatccataaaagcacaaaacagtttctaacacgttccatcaaacttctggcgtactttatgtgtcatttccatgactactaaccacatatatagagactaggggatacttagtgaagacagctttccaggaagtttacaaaattgaagnaaaaaaaagtatgtccaaatatggcataagtagcaatggggccctgaatttactttggaaagattgcctaaggcaccactataatgaacagttgtaaatctctgatcagacttcaaatttttctggtcttaaaattgcaattctaaccacaaggttaggtgactagattagctggtatattatttcctctgtgccagcatctgtaagaaatattacatctatcctgggcaccgtcactccgatatatatttgtaatagatctgattatatgaggtgtgaaagtcaatatgggtaatttttctttaaatgcattttaagaacaaac

SEQ ID NO: 433782 - DNA, 2738 bp, Homo Sapiens
  misc_feature (125)..(185): n is a, c, g, or t
  misc_feature (218)..(289): n is a, c, g, or t
cgcggcggcgggggatcagcggcactcagggcgggggcggcacacaattcggtaacggcggaaggggggctacaaataacatgggcgggggcgaccggttcaccagagcggatacacgggatatnnnnnnnnnnnnnnnnnnnnnnnnnnnnnnnnnnnnnnnnnnnnnnnnnnnnnnnnnnnnntttgggtcgtagcggcgtggatttggaggggcnnnnnnnnnnnnnnnnnnnnnnnnnnnnnnnnnnnnnnnnnnnnnnnnnnnnnnnnnnnnnnnnnnnnnnnntaagccgtacccgggtgcccgggcgcgacgacctgaaatcccgttacgccagttgggaggccttcccccaagagaggggactggcttagtaagacctggttcaggtcagtcggaaatcgggtttgccgggccccccgggccactcagagtggcaaccaccctttcggagtgctgctctcttgatccccacttagcatttttgtctccggggttgctcacatggaggactgcttggtgagagggccggtagcactgaaaagggcactggacgatctgcttttagcattcactcccacccccaacctccctggccctccctgcagctgcgatccctgtgggtcatttccctggcgctttgtttgcatggagaacagcgggtgggtacccgaagtcccaggaagctctgagtcactgacaatcattagtaatcaaagaggcaggccgtgtggcccaggagttgccaaagtctcaaagtgagggagaggccagcctgtctaccgagtgggaagatgtgtgctgactcaggccacctcctgagacctgggaaaagccaaaagctaccccagcctcagtgctaaaatgtttggaagagtttctgatccccaccgtaactctagcaaccagctaccctgctactcctcattgcgatctaaacttatgtgttcatttaggagcaagtttctccccggcagctgacttccctgaagtgttaagtcccaatctttcacccttttctaatttttttccctgctgccaccctgtggtacatgccccccgccacccccagcttcgctgtccctggacaggtgaagttggcacagtttacaggacagacagatcctatcacgatggccagccagctcctggggactccttaggtatttgatagacacggagacccactgcagtcgctcttcctctgcctaactgaaatgaaagctcctgaggtctgtcctccagcccagtttctttgggcttcagggttgtgcgaaaatgactgctacaaggggtagaaattgacagggagacactgagggggccaggcctgctataggagaaggtgttatttcggggtgcctgcccccagctgtttcatcttctcttctgaggctttgtctggaagcaggacctccacagtgaaattgaccttcttggcatgaatgaagctgtaggtgttgtcaaaccgcaggacatagatgccaggatcactgcaggtgagggtcccatcttcagggaccaggtgggagttgtacctctggttgggcagcacctctgtcatctcccctgcccgctgcctctctcccatcttggtcttcaggaaaatcccaaaaccaacatccgctccatctgacataaactgccacctgaggacacagccagggcaagaggatctcatactccacttggtggaaggagccacgggaaatctgcacgctgtgttcatactgctgtttcacctggtctcgcacataatacttcctggggatgtcacccccgtagttgatcttggatttgcacttggggtttccatcagggtcagtcatggtgcccccatactccacaggcacctggtcagggctgatatgtttcagtaaaacctccttccaatttgctcccaggaccatgatcttcttacgagtgtcctcactcaggaagggtttgatgaggttataggccacaggaaacagtttgggggctttaacaacaataagacgcttcagtgtttcgggataattttcctcaaacatgcagagaaactctccataggcctccacagcaggcttccagagatgcttgaggccaagcccctcgcagtcataaattatggtgatggtctccaccttcctccccaactttgtggtctggtgggcacactcttgcagaagcagctcacactcccgcatcttggtcctcagcaggtcctgtttggaggctgagaacagcagacccttggcatccagaggtccaattatgtcgtaccagactgggcagccatccaggtcatagccacacataccccctgacagatactgttggatcacctctggaggctgccagctaatgatgttgtcaatgtccttttgctttcggaactccacatgcttccggagcatggcctccgacttctgcaggtcgaagcttctggctcggagccaacgcaggagaaaatagtcatctggattcggcagggccggcagcacatcctggacattctcccgaaacttggccaatgcctccttctgcctggggctcagatcgccgactctgccgctcatcgtggctcaaccgcggggatggggtttgggggcgggaggcggcgggtgcggcagctgatggagcacagactcgtcctcgccgccacccggagtaaagtcccagccttttgcccgggccgcggagctggcagccaagccccgcctcttaaaggatcccgagaggcggagtaggg

SEQ ID NO: 433783 - DNA, 1157 bp, Homo Sapiens
  misc_feature (775)..(872): n is a, c, g, or t
cttgataatactcattcacttagatgttcagtctatggatgtcagttccttctaacttgatatccacagcaactaatggacaaatggatgaatgggggaactcttcaggaagcaagtaatgcgtgctgttcagcaagcctacatgaaccattcagtaagaaatgttttaatagtgggctaaaagaagaaggaatcaattggtgaaagcaaaatgtataagatgagcttcattattatttaaagaactacagaatcaacatttgaaatacaatttcagattggtggctgttagattgaaataacatcaccattagctcaatctgatatgccaagggaaatacaaatgtgtgcctaaaagtgcatccttaaaccccaaaaatcccttgccctgtcactcagacctacaaagttggcatgtttgacccaaaattgatcccaaagttttttaatcactcacaactaaaaattattagaactaagctggtcaggatgaaaatataaattaaaaaaatctgttctatgtgtcttaaattattctttggtcaaatgatgtgatttttgagagatctgaaaatataaacctatttctcatttccaaatacaaggttataagtatgtacagcaaggtagcattttcttactagaaaacaaggctttcaggtaccgtatcattccattaacattgtacacttttatagtccctttcctcccatggctacaaagtgctggacatacagagaatacaggaaagaataaaggagcaaatgaatagagnnnnnnnnnnnnnnnnnnnnnnnnnnnnnnnnnnnnnnnnnnnnnnnnnnnnnnnnnnnnnnnnnnnnnnnnnnnnnnnnnnnnnnnnnnnnnnnnnnctggcaagttacaaaagcatggctgggaacaaagaaaaagaaatggaagatcagtcctggctcccagccctagacactaaactttatttcaaaatattaaaaaataaaaatagcccacaattgccttttaaatgttggaatttagaaaaacctttaggtattcctcttaaacatgtgcctttctttcatattcctgctaagtgaagaacggatagatgactaaatggtattccttactctctctaactgcaattcccatgatagatcagatgtatcagcatttca

SEQ ID NO: 433784 - DNA, 983 bp, Homo Sapiens
gatgaggtggaggatagggagagtagtaagagggagaaagacacctttagtttcctccttgcattgaatttcctcagctgctctactgtttctggaagatgaatcttgtaggcgtaacgatcccgctccttaagccatgggtgattcagtgcttcataaacagtgatcctttcagctggatccagcatcagcatgcgacgtactaggtctttggcactttcagagatatggctccactgccttggattcatcttatattttcctttaataatgccttcaaacaatctttccttggttccgtaaaaaggcaaacaaccactgagcaggataaaaaggatcacaccgcacccccagacgtctacaggctttccgtaaggctctcttttgaccacttctggtgccataaaatgaggtgttccaacacgtcctccagctacaagtccagactcccctaattgaatagctaccccaaagcctccaagtttaacaggtgccgagttttcttttgaggcaaggagaacacagtggggcttcacatccctgtgaattatgttattatcatggcagtagcgtagagcttccagtatctgtctcatataatggctggctacagcttcactgtacacaaaaccagcgtcagctcgctttacgatttcaaaaacacagatctgctccatccataaattcgaaaaccatgtaaagcattccatctgagctatatgtctccaataactctacaatgtgtggatgtttcagcatatgacagatactggcttcccgctttagatcttctgtacttaaccctggacttgatgtgaacttggctacatcaacaatttttacagcaaattgttgcccagtttctctgttgatacatcgtcgtacaacactgaagggaccctttccgatcacctcgcacagctcgtacacatcctcgaacagcacgtcgtcgtcggccatggtccggaggggatagcggccgc

SEQ ID NO: 433785 - DNA, 1947 bp, Homo Sapiens
  misc_feature (1033)..(1041): n is a, c, g, or t
  misc_feature (1098)..(1098): n is a, c, g, or t
gcacccagcctaagttgctcttttgaatcacctaattgcttgtagaggagcaatggaggggcacacagagggggtaagcacagagaacattccaagaaaatgcaggaccctttctctgaggcacaagctatggtaacagggaaccccacccaggggagaagccagtacagaggccccagctagagtctgaatgaggacgatccctctccgctgtcctggggagcctgtggttcaccttgcagaactagatggtcccaggactctgactctgcacttctggctgttgtgagcctctttctacgtgtgggtgcttctgctgggctcctgggtgttggccatgggagggtccccttctgcctgcatcccaagacaaccagtctctgggagcttcaaccggggccttccaaggagacttgagttcagtcttaaagaagggggcaggccttggggacctggcacccctgaaatctgggcagagagagagcagtgggcgggaggttgagcatgttccactctgaggacagtcagggacctgtggaagccagagctggcccaggccacaccatgacgggcatcttgagaaacagcctctgcagattcagggccttgtgtaaatgtgccctggaggtgccacccagtcacagaaggcagtacagtgtggcagaaggcagtacagtctggctctagagcccaacttcccagattcaaatcctagctcatcactttcatgctgtgtgacctcaggaaggcaacttcactcctctgagcctctggttcctcatctgtgcactggggcgatgatgctgtgtggtgattgtaaggagttagtgtgcatgcaagtctagtggcacctggacacaaaacttaagcagtgaggaccggcatctttttcccctttccaaactgctaagacggaccccggctgaggcaggagggagagtgcagctcgctgtggccagaaatccagcctttgctccttaatcagacactaatgggcatatctatcttcattgttatttgagagatgctggtnnnnnnnnngctgatgaagaaaccataggagaccaagatggggcaaccccgaggaagtcactgtanatctgcaatgcagagtggtcgaggcctccaatgccctggaccatctactgctctgacactgaaaagggagagaggcttgaaaactgaatttaaccgacatttatgttagggctggaggctgaggggcctccatagggaaaactgcagccagaagcacccggtgcctgggatgctggagtcctcttcagggctagaagccatcctttttcctcctgccttctcctcccttcaccgcagcaaacacagaaccctgtctcccgactgccatctccatgggccatttggaggccagggagctgcctcctgtatctttacaggggtcaggccctcctagggatgtggggccagagggaagatttgagcatgtggggcagagtgactccatgaggacgtcaagcaaccccgccatggctctgggcttctcgccttgggttttctcatggagacatccatctgttaaagatcttgcttatggggcagacctggggtttgatggagagagacttgctggagacagagccattcacgcacaccgcggctaactccccagcccagcctccaccctgccagtgattccaggaattccagacaggtggtccatgtcccttctccctcattgtcaagggtcaggttcttttgcactcgtgacctccccttaagctgatgcactggcagatgatatacggtggcagtgacagatgtgatcggtaagaactggcagccatgagcaggcactgtctggagccaggctagtaatcctattaacatggcggcttccagggaagagtgccgcttctggacaactaagttgtccctttgcctgtcatcaagaccagtagggccaccgtg

SEQ ID NO: 433786 - DNA, 1803 bp, Homo Sapiens
  misc_feature (1685)..(1685): n is a, c, g, or t
agcggggcaggctgtgcggcccggctctccggcggcagcgagtgccacgtcccaagtgctacgcggaggattagagcaggcggtgcgctgggggcgggagcagcgcggagcccggctcggccacaccgatcgcccgccgccatgggctcctcgcaaagcgtcgagatcccgggcgggggcaccgagggctaccacgttctgcgggtacaagaaaattccccaggacacagagctggtttggagcctttctttgattttattgtttctattaatggttcaagattaaataaagacaatgacactcttaaggatctgctgaaagcaaacgttgaaaagcctgtaaagatgcttatctatagcagcaaaacattggaactgcgagagacctcagtcacaccaagtaacctgtggggcggccagggcttattgggagtgagcattcgtttctgcagctttgatggggcaaatgaaaatgtttggcatgtgctggaggtggaatcaaattctcctgcagcactggcaggtcttagaccacacagtgattatataattggagcagatacagtcatgaatgagtctgaagatctattcagccttatcgaaacacatgaagcaaaaccattgaaactgtatgtgtacaacacagacactgataactgtcgagaagtgattattacaccaaattctgcatggggtggagaaggcagcctaggatgtggcattggatatggttatttgcatcgaatacctacacgcccatttgaggaaggaaagaaaatttctcttccaggacaaatggctggtacacctattacacctcttaaagatgggtttacagaggtccagctgtcctcagttaatcccccgtctttgtcaccaccaggaactacaggaattgaacagagtctgactggactttctattagctcaactccaccagctgtcagtagtgttctcagtacaggtgtaccaacagtaccgttattgccaccacaagtaaaccagtccctcacttctgtgccaccaatgaatccagctactacattaccaggtctgatgcctttaccagcaggactgcccaacctccccaacctcaacctcaacctcccagcaccacacatcatgccaggggttggcttaccagaacttgtaaacccaggtctgccacctcttccttccatgcctccccgaaacttacctgggcattgcacctcttccccctggccatccgagttcctcccgtcattccccttggttccagagagctcttctgcagcaagctcaggagagctgctgtcttccctcccgcccaccagcaacgcaccctctgaccctgccacaactactgcaaaggcagacgctgcctcctcactcactgtggatgtgacgccccccactgccaaggcccccaccaccgttgaggacagagtcggcgactccaccccagtcagcgagaagcctgtttctgcggctgtggatgccaatgcttctgagtcaccttaactttgaaccattctttggaattggcgtggtatatttaaccacgggagcgtgtctggaaacgcaaactatcattaatttcatactagtttgtaccgtatctgtaggcatcctgtaaataattccaaggggaaaactaaacgaggacgtgggttgtatcctgccaggttgagtggggctcacancgctagggtgagatgtcagaaagcgcttgtattttaaacaaccaaaaagaattgtaaggggtggctttgctgcccaggcttgcactgccgtttccctgggggtgtgcatcttcgggaa

SEQ ID NO: 433787 - DNA, 993 bp, Homo Sapiens
  misc_feature (319)..(319): n is a, c, g, or t
ccaaaaaccggtactgttgggttcccccctggtatctgggacccctttctgaccaagtggggggaatttgagctaatggaaaagttccagtcaggactctggttcaattccctgaagttcttgggtggtggcaaaggcgggggggattaacctgagggccaggtgggccttctgtaaaccccatctttaaagaggtgtaataggtgtaccagccatttgtcctggaagagaaattttctttccttcctcaaatgggcgtgtaggtattcgatgcaaattcgcatatccaatgccacatcctaggctgccttctccaccnccatgcagaatttggtgtaataatcacttctcgacagttatcagtgtctgtgttgtacacatacagtttcaatggttttgcttcatgtgtttcgataaggctgaatagatcttcagactcattcatgactgtatctgctccaattatataatcactgtgtggtctaagacctgccagtgctgcaggagaattttgattccaccctccagcacatgccaaacattgttcatttgccccatcaaagctgcagaaacgaatgctcactcccaataagccctggccgccccacaggttacttggtgtgactgaggtctctcgcagttccaatgttttgctgctatagataagcatctttacaggcttttcaacgtttgctttcagcagatccttaagagtgtcattgtctttatttaatcttgaaccattaatagaaacaataaaatcaaagaaaggctcccaaccagctctgtgtcctggggaattttcttgtacccgcagaacgtggtagccctcggtgcccccgcccgggatctcgacgctttgcgaggagcccatggcggcgggcgatcggtgtggccgagccgggctccgcgctgctcccgcccccagcgcaccgcctgctctaatcctccgcgtagcacttgggaccctcgtgccgaattcgccacccaggc

SEQ ID NO: 433788 - DNA, 1108 bp, Homo Sapiens
  misc_feature (459)..(459): n is a, c, g, or t
attggggaaagttttggggccaattcctctggtgtgttaaaagggccattcagggccctgggataaagataagtaggccgggaatttcattgggggcccaccgaaaggtgaagggacgtggttttactttgggggtggcaaataacccggtactttgtggtgtaccccctgtactggaggacccttaccttgccagcttggtgggaattggagttaattagaaaagtcccagtccaggcttctggttcaattccctgtagttccctggtggtgacaaaagacgggggattaactgaggaccagctgggccctctgtaaacccatctttaagaggtgtaataggtgtaccagcccatttgtcctgaaggagaaattttctttcctttcctcaaatgggcgtgtaggtattcgatgcaaataaccatatccaatgccacatcctaggctgccttctccacnccatgcagaatttggtgtaataatcacttctcgacagttatcagtgtctgtgttgtacacatacagtttcaatggttttgcttcatgtgtttcgataaggctgaatagatcttcagactcattcatgactgtatctgctccaattatataatcactgtgtggtctaagacctgccagtgctgcaggagaatttgattccacctccagcacatgccaaacattttcatttgccccatccaaagctgcagaaacgaaatgctcactcccaataaagccctgcgccgccccacaggttactttgtgtggactgaggtctctccgcaggttccaatgttttgctgctatagataagcatctttacaggcttttcaacgtttgctttcagcagatccttaagagtgtcattgtctttatttaatcttgaaccattaatagaaacaataaaatcaaagaaaggctccaaaccagctctgtgtcctggggaattttcttgtacccgcagaacgtggtagccctcggtgcccccgcccgggatctcgacgctttgcgaggagcccatggcggcgggcgatcggtgtggccgagccgggctccgcgctgctcccgcccccagcctcgtgccgaattcgccacccaggcctcgctactt

SEQ ID NO: 433789 - DNA, 989 bp, Homo Sapiens
  misc_feature (958)..(958): n is a, c, g, or t
  misc_feature (969)..(969): n is a, c, g, or t
  misc_feature (977)..(977): n is a, c, g, or t
cttatttcaaaaacagggatatctgcatttaatttcattcagtaaatcaattccagttaacttaccatctcttaaaaatgggagaaagcaaacataggacgtgaaaagttaaagatgcgtgacatactggagagtaataagacatactggagagtagtaagtgcacacgtggcaattaagggttgtaatttagatgtaacacaagaaaaaaagtaaaattactgtactttattgctgtatctatgctttcccagtatagctataatactacaaggagccacagagtgccaccttctggtttaaaactgtggcaccttatttcttttgaaatgtcactttataaggtgtatgtagaaagcaacagcagcagttacaaaatgttgtctgagtgattctgagagctcaaaacaaggatccgcgtataggctgaagaaaaagacgttcagttaacagtgcgcgctgtagaactttaacacaagtcttcaggtggaattcctgtgtaaaccttagtagagatgcgactcacggagaccaaaagtaaaaatctctttaccgtttacagtttagtgaggtggtctgcattctcgcaaacgacttacaaagtacaagaaatgttgcgtgtgagtattaggcatagaatatttcattttcttacggaaggagcagcaggggacaggaaacctagtggacgccccgccaccacctttcccgaagatgcacacccccaggaacggcagtgcaagcctggcagcaagccacccttacaattctttttggttgtttaaaatacaagcgctttctgacatctcaccctagcgtgtgagccccactcaacctggcaggatacaacccacgtcctcgtttagttttccccttgggatttttttacagggatgcctacagatacgggtacaaacttgtttggaatttaatgatagttttgcgttttccagacaangttccctgggnttaaattntaccccgggcat

SEQ ID NO: 433790 - DNA, 911 bp, Homo Sapiens
gcttttcttctgcttgcctctcgtacctttgcctccattcgtgccctctgttgtgttctctgcttccttccctgatcactcgtttgcttttgtctctgtcggtttagtccatctgataacggtcagagtcacttgtctgttcggtgagtccatgttatatgagctgggtccagcctcaagatctggaacatgattcagtgaggaagacacggatgcactattaggaagtggagctgtcatctgataaaggtcagagtcacttggttgttggtgagtcccatttatatgagctgggtccagcctcaagatctggaacatgattcagtgaggaagacacggatgcactattaggaagtggagctgtcatttcatagtaaggaagctgcagcactggattatacacatgccactgcatcttctgaaagagaaaatattcttgaggtaaagaagtattattaattggaaaatactgcatgggaaaggaagatctgcccaccaacatttcttcattcctgtagttgtgtgaatttatcttaacacagctctcaaaactttggttagctggttcagaagagcgagaactcccaaatcgatactgcacgttaattggtcttccatataaacgaattccattcagcaaagctatggcataagacaccgattctgggtgtttaaagcagacaaatccaaaagactttggctttccttctctgtctttgcatatagtcactttggttagtggccccgcctataagaaactgaaggaacagctcgtacagaatctcttcccgaactcgggcctctaaattcccaacaaacacggtcctgtcggcctcctcctgagcagggaacatcctccggtctcggccgtagaatgaagtaggagctgagaccccgccccttctccggct

SEQ ID NO: 433791 - DNA, 918 bp, Homo Sapiens
  misc_feature (833)..(869): n is a, c, g, or t
ttatttggatggataacatcttattgtgttggcataagagaactaagatcagtgtaggtaagtttcatttgtaggtaatactagtatcttttcttcttcttagactttcggaacttttggctacattcgttgcctctgttgttgtctgtgctactatcactatcacttgtttgcttttgtctctttcgtttattcatctgataaaggtcagagtcacttggttgttggtgagtccatttatatgagctgggtccagcctcaagatctggaacatgattcagtgaggaagacacggatgcactattaggaagtggagctgtcatctgataaaggtcagagtcacttggttgttggtgagtccatttatatgagctgggtccagcctcaagatctggaacatgattcagtgaggaagacacggatgcactattaggaagtggagctgtcatttcatagtaaggaagctgcagcactggattatacacatgccactgcatcttctgaaagagaaaatattcttgaggtaaagaagtattattaattggaaaatactgcatgggaaaggaagatctgcccaccaccatttcttcattcctgtagttgtgtgaatttatcttaacacagctctcaaaactttggttagctggttcagaagagcgagaactccctgaaggaacagctcgtacagaatctcttcccgaactcgggcctctaaattcccaacaaacacggtcctgtcggcctcctcctgagcagggaacatcctccggtctcggccgtagaatgaagaagccgctctcgacgaattcgagctcggccgatttggcctgatnnnnnnnnnnnnnnnnnnnnnnnnnnnnnnnnnnnnncgccgccaccgcgataactccgattcccctatagtgagtctatacatca

SEQ ID NO: 433792 - DNA, 1517 bp, Homo Sapiens
  misc_feature (1426)..(1462): n is a, c, g, or t
ttctaattcgcccttgttctcctgtttacgtaaagcttgattagccagctttaccccctgacaggccagcacatgtgaacacttttagtgtgcctgtttttccggcttttttctggattcacatcttttctctgtcttcattcatgtacagaaagaattccatgagaggaaaagcctaaatgcataaggggttcttctattttaaggttggtcaaaccatacgagccagtgcacaccttaacacttgtcaacaactttacttgttaaaaagctgaatatctttttcaaacagtactgcagcctctggttcaggggcttgctgtatcaatcttgtagaaactctccttgcatacattaatacctgccaaatatgattatggttccgcctccattttgcaaatgctctcttcacatccagctcacctgaggtgggatcaactagcgggtgaaagacaggaatatcgaacaccaagcgtggacagtcaccatctggatagttatcagggatgtaaactgtaaacttaaatacgccatcttggtaaagtccatgccgtatgaatattactccaaaccacattaatgcagagcgataagatggctgcacatagacgcctggtagcttctgcttcacaaccaaggtaaattctgcaagaagagagtattccaggtagaagggtccataggacgcatgcgtgccatttgttgactgtgctgctggggcaggagatgtaggcttagttatgggcaaagcatttttgggaatagaaggcagctgtttctttggtgcagttcgtggaggactggttttcacgtcccctgttaatgtcttctcttcaccttcagatcgtttgcgtacagagcttgtagacatgctccagaaagggttcataacgtgtattccaaacgaagaaagtcagtggtgtatcatccaatcttctgtcttcggcattcactttacctgtctcgaggtgatgcaaggcgggggccctgtcctggcctcgcagctagctcgatgctggcccgggagccgcgggcccctccagtgggggggctctggggcccggcgacgcccccttaaccagagctcgggttcgggacccggccggggagggcgggcacgggccggggcgagccagctgggcccccctctccctcgggccgggccagcccagctccagccgcagtccccagcagcagtcccgggctgcgaggcggccagcgcagcaggtgcctgcaaacgcgcacaggtgcccggccccgcctccgtgtcccactgcggccgccgtcgccgagtcgcgagcgccccagtgccttcaatgcagagctcctggctgccaagcgccgccgcggcccgacagcatctcccgccgcagcgccagccccgcccgctctcgacgaattcgagctcggccgatttggcctgatnnnnnnnnnnnnnnnnnnnnnnnnnnnnnnnnnnnnncggccgccaccgcgtgagctccagttcgcccatatgatctatattccggcccggc

SEQ ID NO: 433793 - DNA, 1809 bp, Homo Sapiens
ggcaaagaacaatcatttattggtttattttgtctctactaaacacattagtcatttatcatttaaataccggacttcattagaaaccgttgtaacactttttctccctcctgccataaaaatacagtaagtaatttgcttaaaaaaaacaacacaacactaggaacaagtgttctggtttcttctcactgaactaaagacatttctcagtgatttcagtttgtaaatcagtaagacagtgcaggctacaaatcagtgcaggctgaagactgagattcaaatgatcttccacttaaaagtgctgagctatggaacctgctctctctatacctctccatttcctaacatatatacaactgaaaccactgatttataaactattaagtagtgctgaattctgtctgctctattagtttaaatgaatgcaacttacctttagcattatattcagaaaaatacttacttaagcctcaaggtccccaataatttggagtactgaactagataaccaccctaagacacttctgacagaagtaatgcattacttagagacaggtttccaaaccctgctgttagaacctatgcatacatggaaaacactggcagtcagtcattgttcacacagttttactcttcaggcagtcctctgccattggtcagcttgaactaggccagagtctagcaggaaagtgcatggtgcaccagattcaccatctcttaagtcgccactgttttctcttctttactgaaaggctgtactgagccaggctttacccatgacaggccagcaacatgaacacttttattgtgctgttcttcaggcttctttttctgagtcagcatcttttctctggcttcatcatgtacagaaggattccatggagaaaagctaattgcataggggtcttctattttaggttggtcaaacaaacgagcagtgcacaccttaacactgtcaacaactttacttttaaaaagctgaatatctttttcatacagtactgcagcctctgggttcagggggcttgctgtatcaatcttgtagaaaactctccttgcatacattaatacctgccaaatatgattatggttccgcctccattttgcaaatgctctcttcacatccagctcacctgaggtgggatcaactagcgggtgaaagacaggaatatcgaacaccaagcgtggacagtcaccatctggatagttatcagggatgtaaactgtaaacttaaatacgccatcttggtaaagtccatgccgtatgaatattactccaaaccacattaatgcagagcgataagatggctgcacatagacgcctggtagcttctgcttcacaaccaaggtaaattctgcaagaagagagtattccaggtagaagggtccataggacgcatgcgtgccatttgttgactgtgctgctggggcaggagatgtaggcttagttatgggcaaagcatttttgggaatagaaggcagctgtttctttggtgcagttcgtggaggactggttttcacgtcccctgttaatgtcttctcttcaccttcagatcgtttgcgtacagagcttgtagacatgctccagaaagggttcataacgtgtattccaaacaaagaaagtcagtggtgtatcatccaaatcttctgtcttcggcattcactttaccccagtgccttcaatgcagagctcctggctgccaagcgccgccgcggcccgacagcatctcccgccgcagcgccagccctgcccctgcttgatccccgccccgccccaccccgccctgacctgccctgccctcggcagcg

SEQ ID NO: 433794 - DNA, 1594 bp, Homo Sapiens
  misc_feature (1529)..(1529): n is a, c, g, or t
aatttataaatgctttattgaaaaatacacttatcttcatataaaattacagtagcagtatcttgagaagttttataaatatttttgcagaacactattctaattgaacaatgtaagttccatatttctctcagcaatatgaagttacctagtaactttgtttatactgattcaatttacaattgaattttctccctaataagattattaatttgacttgaaaactgctggaacaatagtgattaataaagatatgtatagataattcagctgttaaataacattttctaatttgtataaatggtactatggtactaataaaaacctaaattctccaaccaatttttttaaactgccaggaacaccccaaaaatatttttaaatatatcaccttaatagacatttcttttagataactccctcctaaaggaagaggtcataagttttcatattaatcccctcaattcaacttgattaaaatcttttcttagctggttgatccctatataacaaaaaactggagaatttaaaacattcccaaaaggtggctataggggttttaacattttaaaaaaatataaaagcattaaagaaaatattggatgtttagcctggaagttttgtatttaataaagttcacattgtagaaagtgctatcacaaatatacagcaaaatctgggttacaaaatcatgcattttacagccctaaagtgcctccacttatacaggttcactcagacattgcacacccgaacaatcaaggacttttcacactgcaccacaccgaatgggggagagggaagatgtgcacaaagggaacgggagacgagggctaatgacctaggacctccaaacctgggtgtgctctcctttgtcaggaatgcaaaaaatcacacactcctaccaggtgttttaggacaaaatacctaatttttgttttgctttttatgaggactacagctgaccacaaaacaggtaggattgaacttgaaacacagttcttctgttggagtacgtcaacagaagcctcctatgctcacgtttgggtacacatcattttcttgcagtatttctaaaagctttgccagagtcaaaaatccaagtttggattctaagcagccttgacagtaatcactgaatggtagggaaaaaaagacagttgggatgaattaaaatgttctaaggacactggaaggagttaagtcccatttctcaccaaaatgtcccctcatgttactaacaggctgtaactcatcagctggattaaggaaaaaagctccataatctagatgcattaaaggctgctgctaaacagattttgtgaagagtttaatacaagagactaacctcagtgggaaccacggtcattagctacatcttggagacggcgtaataaggcagaatgattttctgggcaaattctttttgcaggtgattcacttccatcttccaaaagaattcctctctttttagtaggagtttctcctgtgcgtatcatactattaatttctctcagtctctttgaagnctgttgctaaagtaatagaaaatcttttctcgagataaagcattgtttcatttttatgtgggaaa

SEQ ID NO: 433795 - DNA, 925 bp, Homo Sapiens
  misc_feature (48)..(56): n is a, c, g, or t
cggagcgacgcaccacctggctgtttgtagcactgaggaactgtggcnnnnnnnnncgtctggagacccaagagacccagcgagcgtgtcgctccctcctcgggtccgaggacctagcctaggaaccttctgcccggggtagtgtctggtgatgaggcgagagttttgctgggacgcctactccaaagcggccgggagtcgcgcttcttccccactcccgagacaggatagagattccttctggccatcagatgtctttctgcttgactgaactgcacctgtggtctttgaggaataccttacacattgcggatagagacattgggatctaccagtattatgacaagaaagatccaccagcgacagagcatggtaacttagaaaagaagcagaagctggcagagtcacgagattatccttggacgctcaaaaacagacgcccagaaaaactccgagactcgctcaaagagttggaggagctgatgcaaaacagtcggtgtgtgctgagcaaatggaagaacaaatatgtctgtcagctccttttggttcaggtgtgctggtgtctctaagcctttctgggccgcagctggagaaagtggtgattgacagaagcctggtggggaagctcatctcagacaccatcagtgaatgctcttctcacagacagttttatcatcttatcatttttggcacaaaacaaactatgttttattcagtttaccaagaagatggagtcttctgatgtaaacaaaagactggaaaaactctcagccttggattataagattttctattatgaaatacccggcccaataaacaagacaacagagcgacatctagctatcaactgtgttcatgatagagttgtttgctggtggccactggtcaacgatgatgcttggccttgggcccccatttcttctga

SEQ ID NO: 433796 - DNA, 492 bp, Homo Sapiens
  misc_feature (345)..(345): n is a, c, g, or t
  misc_feature (461)..(461): n is a, c, g, or t
  misc_feature (466)..(466): n is a, c, g, or t
aattttttaaataaatagactggtagagaacactgatcagtatcccctaataaatccacctttatcctcggatggtttctatcatgtaaacataggattaaactcttagcacaaataaaatggaatgttttcgtctctacattcagctcttctcacagacagttttatcatcttatcatttttggcacaaaacaaactatgttttattcagtttaccaagaagatggagtcttctgatgtaaacaaaagactggaaaaactctcagccttgggattataagattttctattatggaaatacccggcccaataaacaaggacaacaggggcgacatctaggctatncaactgtgtttcatggtaggagttgtttgctgggtggggccactgggtccaacggatggatgcttggggccttgggcccccccattttctttctggaggaggggacagaggcccantttantcctccgggggttatggcttcagggg

SEQ ID NO: 433797 - DNA, 2575 bp, Homo Sapiens
  misc_feature (49)..(49): n is a, c, g, or t
  misc_feature (76)..(76): n is a, c, g, or t
  misc_feature (1192)..(1192): n is a, c, g, or t
taaaggacacttaataacaacgtgcagaacccacacgtgctaggccctngcgactatacgcgacgtgagaatcctngcagtgcacgatctggcttccgaatctgagagcttccactagtcgcgagtcagccatctgtctctttggaactcagtcacagaccaaagcggggctggcgtgcggcgaggggtcatgggctccccttgctctttccggcctggagtgtagatcttcgtagacctgacactgcccagggggctgcgcttctcctgctcctgccgccgggctcgcagctgctcctcggccagcgccatctcctcctccatggcagaggcttcctctttggcccgacgacggttctcctgccgtgacttgcccgcctgtttcacgctatagaacatggggcccagctccgccagccactccccgtccacagcggtcacacactgcatatactccttggtggtcatgaccaactcgtgatacactatgtaatctggggtgtagcccattccaaaaagggagctggtggggtgcaagtggcagggcatccctgtgcggatgttcacgtactccccgattcccttgagcttggctgcttggtggaaataggcagcacagatgcacttcctgacgatgtcccagtcagtgccacacgaggccaggctcatccgctgctgcaccatgatgtccttgagttgagctcgcacctcccggaccttccgcatggccttagcatggatgaaatgatcgttacaccagatggtggagtaattattgttcttccactgcaggtaaacattcaggtaggtcaaatgatcgctctcaggaacagcgaacttctcccggatttgatcactctcctcctctcgacccttgggcctgtagaagatggctgggaccgagagcatggaaacgatgagcaggatctcggagctgcagcccatgtcacaggacacgatgagcatcttggacagggcagggtccagcgggaactccaccatcagccgcccggtagaggtcagaccacctgtgttgtcccagggccccgaggatccagagctgatacatagagttgagcatgttgtcctccgggggcgggtccatgaagtggaactgcagcaggtcctgcaccccgagggacttgagcagcagcaccacgttggccaggttagtcctctggatctcgggtantgtggtggtcaggagctcattcttgtaggcgctctgggtgtagagcctgaaacactgacctgggcccgtcctgccggctcgccctgaccgctggttggcattggcctggctaatgggatagatctgcagagcatccatgccaatcctggggttgaagacctttaatttgcaataaccagaatcgataacaaacatgatgccgtcaacagtgagagacgtctcggcaatattggtggcaacgatgcacttccgaacgccatctggagccttctggaagattttggcctggaggtcagaaggcagctgagagtagatgggcagcacagccagggcaggcgcgttctccagttcctccagatgcgtccacaatctggtctgaggtcacctcaatgtcctctgccaggcatgaagataaggatgtctccaggggcccccgacaggtgcacctgcaaggactgcttcactgcagcctccacgtaatcctcctgtggggtcttgctgaagaggatgtcaacagggaaggtacggccagggatgtggaagatggggacattcccaaaaaaggcagcaaacttctccgcatccatcgtggctgatgtgacgatgagcttcaggtctgagcgccgagccactacctcccggagcagcccaaagagcacgtcagtgttgagggagcgctcgtgggcctcgtccatgatgatggcactgtagtgatccaggtcggcttcccggagggactctcggagcaggatcccgtcagtcatgtatttgatcaaggtgttctctgaagtgcagtcttcaaagcggatggcatagcccacctcctcgcacaaggtttccccccatctcttcactgactctcttggccactgacatggcagctacacgccggggctgggtacacccaatcatcccatagtccgtgtaaccatcttcatgcaggtactgtgtcagctgagtggtcttaccactccccgtctccccaaccacgatcacgatgctgttgtctctgataatagtgagcagctcctgctgcactgcaaagatgggcaggtactgcctctgctccaggatggacttcttctttgcaaattcactgctggcttcgctctttctcttcatgtgatctgcaaagttctgctctgtcctgtagtccaccttcccatcctccgtcacagctttatctggctcttcctccttcttgacgcccattatatctcccagttgggtccccgccagttcccagtgtttgtgctgagccttcttgcgctccttctgctccctgtgcttccgcactgtctggctgcctttccgagcaatgatggccaggtcagaagtggctccttcactggaatcaccggttccggctgcttggtgaagaca

SEQ ID NO: 433798 - DNA, 734 bp, Homo Sapiens
  misc_feature (673)..(681): n is a, c, g, or t
gtattgtcctacagtgtcataaagaacctgaaaatgaacttttgtttctaaagttggaccttgctgccatgactgtttaggtttacagaaacttgaccccgggctcatcctgtctctggctgtggcccggcaaagcactgaaaacccctctggtctcagagacagtaggggcagtgccactttctacaacctgccaacccacacactggagtaattctgaaaaaaattattcctaaactctctaagtgtggacggagaatgagcaagccccagaagtattttacaaccagagtgggtaatgaggagggggcttactggaatcgtcatatctctgaatattgaaaacaacaactaaaaaagtggaccttctcagaaaaaaagggcagcaaatgaccaagggcgccccttctggccgtgcttggcttgagtaactgtctctctttccccacccccatcacagggctttcagtttggcaaaggaaaagcagataaaaacagaacattccatatgtttctttctccatcggccaaaaacattttgacacaatgtttgtgaaacacctttggagaggtgcacttctgaatgctgcctctgccgtaaatcctgggggcaagggatcagcctcttcccaggaaccatcgccttctataaaccgtgaactcaagcaggcannnnnnnnncttaccgaaaggcttgctattgtgcaagggcacataatgggtctgttgctctt

SEQ ID NO: 433799 - DNA, 800 bp, Homo Sapiens
cctggaattacagatgtgagccactggcccagcccagaacttggttttatccacctctggtgaaacatgagctcacttggtgctctctggcctctttattcccatctccttaggctgaccctgacaagtgccagggccaggcttggaccaagcagtcaactgagtcagcctgccctgggaaccaggcaggggagggagcttacggacgggctaggctcaggagagtaagagagagcagatgaagggcagaagtccgtggccgcagaggcagctgagcatgagggatggagcgtgctgctgtcctgcaggtgccgttagccctgttttgcactggtggattgatctgctcaggcgcacagggagatggcacagcaggacccgccgcccagcctcgctgagggcatgctcccgcctcacctccagaggctgttgggcggaagccgagagctgcagcagttggggccagcgtgggactggaggcccaggtgaatcttgtggggcaggggacggagctgaggctgtccggcccgggccctccccacccaaaggccctagaaccctagccttcaatcctgggggtttgcttctcccctgagtcctggctttcctgacctgccgtccgttagggacaggtggaggggccaagtcttgccatcagaggccagtgtggtggtgccagagctacggggtattccaggacacctgacctaggcacggggcaggagggcccagagccacctggccacttgtccgacgcgtgggtcgacgatatcccgaaactccggaccgtacagcgctta

SEQ ID NO: 433800 - DNA, 1137 bp, Homo Sapiens
ttggcggggcttcggcttattggggagggagtgggggtctatatcaatgtgtggatacccactcgggtgtgacccccacttgttggttacctccttggaggctggatgggcgccgtcatgcatggagcggggtgggcggtaaccaacgataggttttggggaggagaggtggaatgggcgaggtttcttggggcacgccgccatttatgaaggggtcctgcaggctaagagccttcggggaagtgcccccaaaaaaggcccatgccccctggccaatgggagcccagttggggatgttgaacgttagggcttaagggggccttttttagcaccggccccacagggcctccagcaagattgttgcaaggggcttggttctccgctgctccccccacgtggcgggcccccggcgcccatcacttatgggccccttccctggacccacacaggggcaggttgggcaagacccgcagcaccccgtgtgtttgggggcagcagctggccagagagaggtcagaatcagggagtctgtaggactgggccctgctgggcaggccccagcaggggcctcaggaaaggtccacgtcagctcgcggtgggctccagcgtctgcctcccaggtacagcaccaggagggaaccctaaatccagccacttgatccaggtgggccacacggccacctctcaggctctctggggggctgcctgccgcccaagcctggccagcagagcctatactgggaccaaggccttagcccaagggacactcacctcctccagggtgctcagagacatcccagcagccacggacaccaagatgtgttcagtggtgaccacaggagccacctctgccaggacagctggcagcacatgaggcttggtggcaaagatgacgagcaggcagctctgcagcacctcctggttggagtgcgtggtccggcaacccagagcttgaaagtgacataggttcctgtctgttggtgcactggccagtatgtgctgagcttccacttttcctgctctgatgaggccctgcgcgatggcccccgccatgcggcccgcgcccacgaagcccacgcgccgcggagacggctccgcagctgccatcttgttgcctatcccgggaattccggaccc

SEQ ID NO: 433801 - DNA, 2205 bp, Homo Sapiens
agtgcagggccagcgcttggattctaatgcagtcaactgagtcagcctgccctgggaaccaggcagggagggagcttacggacgggctaggctcaggagagtaagagagagcagatgaagggcagaagtccgtggccgcagaggcagctgagcatgagggatggagcgtgctgctgtcctgcaggtgccgttagccctgttttgcactggtggattgatctgctcaggcgcacagggagatggcacagcaggacccgccgcccagcctcgctgagggcatgctcccgcctcacctccagaggctgttgggcggaagccgagagctgcagcagttggggccagcgtgggactggaggcccaggtgaatcttgtggggcaggggacggagctgaggctgtccggcccgggccctccccacccaaaggccctagaaccctagccttcaatcctgggggtttgcttctcccctgagtcctggctttcctgacctgccgtccgttagggacaggtggaggggccaagtcttgccatcagaggccagtgtggtggtgccagagctacggggtattccaggacccctgacctaggcacactgcccacctggtgccaccccagcactgccgcagacctggcccagcagctcctgctccttagcaggggatgagcacgcccaccacagccaccctcttctccaggctgcagggcaggctccagctccccatgggggccccatcaggccagggcccctggctttactgcaggggagagggtctcttgtgcagaccccatatggctcgtgcccccctagagctgagatgaggcagccggcctggctgtagctgcacggagccacctggaaagccaaaggcaagctccagctccagaccaggcattgggccagccgtgcctgttaccgtaagttctgttcatggcctcaaccaactgcccaaccatgcgggcaaatgaccaagacgccatctcttgggcccctcagaaccaatgttgcagcaaggtgggctcactgcagcaaggggcagagccaccaccacggtgccttctgctcactggggagggaggagtgtccccactggtcggggctcccccgcctgctggaacctcccaagtcctgccccctgcatttccctgtgcaaggggagaaggagcagtaggagaccctcatgcaggagggagggagccgcagtcctcaggggaagggacacagggagaggcaggggcacagaggcaggaaaggatggccagagcccagcctactttctgctgagctccttggcccggcaggtggcagcctccacggcgctcatggtggctgctcgcagcccgccctgctccagggcgtggagtccatagatggtggtgccacccggggtgcacacgtctgagcgcagctgggctgggtgttggccctcgtgcagcagcatcttggccgtccccagcagggtctgggcagcgatgcggtgggccaggctgctgggcatgcccatcttgacggctccttcagccagggcctcggagaatgcacacacgaaggccacgccactgccactgaggccagtgtggatgtcgacgtaggcttcaggcacctcctcacaccgcccacaggcctccagcagatgctgcaggagcttggtctcgctgctccccacgtggcggccccgcgccatcactatggccccttcctggaccacacagggcaggttgggcaagacccgcagcacccgtgtgtttgggggcagcagctcctccagggtgctcagagacatcccagcagccacggacaccaagatgtgttcagtggtgaccacaggagccacctctgccaggacagctggcagcacatgaggcttggtggcaaagatgacgagcaggcagctctgcagcacctcctggttggagtgcgtggtccggcaacccagagcttgaaagtgacataggttcctgtctgttggtgcactggccagtatgtgctgagcttccacttttcctgctctgatgaggccctgcgcgatggcccccgccatgcggcccgcgcccacgaagcccacgcgccgcggagacggctccgcagctgccatcttgttgcctcggacgccgctgcgctcaccgcccatccacaggccgcgccatcccgagaattccggaccggtaccagccggttatgagggaagggtagttgagtgagtgtct

SEQ ID NO: 433802 - DNA, 1006 bp, Homo Sapiens
  misc_feature (11)..(11): n is a, c, g, or t
  misc_feature (16)..(16): n is a, c, g, or t
  misc_feature (35)..(35): n is a, c, g, or t
  misc_feature (48)..(48): n is a, c, g, or t
  misc_feature (69)..(69): n is a, c, g, or t
  misc_feature (79)..(79): n is a, c, g, or t
  misc_feature (84)..(84): n is a, c, g, or t
ttcccagagcntttcnatagcctgaccatctgcanactgaatacctgngccgtgcccagttgtagatcngcagccacantgttnttcagcttcttaaggctgcaatgtgcccttggccagatccacgacatggatgtaatcgcgggacacctgtgccatcctctgtgtcatagtcattgccaaagacattcagggcctcccgtcgcccgatcgccacctgggagacataaggcatgaggttgttgggtatgccctggggatcctcaccaatgcagccagaggcatgggcacctgtggggttgaaatagcgcagcagcactgcgttccaagtcttgtctgcctggcacaggtcccggatcatttcctcgatgaagaacttggacttgccgtaagggttggtacaaccacccgtggggtgggcctcatcaaggggcaggtactgggggttcccgtacacagtggctgagctgctgaacaccaggttcttcaccccgtgggccttcatgatctccagaagctggatggtcccggtcaggttaactctgtaataatccagaggcttctgcaccgactcgcccacggccttgagccccgcaaagtggatgaccgccataaagctgtactttttgaagagacgctgtagggctccctggtccaaaatgtccatctcctcaaactccacagagcggcctgtcagctcctggacccgccgcaggctctcaggcagggagccccctccacggaaggcattatggaagttatcgatgaccacaggcaagtagccagcctccagcagctccagcaccgtgtggctgccaatgtagccagccccacctgttaccagcaccttctctgccatggcaccttggagttggaaaagatggaatctgaggatccacacttctttgtccaaggtgactgaggactggagagtcctgctcgggttcccgcgccccacgcttgctgcagaggcaccgcctcctacgcccgagccgcgggccctttt

SEQ ID NO: 433803 - DNA, 1412 bp, Homo Sapiens
ttcagtgtaagaaaacttgtttttatttttaaatactttggaaagctctttcagagcaatataaatgagtgcctgggaggaggaggttttgtgccagagccttgccccctcactcactcttgggggtcctgatgaactcttggaccctgtggaagataagagttagagacctcggcctcctggtcagtggagcccttggcctcatgcctggtgggctaagcgggcccagctggggtttgaggtaggggaggccttggcttggccccagcagctccagggccctgagttcctgccagaggctggagagcaggcagctgctgcttttcctggtccttggtaggggagggtcctcaggcttgcgtgccaaagcctgaaggattctgcttctgccagcgccagagatcctcacacatcctgtccagccctaaggctgctgtccaccccagctcctcttggggccaggctggggttggcgtaacaggctgccaattaaccttcccgccgtgccaccaccttgtaacgggatcttctttcccagaggccttctccatagcctggaccatctgcagcactgaatagcctgtgcccgtgcccaggttgtagatccggcagccacactgttctttcagcttccttaaggctgcaatgtggcccttggccagatccacgacatggatgtaatcccggacacctgtgccatcctctgtgtcatagtcattgccaaagacattcagggcctcccgtcgcccgatcgccacctgggagacataaggcatgaggttgttgggtatgccctggggatcctcaccaatgcagccagaggcatgggcacctgtggggttgaaatagcgcagcagcactgcgttccaagtcttgtctgcctggcacaggtcccggatcatttcctcgatgaagaacttggacttgccgtaagggttggtacaaccacccgtggggtgggcctcatcaaggggcaggtactgggggttcccgtacacagtggctgagctgctgaacaccaggttcttcaccccgtgggccttcatgatctccagaagctggatggtcccggtcaggttaactctgtaataatccagaggcttctgcaccgactcgcccacggccttgagccccgcaaagtggatgaccgccataaagctgtactttttgaagagacgctgtagggctccctggtccaaaatgtccatctcctcaaactccacagagcggcctgtcagctcctggacccgccgcaggctctcaggcagggagccccctccttggagttggaaaagatggaatctgaggatccacacttctttgtccaaggtgactgaggactggagagtcctgctcgggttcccgcgccccacgcttgctgcagaggcaccgcctcctacgcccgagccgcc

SEQ ID NO: 433804 - DNA, 2005 bp, Homo Sapiens
  misc_feature (28)..(28): n is a, c, g, or t
  misc_feature (1366)..(1416): n is a, c, g, or t
  misc_feature (1736)..(1770): n is a, c, g, or t
  misc_feature (1868)..(1931): n is a, c, g, or t
catggtaaccccttgtcctggggcagcntcattttactttggcaaggaccgcagtgttcgcttttctcattaaacgagggctttcaaggatgtgttaaaattacgtgaaaagacgggccctggtgccggctggtccctgttttccttaaggcgaaagttggggaaccgcgtcagcactccggggttcggattccctggaacctggggcagagtctgaaataaagcagcaccggccctgtgtggcgcggacccatgggaagccttgaaaggaaagtctcttcagaaagaaacaatgggttcagtgacttgtacactgaaaagatagatggccagttttaaagttctcctgcgtttaaacacgggcagcagcggggttgacggtacaggcaccaagttctgacataaaagtctttccttaaatcatgtaaaaaaaccgagacgtgcgcactgccaacttacactcatcgacacaaacttacaatatttataaataagtcgcaagcaaacactgagttacatttaccacgaagtcactggacagagaccaaaatcccatgaaagcggattgatgtgaaaccacgttagatctgagacgcagacgtgagaaacgccactgataagagacacggaagatcggagcccagccccgtgagccggtcggggacagcacgggggtcagcgtgcggccgggcccggctcaggctcgctgaggtccaggaacgggcacctccacctggacacggcgcgctgccccggcaacccccaggggtctcccaaacgcagaccgggacgcagcgaccacaagcgtggctgcgggacgggggccttggggcccgggcgtagtgcgcccgctcggcacctgccccaaggcgccgccgggtgaagcaggtgtcccggagggccgggccgcggcggctcaggggatgccctcccttctctggcagcactgcgagggcggcgcggaccagtcgtacacgtaggacaggcgcagctgcacctcgcgcttgcacaggcggccctcgcgcgccagcgtcgcgtgcttctccagcatgtcctccaggctctgcttgtgcgtcaccaggtactggttgctgcagccgcgggaccggtattcggtgtcgaagcgcgggtcgtgctcccgctggacgtccaccggcgccagccaggcgcccagagacacgtcctcgctgtgccaggcgcgcaggtagtcgcggctgaggcgcaggtagtgcaccaggtcggccgagagcacgtagccgccgcccagcgcgtagggcaggtagtagtcgcagagttgccaggcggcctcgcgccagcgcccccccggcttgacgcggccgcggcccgagaagaagccccagtagannnnnnnnnnnnnnnnnnnnnnnnnnnnnnnnnnnnnnnnnnnnnnnnnnnccagccgcgcgaaggagtcgtcgtccgccttgagcacgaactcgaaggccacgtgctcgtccagccacgccagcatggccagcaccttggccgtgaggttttcgtaggcgtcgcgcagcgcgggcagcagcagcaggtccccgtgccgcgcctgctcccgctccagggcgcgccgctcctcggcgcccaggctggccgtgcccacggcaaagcgcgcccacacgtcgcctggggccccgcgccgcgcaagccacgtgctgcggatcacgctgcggcgctcggcggcgcggggcgcgctggccaccagcactgccaggaannnnnnnnnnnnnnnnnnnnnnnnnnnnnnnnnnntgcggcccgacatcgccctggggtccccgggctcggccgcgcagcgcgccaggtagagcagcgccgccccgcacagcgccagcgtgcccaggcctagnnnnnnnnnnnnnnnnnnnnnnnnnnnnnnnnnnnnnnnnnnnnnnnnnnnnnnnnnnnnnnnnaggccggactcgcgagtgcgcaggcgccgccggctcggggcggtgcgcgatcccgggaattccggaccggtgcc

SEQ ID NO: 433805 - DNA, 584 bp, Homo Sapiens
  misc_feature (56)..(134): n is a, c, g, or t
  misc_feature (418)..(466): n is a, c, g, or t
ctgctctacctggcgcgctgcgcggccgagcccggggaccccagggcgatgtcggnnnnnnnnnnnnnnnnnnnnnnnnnnnnnnnnnnnnnnnnnnnnnnnnnnnnnnnnnnnnnnnnnnnnnnnnnnnnnnncgagcgccgcagcgtgatccgcagcacgtggcttgcgcggcgcggggccccgggcgacgtgtgggcgcgctttgccgtgggcacggccggcctgggcgccgaggagcggcgcgccctggagcgggagcaggcgcggcacggggacctgctgctgctgcgcgcgctgcgcgacgcctacgaaaacctcacggccaaggtgctggccatgctggcctggctggacgagcaccgtggccttcgagttcgtgttcaaggcggacgacgactcctttgcgcggctggannnnnnnnnnnnnnnnnnnnnnnnnnnnnnnnnnnnnnnnnnnnnnnnntctactggggcttcttctcgggccgcggccgcgtcagcccgggggggcgctgggcgcgagccgcctggcaactctgcgactactacctgccctacgcgctgggccgggggctacgtgc

SEQ ID NO: 433806 - DNA, 3021 bp, Homo Sapiens
  misc_feature (241)..(241): n is a, c, g, or t
  misc_feature (296)..(310): n is a, c, g, or t
  misc_feature (335)..(572): n is a, c, g, or t
  misc_feature (2626)..(2664): n is a, c, g, or t
  misc_feature (2921)..(2957): n is a, c, g, or t
tttttttaacaaaattatgaatacttatttacaaataagacattttccattagcatgacacatgacagttttcatgataaaatcagcatagaggagtatgtgcaattttgcataagtaataaaaacattcaaactatcaatgccctgatagcacgaataagttccaccaggcatctcttttgactttacagttttttatttccttttcttcatatatccttgatgttgctgagaagaaacntgaactttgcacaacagcagaaaagtctagttagtcgcgggtacaggctctttcnnnnnnnnnnnnnnngagacggagtctcacgctctgtcannnnnnnnnnnnnnnnnnnnnnnnnnnnnnnnnnnnnnnnnnnnnnnnnnnnnnnnnnnnnnnnnnnnnnnnnnnnnnnnnnnnnnnnnnnnnnnnnnnnnnnnnnnnnnnnnnnnnnnnnnnnnnnnnnnnnnnnnnnnnnnnnnnnnnnnnnnnnnnnnnnnnnnnnnnnnnnnnnnnnnnnnnnnnnnnnnnnnnnnnnnnnnnnnnnnnnnnnnnnnnnnnnnnnnnnnnnnnntgagcgaccacgcccgggctcaggctctttcagagagcacagtgagtgcttgcacaaaactctgcttttgaagcaattcactgacctggtaaagatcaaagttcaaacttgcatgtttattgattgggcaactctgcttatggagaaatacatgtcctagtcaccagtccattttaatattgctctgcacttaaacaaccaccatctgtcactgagctacagaagtgttgattccataaatgttcccagtgataccatgtaaggtgataccagtaaaaaaaatttccaaatggatcttttgttctgttacatggacaaatgttccatcacttaagaaacagaaatgcagcaatttctctccacacaatagcaaagattttcttacatgactctgtaacttctacttagtccatagaaaaacagtcccttttctaagggtgaaaaaatacctcttcaagagacaggcaaaaatttgaaaattacaagaatgtgctctttgtagcctttcatccctcccacaaataggtcaacagtaaaaaaaggatgaagtttaacattctagctagaaacgtacaaatgtcacatgtggacttttgtcatcttttctgattatcgactacttcaattttcacttgagttgtgcttttattcttctttgggatgggcagttccagaaatcattaaatattaacaaatgatgatgtcagagttctagaaataaaaatatccatctattgtagtactagtccaaccttttcagaatctgtacctggacacctccaattgtacaggtaatactgcaaattgccatctcctataccaaacttgagtttttccaagaatgtcttattttccatcaaatccagtgcattgaatacatcaaatcctttcgatttagccaggatgagcgcgtcgctcatgaggtccagcaggggcgtctctgtgtggatgttgtagaatgagtaggcggctttgaggctcttgtgagcagggtggtgcatcaccgtggaggggagcgtatagaagctcaggaaatcagtcagtttaccgttggggctctccactacaaacgtgtcaataatgtgctcccgggggaggaaccagtgggctacttcctcttcatccatcactggagccagatgaaactgcttcaggtaagtgttgattaattctcgaactgatttgatatcttttggttccattggtctcaaacctgaagtctttgtaacatctggaagtctgtatagcttcattgttctctgtaaagtcatatttctactcaagtgagaaaattcacttctaccaattttctggggtttagtgatcgatgccagtatctgcatgtggctatgggcttaggaagaaccactcccgcggtgtacacagcctggaagatcccttccaggttcactcttctagtgatctctcggattagcactggggctacccgtttcgatctcaacttcttatgaacacaaagaaagttgatttctaccatcttcttcacactgtcataaatccgaatgtttgctgggatggcacttatgaacccgaccagttttttatttgaagacactctgaccccacagtgccactgcaggagccagcctggtggacgcagagcccacaacaggaactcgggtgaatagtcaaatcggaacatattgtcatcatcttctacgtaattctcatttaacaacgtgtataactccttgagcacttcggcatcactcaagtctaaagtgtcccacataaaaccctgtggcaaagaatacggttcttggcgtacgttgtctttatctggttcaattgcaccatgagatgttatgacttcatctagttttggtaccggttgtgtgtcccaaaactggtatctgtgctttgcagcctcatcaatgttcctggctgggccctggcatgcggatagcagctccattgctctctggatatcctgcaacttctgcattggaacactgggatttttcgaaggctgctgaattttaatctcctgggaatcagatgccgagtctgacttggtgcctccggaatttggnnnnnnnnnnnnnnnnnnnnnnnnnnnnnnnnnnnnnnnggctcccaaataccctccaggacttcctttggcgtgctccgtctcctcctcattgtccccgtctatcccgcacgtgtcctggtcgtccagttccaggctctgctggctggccgcagactcgctgtcctccgccatcgcggcggcgctggctggggaggcggtgctcggggccgggccggagcggccgcagctccctctagtgcctcccgccatactccgctctcgacgaattcgagctcggccgatttggcctgatnnnnnnnnnnnnnnnnnnnnnnnnnnnnnnnnnnnnncgccgccaccgcgtgagctccaggtcgcccatagtagtacattccgaaggcgggagggagtgcg

SEQ ID NO: 433807 - DNA, 844 bp, Homo Sapiens
gaaaggggttcccccaaacggtttcccgggggtaaaggggtttttttcccttcccccggggtaccaggagccccgtcccaaccccttaaaaagttattatgtggcatttaagtgccatcatgcttctgctgcagcacattcagatagaaggtagctctgtctcgtacctcgtcatcagtatccatcatacacctctgtaagagtacaaggatgcttgggagaagactctcattctgagccccaaatttagccaaagcactcacagcagcagctctgacagcctcattctccaggacaaccctattaaaaataaaacggatatatttggaggggacaggcgttctagggccctctttgcccaacaagtgtagaatcttagtagccagaacagtgtgttcacagtcctcaatgaattcacaaaggtgggctaggcctgcttctttactctcagggttctcttccacaatgctgattatacagtccacaatggcccgcttgtactcaaagcctccatcatctcggagcatgttggagaggaaagtcatcatgacactgtgctttcgagggtatttctgacagagagcactaattgcctgtacaaccaccaccttgaactcatctgagatttcagacacaaaagaagatatctgcttcatgagccggtccacactgctctcacttcctgttttgaggagtgtagtaatggctaaggtagcaatgcttctgtttgagtctgtgattaagttttctaagtccagattgcaggcagtaacagcagaggggtgcttcattgccaccttgttcaaggtcctcacagctgcatatctcaaggctggcttaggaa

SEQ ID NO: 433808 - DNA, 742 bp, Homo Sapiens
  misc_feature (39)..(39): n is a, c, g, or t
  misc_feature (91)..(91): n is a, c, g, or t
  misc_feature (147)..(147): n is a, c, g, or t
  misc_feature (171)..(171): n is a, c, g, or t
  misc_feature (173)..(173): n is a, c, g, or t
  misc_feature (185)..(185): n is a, c, g, or t
  misc_feature (212)..(246): n is a, c, g, or t
cggagaacatcctgctggatagggacggacacatcaagntcacggactttgggttcgccaagaagctggtagacaggacttggaccctctncggaatacccgagtacctggcccccgaagtcattcagagcgagggtcacggaaggnctgtggactggtgggccctcagcntnctgatattcganatgctctcaggatttcctccatttgtnnnnnnnnnnnnnnnnnnnnnnnnnnnnnnnnnnnacaacatgtttggcatttatcagaaaattcttgcagacaagatagatttccccagacatttggatttccatgtgaaagatctcattaagaaactgctcgtggttgacagaacaaggtggttaggaaatatgaagaacggggcgaatgatgtgaaacgccatcggtggttccgctctgtggactgggaagctgttcctcagagaaaactgaagcctcccatcgtgcccaagatagcccgcgaaggcgacacctccaacttcggaacttaccccgagaatgactgggacacagccgcgaccgtgccgcagaagggtttagaaatcttcaagaatttctgaggacaggagctcacatctggaagaagcaggaaggctggaatctgcctgcaacaaagagctgctcctgagcagaccagtagcaatgtcttcttcacgtgataaggacatttccacttttctgtctttgtgcctgtatgtatagaaacagatcagagcac

SEQ ID NO: 433809 - DNA, 1736 bp, Homo Sapiens
  misc_feature (1192)..(1192): n is a, c, g, or t
cacgcggccaccgagctggaggaggcggcgggcgtgagaccgggaatgcttggggcccccgccttcctcgcagccatccagcactcggtgcacgccccgcgaggccagcggctgctccctcccggggctattgctgctagtgccgtgagcaccgcccagccattgtctctgtgtctccgtcagccgtgccgagccgcgcacccagaggcgagggcgcgcatggggagcctccgttgatgctgccgcggctgccgcgccgccctccgaggctgcgtcccggggagtccggcttcccgagcgctccggcctggcccggcgccccggacctgagtgcctccccatggaggcgcccgggccggcccaggcggccgcggcggagagcaactcccgagaggtgacggaggatgccgccgactgggcgcccgcgctctgccccagccccgaggcgctgtcgccggaggcgcctgtgtaccgcctgcaggactttgacgcgctggtcaccgtgggcacttggacgttcgggcgggtgcacctggtgaaggagaagacagccaagcatttcttcgccctcaaggtgatgagcattcccgacgtcatccgcctaaagcaggagcaacacgtacacaatgagaagtctgtcctgaaggaagtcagccacccgttcctcatcaggctgttctggacgtggcatgacgagcgcttcctctacatgctcatggagtacgtgccgggcggcgagctcttcagctacctgcgcaaccgggggcgcttctccagcaccacggggctcttctactctgcagagatcatctgtgccatcgagtacctgcactccaaagagatcgtctacagggacttgaagccagagaacatcctgctggatagggatggccacattaagctcacggactttgggttcgccaagaagctggtagacaggacttggaccctctgtggaacacccgagtacctagcccccgaagtcattcagagcaagggccacggaagggccgtggactggtgggccctcggcatcctgatattcgagatgctttcggggtttcctccgttttttgatgacaacccgtttggcatttatcagaaaattcttgcaggcaaaaatagatttccccagacatttggatttccatgtaaaagacctcattaagaaactgctcgtggttgacagaanccaggcgatttaggaaacatgaagaacggggcgaatgatgtgaagcatcatcggtggttccgctccgtggactgggaagctgttccgcagagaaaactgaagcctcccatcgtgcccacgatagctggtgacggcgacacttccaacttcgaaacttaccctgagcatgactgggacacagccgcgcccgtgccgcagaaggatttagaaatcttcaagaatttctgaggacaggagctcacatctggaagaaacaggaagattggaatctgcctggaacaaagaactgcacctaagcagaccagaagcaaaatgtcttcttcacggcataaggacatctccacttttctctgtacctgtgtgtatagaaatagattagagcacagttgaaattcatggaactggcattatttaagcaactggaattccacactgtaggaaggttttgaaaattgtttggttgtagattttatcttatcctttagtgttgtgttcctactgtgatgtcttggtttttgtcatagacttaagtttataagtttga

SEQ ID NO: 433810 - DNA, 659 bp, Homo Sapiens
actgagctgtgagcttttcgcagtgcgcccagcactgacacactgccaggcgctcggaaactatttacgggttgcctgaagctgctgtcacactcccgtcctttgcgaagttccaggtagtggaggcaacctccaagaggcaatccattaccaaccaactcatgacccctccctccggtggaaatcagagctcacggagtgtcgtttgattggactgtgatgcactgaagctgaattcaagactgatttaaaaaaagacctgccagctgaatgaatgctgtcacagagggaggagctggacctggccccagggacccaagatgatgctgtcagtgacgtcgttcactccatctggtgcccaaagaggcctcggcccaagcaacaccgtccagtttacaggaccaggtccaagctgcccggcagctggggcaggcaggcctgacttgcaggggtctggacggctcagagggaagctggtaaaagcagggtaagcccaggtcccacctctgccccttcagaggccaaggccactgcagagtccagagcagccggaggactacatttcccagagtcccccaagcccagggatgagccattggccgatttaaatagcccaggcccgaggcagccaggccgcagctgtggactcctcacctccc

SEQ ID NO: 433811 - DNA, 1025 bp, Homo Sapiens
ctgacccccaaagtgaggagaagctgcaagggaaaagggagggacagatcaggcagaccggggaagaaggaggagcagccaaggaggctgctgtccccccacagagcagctcggactcagctcccggagcaacccagctgcggaggcaacggcagtgctgctcctccagcgaaggacagcaggcaggcagacagacagaggtcctgggactggaaggcctcagcccccagccactgggctgggcctggcccaatggcctttaatgacctcctgcagcaggtggggggtgtcggccgcttccagcagatccaggtcaccctggtggtcctccccctgctcctgatggcttctcacaacaccctgcagaacttcactgctgccatccctacccaccactgccgcccgcctgccgatgccaacctcagcaagaacggggggctggaggtctggctgccccgggacaggcaggggcagcttgagtcctgcctccgcttcacctccccgcagtggggactgccctttctcaatggcacagaagccaatggcacaggggccacagagccctgcaccgatggctggatctatgacaacagcaccttcccatctaccatcgtgactgagtgggaccttgtgtgctctcacagggccctacgccagctggcccagtccttgtacatggtgggggtgctgctcggagccatggtgttcggctaccttgcagacaggctagggcgccggaaggtactcatcttgaactaccttgcagacagctgtgttagggacctgcgcagccttcgcacccaacttccccatctactgcgccttccggctcctctcgggcatggctctggctggcatctccctcaactgcatgacactgagtgtggagtggatgcccattcacacacgggcctgcgtgggcaccttgattggctatgtctacagcctgggccagttcctcctggctggtgtggcctacgctgtgccccactggcgccacctgcagctactggtctctgcgcctt

SEQ ID NO: 433812 - DNA, 1123 bp, Homo Sapiens
agaatgtttccccttggtgcagccccaagctccctatcagagacacatcagccaaattagtttccgaggctcacaggctgctaacattgctgaacaagatttttcgaatttctatgtgttaggagtattaaaagatagtgattacctatactagcagcctttgtcccttttctcttccctagtctgtaccagcccactggcccttgagtgaagtgcatcttcgtcagcctgcggacttgggagctcaggctctccatctgttgaggtttttcaattagggagactaccagaggatgtgtgtgggtgtgtgtttgaataacaaagaagtaacccttcattctgataaaagtgttcctctgcttgacctggaggagcccagaagcttgtttataccttcagtattcaagggacagtcacaggcctgttttgaccttttcctgagaattagctgaaacttccctctgaagtcaagtagtgaatctgttataggtctaaggaaggtcctcttcatctgggagttcttggcattactttggtccttctttcagaaacttggcaagttggaaagtgcaaagacagtataagggcccattttcaggccaggtccagcatgaaacagagtgaacaaaattagttccacacattagggaagagccaagtcagacgaatatccaatcatttgcagtagtagaggcaggtgaagggtccccagatctgggaagcagggctcaaaacctggccaggaggtcttgttgggccaggaatgtccgtggttggtgaggaggctgggagaaggcctttttgatggctccattgttcacagcgctgccctacaaataccatatccgtccccacctcctctgcaagggtcgagcggaagagtaggtctggtgagctgagctctagggcgctggtaccatcttccctcaatccccctcggttaccccttggggcagcaacgacgtcatcccagccccttccagagaacacacaaaggaagccccacccgtccttagacctgaggacacgctcgggagcgggctgacgtggaccccgtttcagggcgccccgggcccctgcggggaacaatagccgccgcctcctgggcggtctggcgggcgcg

SEQ ID NO: 433813 - DNA, 1628 bp, Homo Sapiens
  misc_feature (275)..(276): n is a, c, g, or t
tggccaattttggttttctgggggccaaaaatgggcagtaaaaaccccccagttcttaccttggggtccaacaacttaaggatcttttgtagggctaacggctttccaactttcttgttcctacaccaacccgggcactgtggccttgccacacgccattacgtattcactcttctgttttttcccaggaaccactttcaaactgatagacgtgtcacccatcccatgtttcttttaagggcactcgtggaggatctgatatggagacaccagcnncagccttgctggtcagctcgtagacccgcgagtcctcgatgctgatgtggttaaaatactcgagttcttcactgtctttgggtttctcttcagaggtctgtttaacacagtcagggatgaggatttccagtgtagctcgggcagctttattcttcgcaagttttttgctgcttgcagttccagatccgtaagtcacaccatcaatggtcaccgaggcaccaaaaggctcacttgggttctcacattcaaagcaattatagacagggcggaccttgaggacacgctgcatgtactcgtgcaggatgcagacctcggatttcccgttggggttaataaccaactctttctttgtgggtgcatcttgcactgataaagtaatgagcttctgattggctggcaagatgggcctctcggactccgcctgcttccgcttcatttcccgattgaattgccgccgctcagcccaagtcctgaattttttcacagtaacttgctcaaagtcaaaacgcttctccaggtagcttcgaaattcctcgagatcaacggattcatctttgcacacctcgactttggccttcacctgccccagggccccaggggctgcctcagcccctagtgggtctttctcgtccgggggccccgggtcagcacccatagagtcaggctcatccaggggaaactccagctctgcagatcggctcaggggcttgacgggggacacatccccactaggggtgaggtcactgctttgctcccgttcctcgttgtccttcattttcttataatgcagacaagggatgctactcagaggagggtcgtgtttccgtatgcttcccgttcccaagaagtatggcctggaccaggtgaccacccgagactctctgtgtaggtacaccgggactccagagttatggaatgtcatgatccacccgtcgggcagcggctctgtaggtgggcggccacgacttttgagcactgttttaatcttggtcatcatcggctgcacacttgtctctccatcggacggatggtcgctgtctccgccatatttttcctctgttcgcctctttttgggggcacaaaggccttcttccagcagagcatccacatcgttgtcaaagtcatcctcgtaggggaaattcaaggcctcttcatccactctgtctctctgaacgattgctttagccgtgaacccgcctgctccttcttcatctagctccaaattgtcagtaaaatcttctaactcatcgagcactgcatactccactctcttttcctgatccagctcattctcctcatccttcttatcagcactctcaccccctatgcctaccccgtcaccaacactcccg

SEQ ID NO: 433814 - DNA, 936 bp, Homo Sapiens
  misc_feature (761)..(761): n is a, c, g, or t
ggggcttgaggcagcccctgtgggccctggggcaggtgaaggccaaagtcgaggtgtgcaaagatgaatccgttgatctcgaggaatttcgaagctacctggagaagcgttttgactttgagcaagttactgtgaaaaaattcaggacttgggctgagcggcggcaattcaatcgggaaatgaagcggaagcaggcggagtccgagaggcccatcttgccagccaatcagaagctcattactttatcagtgcaagatgcacccacaaagaaagagtttgttattaaccccaacgggaaatccgaggtctgcatcctgcacgagtacatgcagcgtgtcctcaaggtccgccctgtctataatttctttgaatgtgagaacccaagtgagccttttggtgcctcggtgaccattgatggtgtgacttacggatctggaactgcaagcagcaaaaaacttgcgaagaataaagctgcccgagctacactggaaatcctcatccctgactttgttaaacagacctctgaagagaagcccaaagacagtgaagaactcgagtattttaaccacatcagcatcgaggactcgcgggtctacgagctgaccagcaaggctgggctgttgtctccatatcagatcctccacgagtgccttaaaagaaaccatgggatgggtgacacgtctatcaagtttgaagtggttcctgggaaaaaccagaagagtgaatacgtcatggcgtgtggcaggcacacagtgcgcggntggtgttagaacaacgagagttgaaaagcagttagcctcacagaagaatcttcagctggtgcacccacatgtcagaaactgggggtctttactgcccatgttttgccgtgagagcaaccagatggtcagccaggagacatccgccaggagtgtgattgacctgcaacatgatgcc

SEQ ID NO: 433815 - DNA, 927 bp, Homo Sapiens
  misc_feature (174)..(174): n is a, c, g, or t
  misc_feature (846)..(882): n is a, c, g, or t
gtcccggtgacatcgagttcctttcccacgcagccagccagccccccaggttttcttggccgggccccgagtagcccaggaagcccggcgatttggccatgaagctgcccccaggatcatgatgagccacaggcccctccccgcacacagccaccagcgccacgcagcaggagnccaagggcgtagaggcacagggatccgaacactgccatgagctggggtgtggcccccagagccccacgaacgcctgggggagcaatctcagacacgtacaccgggatgcaggcagctgtgagccccccggcgaagcccgtcagcgtccttccgagcagcagcatccagaggccgtgcgcacctgccatgagcgcatagccggccgccgacggcacagctgagaacatgatgctcagcttccggcccaggaggtcgttgaggatcatggcactcaggcctccggccgctgctcccagggtgaacacggacccaaaccaggatgcctgggatttggtcagatgcaggtcaggatccaaggagcgctccagggctgggatgacaggggatgtgtagaccagggcatacccaaagctgaaattgccgagcactgcggcgaaggtggccaggaacacccttttgttctgcagggtcccgacccgcgccctgtcccctggcgacgggggcggcttctcggggaaggtgtcgtagtccgggccctcggctcccagcagcggctcctgcatggccgggtctctctcggggcgagcggagggcgctcagactggagcagccgcccggggccagcacctccccgctctcgacgaattcgagctcggccgatttggcctgatnnnnnnnnnnnnnnnnnnnnnnnnnnnnnnnnnnnnncgccgccccgcgtgagcccagttcgcctatagtatcgtatcagcc

SEQ ID NO: 433816 - DNA, 838 bp, Homo Sapiens
  misc_feature (62)..(62): n is a, c, g, or t
  misc_feature (76)..(76): n is a, c, g, or t
tttttaaaattaaagttcctgtggacagggaaaagatagacccaaaatatttccccaacccnggcagatatatacntaatcctgttccagcctcacaacagagagaaatggtcatattgagatggataaaaattcagatttgagacttcccatgtatataggcatacctgtgtctgcaaatgagcacattttgggaacgtaggagttagcatacagtatgaaagttgaaagcaaacaatggctggtttcctaaaagtggatcccttttcttcactgaacatcatcccttagacacccacaatttcccaatatacttaaaaaccatcaacccctaaaaagttataatgatttgcctattgatataaaaattttcacaaaactagcgagaaagaaaaaccccttgactcccaggaaaaccttttcataatgcatcccccaagttgggggattaaatcgctgaaatgtttatttagcactagagaagtaaattcaaagttgcctgtgggtagacgtacaatagaattggttgacaaagtttggtttataaaatatacttacatattgtttcttaggcaaaaatcggcagcaatctggaataattcagattttttatgagattaattgccaatctttttatctgtgacgataatgccaaaaatgactcagagccaataaccttcatctgtcatatgggaagaaacaatcctaggggcaatagttttttcaaaagcggaactgacaaagataagcgtttaaaagggtcttgatcaattagttacaggaacatgaaagaaagtgttccacagagaactgtgtctcctaaaatctctttcttcta

SEQ ID NO: 433817 - DNA, 1052 bp, Homo Sapiens
cccccttcttcggttgtccatttcccaaattggtttgggcttgtcagtggggtcccggaaatccggggcccatttaccttccagttggccccccctggtgggcccggcgacccattccagggccttcaaaggattctcccgggacctcacatgttatcttccagtgcatcccagcttcagctggggctgttccccagcacccggtcagttctgaaacagcccccccttgtgaaaccacttggaacttgatgccccttggtctggatggcccttcggaagccacggtggctgcggttgatgcagagtttgaactgctccttgaactcaggggagtctgtgttcttgatcacactggtcttgtctttctgagcttcttccacgttgggataggggaagtcaaaccgaacaaagacatccagatcgccaggggacagtcctgggggtgtgggcaagttgatgcccttcacgatgaagaggagcatgtcgttgctgctgaggtcagggaagatcttgatgacgctgaaggtcctttgctcaaagcgggcggtgggcgtggggagaccccggacgaaggcttgcttcagaatgtccatgctccgcttacagtcctccgccaacttttcaaacttggtggtttcagtgatgttgcccagctgggtgaattggtttgagtggttcaggcacatctcgtgctgctgccgtatgagcttggtgagttcaccatagcgccgggcggcctcctgagacagacccgggccaggccgctggaccagggcaaagtcgtccttgttgacaggggcaggcggcaccttggtgatgtccacaggcagcccattgcgcgaggcctccagcataggctccagtcccttggcttggcgcaggtgcatcttggcaccctccacgtcgtttttctgcttggctcgcagtgcggcctgcaggagctgcttcttgcggccctctaggaaggccagctgctgctgggctctggtggatgtggctttggggggcgctttggctcctcgtgccgaattcgccacccaggcctcgctctt

SEQ ID NO: 433818 - DNA, 1108 bp, Homo Sapiens
  misc_feature (491)..(491): n is a, c, g, or t
  misc_feature (1005)..(1005): n is a, c, g, or t
  misc_feature (1038)..(1038): n is a, c, g, or t
  misc_feature (1048)..(1048): n is a, c, g, or t
  misc_feature (1055)..(1055): n is a, c, g, or t
  misc_feature (1076)..(1076): n is a, c, g, or t
  misc_feature (1090)..(1090): n is a, c, g, or t
aatacggtggtgcctgggtgaagaagtatgatcgctcctccctgcggaccctggggtcagtgggagagcccatcaactgtgaggcctgggagtggcttcacagggtggtgggggacagcaggtgcacgctggtggacacctggtggcagacagaaacaggtggcatctgcatcgcaccacggccctcggaagaaggggcggaaatcctccctgccatggcgatgaggcccttctttggcatcgtccccgtcctcatggatgagaagggcagccgtcgtggagggcagcaacgtctccggggccctgtgcatctcccaggcctggccgggcatggccaggaccatctatggcgaccaccagcgatttgtggacgcctacttcaaggcctacccaggctattacttcactggagacggggcttaccgaactgagggcggctattaccagatcacagggcggatggatgatgtcatcaacatcagtggccaccnggctggggaccgcagagattgaggacgccatcgccgaccaccctgcagtaccagaaagtgctgtcattggctacccccacgacatcaaaggagaagctgcctttgccttcattgtggtgaaagatagtgcgggtgactcagatgtggtggtgcaggagctcaagtccatgggtggccaccaagatcgccaaatatgctgtgcctgatgagatcctggtggtgaaacgtcttccaaaaaccaggtctgggaaggtcatgcggcggctcctgaggaagatcatcactagtgaggcccaggagctgggagacactaccaccttggaggaccccagcatcatcgcagagatcctgagtgtctaccagaagtgcaaggacaagcaggctgctgctaagtgagctggcaccttgtggggctcttgggatgggcgggcacccaagccctggcttgtccttcccagaaggtacccctgaggttggcgtcttcctacgtcccagaagcagcccccaccccttnacgtgaagcttgggttgaagagcctttttcttnccatccattnggaggtnccagggagttttcaacccatnggagaggctttttnggacatgggttaggggtt

SEQ ID NO: 433819 - DNA, 1297 bp, Homo Sapiens
  misc_feature (1036)..(1036): n is a, c, g, or t
ctaacactcaccaccttttattacagttatttgtatcttctgggggttctgacttagaagcattcgctcatgatcccttgagaggtttatgactgaatgcctaatttatctctgagtcctctaccttgcactttaccttgcacatacaggccttcggcaaatgtttgctgaatgcttggattaatgaatacacttctgaacccacccaagagggcgccagcagggacgtgcccttcccgggtgcctaatgggacgctgtttctcaacaggaccccccatcatctccagcacccagacccagcacgccctccacggcgagaagggccagatcaagtgcttcatccggagcacgccgccgccggaccgcatcgcctggtcctggaaggagaacgttctggagtcgggcacatcggggcgctatacggtggagaccattagcaccgaggagggcgtcatctccaccctgaccatcagcaacatcgtgcgggccgacttccagaccatctacaactgcacggcctggaacagcttcggctccgacactgagatcatccggctcaaggagcaaggttcggaaatgaagtcgggagccgggctggaagcagagtctgtgccgatggccgtcatcattggggtggccgtaggagctggtgtggccttcctcgtccttatggcaaccatcgtggcgttctgctgtgcccgttcccagagaaatctcaaaggtgttgtgtcagccaaaaatgatatccgagtggaaattgtccacaaggaaccagcctctggtcgggagggtgaggagcactccaccatcaagcagctgatgatggaccggggtgaattccagcaagactcagtcctgaaacagctggaggtcctcaaagaagaggagaaagagtttcagaacctgaaggaccccaccaatggctactacagcgtcaacaccttcaaagagcaccactcaaccccgaccatctccctctccagctgccagcccgacctgcgtcctgcgggcaagcagcgtgtgcccacaggcatngtccttcaccaacatcttacaggcaccctgagcggccagggccgcctctacgactacgggcagcggtttgtgctgggcatgggcagctcgtccatcgagctttgtgagcgggagttccagagaggctccctcagcgacagcagctccttcctggacacgcagtgtgacagcagcgtcagcagcagcggcaagcaggatggctatgtgcagttcgacaaggccagcaaggcttctgcttcctcctcccaccactcccagtcc

SEQ ID NO: 433820 - DNA, 454 bp, Homo Sapiens
actcatcttgactctttcacatggtccaggcagtgagggctggtgggggttatacagggcaatcttttgagtttctgatctcatcttttccttgggggaagtggaggtttagccacctcctatctactgagcagccttttttgggttgcagattgaccggggtgaattccagcaagactcagtcctgaaacagctggaggtcctcaaagaagaggagaaagagtttcagaacctgaagggccccaccaatggctactacagcgtcaacaccttcaaagagcaccactcaaccccgaccatctccctctccagctgccagcccgacctgcgtcctgcgggtaagcagcgtgtgcccacaggcatgtccttcaccaaagtctacagcaccctgagcggccagggccgcctctacgactacgggcagcggtttgattgtgacatggcgagaggcacc

SEQ ID NO: 433821 - DNA, 2229 bp, Homo Sapiens
cgacggaaacgacggcccagtgaattttcaggccaaacgtgactgcagtttatttatttgactattttatggtaggggagaaggttgagtgttgttgtgaaagccctgatatcagtaatggggatgatacaatctgccagcagaggagaggttggcaggtaggtcagctgcatcacttcacaagaagaatttgaatcctcactagaaggggtaccatcctcttccagttcatacttcccatatccaacaacatgaacgctgagcattttacttcctggccctctatgggccttgaaccagttgaccaggtctgattttgagaatgacttcagtgcttcaatctcgtgggcaaggcggtcaaagaggtactgctgtgtaaccacttcattccagttcctatccacctcctccccaaggtgggtatcctcacactccttcagcttgatgagagctgtgacctgggtgttgaatgcctcttcagtgaggttctcaatcttctcctcaaagctagaaagaaactcttctatcttcttatcaacaacttcagaattgtatttggttgcctgagtccccacagtgacagaaaatcctagaatcccggatgtgttcctacaggtagggtagacatggtacccaagggtctgcttggttcgaaggaagtcaaaacaaggttcttccatgtgcatcacaagcagctccataagcgtatattctcttagactcctggtacctgactggtagtacacagtgacttcagagttggcatcacccttgttcagagctttcactttgcatagatggtggccactgggcagctctaccacctggaactgcacaggcatctcctgctccagaggcttgaagtttagtttgtcaacaacatatttcaggaaatccatagattctgtgcttgtgacattcccttgtaccaggccctccacaaagagctgggatttgaattctttgacgaagctcagcagagactcaagggaaaggccgtccatcaaagcctggtacttgtcaatcatagaccaacgggcatattccaagattaaaagccgtacatctttggccaaagtctcaggcttgatgaggatgttaaagtaggtctttcttcaactgctcagttatcattgtaaagacagctggtgtggaattgaactcagctaagtagtcaataatgagctgaaacagtagaggtagtttgtggttaaatcctttcactcgaataattaaaccatgttctccagctaccagtttatactccagctgtgccacatctgcttcataagctggttccgcaaggttatgcgtaaggatattgacaaagatatcaaagaggaccacatttgctgcagatttctgtatcaacggtgaaattagatggaaacgtatatatgctttggggattttgaatttgttgtctttcttataccacaggcaaccttgtggagtattcacaattttaactgggtattctgtttccgggcaatcgaaagccttcaacgtaaagtccgtggctatgtacttgttttcagctggaagatgaagatctggatttaattcgaaattactattccacagttcagcccaagagttttcaatatcttctatactatattgagttccaaaccatttctccttgaggtcacattttccctcattagcaccagacagtaaaacaagatttgctttttgaggaactagctgattcaaggcttcaccaatgacttctggcttgtattcaaaaagaagctgatctccagtgagaatgtcctgcaatgggtacagctgcatgttctcacacatgttttccacatactcaactggatctgtctgttcttggtaatgaaattcattatcctcaattttccgaatctcttcaaaaattcttttttctgggcctagcttctgcagcatttttaaatactgaaagacagtgtaagcaacctcataaaaatgttcataaccctcatcagtcaatgtaatagaaatgctgaacactgaataagtagaattttgctcaaatcctgtctcaccatttccaccaaacagtgcaagagcccagcattttttcctaaggaaagaaagaatgctgcctttgccttcatgtccaaccagccaggatatataatgaagtggcttcaccctgtaatgttgctgttgaggaggaagtgcccatgtgatggtcagagcatgaatttttctgattggaacaactctataaag

SEQ ID NO: 433822 - DNA, 840 bp, Homo Sapiens
  misc_feature (423)..(423): n is a, c, g, or t
caggccaacgtgactgcagtttatttatttgactattttatggtaggggagaaggttgagtgttgttgtgaaagccctgatatcagtaatggggatgatacaatctgccagcagaggagaggttggcaggtaggtcagctgcatcacttcacaagaagaatttgaatcctcactagaaggggtacccatcctcttccagttcatacttcccatatccaacaacctgaaagaggacaaagacaaaagtgaaaaatatgctgaccagatttaggggtttaagagttctgatgataaccacccaaactcactcagtaaatgacaaccctagaatgggatggagttagttaaacatactcacatgaacgctggagcattttacttcgctgggccctctatgggccttggaaccagttgaccaggtcntgatttttgagaatgacttcagtgcttcaatcttacaagggaagggaagataggaaagaaattcaagaagaaagatagctcttaaacctaacccccaggcagatgtccctggacctgcttagcatctgaagacctcattttattcttcctattctcaggttacccctaaccttccagaccaaaacgatgatgaagctctctggcatgccttcacattttataccaatcatctacaatggcaagagaggttagcagatgctataattacagctaaataccatacactgagcccaacacccacatccccttagtgtcacctcccaattacatggtagctgcataccacggcttgaggaaatctaccttgcttctattatagaaaactaaaatgtgttgagatgaagcacgtcgggtccg

SEQ ID NO: 433823 - DNA, 424 bp, Homo Sapiens
caggccaacgtgactgcagtttatttatttgactattttatggtaggggagaaggttgagtgttgttgtgaaagccctgatatcagtaatggggatgatacaatctgccagcagaggagaggttggcaggtaggtcagctgcatcacttcacaagaagaatttgaatcctcactagaaggggtaccatcctcttccagttcatacttcccatatccaacaacatgaacgctgagcattttacttcctgggccctctatgggctttggaaccagttgaccaggtctggattttgaggaatgacttcagtgcttcaatctcgtgggggcaagggcggttcaaaggagggtactgtctggtgttaaccactttcatttccagtttcctattccaccttccttccccaagggtggggtattccttcaa

SEQ ID NO: 433824 - DNA, 1030 bp, Homo Sapiens
  misc_feature (952)..(988): n is a, c, g, or t
ttaaaccatcatctgtttaccgaggtaaggataggtgtcgttgctgctgaagtcgtaacttgcttcggcattatagttggaggccaggtccgggtggagatagtcaatcccatcatccataattccaatggtaacacctttccctgtgtatcccagctcccaggcttcagccacattcaaatcaaggccaggagtgccatcagcttgcccagtattgatcagataccactgctttgtaaaaagaggatcgttcatgttgatgtcgatctcattgatgtctctgtaacctcgcttttttcggtcaaatccttcctgctgcaaagccatctttaccctggggtctctctccagctgctgcttgtggtgtaggctgcgtcttctctttgcctttgcaaggccattgtgataaaagtggtacagaccttcagcaaagggaagctttcggactccaaagccgtgttctgctgcaacttggcgagctttgtcctctccccctttatgcaactccacaagaaaatgattcgtgaagaccggtcgctcagcagatgcaaaaaccatgacacagaagaggaacccggcggccgccttccactgggagacacaaccacccttcatccttctttgggagtgaaaagtggtgctaggaggcgcgcaggctggcggagcaggggactcggagggagggtgcaaataaagaattcttatatatagtttttaaaaaaatctttgtatagagaaagagactgaacagggtcttggaaagcagcgaatcagtgtgtgttctccagcatctggctggaggggaagccgtgcagtcaggcggcccggcgcgcgggcaggggtgagaatgtggggagctgtgtgtaccggagagaaagagcgagtgtaggtctgtgcttgatgctaaatctccgctctcgacgaattcgagctcggccgatttggcctgatnnnnnnnnnnnnnnnnnnnnnnnnnnnnnnnnnnnnncgccgccccgcggtagagctccattcccctatatgatcttca

SEQ ID NO: 433825 - DNA, 739 bp, Homo Sapiens
ctccagtactttcctggggcttgcaggctgttctagagatccttctaaaccctgctctggatctctgatgctgagttttgtagtttcttggaacctgggaaaatccttgattttggtctctttctcttgaacagcccgggtgccttgacccttgtttctcacaaagtcttcctccagcccagcctgcttcagggtgtctagataccactgttctgcttctttcttggctagatccttggcaacttgttcaaagagatagggccttgtttgtattcgctgcttcatttcctccagttctttcttatattctttcgctcttttacggtcattgttccggttctctttcagctttgctttgaacacttcctccaggcttttatggggatccatggcttttgcacgcaaggtcacagatttggacattgcttgagacttctttttgtgtatctccagccactgaatactctcatctgctttgttctttttttcaagtgcacttctgactgcagattccctcttcctggtggcatctgtgatgtgcacagggagagtgttggcagagagggaagcaaggccgctcagagaacgactccttggcaggggtgtagctggtggctgtggggaatcctgcctccttccggtggtggcagcatcacagggccgacaacccttcccaagatacacggtccagtccaaacagccagtgagcacaccacgtggagcccatgtgttggcagga

SEQ ID NO: 433826 - DNA, 1123 bp, Homo Sapiens
  misc_feature (1036)..(1072): n is a, c, g, or t
atctttcacgagtagattgctacatgacagggaaccaaactatgatgatcaattctatgttttctgttgattaaaccgccgcatttgagttacataacccgtgtatacccgagaggttctccccaggtcgaaaggtagatcacttgtagagccgccattacgcgatccaagcttgtcttgaaggtagtgccaaagatgcagtgtcataagtgttctcccgaggcaggaacgtcttatgctgtgtctctcctgaggatagatctgtaaatcatatggcttttccagccctcactaaaaaactcagtaatatactggtatgtgcaaaatggacattctcatccaggaaaccatgtaagagcagtaaacgatttggttcagaggggaacttttctgcttgcatggccacagatcctaagtaatagccctgttcattcaggtcagggtgacccatataacgttccgtgtatcctgtatcatagaagatccacagagtgactggggccccagcaatagcaaccctgaagatatctgacctctgcattaatgccatcagggagaggtatcctccataggaccagccgtggatgcccacacgatctaagtcaatgaaatcatatcgagaagctagatattggagtccttccacctgatcgtcaatttctatttgacccattttatatttaaaggcgccttcaaatttaagccctcggtgacaggatcccctgttgtctatcactacaaccacataacctagagaggctagggtattcaagcggaaatacttgactcctttaaaccgattattcaccaactgcacctgaggaccaccatatatgaacagcacagtaggatatttctttccaggctgtagatcatgaggcttgtagagcatcccatacaatgtaaatccagtagtactttcaaaagagaaaatttctggaggagtatagtcaggaagaggacctgctgaatccaaaatggtggcccaaaatcccccgctctcgacgaattcgagctcggccgatttggcctgatnnnnnnnnnnnnnnnnnnnnnnnnnnnnnnnnnnnnncgccgccaccgcgtagagctccagttcgccctatagtggattatcagttct

SEQ ID NO: 433827 - DNA, 1307 bp, Homo Sapiens
  misc_feature (15)..(15): n is a, c, g, or t
  misc_feature (67)..(67): n is a, c, g, or t
  misc_feature (191)..(191): n is a, c, g, or t
  misc_feature (1118)..(1176): n is a, c, g, or t
tgtaaggtgggaagncggggccaaaaagtaagatttcctccaggaaactccgaatgggaatttggcnccgtaaactgcctgaatgttttttcaaataatagatgtgccacggcaaacccactccctaacaaatttcctgccgatgatgaaagagaaggctcccgaaaataaaaggaccaaccataggagtnaactttttttggagtcacgctgcccggggtctccggcgttgcctgatatataaactatgatgccaatgatgttgcttaaccctgcagagacaaaaaagatgcccgcgctgagaatgacgttgtgtctgctgcggtggaactcactggctgccacgcagagcccgccgaagaacagcagcgtgacactgaggatggggaagacactggaggccctcacagctcgcaggagatattcggctgtgtcctgttcgtagtcagcatcttcagggaagtgatcgattttcttgcacacgcctcggaaagccccttctaggcagcaggtcctccacagccccgaatgggtcattacttcttcattcttcctgctggtttcattatcacttgtagatttagtcctgcacacacctctggaatataaccagtagtccgtgcccactgcaatggtcattaaactaaaagcggcaaaggctcctacagtggtgatcaacatctggatacctctgtcacacatcctcataattcttcatggtactctggacggctgggggttggagggggagagtcagtgccggaggggaaaatcactctgcagccgggtaacctagtacaggctcttccaaaaattcaggtctccttttgtcagcatccacagggactttgggaaagctgggatttcctttctggagctctctccagttccctgggtcgcctatggccctcggaagggtgcaggctccggggggttggtccgcatcactgctgccttctgagggtccctgggttcctttcattcctcaggagcgtggtaaagacgagggtccgtgcagggcatggctccggagcctggagctgccagctcggtttgagatgcgcctggcttctcacagccccgggagactcaaggcaaagaaacccagagaggtctcnnnnnnnnnnnnnnnnnnnnnnnnnnnnnnnnnnnnnnnnnnnnnnnnnnnnnnnnnnntgggggtgagggcggatggcaaaaaatagcactgctgggaggcgagccgctgagaagagtgttcactgcttccacagcctcgcaggaaagctctccgcctgctcccgacacccccgctcaaactggagaaa

SEQ ID NO: 433828 - DNA, 1112 bp, Homo Sapiens
  misc_feature (740)..(796): n is a, c, g, or t
  misc_feature (824)..(824): n is a, c, g, or t
  misc_feature (960)..(960): n is a, c, g, or t
  misc_feature (978)..(978): n is a, c, g, or t
  misc_feature (991)..(991): n is a, c, g, or t
  misc_feature (996)..(996): n is a, c, g, or t
  misc_feature (998)..(998): n is a, c, g, or t
  misc_feature (1008)..(1008): n is a, c, g, or t
  misc_feature (1012)..(1013): n is a, c, g, or t
  misc_feature (1030)..(1030): n is a, c, g, or t
  misc_feature (1032)..(1032): n is a, c, g, or t
  misc_feature (1035)..(1035): n is a, c, g, or t
  misc_feature (1053)..(1053): n is a, c, g, or t
  misc_feature (1058)..(1058): n is a, c, g, or t
  misc_feature (1063)..(1063): n is a, c, g, or t
  misc_feature (1077)..(1077): n is a, c, g, or t
  misc_feature (1084)..(1084): n is a, c, g, or t
  misc_feature (1091)..(1091): n is a, c, g, or t
  misc_feature (1094)..(1094): n is a, c, g, or t
  misc_feature (1099)..(1099): n is a, c, g, or t
  misc_feature (1103)..(1103): n is a, c, g, or t
agcggactttttgcccgcctaagcgagccatagagccgtctccagagctgccggtgcctttaagaagactcggtctttcgggtcttctttttccccaatgggctccagtggtgcccgcagcaaaaggcaaacttgcctggctcatggggtgaaagggaggattgaagaatgccgcgttgggtgggtgctgagggagcgccagagtgcgctacgggcttcgctccccttcccctttccttaacccttcctagagcggaggaaccgggtcgtgctgcagcgcccaggagccagggcgctgactgtcctcggctccagaaactttgcgcggagagtgggcttgactgggcagagccgagccggctggctgacccgggaaggaacgggggaagggcggggtgagggaagaaagaccctttagcaccccgggtttctagcccgggcggcggtgtgcagctgcatgagggagctgtcccttcggcaccacggaccttaaagcctaggcgttaagacgacggaggcggggcaacaggcggggagctgtcccttcagcaccacggaccttggcgcccccagggaaaccagccggcccccgccccaggactctgtcttttctccagtttgagcgggggtgtcgggagcaggcggagagctttcctgcgaggctgtggaagcagtgaacactcttctcagcggctcgcctcccagcagtgctattttttgccatccgccctcacccccannnnnnnnnnnnnnnnnnnnnnnnnnnnnnnnnnnnnnnnnnnnnnnnnnnnnnnnngagacctctctgggtttctttgcctttngtctcccggggctgtgagaagccaggcgcatctcaaaccgagctggcagctccaggctccggagccatgccctgcacggaccctcgtctttaccacgctcctgaggaatgaaaggaaccagggaccctcagaaggnagcagtgatgcggacaancccccggagcctncaccntncgagggcatngggnnccagggaattgagaaancncanaaaggaaatccagctttnccaantcctntggatgttacaaangagactnaattttnganagctntatnggttccggc

SEQ ID NO: 433829 - DNA, 772 bp, Homo Sapiens
  misc_feature (693)..(729): n is a, c, g, or t
ggagagccatcatttctgagctttcagggaagatgctcgtgtgctggccattgcaagcccaattctcaattacagggccaaggagtagaggacattagtcaagaaatggggaaaaaattaagctattctggagggacactctgccaatcacaaggcacattccgggtgtcagaggagcagcaggaatcatttctcagcctacgaatgtctttaaacatgtgtgaatgaaggggagtggggcttggggggagggcaggaggagctgaccagtgtggtttcatctgtcttgatggataacattattcaagaaagagcttttaccttcatcccttcacactttgtaggaagccagtagccaggctgaagataacactacgtttgagcagtgccttcgtttacaaaacactttcacattgatgacattttctgtgatctcgtcttatgctcccaaagatcaagtgagacaggacttgccactctcactaagtggctgggagacctggagcccttcctggggtgctcagcaggagaacagatcagagagcctcaagctaagtctccagaactgagtggagcaaacacccagcctctgcgggacgtgggtttccacacctgcaaaatgggatgttttggggagtgctgaggcaccgtcccgctctcgacgaattcgagctcggccgatttggcctgatnnnnnnnnnnnnnnnnnnnnnnnnnnnnnnnnnnnnncgccgccccgcgtgaatcaggtccctatagtatctatacatcg

SEQ ID NO: 433830 - DNA, 563 bp, Homo Sapiens
actagacccacaggcttccccttctcataagccgagccaccttgaggtcctgaactgacagaggcgagggagaggcatccacgtccctctgcaccagttcagcaggtgggagctctaccttatcctcttcaggcccccaccggctcttccgcttcctcttcacggtggctgcggaggctggcttcccgggggcagctggagcagggatgatagtgggcgcaggcgtggacgaggcggggcaggtggtggctgggggtaaggaccctgacagggcctcaggaggggacttgcgcttcaggccgggatcaggtgctgtgaagctgcctgtggagctggccttggctttccggaactcctccagcttctgtcggtagtacttgtacccttggctattgggctcatacagaaagctgaatgcctggttctcacggttgttctggagggcaatggtttccacctcgggacccccgtccgctatgaacctggccaacttttctgcaaggttcttgacctcttcgtcctctgggggtgaaactttaagcaggctgtcagtactgggctca

SEQ ID NO: 433831 - DNA, 1094 bp, Homo Sapiens
cggtggtggctgggggttaagccccctgaacagggccctcaaggaaggggactttcggtttcaggccggggatccaggtgctgtgaaagctgccctgtggagctggccttggctttccggaacttcctccagtcttctgtcggtagtacttgtaccccttggctattgggctcatacagaaagctggaatgccctggttctcaccggttgttttggagggccaatggtttcccacctcgggaccccccgtccgctatgaacctggccaacttttctgcaaggttcttgacctcttcgtcctctgggggtgaaactttctgagaggctgcctgcgacttctgtgcttcctttcttatctcagccaccttcttcctgtagtagaggaattccctgctattcttatcgtgcaaaaatgcaaatgctgggttatccttgtagtcctccatagctactttttctaactcggggcctccttctgccacaaagcgggccaatttctctatcactttccgagtctcggctccctctgggggtgaaactttgatctccagccactgctcatagtcctcctcctcgtcctcgtcaggggactggaagacactcgggcggtgcgccacgggcagctgcttggcgtgggagtagctcttcacagggcccggcaggctggccagccccaggcctgtccgcctgctgatgagcagggacctcttcccagcgctgggggtgggtgtgctgggaggggcgctgggcgcactggtcggggcgtctgtgctggtctgtgccttctgcaacttcagaaactgctgcaagaagctaccatcgttggcaaacttgttggaaatgcaggaagagttgtgtgcatttgtgatttcgccaggatgtgggggctgagggctggccacctgattctgcttggctttctgttccattttggcttcaatttcccgtttcttctgagcgatgagctcttcctggtgaaggatgttcatgttcatttttccagatttagggggagcaaccccaaaccaccggttagcctttcctgcaacatcccggttgtccatcttgagactcatccaatcccacactccgct

SEQ ID NO: 433832 - DNA, 746 bp, Homo Sapiens
gggtagctgagactacagcccatcttatttctttaaatcattcatctcaggcagagaacttttccctcaaacattctttttagaattagttcagtcattcctaaaacatccaaatgctagtcttccaccatgaaaaatagattgtcactggaaagaacagtagcaatttccataaggatgtgccttcactcacacgggacaggcggtggttatagagtcgggcaaaaccagcagtagagtatgaccagccaagccaatctgcttaataaaaggatggaagacagtaaggaaggaaagtagccactaagagtctgagtctgactgggctacagaataaagggtatttatggacagaatgtcattacatgcctatgggaataccaatcatatttggaagatttgcagattttttttcagagaggaaagactcaccttcctgtttttggttctcagtaggttcgtgtgtgttcctagaatcccagctctgactccaaatgactcaatttctcaattagaaaaagtagaagctttctaagcaacttggaagaaaacagtcataagtaagcaatttgttgattttactacagaagcaacaactgaagagggagtgtttttactttcagactccgggattcccattctggagtctctctgcttttaaaaaccctccctttgcaatagatggccaaaacagaatgatggtttattaaacttgggaaatttacgggggccctccagaacaagtg

SEQ ID NO: 433833 - DNA, 1424 bp, Homo Sapiens
gagggaggacccagtgtgactggtctaacctcaggtggtaagcaggttgaagaaaggaagaggacccattaagaacctcaggcagaggaaggggagctccagctctgacgtaatgaacaccgggacccaggagcaccaccaccccagcaccatgtccccaaggcctcaggggatcaccagccccaaataggagggaaaggatatcttatagaggctaggaagaaggcatgggtgtggcacaccaaagaggtgggccacagaggacagcgtgtgggcagagtcctgaggagaagtggggacagagccatgggggcaggggtaggcaggtgctcggtccttgctccagctgctgacttgcccagcagggctctgcctggggagggtgggagatcagcgacacaccccaccagggttcctgctggggccaccggtcctggaaaggggatccgagcccacgataagaggctcgaagcaggtccttaggaaacaatgggtggcttgatgagacctgctctgtgatactcctgagaagggagaagcccctgcagccagtccccactggaaaggaaattgggggtttccgtggcaaccatgctccctgggcacaaagacttgtctgtctgcttggaaggcagcctgaggtgtctcgccctgcagcagcctttgctctggggaacagggagatggagggaaggatgtggggggatccaaaggggctatagggcccctggtgcttcttaaggagctgacagtcacagggccactggaataggtgcatgctccacgcagcatggcggtaacggggaagcaacaggtggtgacattgcagataagcagaggggaagggggttggaaagttgaatattttattatttacacatataaagtgagaatgaaaattgggcatggggcaagggcaggaagatgactccagctcagtcggtgatgatgagctcgtccaccccccagtcttcatagctcccatctggcaggtaacggcgaatgatgatggggatctttcgggccttgagttccttcatggcaatgagcagaggatctgtctccccctccagctccaccatcacaggggcacacatcgcaatctggagcgctcgggtgcccagcacgcgggctcgctcgtacttggtcatgtatggtgtggtgattcgcttctggttggcctgcggtcgctccccagaggggaggatctcgacattctcctggccttcctcttcggcattctccaagtcatctagcccttcatcctcctccacatcatcaaagtcgtcgccatcaaaattgtcctcgttgtctgacatgacaccctcgcctcagcgaccccgctgcgccccggtcccgcgcggagacccgcaaacagcgacactacgactcgcgcggctcctagcttatcttgcgcccccgct

SEQ ID NO: 433834 - DNA, 1408 bp, Homo Sapiens
  misc_feature (136)..(162): n is a, c, g, or t
  misc_feature (188)..(198): n is a, c, g, or t
gcgttaccaagttaattagccacagtacaaacctatccacaaagtggttggcttatactcactatttcaatgttaaatgtctgaaccaaatttcaccactagtttttaaaaactgctaatacactgaccatgatgnnnnnnnnnnnnnnnnnnnnnnnnnnngtaaaccgacaacgctgtagtctttnnnnnnnnnnnttatctgaaagtgtaccttgtgttcctgggggtacttgttactgacgactttaaggtgatgttggcaacagtccagcccagctgggattttaaactttcccctccctcattctacatcagttctttaaaaagctccgatctccgtcccccaaggtctatagggcttgccaaggtttgcagcctgcgtgggtgctgaagggctcagtgcattgggagacagtaagtggaaggagccgaaagagaaggggaaggccgacagggaggccactgaggagagcagaggcggcgacagtttggaggcggaggtgaccacagggagcaccggtccgaggctgccgctagggggcgctcgcaaagcaggcgcctccggatgtgccgagcccagccctgccctggtggtgcggttccgtgggtgaggccgtggtgcccgcgttcccgtggccgttctggggcagcaacagcgggtgcgcgatgtgcgggtgatgtccgaagacggtcccccagggaatgtgtccgaggcccgcgtgggcgccgctcgcggcttcccgctgggaagcgtagttgttgagatgcgaaaccagtcgaactcgaagcgggtcagaggcatctagtccttcaatgatgctcagataacgcgcaacttctgccaggcattcccgaaatcccaaactccgatagtccatagcaagggcgtgcgcgtcaaagtaacctttccctcctgccgtatgcagcattttcaggtgatccacggtcatctgcaggatctcggctttttctagcttagcagatccctgcttctcaaaagcactgggtaccagccttctcagctcagacaaactgttattgatccggtctcgtcggcgcttctcaattattcctctccgtctttttctggccaaaatctgggaagatgtagttggggacatggaacctagagccgaactcaagtttccattctcgtccgcactctccttctccacctcgatggtctcgtccagctcgctgtccgaggagctgtactcggggtgagctcgcttcatgctggctccctgggggttcctggggagggtcggcgcggcgggcagggaggagttaactacagcggcgcctctccgctctcggctgcttgcgttccgcacacactgatcccgctcacgctttgcctctggttaaaactcaaccatcctttcccacgctgagccccttccca

SEQ ID NO: 433835 - DNA, 1260 bp, Homo Sapiens
gtgtgagccactgcgcctggactgagtgtttgtttctttaaaggatcttatatttttcctgtgctacataccaccacagcagcccagcttctgtggggagagaagttgaaggatcccgaagctttagaaaaaggatctcagctgtggcacaggcagtgttatgcgcctcactgccacattggtgctgttgtattgaaggtggtgcttctggccttggcccttttgagttggtttccatttgggctgcaggtgactcagtgactccctcctcaagctgtcctcctgctaagaccagcagtcacaaacccatggcaagggtgagtgtgaaggcctaaccctgtgcctatgtaataggctccaagcatcgactcccatcctgagaggaccggcccttttgacactcaccaaccaaatctgttcattcgatagagtgaccaggcctccctcacctgcccaggtgtatgatcctacagttcctgccttctctcctaccccgcacagctgccaactggtcctacatcctcagcccctctgccaccaccttaaataggactttactgattccccaactttgtctttttgtaggatgagatttcctttttatcccaccgcccccacaccccaaacagacattgctggagggcagactggaggaaggggaaggcatgcaggtacaattactcgccttgtcagcctctgaccctacatctctcagaatcgtcggctgagaattaacccaaggaccacaaccagtgcctgatttctacttaggcgagagacggattggaaacgatccctaagaaactgactgacggtgacgaatggccaggaggcgtgtgtccaaataacccaggaggcggcacagacgatgatgcgcaaggcagactgggcaccgtcacgtagacacagaacaaaccaatcagaatacgaacaaagaagaaacaccgactcttcgcagctgcaacttcaaagtactcacccttcatacatggcagggattccataatgcaccatggccatctacgatttcaatgtgcacactctctacaatgcaggttcacccctcggcagcctgatatcagcggtgccaagtagcagaacggcccagatgctccgccttctgcccaggacgaatgacctgcacaccctcacagactggcaacgctcgccacatccgaaaccaccccctgtcaacaatcagccaacacacagcccccacgcaccacaaaccaggacaacactcccccgaccactcccgca

SEQ ID NO: 433836 - DNA, 449 bp, Homo Sapiens
ctctctcttacctcagtctggaaggttcttccactggctcttctcaccaacagactgcaggcctggctgtcccatctaaagtgctgctttccccctgtccccctctatgcctacactacactctgctgagtttccttaggggcaccgactcctctccatcatcatccgtttcatttatttgctcatctcaccaggatacaggttccgggggggcagggcagagcctttgcctgtcttgttctctgggcctgacagaaacttagggccccataaatacttgaattaaagaagcaatgaatggatagctgggtaaatgaatgaataaacaatcttagcggactcctttcgcagggacttggcaagggttcacattggtgcaagggcggtctcagtgatgctctcatggatgaatgcagtgttccactgtggcttttaaaaaatatattttg

SEQ ID NO: 433837 - DNA, 1846 bp, Homo Sapiens
  misc_feature (12)..(12): n is a, c, g, or t
  misc_feature (62)..(62): n is a, c, g, or t
  misc_feature (100)..(100): n is a, c, g, or t
  misc_feature (378)..(378): n is a, c, g, or t
ggtaaaaatgantgccccccggtcccatcatcccaagttccaaacaattatcaaacatgtgncccaagttttcaatttaatatcctcctcactctccccnaccccaccccttcaacaggataccctgaagcaaaataggggctggtagggtggtcctttgaacccagagaccctcgggagggagtgaggttatggaggagctagaaaaacctgaaaaaatctgagtaggctgaagcaaatagaaaaattgttgaggaagtggttgttgccagtgtttgggaaaggctaaagttaaccctcatcttctctaccacacatcatcccttcttcttcttccctctttctcatgatgtggggatacaagctagattagaatgnatgggtttttccagattaggggccactgataatagaaatgttcagcctggagaaaaacttcagagataagtgtgtccctctaattaacctcttcactcatgttgcagacctctagggcaagcaggagcctgggcgtacctgctgttctgaagtgggatctgggggaagtacattgggccattgggcctctcacaggtccctactgccccaccattttagactttggagagaagctcagcaacctcgaattgcacccagtagagaagaagggagccccgagggtgagcccatggcccaggcggggagattttgcttggaacatgttgccctctgagcaaaggctgcaccccacaccagccctgccagagaagtctcaagagaggtgggtgattggagtcctggtgggaggtcccaacggtgccacggctaacccggtgagctgcagggacaagtcccaggatgcgcgctaaacgtaagtggagaaaggatctccaggtcccaggtgccaccgaggaacaaggttgccatccttgtcactgtccactgtgttctgagaggtcctagaagcaatggagatggtgtctggttggctgctcccatccccctggctgtcaatatcctccactccatccctcttactattgttcctctgtttggctggtgttttggggagctgaagtggctcctttaaagcttctttcaggtgaatgatcctttcttgaatcacttctcgaatgttcttgatccactcctgcttggtttcaatgttggaggctttcagcactgttttattgtctgaggatggggtgcgcccagaccacaaggcgaatttgcagggatcgcccttcacgtgctcggtcacacccagctctgaggtcagtagcttgttcttgtaaacatatttcgtgtgtcctgaagaatctttgatctccttgctaaaaaccaaggagatctcaaagaggaacaagtgccgctcccgccccttccggatcagcgacttcgggtcccacacttgaaaggcatcctggagaatcaactccccctgcacatccaggttctcgtcgaaacccttcccagcatgctgaacatgccatggcatcaattggctttctttgggacactgagcatcacctcccaggccatccttgagctcccctttcccttcttcacagcaagttaaaagttccttcaggagcagttgatatttggtgatcctttggacaggcttaattaggtaggaagagatggagttggccagaccatgccgctgttgtatctcatcaaagaaggtgccccgcatgctccaggataagctggttggaatcaggcttgtttttacagtaggtgacatacatctgaaatttgtctgcccaggtaacaaagcagtgtcccacatcctcaggcagttgctcgtacttctccagctctttgaggaagatgttgttacctatcaaacgggatcctcaga

SEQ ID NO: 433838 - DNA, 2629 bp, Homo Sapiens
  misc_feature (957)..(966): n is a, c, g, or t
gttgttttgccttaaaacatcaatatgctggattgtggcgtgaggtatttttattccctttgttagtactggaaaccgtctggtacatcttgtaaggcaaatgattaacacacggcaggctcttcgtccgtttgcaagttgctgtttgtttccagctacaccagtcagagctccacagagagggtgcgttcctggttctcaggtgggcaggtgctatggtgcggggcgctggaaagaatggggttgaattggccctcgcctccgcttgtttgagactctcgttagaaagggcttaggaaaaccaagggaatggcagccaccccatcaccatcgagaacaggcagacgtttcccgagtaggggccaaagccactggaaaccgtgttccctgtgcagtccgactgacactaccccatgcctggggggaatgagtataaaaagggaaatgtttttgaagacaggcacgatatatactactagagaatgcgcagtttcaaaccacagttgcaggaggatataggaataacgacaggtgccggggactacgtaccatgatttcatagtgctctgcagccagcaggctcactaaacgctcatcacggaacataccacaaatggtgctgatcaatgacacacgggttttcatgcttgtgacacagacagacagcaaaacaccacggcttattatcttcccattgtgtacaccactcacaggacggtgacagtccaggtattgcactggatctcggctttgcttaacagaaaacaaccctgctacggttggaaagagttaccacttaaaacgatttggtcaacttgcaccaagaagtaggttgggaacaggtgttttcaggtgagcgtgaaaccccgcagtggaacgctgtgtgctgcaaattgcttattaatcagagaagtgagtcctactaacttcctattattacaaaagtagaaagactgnnnnnnnnnntgaaatctgaaaatgatctcatttgcttaaggctgcactgagtgtattgcaaacaaacaaacaaacaccgggaagtccacttcgtaaaatgcagcagccaataggtgaaaataataaaagaaagaactttttttaggaagaaaaacacttgccctgtcttgtgttgaacggatgtgtgtgtactgtttttcaggggcagggtggagggaagatgtcatttggcactctcgtaatgacaatgttttaatactggcactagctaaagaacagcgcccccagcggatgccaggactggaggtgggagcgctgttcattcagacgctgagaggtcggggttaaaaaaacgcggctgtggagacaggagagctgctgggaagccatgtttttgattttcagacaggtgttaattttaccaggcttcattaatacagaagaaaggaaacgtcttccaggaaagcagccactgcggaaacgagtgtgtccggccatcaatacacaagagactctttgtggctcaacacgtggggtcgcgaggcagagctggtggcactgcggatcacttccatccacctttcgaacgtgtactcgctttccgccctgaagtagtagacgtgggacttgaagtgcagcttgaacacgtagtctttctggatgttctcggactcagaggggatggtgagcgagtagccgagcagaggcaggctggcaaggggatgattgtcctggtgtgatttgtagaagaacaggcagaagtttgtgaacaccacccacagcttctgccacccgttgctgtttttgaatttcctcagcaggtttccagacaactgattctccactgcgatgctgaagtccaccatggagacgctggtgttgcggtgccagcacacgtgcaccattgtgttgccgcggtgcggggcctggcgctccagcgatgtgcgcgaggcgctcaggtcatcctctgactcctggtcagccgcggtggcttcatcaggggacttgttgtcaggggggctgctggccaggaactcaggggcggggctgctgctcttctccgccaggtcaatggccatctggatgtcctcaacccacttctccatctcggaccgagaactggcggccacgatgatggactgccgctggccccggagggtcaggcagtggggcaccccccactcgtcttcgctctcctcaatcgtcatgccatagagcgggagctgcccgtggactttaaactgattggaggccgtcagcccccggctcgtgtatagcaggacgtcgttgaacaggaagaacatgcgctgctggagccccttccccgagagcttgctgaggctgcccagacggatgaactcccttcccggaaccacaagattgtcaatgccaatcaaatctttcttgagttcgtgcagcttctggaaattctccatcttgatcatcgtaccgtggagctgtgccaccatctccgtgatctctgccaaagcggctcggcagtccctgaagtcggcgtggctcggcgggtggtgtttgcacagccgctccaggacctgcttgtagtgcatgagccggtgcagtggccgcaggaggaaggtgttgagcggtaggtaacacaccttctgcagctcaaagtctccctcgtgccgaattcgccacccaggcctcgctc

SEQ ID NO: 433839 - DNA, 1119 bp, Homo Sapiens
ccgccaggttcaaatggccattttggatgtcctcaaccccacttttcccattttcggaccgagaacttggcggccacgatgatggcctgccgctggccccggagggtcagggcagtggggccacccccccactcgttttcgctttccctcaatggtcatgccatagagcgggagctgcccgtggactttaaactgattggaggccgtcagcccccggctcgtgtatagcaggacgtcgttgaacaggaagaacatgcgctgctggagccccttccccgagagcttgctgaggctgcccagacggatgaactcccttcccggaaccacaagattgtcaatgccaatcaaaatctttcttgagttcgtgcagcttctggaaattctccatcttgatcatcgtaccgtggagctgtgccaccatctccgtgatctctgccaaagcggctcggcagtccctgaagtcggcgtggctcggcgggtggtgtttgcacagccgctccaggacctgcttgtagtgcatgagccggtgcagtggccgcaggaggaaggtgttgagcggtaggtaacacaccttctgcagctcaaagtctctgcagaagttctccagccgccgggagctcttgattccattctccagggcctccaaggcctcgctgtgcttccacaggtgagccgccaggtgcttcatgccctgaatgttcttcagcgtgacatcgccgattctttggtaatctctgatttgggcatttgagcggccttcccacagggcaagtcgttgctcaatttccttgagaaaattagtatgaaatttgtgcaaaggttcaaaattcgggaatatgagacttttcagtgcttccggcatggcgtcctctttgctcactgtgctctgaaaccacgaagtgataacttcgagatccttcagatatgttcgctaggtggtagacacttccttagctatgaagtacgctttatcagcttgggaatctcttcctccggccctcatcctcatcgtccgtccgggggccggcctggtcattcagcggcggtctgatcaagggagaggcctgcttggtgtcggggctcaggttgggagacaaggtccctaagttcagagccagg

SEQ ID NO: 433840 - DNA, 1679 bp, Homo Sapiens
  misc_feature (1637)..(1637): n is a, c, g, or t
ggagcggtccctgcaacccgtccggcgggaactgccttctagtttttagtctcagaccagaccaccgggcgcaccccgatgccgagcccgcagcttctggtgctcttcggcagccagacaggcacggctcaggatgtgtcggagagactgggtcgcgaggcccggcgccggcggcttggctgccgggtgcaggccctggactcctacccggtggtgaatctgattaacgagcccctggtgatatttgtttgtgcaactacaggccaaggagacccccctgacaacatgaagaacttctggaggtttatattccggaagaacctgccctccactgccctctgtcagatggactttgccgtcctgggcctcggggactcctcatacgccaagttcaacttcgtggccaagaagctgcaccgacggctactgcagcttgggggcagcgccctcctgcccgtgtgcctgggcgatgaccagcatgagctggggcccgacgctgctgtggacccctggctgcgagacttgtgggacagggttctggggctgtacccgccgcctccgggcctcactgagatccctcccggagtccccctgccctccaagttcaccctgctgttcctccaagaggcacccagcacgggctctgaggggcagcgggtagctcaccccggctctcaggagcccccgtcagagtcgaagcccttcctagcacccatgatctccaaccagagagtcaccggcccctcccacttccaggacgttcggctgattgagtttgacatcttgggctctggcatcagctttgctgctggtgatgtggtgctgattcagccctccaactcggctgcccatgtccagcggttctgccaggtgctgggcctggaccctgaccagctcttcatgctgcagccgcgggagccagatgtctcctcccccacgaggctgccccagccctgctccatgcggcacctcgtgtcccactacctggacatcgccagcgtgcctcgccgctccttcttcgaactcctggcctgtctatccctccatgagctggagcgggagaagctgctggagttcagttctgcccaaggccaggaggagctctttgaatactgcaaccggccccgcaggaccatcctggaggtgctctgtgacttcccgcacacagctgccgccatccctcccgactacctgttggacctcatccccgttatccggccgagggccttctccatcgcctcctcgctgctgactcacccctcacggctgcagatcctcgtggctgtagtgcagttccagactcgcctcaaggagccccgccggggcctctgctcctcctggctggcatcccctggaccctggggaaggacctggccgggggcccctctgggtgcggcctgggagtctggccttcccggagaccccagacacacccggtgatcagggtgggggcggggcactgggggtaacccccctttccgaaccagcgcatcccgggagcggggtgggcccccaggggcgcagaaagggaaaacattccttgcttttttttggctcgccccgccgggcggggaacaccaaaacctttcttaactgggggaaggcgctgaaagtgggacaagggaaacctgggtaanaaacccgaggggacactggtttcttggaaaccccttctggtt

SEQ ID NO: 433841 - DNA, 675 bp, Homo Sapiens
ggagttgatttttgttttttaaacagaaggcatcttcagatgagaagctgatcatttacatgtgcaggtgtttacagggttcctttctgtcctggtgtagattttttaaccagcttgttggccctggtcattttggccacatttgtgaccatcataaaagctaagtggtatttctgtgtagtttccgtctggaactgctttcccattcccgggaacccatagccgggccagccagggtcccgaacacaggcccaaagtttattaaaccccgatcataacctccagcaggcatttcatttaatactgagcttagttcctgctgggtaaggcattccgaggtaaccagggccctctgggcaccccctcaaaagccagctcttcgagggtgagtactccttgtttctactgtgagtcgcgtcttgattttccctttctttgatgtctcagtgtgtgtcccaaacacctgcatctcatggactgtttgtgcccatgcccagttcctggcatgccaggccctgggctcaggtgcacaactgactctctttttcactccctaggggaaccccctcggaaggggaagggttgggtgctgacgggcaggagcacaaagaagacacattcgatgtgttccgacagaggatgatgcagatgtacagacacaagcgggccaacaaa

SEQ ID NO: 433842 - DNA, 1179 bp, Homo Sapiens
ttttttttcacactgcatttcctctacatttattgcaacggctaaatgattaacaacattcacaacttcttagatcttaaaaaacagaaacaaaagaaaacttccattttgtaacatcacaaatgtcttctaggctttatcaaggaccaaaaacactacaattctctaagtgatttccagtgatggaaacaagccagagacagtaaagcacccagagtggcgagagagcacttccagatgcctgttgtcctctcgggggtgaccctggaactagaacgacagaaaagacactgtgactttgacacggctgtgccaccacacatcacgcgcgacacgaggatcctgcagagcggcctctgcagagagcaaggacagcctcggttaagagggaggggctgggggcacggagggccagtggcatctcctctatcccggctggccggcagctggcagcacgcaccatgctctgctggctcccgacaccttcactgccccagcgctgaatccacaggagaggtgtcctctgagagtgtagggggctttctaggttcaaggagatgtgccctttgacccctgccaaggactcacagaaccatctcagctcaaacttggaggagcggcaggaggtggggggcggtcagtggccacacgccacagattcctaaagcatttaactttttaataaaatgaagtggagaaagtcaagaatgaacatgctaggacaaagcacatggaatggtcagggcgatgctggagagagtgcgcttgatccacgctgcaggtgtgtgcgcctcgctcgggtcaatgggctgagccccgcttggagctccatccattcacctgacccatggccaacatggaagctgtcggaggggtcaggaaaggagaaggagaaaggagatgatgaaccccccgcacctgtgactccccaaaaccagctccactccaggcccccacaggctggttcgttcgagggttgggttataaacccaaactccatcctccatgctggcacctctactgccataaagatctgccagttgccaaagctacagaagccactggaagcaagcagagcccctgggggtggtggcactgcaaggtgacagggcaccaggcagacaaggagctgggaccacagcctaggaagtctgtggcttaaagaaagccaggatttcc

SEQ ID NO: 433843 - DNA, 2429 bp, Homo Sapiens
ttttttttgcatttcctctacatttattgcaacggctaaatgattaacaacattcacaacttcttagatcttaaaaaacagaaacaaaagaaaacttccattttgtaacatcacaaatgtcttctaggctttatcaaggaccaaaaacactacaattctctaagtgatttccagtgatggaaacaagccagagacagtaaagcacccagagtggcgagagagcacttccagatgcctgttgtcctctcgggggtgaccctggaactatttgttggcccgcttgtgtctgtacatctgcatcatcctctgtcggaacacatcgaatgtgtcttctttgtgctcctgcccgtcagcacccaacccttccccttccgagggggttcccacgctgaccggctccctgatgccctttccgagggagcccaggccatggccctccttccagcccatcttctgcagcatctggaagcccaggttcttatcggtcagcttctgctgggcgaagtccaagtccttgggtttcttctttttggacatgggacgaccccgaggcctgtcataggcaattcgaactggttcatggacttttggctcctggatgagacacactctcttgggagctggaatcatgccaaccttcaatgacttgctgctgatcctcttccgagggaagcaggtacctgaggaggcctgtgacaaggcaggtgctccagccaggtcgtcctcggcagcctcgccgggaaggccgtcggcaggggtgctgccctcagacttgcccgcccctccaggagcgggggcctcctctcccccatcctcatcgtcctcgtcctcctcctcaggcatcacctctgggctctccagctcagcctcccgcggagggggctcgtcttcaaactctgcttccccttccatgaggtccacggggctctcctgagaacccgtggtgtcaccaccaccagtgtgaaggttgtgcggagatgacgtgaaacaaattgatggacatagttcaaacactttctttcgatagaatttgaaagcagaactattttggtcatgtagaaaccacaggtcagggttatcggtgctgttttctatgctgaattgttcgatctctggtcccacctgagcaacaaatctagccagtttctctgcagtctccattgtcttcatgtcaatgtcagcagatgggcagggagaagaggtctgaggtgcttcagagatgtccactcctgctggcttgggggatgggcctgaggcttctaagctggggtcctgaggagaaggtccaactgggtctggcgggcagtccttggcagcatcatttctgtctggcagggatggttttgcctgtgagaggcctggacctgccggccgtggtgtttcagcctggtgcctgaggataggagggtctgggtcccggtggtcgctctcctcgccttccagccccggagcccttgagcacggaggagcccccgccgctgccacggaaggagtttcttcttgaggttgcggacagcccgggagtacagcatggccctcactgcacagtctgctgaggtcggcttctggtcggctcctcgcaagttctcgctcatccgctgcatttctgccaacttcagcttgtaatatttatactccagactattttcatcagacaaaaaccagtaagcagggtcctctttgagaagagttctctctttgggagacaggctgccttcgatgacacgtttcacaagctggtcgatggtgcccactaccctgtgatctgctcgctgggggacagcatcactcagactacttggagccttggcctgaatttcaggtttcgtaggaggaatcattttctcctcctcgtcgcatcggctctggttcggctttcttaacctggaggggacatccgctgctgactagccaggccttcaggtggtctatgtactctcgcccaaacaaagtggagtcttcgaagtttggaaacgcagcaggtgagggagctatatcttgcaggccgacagcttctaagattttctcctgccggaaagaagaggccaaggaaaatgtctgtcccaaaagggccaaagacttccggcagagagagttggtggtttctagggcaagagccaagtccagggggattactgagggtcttcatcttgacacttagctcgtaggcattgcaggccataagcaaaggtgtgacactcttcagaagccggtcttgaagtctcattatgtacttgtcaaaaggctttatgatttcaaaaaagcaatttttggtcttcacagcacctttgtctaaaagcatgtttaaaaactcattatcaactctgggtgttttcaaagcagagtgctttaaaaatttgatagtaaaaaagcaaaaatctctgtgctctggttttaaggaacatgttgaatgaggcaagcattttagc

SEQ ID NO: 433844 - DNA, 336 bp, Homo Sapiens
  misc_feature (205)..(205): n is a, c, g, or t
  misc_feature (281)..(281): n is a, c, g, or t
  misc_feature (292)..(292): n is a, c, g, or t
  misc_feature (315)..(315): n is a, c, g, or t
gaataagatacaagtttatttatctttcatagtaacagtccagggctaatagagcagttctgccatcctcatcacaagggcttctgcctctgggtccaaagtagttgccccaattcctgccatcacatctgcaccccagccagtggagagggtaagagggcaagggtaacacatacatattcttttttagggcacaaactagaantaatacatgcaacttccgttcacatctcattggccccaaactttggacaaacccagatgcaagagaagctggtaanttagcctttanttgagaagccaagcgcccagaangcagggagttagagtttacaa

SEQ ID NO: 433845 - DNA, 589 bp, Homo Sapiens
atggggaggcgagaatcaaataaatggatgaatgattaacatctgcagcactcagatggtgataggtgcacaagaagaagatgcagagaggtgggtagggagggagggtggggtgtgttgtccttttaaataagtcagggaaggcctcgttgaaaggtgacattggagcaaagactggcaggtagtgaggggtgaaccatgtggctctctggggaagaatgttcaggtagaaggaatggcatgtgcaaaggccctgaggcaggagggtgcctgtgactagaaacggcaggaaggcctacgtcccagggcagagcagcaggcagaagaagtactgggatgggagaggcctttgtaaggacctggcttttcctctgccatgggaggctgtttcttcgtttaaaggagcactccagtgtctgcagataaattctaaaacagctggtttcactcatttgtcctcattaaataggttgctttggtcttgaataaattcagcctatatttactcttaaaaccaaatggtactcttcgccttatgttaaactaacaaattatgtatatatatatccttgatatgctctttgggagg

SEQ ID NO: 433846 - DNA, 769 bp, Homo Sapiens
  misc_feature (173)..(174): n is a, c, g, or t
  misc_feature (349)..(357): n is a, c, g, or t
ggcatctcagactcggtcattaagctattgttgcaccctccggaaaacatggcagagcatgacctttgagtaagagtgaggatgaccttgcagatgactttgcccattcgcgctccatcctcatgaaggaaattgctgccaaggtctgtattttgaccaggcacagagggggnncatcactccagctttccatgtggttcactctgatgcgatgctgtaaatgatcaactctttgaaataggaccctccggcccccatttcctagcagccccccttcagtttggttctacaactcaaccccttcactgcacattgagatggctcaggggttctagcaggggcttccagnnnnnnnnncaccatttctgtcccgggggaccagttctgagctgtgctagatcatcacacgaccacccagaaacccacttgcacttcctgctggatgatcaggcaacgctgctgctgaccgtgctcccatcttagacccagaaggttctcccaaacagaggagcccagtgaaacagccagccaggggccaccagctcctggactggcatctgtctctaaaatggtagaattaggatatgaacagtactcatgtagtggtgtggaagattaggagcatgatacacaaaaggaagaagtagttttaacagatatggtgatgatgatgatgcccttgtttcctgtatgtgacaaagaccctgcactttctccctgagacccccccaaaattgtcctgagcacaggcctgtctttgagcgtgccc

SEQ ID NO: 433847 - DNA, 1200 bp, Homo Sapiens
ggctggtactggcccgggagtatgggatcacagggcctcgccgggctcgcggctgcctgggcgcggctggacccacgtcttcaggtcgggcggcgcggaccccggcggggccctgggcgcgcttctccgcctggctggagtgtgtgtgcgtggtcaccttcgacctggagctgggccaggcgctggagctggtgtatccgaacgacttccggctcacagacaaggaggctgccttggagacactcagttcagcttccgcatgcgccagtgtggagggcagaggagcccctggcatgccgacgacaggcactacaacagcagggcccctgtggcactgcagagggagccggcacactacttcggctacgtgtacttcaggcaggtgaaggacagctctgtgaagaggggctacttccagaagtctttggtgctggtgtcccgcttgccctttgtccggctgttccaagcgctgctaagcctcatcgcccccgagtactttgacaagctggcgccctgcctggaagcagtgtgcagtgagatcgaccagtggccggcgcctgcacctgggcagaccctgaacctacctgtcatgggcgttgttgtccaggtgcgcatcccatccagggtggacaagtccgagtccagtcctccgaagcagtttgaccaaagagaacctgctgccagccccagtggttcttgctagcgtccacgagctggacctgttcaggtgcttccggcctgtgttgactcatatgcagacactgtgggagctcatgctcctcggggagcccctgctagtcctggcaccctcgcccgacgtgtcctcggagatggtgctggccttgaccagctgcctgcagcccctcaggttctgctgcgacttccgtccctacttcaccatccatgacagcgagttcaaggagttcaccacacgcacgcaggccccaccaaacgtggtcctgggagtcacaaaccctttctttatcaaaacactccagcactggccccacatcctccgagttgggggagcccaagatgtcccggagaccctgcctaaacaaggccaagctggaaaaacctttcaagggttgaaaacccctggaacacccaagcccagccttctaaacggctttaaacggggccaccttcccccgggaaaaaaggggcttgctcaaaagggctgcctccaggggcggtgcc

SEQ ID NO: 433848 - DNA, 881 bp, Homo Sapiens
tggaccggtccggaattcccgggatggacgcgctgttgggcacagggcctcgccgggctcgcggctgcctgggcgcggctggacccacgtcttcaggtcgcgcggcgcggaccccggcggcgccctgggcgcgcttctccgcctggctggagtgtgtgtgcgtggtcaccttcgacctggagctgggccaggcgctggagctggtgtatccgaacgacttccggctcacagacaaggagaaaagcagcatctgctacctgtcttttcccgactcgcactcaggctgccttggagacactcagttcagcttccgcatgcgccagtgtggagggcagaggagcccctggcatgccgacgacaggcactacaacagcagggcccctgtggcactgcagagggagccggcacactacttcggctacgtgtacttcaggcaggtgaaggacagctctgtgaagaggggctacttccagaagtcaggcgttcctggggcagctgtcctgtgaagttggtgggacgtgctaccctgggccagctccagtctttggtgctggtgtcccgcttgccctttgtccggctgttccaagcgctgctaagcctcatcgcccccgagtactttgacaagctggcgccctgcctggaagcagtgtgcagtgagatcgaccagtggccggcgcctgcgcctgggcagaccctgaacctacctgtcatgggcgttgttgtccaggtgcgcatcccatccagggtggacaagtccgagtccagtcctccgaagcagtttgaccaagagaacctgctgccagccccaggtggttcttgctaggcgtccacgagctggacctgttcaggtgcttccgggctgtgctgactcatatgcagac

SEQ ID NO: 433849 - DNA, 1123 bp, Homo Sapiens
tggcccgcgtttccccggcaacccgcggccgccgccatggacgcgctgttgggcacagggcctcgccgggctcgcggctgcctgggcgcggctggacccacgtcttcaggtcgcgcggcgcggaccccggcggcgccctgggcgcgcttctccgcctggctggagtgtgtgtgcgtggtcaccttcgacctggagctgggccaggcgctggagctggtgtatccgaacgacttccggctcacagacaaggagaaaagcagcatctgctacctgtcttttcccgactcgcactcaggctgccttggagacactcagttcagcttccgcatgcgccagtgtggagggcagaggagcccctggcatgccgacgacaggcactacaacagcagggcccctgtggcactgcagagggagccggcacactacttcggctacgtgtacttcaggcaggtgaaggacagctctgtgaagaggggctacttccagaagtctttggtgctggtgtcccgcttgccctttgtccggctgttccaagcgctgctaagcctcatcgcccccgagtactttgacaagctggcgccctgcctggaagcagtgtgcagtgagatcgaccagtggccggcgcctgcacctgggcagaccctgaacctacctgtcatgggcgttgttgtccaggtgcgcatcccatccagggtggacaagtccgagtccagtcctccgaagcagtttgaccaagagaacctgctgccagccccagtggttcttgctagcgtccacgagctggacctgttcaggggcttccggactggggctggatcactatgaagaaccctgggtggagaatcatgcgtgcctgggggaaccccccgcatagtcccggggacccctcccgcccgcatgattcccgccggggatgcgggtatggccttgacgctgaggcgctaggctccctcttaagagtatttcgcacaggaattactaggtgtgttagcgcaaccccccctgcgttaccattttcgtctcatgctaccccactacggccgcccacggcgcgtgcccgcgcatgcccgacgggcgctgtataagagtgtagccgctagaaccctcctttataaggaactga

SEQ ID NO: 433850 - DNA, 1080 bp, Homo Sapiens
agaatatcagcccttcagggaggatgaggagtggctacacctcctgccaggttgaaggcatggctggggcctcctactgggaggctagaagcatctccatcgattttagcaggttcctccatctcagcctggtctgcagagggccctggaggaggaaggcctctggtgctcacttcaaaggcatcgagaagaacttgttcccagacttgcagcggacttgctcagtgtgcacgcgcagcagcacctcagcatcttcaaacccatccacgattgcctgtagttcctgcaggcactgcccctccagctggagacgtgcatcacccacacaccaggccaggctgaggtggaaagaaggatcctggtagaaagtggtgaggttgaattcctccatgactctgtccacctctgaaaccaggtccaggaactgggcatgccctgaagtgacctcaagcccaataaaggtcctggttttctcttgattggtgtaaatctttacctggttggcagtaaagaagaatctgtggaaggaggtcatacgggctttcagagcctgcacgaaggggaggatccagtggtggcgcagaaccacactctgggacaggctgaggtggaacaccttcatccttaccagccgggggacatatgtctgggcatggggcagcaacacatcaagcagatccaggaactcctccttggcttcatatggtacatagacgtgggtggcccagttgcctcgctcgtgggggaaggtgcgcacccgtcccccgtgttttgtgctgtcatcttcaggcccctcctcggtgcccgggaacatgttcagcacactgtcaggtactggaaatctctgcctgggaagggggctctggccacgacggtggctcccatcccccggcctggtccgcatcccgtcctcggactcatcctcggagccgctgctgctgtagcccaccaggggcgccgcgctcatggggcctcatccaagaccaccagagcaggtccaccagcaacctcaaccggcacccggagttccgccctcgtgccgaatttaacacccaggcctcgtacctagccgtaagttta

SEQ ID NO: 433851 - DNA, 266 bp, Homo Sapiens
ccaggtaaagatttactccaatcaagagatacctaggacctttattgggcttgaggtcacttcagggcatgcccagttcctggacctggtttcagaggtggacagagtcatggaggaattcaacctcaccactttctaccaggctgagatggaggaacctgctaaaatcgatggagatgcttctagcctcccagtaggaggccccagccatgccttcaacctggcaggaggtgtagccactcctcatcctccctgagtgctgatat

SEQ ID NO: 433852 - DNA, 1832 bp, Homo Sapiens
  misc_feature (1624)..(1765): n is a, c, g, or t
tttcctctcagaaagccttagcaaaatgggtgcttttattttcacagacatgtctatgcaatacactcagtcacaagagagagcttcttaagcctgaccataatttaaactctgaaaggtgagtgagcctgttaagagacctccacccttctagtaacctatatcccttgatatgggaaggatatcttagttctccctagccccttgcttaggattaagtgagagacttcagctttggtgtaaagctgtcagctgccctaatcaaggacaatacacaaaaattagactccttataagaataagggattaaatggaggaagatctagaagtgggtgggaacaaaagagcagaactgagcctgcatctgcagaaaatgtccaaagacaactggcagagttcactccatggggaaaaggcatgttagtgtgtaggtagagaaactggacaaggaaggatggccttagccttccataatggagaagtcgggcaggggatgtctgcatgcaatagacaactgaattagaaagagcagaaatgtaaaccagcagtgcttccctatcttgggcctggctagcttaaaggggctctactgtcattggtcaaaaaactttcatgaggagatccaatcactaatgcaacaaactctaatgagttctaagttggagagagctcagttctaaagcttgggggtagacaggtcactgagagaggaggaatgaaggagtgggatctgaacattgtaataagtcatctagtagctctgatcactttggacattgctgggggatacataacagctcactataacattacaacacatacttatatctgtttgctcctccaaactaacatgacaatgtgtttctgccatcttagcttacagagacatgatctagttcagcttatactcagattttacaaaagagactttgaccacatagatattcataaaattaatgtggttaagaaaaaagtgcaggggcttgaagtcagaagagctccgttcccattttggctatgctgctgttcaggtttgtgacctgcagagcagtttagcatctctgggtctcaatttgttcatctgtagagcgtgggtgatcaacctttatgtaatccttctgtgttgagtgggtctcaagatggaagctcactatgggaatttaaaagcaaactgtggcatcgaaacaaactggacaattgcttgaactctaatatcatcatccatcctcataaagtaacttgttggtcactagtctgacagtactgttaaaagacatttatttgtaacttttgagaaaataattttcagactctgatcttagaataagctcatgagaagtctcatttccaagctggagatcatttccagtttgaatgaacaattcttctttttggcttgggtgaacgtggggataggtgaaagctgagctgcacatccttcagaggtcacaatgaaaagtcagtctttattctagcagggcttggtcatctggaatagctggtacataggtggcagctccatgccctatctcatactttaaacaacatcaccaatatctttttccgaaataagcttgagttgtatatgtttattataggagagaaaagtttgccaagtgtcttnnnnnnnnnnnnnnnnnnnnnnnnnnnnnnnnnnnnnnnnnnnnnnnnnnnnnnnnnnnnnnnnnnnnnnnnnnnnnnnnnnnnnnnnnnnnnnnnnnnnnnnnnnnnnnnnnnnnnnnnnnnnnnnnnnnnnnnnnnnnnnggtcacgtcgttaggccatggcagagatctgaaataaaaggtcaggtcttctgacttcagtccatgc

SEQ ID NO: 433853 - DNA, 484 bp, Homo Sapiens
tacattatttatagacacaagcagaagggaaaggaatcaagcatgccagcagttacctacacccctgctatgagggtcgtcaatgcagattataccatttcaggaacccttcctcacagcaatggtggaaacgctaatagccactacttcaccaatcccagtcaccacacgctcacccagtgtgccacatcccctcacgtcaacaacagggacaggatgactgtcacgaagtcaaaaaacaatcaactgtttgtgaatcttaaaaatgtgaaccctgggaagagaggccctgtggggggactgcactgggacattgccggctgactggaaacatggcggctacctcaacgagcttcggtgcttttgggacttgacagaagctatttggggaaaatccttaaaaggacctggggaaaggatttttgaatataatttcaagttaactgcttcctaaggcagtttttgaggaacccctatggccatt

SEQ ID NO: 433854 - DNA, 616 bp, Homo Sapiens
  misc_feature (168)..(176): n is a, c, g, or t
atggttcctgcctcagttccagcctggtatggttctttgatatgccctgaaggttctcacatggcaacatcagtatcctgccattcatgttgttttaagatgttttaaaaaccaatggacaaacttcttgcttcaaggaacaaactcttaggttggcaacagcatatnnnnnnnnngatcacagctgaatctcatgaaagattaaaaaccaaaggattcaagaccggtgttgtaaaatgaagaggaattttacttacatgttacagctgccaagtttttagatgttcctgtcatagctaaatagtcactgctagcctttcagagaacagatagtaacaattgtttgcagctgcagtgttgcatctaattttggtgtttaggctttttattttgtgggaagctttttgttaatatcctgcagggcaactgcctgttgggagggagaggatggaagaaggagcttactctgggggccttgcctattgagggaggctgttgcccagagcagttgcttcatggaagtcatccaaaggcgctctcagtcattacaatgacaggatctcaaagttgggaaagggctgttaagtcatccagtctagtctccacataggtgctg

SEQ ID NO: 433855 - DNA, 925 bp, Homo Sapiens
ccttcctccctcctccatggtctttttccatcgtccagcctttaccttggtgttcccgttttgtgccttcccctgtcggcttccggcctcgtgccgttgtgttccatgcccccttatttgtagtacgggtatctccgcccctgcatctttcccccccggcttcctgtgtctgtctgatgtccttcccgttggatgatatgctctgagttcacctcttttgtccatgtctgtaatttcggccatggtcgtggagccccatcaaggttcagggggttgccccagagcgccctcgatagtcttgttcgtgtctccgcatctccagctgagcgcacgtgtcatcgcttccggctctacgtcgctactccgggctccgtgtctccgggtcccgctccgtccccaggtgtcagtactgtgggttcagttcgtccgtccgctgccgctcaggtcacttggcttgcatgacgggccccgctgcagcccgcgccagtacatggcccctccccgtccgtccgctgctctgcccaggaccccacagcgcaccgctgctcggtgtctggccccgggcccctcagccccggcactctgcccgggcgcaccgcagggcttggaaagcagccccggcgaacgaaaaggcgagtgaggaggcgggcgcgggtggtgaggagcagccagcaagcgtaggagtccatgagagccaacgccggggaggcagcgagtaggcacggcggagcgggcgagcgctccttttctcccgctcctgtggcgctctcgccctcgggcggcggcaacccaccctcttccaacctccggcgcggatagcaggggccccggggcgctctcccagccttgtgcgccctggatcgcacaagaggccgcctccgacgcgtggtcgacgatatcccgagacattccggaccgtaccagc

SEQ ID NO: 433856 - DNA, 751 bp, Homo Sapiens
  misc_feature (552)..(613): n is a, c, g, or t
tcgggggttgatgtggataaacagggcatgcgatgaagagataaaaccaggctggtaccggtccggaatttccgggatcgaccgcaggcctccgttccgccggggtaacggcccggaagtgcggccttgtagtcggtcaggaggaagcggccacggcagagcctggtgcctgaagaggagtcggagatggcggctgcagaggctgtgcatcacatacacctgcagaacttctcacgctctctgcttgagaccctcaatgggcagaggcttgggggacacttctgtgacgtgactgtgcgcattcgtgaagcttcgctgcgtgcccaccgctgcgtgctggcggccggctcacccttcttccaagacaagctgctgctcggccactctgagatccgtgtgcctccggtggtgcccgcgcagacagtgcgacagctggtagagttcctgtacagcggttcgctcgttgtggcgcagggtgaagccctgcaggtgctcacggccgcgtcagtgcttcgcatacagacagttatcgacgaatgcacgcagattatnnnnnnnnnnnnnnnnnnnnnnnnnnnnnnnnnnnnnnnnnnnnnnnnnnnnnnnnnnnnnncactcgcacctgcgcagctgcgtcaccgcctgcgccacctgctggctgcacgtcccccggggcaccccggtgctgcacacagccgtaagcagcgccagcccgcgcgtttgcagctgccagcgcccccaacacctgcca

SEQ ID NO: 433857 - DNA, 1773 bp, Homo Sapiens
  misc_feature (1299)..(1299): n is a, c, g, or t
  misc_feature (1307)..(1307): n is a, c, g, or t
  misc_feature (1319)..(1319): n is a, c, g, or t
  misc_feature (1323)..(1323): n is a, c, g, or t
  misc_feature (1325)..(1325): n is a, c, g, or t
  misc_feature (1331)..(1331): n is a, c, g, or t
  misc_feature (1359)..(1359): n is a, c, g, or t
tggagaaagggcgaagggagagagaggacctgcagctcaggagggagcgggtctagtgtcggggaaccacgggtcccgcagcgcgcgtggccgacatgtgcgggaggccccggatccaccgtgggcgagccaggccccagcgccatcagggcacagggtgcaccggccagtggcgctccagcagcgcccggtgcgagaagaccttggccgcaggcgggcgcagggccgcgcgctcgggccggtgagtgcgcatgtgcacgttgagcgagctcttctcgcgtgaagcgcttggcgcagacggcgcactggaaggcgcgcaacgccggtgtgcgtgaccatgtgtcttgagcaggtagtcgcgtagagagaaggatcgccagcacacggcgcactggtgcggcttctgcccccgagtggatgaacatgtgcttggtgtagtttttccgggagctgaacgtcttgcgacagtggctgcacatcataccgtaggtggcatcagaatcctggcgatgcgagcagagggtgacctgatgggcgcaccgtgtgatgggaagcaagacatgagtgcgacgcactgggacactccctcacatgactgagctaactgcgggtgctcgccatcgtggctggagtgtggggtagaaggcgggtgggggcggcagggtgctggcccccgatggtgctgaaggggggtggtgcgggtggcccaggggcacccaagtgaaaggggaagagtgcaacgggcggccctggggtcttcacaccaggcgggcgggatccagacagtatgcagtcgggctggacaggggtctcagtgggacagccttcggggacagcgccatcctcgtcgtgccaagtggatacatagctgtctggaaatacgtcctcagctgacccagctccccgaagaaaatctctcccggcaccactgtagtcagcgaggccagtgggtgcagggggctcctcgcacgcgctgtcagcagcagcagtgaggaagccagcagcacagtctgggaaggaaggaggtgcctggccctcgcctgggccgccaccttcgccatcctcgccatcggtctcatcgtcactttcctcgtcatcctcgtcacctcggtcatcaggggccgcggacagtgaggggtcagcatcaggcccctcagccttggcaggtgtatgggggcgctggcagctgcaaacgcgcgggctggcgctgcttacggctgtgtgcagcaccggggtgccccgggggacgtgcagccagcaggtggcgcaggcggtgacgcagctgcgcaggtgcgagtngcgggggnataggggtgggnaggnangtgggngcagaggtgcccggggtcgagcgcgggngataatctgcgtgcattcgtcgataactgtctgtatgcgaagcactgacgcggccgtgagcacctgcagggcttcaccctgcgccacaacgagcgaaccgctgtacaggaactctaccagctgtcgcactgtctgcgcgggcaccaccggaggcacacggatctcagagtggccgagcagcagcttgtcttggaagaagggtgagccggccgccagcacgcagcggtgggcacgcagcgaagcttcacgaatgcgcacagtcacgtcacagaagtgtcccccaagcctctgcccattgagggtctcaagcagagagcgtgagaagttctgcaggtgtatgtgatgcacagcctctgcagccgccatctccgactcctcttcaggcaccaggctctgccgtggccgcttccatcc

SEQ ID NO: 433858 - DNA, 2750 bp, Homo Sapiens
  misc_feature (237)..(250): n is a, c, g, or t
  misc_feature (534)..(545): n is a, c, g, or t
  misc_feature (567)..(580): n is a, c, g, or t
  misc_feature (1838)..(1838): n is a, c, g, or t
  misc_feature (1842)..(1842): n is a, c, g, or t
  misc_feature (1844)..(1844): n is a, c, g, or t
  misc_feature (1847)..(1848): n is a, c, g, or t
  misc_feature (1851)..(1851): n is a, c, g, or t
  misc_feature (1980)..(1980): n is a, c, g, or t
  misc_feature (2007)..(2007): n is a, c, g, or t
  misc_feature (2082)..(2082): n is a, c, g, or t
  misc_feature (2625)..(2625): n is a, c, g, or t
ttcacaattcaatgcttattgctgctactcctcttttcatctctattacttctttgcattatctcgattcctctgtcactctcctatcagccgttttattattacgaagccgcgccgcggaatatattttctatcataattaagtacatgcctttgtcaccaatttcttcctcgatcccaccacattatatcacattgtgtttggtttacacctcaatcatcaaacatctccgatgnnnnnnnnnnnnnncacccgctcagctcttataatttcttcatgctgatggtgtggtctcgccaccattgtgtcgccccccccacacagcaggtggggtgctctctctctcaaagatgacacacacataaacgtttttcctctccgtcgaccgaggtcgtgttctgtattcacccgcgcgtctctcttctttttataataagcccacccttctatggtggggccgcccttttacacaaaaaaacgggctgtgctgagtctatcatagtggcgcctcccgccaggaatgttatttctgnnnnnnnnnnnntttttatctctgccctatatcnnnnnnnnnnnnnngttcagcttttactggaaactgctgtctaggaccacctgccctaaccaggaataaaggcaagacagcctggagaccagtttgtttcttcagctgcaaacagctgcctgggcaggcaggtgacacaaggcctctgtccccagggatgggacctgcagggtctgttcacccagggcacccacagtcctgaagtgcaggcccagggtctgtccagctgggagagggcagaggtggcggctgggtgagttgccggcctcagctgggggcctgggggaggccctttcttcagcagagatgtgaggaagctccccagctcctcgtcctggtaggtccaggagaccagcagcaccttggtgcctgggtcctcagaaggggcggcggcctggaggaggacggactccacagtcacagagccgtctgggaggtgctgcacacagtggtccttcaggacgctcttgaggtggctgtagacgcgcaatgccgtctcctgctccttgcgtgtgtcatgcaggtgcacgcggcaggtgaagcgcagctggtgctcagccagacccagctctttgagggcttgctctgaggacaccagccggaagttgctgtccttcatgatcagggtgccgtgcaggagccgaggcttcttggcctcagggagcagcccctgcgccatctcccgcttcagcagccccagcgagatgcctacggggatgctggggcttgtgggcagcgtcaccgtctcgccattggccggcatgtagcagttgacccggagctcctgctcgatcttctgcttcaggaactccatcttcttggcctcgccatgcaccagcagcacgctctccggctctgcctggcccaccagctgcatgatgcccttggcgtccgcgtgtgcgctgaatgacatgtactccacctgcatcttgacctccagcacctgccgcccctccatctcgagcttccgctgcccgctgaggatcttgtggccgacggtgccctgcacgcagtagccgggcatgatgaccatgttcttttcgtttccggcccatttccggaagatctgcagggactgcccagcgtgcagcattcctggcgtggcaaacacaaccatcggtcctgggttgtcagcaaaagcccggtcgaaggccttgatgtgcttgaactcaaacatgttcctctgcacgaaagtcttgcggatcttctggcttggtccaggggatgaacagcttgtagtagtggttggccttctcggtcagccccgtgganaagnanatnngcnccttcaggttcatgcgctcccagaaagtctccaggaggatgcagagctcctggcgcggcccagcgcgaacacaggtatcagcaccttcccaccacgctccacggtctcgtggactttcttcaggaagtntcgctcccggcagcgcttggagtcacngatggtcgtggcgtacgtggactctgtgatgagcaggttggggcggcacttgtcaatccaggcagctccccaccntgcacgtgctctcccgggtcggcgcccagtctggtctgggacccgcatcctcgcgctgacgcctcctggtgtccccacggtgctggacgcaagagtgaggtggggtgggctcaccctgaggccccagccttccagaaactgtgtagaacgggcggagggcatggttggtgtgggggtgggcagtgactgtgccagctgtggccctgggaacctgacctggaccgtctggtggaggtggacagccaccaccttcttcatgcagtctttgatcatctgggaggtgaagaagttggcctcgcccttcttgtctacggcgatcttgcggtagtcctccagcaagatggggcagatggcctgggtggggtgagtcatgtagatggggccgtcgtagcccaccatctcgctgaagtaggggagtgccccgcagtggtccaggtggaagtggctaatgatcacacagtccaggaagtctgttaggcggccgttctgggtgatgtaggagaagtcagggaagcgtcggtcgtcattgaagcccatgtgcantccacagtccagcatgacattcttgcccgcaatggagaccaggatgcagcttcggcccacgtcctggccggccgcccaagggcgtgactctgatctcaggcatcgtctccgccgcgctcccggac

SEQ ID NO: 433859 - DNA, 1060 bp, Homo Sapiens; identical to SEQ ID NO: 322166

SEQ ID NO: 433860 - DNA, 1572 bp, Homo Sapiens
agcgcggttgcgcctgcgcagtgcatcaccgcaggcgggcctcgcgggtccgggagcgcggcggagacgatgcctgagatcagagtcacgcccttgggggccggccaggacgtgggccgaagctgcatcctggtctccattgcgggcaagaatgtcatgctggactgtggaatgcacatgggcttcaatgacgaccgacgcttccctgacttctcctacatcacccagaacggccgcctaacagacttcctggactgtgtgatcattagccacttccacctggaccactgcggggcactcccctacttcagcgagatggtgggctacgacggccccatctacatgactcaccccacccaggccatctgccccatcttgctggaggactaccgcaagatcgccgtagacaagaagggcgaggccaacttcttcacctcccagatgatcaaagactgcatgaagaaggtggtggctgtccacctccaccagacggtccaggtagatgatgagctggagatcaaggcctactatgcaggccacgtgctgggggcagccatgttccagattaaagtgggctcagagtctgtggtctacacgggtgattataacatgaccccagaccgacacttaggagctgcctggattgacaagtgccgccccaacctgctcatcacagagtccacgtacgccacgaccatccgtgactccaagcgctgccgggagcgagacttcctgaagaaagtccacgagaccgtggagcgtggtgggaaggtgctgatacctgtgttcgcgctgggccgcgcccaggagctctgcatcctcctggagaccttctgggagcgcatgaacctgaaggtgcccatctacttctccacggggctgaccgagaaggccaaccactactacaagctgttcatcccctggaccaaccagaagatccgcaagactttcgtgcagaggaacatgtttgagttcaagcacatcaaggccttcgaccgggcttttgctgacaacccaggaccgatggttgtgtttgccacgccaggaatgctgcacgctgggcagtccctgcagatcttccggaaatgggccggaaacgaaaagaacatggtcatcatgcccggctactgcgtgcagggcaccgtcggccacaagatcctcagcgggcagcggaagctcgagatggaggggcggcaggtgctggaggtcaagatgcaggtggagtacatgtcattcagcgcacacgcggacgccaagggcatcatgcagctggtgggccaggcagagccggagagcgtgctgctggtgcatggcgaggccaagaagatggagttcctgaagcagaagatcgagcaggagctccgggtcaactgctacatgccggccaatggcgagacggtgacgctgcccacaagccccagcatccccgtaggcatctcgctggggctgctgaagcgggagatggcgcaggaacttccggctggtgtcctcagagcaagccctcaaagaggctgggtctggctgagcaccagctgcgcttcacctgccgcgtgcacctgcatgacacacgca

SEQ ID NO: 433861 - DNA, 817 bp, Homo Sapiens
gatcttctggtggtccagggatgaacagcttgtagtagttggttgcccttctcgtcaagccccgtggagaagtagatgggcaccttcaggttcatgcgctcccagaaggtctccaggagaatgcagagctcctgggctcgtcccagcgcgaacacaggtatcagcaccttcccaccacgctccacggtctcgtggactttcttcaggaagtctcgctcccggcagcgcttggagtcacggatggtcgtggcgtacgtggactctgtgatgagcaggttggggcggcacttgtcaatccaggcagctcctaagtgtcggtctggggtcatgttataatcacccgtgtagaccacagactctgagcccactttaatctggaacatggctgcccccagcacgtggcctgcatagtaggccttgatctccagctcatcatctacctggaccgtctggtggaggtggacagccaccaccttcttcatgcagtctttgatcatctgggaggtgaagaagttggcctcgcccttcttgtctacggcgatcttgcggtagtcctccagcaagatggggcagatggcctgggtggggtgagtcatgtagatggggccgtcgtagcccaccatctcgctgaagtaggggagtgccccgcagtggtccaggtggaagtggctaatgatcacacagtccaggaagtctgttaggcggccgttctgggtgatgtaggagaagtcagggaagcgtcggtcgtcattgaagccccctcgtgccgaattcgccacccaggcctcgctaccttgccgaaggttttttccccccc

SEQ ID NO: 433862 - DNA, 2129 bp, Homo Sapiens
  misc_feature (917)..(917): n is a, c, g, or t
  misc_feature (1457)..(1457): n is a, c, g, or t
agggattatccaagaccaggaagtcggtgtttattactaggaagctgacggtgtcagtcggggaaattgtgaacggagggccattgccccccgtccctcgtcatacccctgtgtgcagcttcaactcccagaacaagtacatcggggagagcctggccgcggagctgcccgtcagcacccagagacccggctccgacacagtgggcggagggagaggagaggagtgtggtgtagagccggatgcacccctgtccagtctcccacagtctctaccagcccctgcgccctcaccagtgcctctgcctcctgtcctggcactgaccccgtctgtggcgcccagcctcttccagctgtctgtgcagcctgaaccaccgcctccagagcccgtgcccatgtactctgacgaggacctggcgcaggtggtggacgagctcatccaggaggccctgcagagggactgtgaggaagttggctctgcgggtgctgcctacgcaagctgccgccctgggtgtttctaatgctgctatggaggatttgttaacagctgcaaccacgggcattttgaggcacattgcagctgaagaagtgtctaaggaaagagagcgaagggagcaggagaggcagcgggctgaagaggaaaggttgaaacaagagagagagctggtgttaagtgagctgagccagggcctggccgtggagctgatggaacgcgtgatgatggagtttgtgagggaaacctgctcccaggagttgaagaatgcagtagagacagaccagagggtccgtgtggcccgttgctgtgaggatgtctgtgcccacttagtggacttgtttctcgtggaggaaatcttccagactgcaaaggagaccctccaggagcttcagtgcttctgcaagtatctacagcggtggagggnaagctgtcacagcccgcaagaaactgaggcgccaaatgcgggctttccctgctgcgccctgctgcgtggacgtgagcgaccggctgagggcgctggcgcccagcgcagagtgccccattgctgaagagaacctggccaggggcctcctggacctgggccatgcagggagattgggcatctcctgcaccaggttaaggcggctcagaaacaagacagctcaccagatgaaggttcagcacttctaccagcagctgctgagtgatgtggcatgggcgtctctggacctgccatccctcgtggctgagcacctccctgggaggcaggagcatgtgttttggaagctggtgctggtgttgccggatgtagaggagcagtccccagagagttgtggcagaattctagcaaattggttaaaagtcaagttcatgggagatgaaggctcagtggatgacacatccagcgatgctggtgggattcagacgctttcgcttttcaactcacttagcagcaagggggatcagatgatttctgttaacgtgntgtataaaggtggcccatggcgcccttcagtgatggtgccatttgatgctgtggagacacagaaggacctcctgggagccagtgggctcatgctgctgcttccccccaaaatgaagagtgaggacatggcagaggaggacgtgtactggctgtcggccttgctgcagctcaagcagctcctgcaggctagcccttccagcctgcgctttcctctggtggttcttgtgcctagcccaggaggggacgccgttgagaaggaagtagaagatggtctgatgctacaggacttggtttcagctaagctgatttcagattacactgttaccgagatccctgataccattaatgatctacaaggttcaactaaggttttgcaagcagtgcagtggctggtttcccactgcccccattcccttgacctctgctgccagactctcattcagtacgtcgaagaggggattggccatgagtttagtggccgctttttccatgacagaagagagaggcgtctgggcggtcttgcttctgaggagcctggcgccatcattgagctgtttaacagtgtgctgcagttcctggcttctgtggtgtcctctgaacagctgtgtgacctggcctgtgcagtctccctcagtctctaccagcccctgctgccctcctcagtgcctctgg

SEQ ID NO: 433863 - DNA, 771 bp, Homo Sapiens
  misc_feature (281)..(289): n is a, c, g, or t
  misc_feature (302)..(571): n is a, c, g, or t
agctcggtacccagttcgacggagactctcaagaactgaagttcatttgtttacagggtcgggaatgtcttcagttcttgagagtcaacagtaatgattggttgtaagccaagggacattttaagctagtgaagagttttttctggaattgatttttcccaaaagaatatattaattgaggttaagaagtcagtgggaaacacacagaaatttgttttaaaatctttcaggagctttactgaaagacttggttatcaagtcttttggggagagaatgacannnnnnnnngagacagagtttnnnnnnnnnnnnnnnnnnnnnnnnnnnnnnnnnnnnnnnnnnnnnnnnnnnnnnnnnnnnnnnnnnnnnnnnnnnnnnnnnnnnnnnnnnnnnnnnnnnnnnnnnnnnnnnnnnnnnnnnnnnnnnnnnnnnnnnnnnnnnnnnnnnnnnnnnnnnnnnnnnnnnnnnnnnnnnnnnnnnnnnnnnnnnnnnnnnnnnnnnnnnnnnnnnnnnnnnnnnnnnnnnnnnnnnnnnnnnnnnnnnnnnnnnnnnnnnnnnnnnnnnnnnnnnagaatgacatcttaaagccaccattgcgttcctcatttgtgaactgtcttctcatattttaagtcaagtctataagatcatttttaacctaagttccaactttgttggactccttaaaataagcacccatgaaagccagccagcccttcctccttccctcaccaccctccgtctcttcgtccctcaccaccctccgtctc

SEQ ID NO: 433864 - DNA, 742 bp, Homo Sapiens
ttttttaaatgataacggctaccatttatttctaagtacccactccataagaagtcctacatacatagttttctcacttaattctgtgaggaatcgattatgctcgtgttaccagtaaggaatccaaggcccagagaagttaaatcacttgtgcaaagtcacatagctagcaagcagcagaactgaggcccgtacccatgtctgtctggctcaaggcatatactgattgactgtaacatcatttgccttcaaggatttgccaaaaacccttgtccccagatcttaagtaaatttagaatgctgagtcagattggggatgcaggaatcaaagaataattgggttatataatgctatgattttatgctaatcttggcactaaagagagattgtctcgcagtctggaagactgtaactgcctatctggtctctagccactgggcctccagtctggcctccctccaatccattctcctcactgtagccacagagaacattctcctgcttctctcagtggttcccagctgccctcaggattatatccaaacccactggggccagggcttggcctgttcttagtaggccctaccccgtttttaaaatcaaatgcattaaaatatacccgtatcgcttactaaatatgaattctatcatgtaaaatttttgaaacaattcgtgatttgaattttggaattattaatttaaaagttcacttttcctatgtaggtgtcaataaattttttt

SEQ ID NO: 433865 - DNA, 546 bp, Homo Sapiens
tcaccagaaaacacatgggccgcaagaacaggcctcatgtagtacctggcatactccagcctggacagcagcaggtagggtcccatgcagagcacgaggaagatggtggccgtcaggaagaaggccagggcgctgttcctcacatcactggatgcagccaagtccaccaatgaggccacggcgctgaccgtcccgcccatggctcctccaggatgtctgagccctcagggtcctccccggtggctgggctggaggagttgcggagtttgaacatccagtactccttggcagtgataaagaagttccatggcagtagactgccaatgcccaggctgaagaagatgatgtatgtgccacagaagcggtcctcgggcctctgcaggccagggggcgggcggtccagcagcttctcaagcagtgcctcctggtcagctcggagactgctgcttgtggttctgtaggtggagtttgaactgtgctgaaagtcgtcctctgagacaacggccatgtcgccgctgcgccacgccgccgctgcctccggcgcac

SEQ ID NO: 433866 - DNA, 1098 bp, Homo Sapiens
  misc_feature (990)..(990): n is a, c, g, or t
aagtgctcagacattaagccgttgagtagaggcatgttttgcaatctctcgtttagctaccaattggagcagtttaacgtgcttgagtccccggcgtgatgtgttcatggacgaagttgccgatggatgttgtcaggtgttgcacctggagggcccagatggatcaatgaggcatttaaagtgtagaatctcaccctgaacccagactattcagataaagaactggtgacacgtggctgtacattcagcacagctgtggtgtccccaagtgccatgacccaggagccattcagagaggagctggcctatgaccggatgcccacgctggagcggggccggcaagaccccgccagctatgccccagacgcgaagccgagcgacctgcagctgtcgaagagactgcccccctgcttcagccacaagacgtgggtcttctctgtgctgatggggagctgcctcctggtgacctcggggttttcgctgtacctggggaacgtgttcccggctgagatggattacttgcgctgtgctgcaggctcttgcatcccctcggcaattgtgagcttcaccgtctccaggaggaacgccaatgtgattcccaactttcagatattgtttgtttccacgtttgctgtgaccactacgtgtttaatttggtttggatgcaaactagtccctgaacccatcagcaataaacatcaacttcaaccctcatcctgctgctcctgctggagctgctcatggcgtgcacggtgatcatcgctgcacggtccagcgaggaggactgcaagaaaaagaagggctccatgtctgacagcgccaaacattctggacgaaagtgccattccctgctccgggccctgaaaacttacttcagtcgtcaagggaaatcccacggcatctctgccgcccctccgggggggaacattgccccgaaaacgggggatgacttccgctttcacgggcccaccccttctcagggggaggttnttttttgggacactacggggcctgggtcttccccagaggccacttgccccaccaattgccgccccacaaacagcgctccaatcaccagggccccccgcgggccaggtc

SEQ ID NO: 433867 - DNA, 3023 bp, Homo Sapiens
  misc_feature (18)..(18): n is a, c, g, or t
  misc_feature (1517)..(1552): n is a, c, g, or t
  misc_feature (1591)..(1591): n is a, c, g, or t
aagtaatttatcaaagtnacagcattccagtttcacagtcgtcccaactcactgtggatttactgccgtcagctgggaggacccaggcgccctcgggacgaggacgacgcagggaaacccactcctggccatggcactacccaaagccagtgttattctcacacccaactgtccctgcagcctggcaggtgggcagtgaccgcctgggctgtaccctaagaccccaaaacagcagagatggagaagaccgctgccctggggccttctcagtgaggatcaagacaaagtacttgctaggaggtagagggcgctgggtgaacctgtgagaattcctgggctctgacctgatctgtcctgcattttgagtaatgggagcaaacacaggagggaggggctcagcttccccgggtcactggggccagggagacgtggtccagccggtttacaaagccttggatgcagccccacccccaagaacactgcctgtcacagcagcggccacgtggcactccaagctgggcatgacagtgcccgggacgtgggcagcggccatgtggcactccaagctgggcatgacagcacccaggacgtgggccggccagtgtggcggtggatccctctagaatgactgggtctaagtagggagacagggcaggcgacccggcgtggactggtgtggatttcacctgggagagcagcggcagcctgtgtcgcttgcgcccaggctctggaggaggggcccctgcggctcccgggccaggacagaggcgcccagccctgctctcactgtccaggaagagccgctgggcagcctgagcctggggcaggtgcaccttgcagggaagtgggtaagatcccactgggctgactgagtacccgggacagaccctaagcgtggagggaggaagcccggtcagagtgggcaggagacgcagggacccacagtctggtcaggtccagagagcccactccagcccaagccatgagagaggcaggaagaggagctggggccagttcaggggtggggctctcaagaggccgagccgggggcccttcctcggcctgggaagttgcggccatgctcctgctgttacgacacgggagccactcggagctgactgatctcactgaggcacagactagccaacattggcctattttaaaattaaactaccctaggaagtgaaaaccccacctgcagcctggtttgccctcacacaagggaaaagaggtgttagaagcagtagctcagggcgattaggggttgtgcgtttccatgcttggggccaggctgggcgctgccacccggtttccgcgtctgggggtcactgggccatttgcaccacgacggctctccaggctttctccttgtcgaactccttcagggggctcctggccacctccccagccaggcgctcctgcgggccgttctgggtgtcccaggatgcaccctgcagccttgcactgaccttgaagcgcacgcactggatggcggtgcccgtgttgaggccggcctnnnnnnnnnnnnnnnnnnnnnnnnnnnnnnnnnnnncatcgtaggatggttttaatggctggcgggtaatccttnaaacatctccacgattctcatgatgctgaatgacagatatccagaggctgtgaacagcagcggagacgtgaggctgcttatggcaatcaggacctccaccagacacttgctgggacactctgctgccacatgactggcaatggcacttggaaagcaggccactaggatccaaaagaacgtcactgagaggtgtgggcctgaaactgagtcatccacgttcagggcaatgatccccccgaggacggcagagatgcctgcgattacctcgacgactgagtaagatttcaggacccgagcaggaaatggcacttcgtccagaatgttggcgctgtcagacatggagcccttctttttcttgcagtcctcctcgctggaccgtgcagcgatgatcaccgtggccgccatgagcagctccagcaggagcagcaggatgaggttgaagttgatgtttattgctgatgggttcaggactagtttgcatccaaaccaaattaaacacgtagtggtcacagcaaacgtggaaacaaacaatatctgaaagttgggaatcacattggcgttcctcctggagacggtgaagctcacaattgccgaggggatgcaagagcctgcagcacagcgcaagtaatccatctcagccgggaacacgttccccaggtacagcgaaaaccccgaggtcaccaggaggcagctccccatcagcacagagaagacccacgtcttgtggctgaagcaggggggcagtctcttcgacagctgcaggtcgctcggcttcgcgtctggggcatagctggcggggtcttgccggccccgctccagcgtgggcatccggtcataggccagctcctctctgaatggctcctgggtcatggcacttggggacaccacagctgtgctgaatgtacagccacgtgtcaccagttctttatctcccccgctgctctgccgttgggagcactggtctctgggtgagggacttccagcaagaagtattcacaaatgaaacaaaagctcagcaaacttgagctgaaggcaggggaaggagagctgcttcctgaatatcaatgaggggaggaatcgggtggatcgtagaaatgtttcgtgttggttgtgtaaaccactgcctcggagctgtcagaacccaactaggaaaggaaggggccctgcctgtgccactcgccacagagctcgggtctctcagaagaaagaagcgtccctaagaatagaatcccaccaagtacacattctgagcaggctctgtttctgaaacgtaactgtttactcgaaggtcttctacatctttccaagtagcctttttccatcccccacagccacacggtgggaacctccttcacacggtcacataagcattcacgcactcggcttagctgtgtggccttgggcggctccggattcggccctgtggtttgcg

SEQ ID NO: 433868 - DNA, 1979 bp, Homo Sapiens
ttttgccacgtctgcaagtcagcgtttattgctcaagcgtattaaacaaaaatgtagactgaaagagacagttcttttaaaccccatttttccggattttttaagcgctctaaaataagaaaataagaaagtgcaagccagcaaaaacgctccaagtgcctaattctgactctgaaacttgagctctctggtctgcccccaagaagacatcagcccgccccgggtcgtccctgtggctcccaccccattcccaggagcagaccccgccagcctcaaagctgcagggaggtgggggtggcctgcagacagggtggggtctgcatccggtaccagtgacagcagcctctcctctcccacggtggcgcttgtttggggctgtggccaaagtgtttgcccggcccctgactgtgtccttccggagctgccgaggactgcagagagggcctggcttgtcccctctaggagcagctgggaaggtgtcttgcctgcatcccccttcaatggttgaaaataatgattccacttgtcatgaacaccatgaaggtatcttggcagccagagtcactcctgttccgcagtgggaaacctgggagggtcctcaaaccccctggcagggtctgcaggccgccccatccagctgcatctcccaggcctcctggttctttgatcttgatggccccaggccacagatgcatctccgggcctttccagcagcccatgggggaccagtcaatacaccccacggcggtgaagagaaaacgttcatgtcttctcagatcagaaggaaagaaacaaacccattgtgaaggaaacacctgctggaaagtaattatcaaagtaacagcattccagtttcacagtcgccccaactcactgtggatttactgccggtcagctgggaggacccaggcgccctcgggacgaggagacgcagggaaacccactcctggccatggcactacccaaagccagtgttattctcacacccaactgtccctgcagcctggcaggtgggcagtgaccgcctgggctgtaccctaagaccccaaaacagcggagatggagaagaccgctgccctggggccttctcagtgaggatcaagacaaagtacttgctaggaggtagagggcgctgggtgaacctgtgagaattcctgggctctgacctgatctgtcctgcattttgagtaatgggagcaaacacaggagggaggggctcagcttcccccggtcactggggccagggagacgtggtccagccggtttacaaagccttggatgcagccccacccccaagaacactgcctgtcacagcagcggccacgtggcactccaagctgggcatgacagtgcccgggacgtgggcagcggccatgtggcactccaagctgggcatgacagtgcccgggacgtgggcagcggccacgtggcactccaagctgggcatgacagcacccaggacgtgggccggccagtgtggcggtggatccctctagaatgactgggtctaagtagggagacagggcaggcgacccggcgtggactggtgtggatttcacctgggagagcagcggcagcctgtgtcgcttgcgcccaggctttggaggaggggcccctgcgggttccgggaccaggacagaggcgcccaggcctggtctcactgttcaggaagagccgttgggcagcctgagcctggggcaggtgcaccttgcagggaagtgggtaagatcccactgggctgactgagtacccgggacagaccctaagcgtggagggaggaagcccggtcagagtgggcaggagacgcaaggacccacagtctggtcgggccagagagccactccagcccagccatgaaaaggcaggaagggggcttgggccgttcagtttgggtttttaagaggtcgacccgtgtgcctttttttgtctgttagttttgacagcttctctgttccacctggagccattcgtgctttttt

SEQ ID NO: 433869 - DNA, 513 bp, Homo Sapiens
  misc_feature (57)..(57): n is a, c, g, or t
  misc_feature (61)..(61): n is a, c, g, or t
  misc_feature (274)..(274): n is a, c, g, or t
  misc_feature (348)..(348): n is a, c, g, or t
  misc_feature (404)..(404): n is a, c, g, or t
  misc_feature (441)..(441): n is a, c, g, or t
  misc_feature (455)..(455): n is a, c, g, or t
  misc_feature (466)..(466): n is a, c, g, or t
ctgcaagtcagcgtttattgctcaagcgtattaaacaaaaatgtagactgaaagagnacangttcttttaaaccccatttttcccggattttttaagcgctctaaaataagaaaataagaaagtgcaagccagcaaaaacgctccaagtgcctaattctgactctgaaacttgagctctctggtctgcccccaagaagacatcagcccgccccgggttcgtccctgtgggctcccaccccattcccagggagcagaccccgccagcctcaaagntgcaggggagggtggggggtgggcctgtcaggacaggggtgggggtttggcattccgggtaccagtttacaggncaggccttttccttttcccacggtgggcgtttgtttgggggttgtgggccaaagtntttgccccgggcccctggactgtgtcctttccggagnttgccgagggattntagagaggggntggggttgttcccttttagggagcagtggggaaggtttttttgcttg

SEQ ID NO: 433870 - DNA, 1251 bp, Homo Sapiens
  misc_feature (1159)..(1195): n is a, c, g, or t
aggggggttcccagaagtggggggccggccacgagtccgtggggccggttaaagcgcttggcgtgcccacttggtgtggtatggacaaagttttctctggattttggggaggcttatatgagagggggtgaggtggcccccggggggagggccagtgttttccgtccatgtcccggggagtgctcaaaggccttgttcccccggggggtcccccttcggttgggatcctttttcaagccaaggtggcaaattaaagtccctgggctgactcaggaatgttcatccccagaatggagactcacaactcatagttagcccttccttgatcttctcgaaaagcttagactccgtttcttcatagaacggggggtatccacagagcaatatgtaggtgatgacgccgatggaccagcaatccacagccttgctgtagggtttctgggccagcacttctggagccacgtagcctggggtcccacaggcagtggacatgatgccattctgttccatcttggacagaccaaagtcagtgatcatgatcttagagttctcttcaggggtaaggtaaagcaggttttcgggctttaagtctctgtggacgatgccattctcatgtaggtatttcactgccgacaagacctgctggatcaccagactggcatccttctctgtgtagacaccccgctccaggatccggtcaaagagctccccaccagaaacaagctgcatgaccaggtagtagtgggtggtgctctcatagatgtcctccagggtcacaatgttttcatgcttgatctttttcaacacagcaatctcattctccaggctgctgtcccggaaggcaggtgacttcttgatgcacttcagagcaaagagcttcccagtcagtctttgcttcaccaggaaaacttctgagaaagctcctgatcccagcacttccataaaaatgaaggttttccggatgttggtggtctgtttcttccaggaactgcagtcatcttcttcctttcgacccattgcctccagagttgaagcttctgaggatgccagggactcgggaagaatcctgcttgagctcccactccagctcctacaggtctgtgaggattagctgctccacgctctcgacgaattcgagctcggccgatttggcctgatnnnnnnnnnnnnnnnnnnnnnnnnnnnnnnnnnnnnncgccgccaccgcgtcacccccgaggtcgcccatagtagtcatcctttcaaggggcg

SEQ ID NO: 433871 - DNA, 3595 bp, Homo Sapiens
  misc_feature (119)..(130): n is a, c, g, or t
  misc_feature (162)..(180): n is a, c, g, or t
  misc_feature (271)..(271): n is a, c, g, or t
  misc_feature (300)..(300): n is a, c, g, or t
  misc_feature (320)..(343): n is a, c, g, or t
  misc_feature (345)..(345): n is a, c, g, or t
gggcggtgagggttacgaagccctctctttatttcttaccgccgagggtgtttctttggtggggagaccaacgcataggtgtccgagttcttttcttttttctcgtacacggggcccgnnnnnnnnnnnnaaaaataatgttgttacgaaaagaatttcttnnnnnnnnnnnnnnnnnnnccgcgacaattttctttcctctctttcttgttcgtcctttgttcggtgccctggcgtgcctctcttgtttttttggggtggttgttctctnttttttctgtgtcggtcgcggccttcgtntgcgtgttgttgtcccttgnnnnnnnnnnnnnnnnnnnnnnnntngcatgtgcacacatgtatacatttattgcataaaattcatcatagcactttcccccatatttttataatccaaaaggaaaatgattcaagaaaggatttcattgtgctcagtttcaaaaaatataaaaatggacatcagattagagatacaagttcatacgctgaactgaattgtacataccaactgcctggctatggaaacccgtgacttgacttaggggtgctgatgacatgatctcgacaagaaccccctagcaactctcaggtggaggcagcacagggatgcggttcctggtgaggagggtcctcactcggtgaccacactgcctgggctcacagctggagggctcacccatgagggacacgggtggacacccactgcttcacatgcctaattcacattagaaacatgtaaagccattcagtctgtgcaataaagagatcctgtatgaaatccactcattccttggagggaagctggcccggaggcacgctctggttgacgggtgacgcacagtcctccagggcctgcattgcatccatgacacagacacacgtgaacacccagcccgccggtcctagcagccagctgtgaaagctgtgtcaagtcacgggggttcctttctaacagctaaagctcaaaggcatactggaccctgagggaaaacaggagagcctgagatgggaagggaagaaagggatttgcaccttcacagagcaaaatgggacaacgggacggggaggttgaagacaagaccttggctcaggagtgtgtctgtcttcagcaccagccagccccaccgttcccgctgcactgtgtgtgcaaagacacacactctcaccacagtgccacacctgcggcccagacactccctcctggtctctgaaggccagaatcccactcgtgtggaagatccaggtacccaccagatttaacaaaacagagaaacgatccctccccaagcctacagaacacttggtgcgagcatccttttacaacagctgtaggtttctgtataatttcttgagcacacaaaagttacagtgcacacgggtgcggctgagtgacacgccagccagtctgactcagaagccctgcagctcagggatgtcccggtacagatccagggtctcggggttcgagaaagcacctccttgctccacggcttttccagcgatgatctgtttgacggcaacttccactttcttgccgttgagcgtatacgggatgcccttggtttccaggatgaggctgggcacgtgtcgcgcagacaagcccatgcggatggcgtcacggatcctcttaaccaagtcaggctggaaggcgtgcccggaggccatcttcaggaagaggatcaccctctcctccctgtacttgttatactgggggacacacaggctgtcctccacctcctcgaaggattccacaatgttatagatttccgagctgccgaaccgcaccccgttggggttgagggtgccgtcactccggccaagcatgacgatgcccccggtcttggggttgattctgcagtagtcgccatgagcccagatacctgggaatttggagaaatacgccttcctgtacttgttgccgttctcatcgttccagaagtgtgtgggctggcaagggatcggcttagtacacaccagctcgccgctctctccccagaccgcctttccttcctcgttccacgcttccacggccatgcccaggttccgggcctgaatctcccctttatacacaggaagagaaaaattgtggcccatgaagcaggagatgatgtcggtgcctcctgagatggagcccaggaggatgctgctcttgatgcacctgtagacatactcgtagctctgggctttcagtggggagccagtggacaggatcgtgtggagcatctggagactgtgggtttccaccggcttcatggccttctcttccagcactgacagccacttggccccagttaccaggacagtgatgcctatcctgtcaaccaggtcccagagcacattgggcgtgggcaccaggggggagccatcgtacaagaccatggccgctcctgtggccagaagggacaccatccagttccacatcatccagccgaccgtggtgtagcacaggaggatgtcactgctggtcatgttgccgtgcagcaggtgctccttcagatgctggatgagggtgcccccagcggaatgcaccatgcacttgggtgcgcccgtggtgcccgatggagaaccatgatgaaccagtggttggctgaaggggcagctgctcgaactccagctggggggcctgctcactggtgccggtggcaagaaagtcatccagaaacacactgtttggaatctttgaaaggtctatgttctctctggaggacacataaggaatcaccaccactttcttcaagtctggtaggcctttaaccacctgctgcagcttttccatgtggttgtgctctttgccattatagacaacagcctccacagagaagatgagctttggctgaatttgagaaaaccggtccagcacaccattcacaccgaagtccggggacgtggagctccagatggcaccaatgcttgccgcagccagcatcgcctcgacagcgtgctcactgttgggtaaataaccaacaacccgatctcctttcttcacacccattttcctcattgctgctgcaaacaaagccacttcttgcctcagctcttcaaaagtcaccttcacaatttcctctttgccttcccttgcaatgtaaagggcaactctgtcattctctttgtgccgcaggaggttttctgcatagttgagccgactgcctttgaaccactcggggacatctgcgattcctttcgatgtgtccacaacctcatcatacacacgtgagaagacaattccactgaatttccagaactctgcccagaagtctgaatatgactcaacggaccaatggtacaagtcatcataactctccagcgccaggccgcaggcggcgcccacagccgcccggaagcggtccatctgcgtgttcttcttactgtcaggctcccacatcacctggcactccaggatctcctcccgaccggggcgctcctccttggacatggcggcggcgggcggccggggctgcgacgagggctggggaccaggggccggggctgaggcgagggccggggacctgggaccggaggaagcgacggtcaggagcgcctggcgggctgggtcagcgatcccgagaattccgga

SEQ ID NO: 433872 - DNA, 624 bp, Homo Sapiens; identical to SEQ ID NO: 325300

SEQ ID NO: 433873 - DNA, 498 bp, Homo Sapiens
  misc_feature (181)..(181): n is a, c, g, or t
  misc_feature (321)..(321): n is a, c, g, or t
cagcatgggtgcatgtgcaacatgttatacatttattgcataaaattcatcatagcactttcccccatatttttataatccaaaaggaaaatgattcaagaaaggatttcattgtgctcagtttcaaaaaatataaaaatggacatcagattagagatacaagttcatacgctgaactganttgtacataccaactgcctgggctatgggaaacccgtggacttgacttaggggtgctgatgacatgatctcgacaaggaaccccctaggcaactctcaggtgggagggcagcacaggggttgcgggttcctgggtgaggnaggggtcctcactcgggtgaccacactgcctggggtttcacagctgggaggggtttcacccatggaggggacacggggtgggacacccacttgttttcacatgcctaatttcacatttaggaaaccttttaaagcctttcagttttgttgcattaaagggttcccttttgaattcca

SEQ ID NO: 433874 - DNA, 567 bp, Homo Sapiens
gggctcaacaagctgtgccaagccctttgaacagtgaacttccccatgtcctccctcattattcctctacaggggcagggggactggaggcccactcccggtcctccgaagaagctcctcctgcccacagtccccagggagcaaaggcagagggagacgcacagaggagatgccaggagcagagaccttgattccaaaatctatgtcccaatctgttttccatgggcagcatctcaacaatgaagactctgggtgatgataggataggggtgccaatcccaaacccatagtttggagctcctttctgcctaccccatccctatctctaacaagacatggatttcagctcactcgccaaatgactgcccaagccttatgaaagggcacgtcctatacgtgtccacctaactcacctccctgtcacccgcaggatgccacatattataggacaaaaaccctcccgaaagtcaactctgagcaagctcaaattctcagctcactctctctattcttatcttcttctttgctctccttttctcctcccaatcctttctccctctttccctc

SEQ ID NO: 433875 - DNA, 1210 bp, Homo Sapiens
tcagacttttcacagcctccaaacccagtctcctgcccttgacaatgctgtgatggctcaggttcaggctatcacagctcagttaaagacaactcctacacaaccatctgaacaaaaagctgctttccccccacctgaacagaaaactgcatttgacaagaagttgcttgatagatttgactatgatgatgagccagaagctgtggaagaatcaaagaaagaggataccactggccgtcaccacgacagcacctgctgccgcagtaccccctgcacccaccgccaccgtgcctgctgctgctgcacccgctgctgcctctcctcctcctccacaggcaccatttggctttcctggagatggcatgcagcagccagcatacacacagcatcaaaatatggatcagtttcagccacgaaatggatgggaatacaacaggatccaatgcaccatcaggttccacttcctcctaagtggacaaatgccaggatttggacttctttcctacaccctcccattttcctcccatggctcagcctgtgattcctccaacttccaccagtgcagcagccctttccaagcttctttttcaggcacaaaatgaaccaccttacacagaagccgcatcagcaggaaatggaagtagaacaaccttgtattcaagaggttaagcgacatatgtctgataacagaaagtcaagatctaggtcagcatccaggtcaccaaaaaggaggcgatctagatctggttctagatctcgaaggtctcggcatcgacgttctcgatctcggtccagggatagacgccgacattctccccgatctcgatctcaagaaagacgggatcgagaaaaagagagagaacgtcgacaaaaaggcctccctcaagtgaaaccggaaactgcaagtgtttgcagtactaccctctgggtggggcagctggacaaaagaactactcagcaggatgttgccagtctcttggaagagtttggtccaattgaatcaattaatatgattcctcccaggggttgtgcctatattgttatggttcataggcaagatgcctatcgtgccctgcagaaactgagccgaggaaactataaagtgaaccagaaatccataaagattgcctgggccttaaacaaaggaataaaggcagattataagcagtattgggatgtagaacttggtgttacttatattccatgggac

SEQ ID NO: 433876 - DNA, 1304 bp, Homo Sapiens
cacttttttaattttacactagtaaattcagcttcaaaccctggaaatttttgcactgagcacatgtcgtatttaaaaccagggaaaataatcgatgttttcttgttgagggggaaaatctctcaaattacaaaacgacataatgaacaatccacagaagggatacagaagtgataatttccataactcaagttgagtgatataaatggtggggtgggttatgtgagagaaatataccttgtcaaatgcagttttctgttcaggtggggggaaagcagctttttgttcagatggttgtgtaggagttgtctttaactgagctgtgatagcctgaacctgagccatcacagcattgtcaagggcaggagactgtggttttggaggctgttgaaaagtctgaaggatctgctgaagctgttgcccttgagttgtctgaaccagctgagccacagcagcaaaagcatcagagctgggcaactgtgttacagctgggacggagtttggagtggcttgtgtgggaggttcagaagaaacttttactggaggtggaggtgagccttcattattggtaacattttctgctactggggctgcattactggttcccgctgccatgtccaaaagaggttgaataatttcaattttgaacactccatttttttgccaaaggttcagcacacgaactattttactcttatcttcagatggacaaagatataaatattggaatgtggcagttatgtttttagagaatcttggcccaaaaacatctttatcagttccaaactgatgacgagactgtcgcacaattgagtcaattacatataatcccggaaccttgtattctggtttacactttttgatgaacttttctactatttgaactacatgcttataaagcttaatagctttaatagcagctttagtgatgagaatcatcttggctctagagatgggaggtttcatatccataagcgaaaagagctcctggttgaaggcgttgacggcgtccatgttcgcgctgcggcggcggctgctccgggcccgccggtcacatagacctcgcgccgcggcggagcggggctgggaaaccagccgggcctggtggccggggggaggcgacgagcggcggagtccgaggcccgggcaggaagaggctgcgcccgaagcggcgaggcgggcggccgaggcagaggcggagaggtggcgggccccctctcagtcccgttcgcaggatgaggaaaaggaggcggcggcagcgctggtcttcacctcgtgccgaattcgccacccaggcctcgctc

SEQ ID NO: 433877 - DNA, 723 bp, Homo Sapiens
tggatctgagcgaactcctgctcctcaccagactcttggatgtacaggggcccccaagactcgtatttgtgactggtctccaagggctgtggctgcatgctgctcggggattcctttgcagttcctgaggaggatatcttctcccacaccggttttctgttcgtttggaggagttgagacctggtgtcctggctcatccagttcccgctccagatcttcgaggagagtgacagcctcttcagcgctctccgggcaatgctcctgcacccaggcctggagctcctggggcaggatggtcaggaactgctccagcaccagtagctccaggatctgctccttggtgtggatctcgggcctcagccactcacagcagagcacccggagttggctcagggcctctcggggtccaggggtatcatggtacccaaactgcctgaagcgctggcggaacatctccaggctaggaaggtacttgcctttctcttctttctcctcgacttttaccatcagaggccccacttgctcctgtggaggcctagggcccagaactggggccatgcctagtaccttggtcatcatgtaaactccagaaacagcctcaccaaagacgggactctgtggggcaggaatattcgttcctttgggtttccagttctttagggccacaagttaaaccatgaatcagagccgctccgggtaccgggagaccgcaccgcgtacctc

SEQ ID NO: 433878 - DNA, 1191 bp, Homo Sapiens
aaattccatgcggcctggagctccgtgttgcagctgctgtgtgtcttcttcgaggcgtgtgggagacaggcccaccctgtgatgaggaagtgcctccagtccctgtgtgacctgcgcctctcccctcatttcccccacacggcggctcttgaccaggcagtgggggctgcggtgaccagtatgggacctgaggtggtgctgcaggctgtgcctttggaaattgatggctctgaggagactctggatttcccacggagctggctgctgcctgtcatccgagaccatgttcaggaaacgcaacttggttttttcaccacctacttcttgcccctggctaacaccctgaagagcaaagccatggacctggctcaggcaggcagcacagtggaatctaagatctacgacacactccagtggcagatgtggacactcctgcctgggttctgcacaaggcctacagatgtggccatctccttcaaagggctggcacggacgctgggcatggccatcagcgagcgtccagacctgagggtcaccgtgtgccaggccctgcgcaccctcatcaccaagggctgccaggcagaggctgaccgtgctgaagtgagtcgctttgccaagaactttctgccgatcctcttcaacctgtatgggcagcccgtggcagccggggacactccagcccctcgccggggctgtgctggaaaccatcagaacttacctcaccatcactgacactcagttggtgaacagtctcctggaaaaagccagtgagaaggtgctcgaccctgccagctctggctttaccagattgtctgtcctgggacctggtcgtggcctttggctccgtggtgctgacgaagctgccatcagtaagctatactccaccatccggccctacctagagagcaaggcccacggggtgcagaagaaggcctaccgagtgctggaggaggtgtgtgccagtcctcagggccccggggccctcttcgtgcagagccacctggaggacctgaagaagacactgctggactcgctgcggagcacctcctcacccgccaagaggccccgtttgaagtgcctcctacacatcgtgaggaagctctcagctgaacacaaggagttcatcactgccctcatcccagaggtgatcctgtgcaccaaggaggtgtcggtgggcgcacggaagaacgc

SEQ ID NO: 433879 - DNA, 905 bp, Homo Sapiens
  misc_feature (150)..(183): n is a, c, g, or t
aaagtaattgaagcttgtggctttacaacttagtgttttttgctatccagataacaagtttcattgtttagaacccagtgacacttaataggtagataaattgtcctttaaaatatcccagatgatatacacaatatggtacatttgtgnnnnnnnnnnnnnnnnnnnnnnnnnnnnnnnnnnagttagatcaagataacgatgacttgtaccctccctgattctgttacagtagggcccgggcagatctgtgtttgttaaacaggccttgtttgtgcatgctttgctatgaatgaagttcctttaaggacaaagaaaagcacacttttcttcttttgagcatatctgcttttactttaaatctgctaatttctaaaatgtagagtccttcaccaatcccagagactcaatttggaaatgaactgatttcaagccgttactgtgaataaagcaccccagcattttgtataagctcttaattaaacctgtacagcttctttacctgatttaagaaagggagacaagcaataggggggaataagcttcttcaaaattcattccaagcacaaaagaaattttttccctttgcatataaacttgacatcagttgattctgttggggtcggggtgggtatgcagggattgccttttattatcaagtgatttatttcaagagcctttgaggggattcaggtgaaggaacccccatctgtgctggagagttggatactcctttaaatagcccccaccacagtcataacaataatgataatgctggattatttgttaagccaaggttgtctgcctcatatccatcatgctgtttgcaatattcttgctttcaatcaatttatactgagtgtaactttaggatttctgctattaaatgcatgctctctatcctg

SEQ ID NO: 433880 - DNA, 854 bp, Homo Sapiens
  misc_feature (17)..(17): n is a, c, g, or t
  misc_feature (40)..(40): n is a, c, g, or t
  misc_feature (47)..(47): n is a, c, g, or t
  misc_feature (59)..(59): n is a, c, g, or t
  misc_feature (75)..(75): n is a, c, g, or t
  misc_feature (143)..(143): n is a, c, g, or t
  misc_feature (284)..(284): n is a, c, g, or t
  misc_feature (495)..(495): n is a, c, g, or t
  misc_feature (634)..(634): n is a, c, g, or t
ctgtgcctttccacccnaatgggtccctccccttcaaagnaacccangcggggatctgnaaaggttctgccttancccccaacccacaaaaacgcaagactgttgctgtaataaacagaggagaaaactcatcttcagtggtnagggatattgctgatgtcgatgtaaacctggagggggatggacaggactggggtcagctcccagggctctgggctccacccagctctgagtgacaagttattcagcactctgttccttccacaagacaggagtgctgaagnaggcctgcctgctggtgatgtacctggtgctggtgacgtacctggttcaggttgtcgctgcaggagaccttgctgtccccgacccaggcataggacacgtagtcattaacgtcccgcagccccacctgtgagggggagtcaggccatcagtggtcagggaggacatgggacctaaggcaagtcctaaggaagagatggtctccctgctggncctggctaccgtactgtgtgcctccccgccgcccttcactgccagcctttagctacagaagaaccgctggggtggatgagggtgagttcgtcagcatctgcccagctcccaggagccctcgggaaggatgaaccagggntgtcgctgatggacttcctgccttgccaccacatcaccttgtacagtccaatccagtcccacgggctgctggggaagtccgaggttgaagagtagctgaccatcatgtcattttccacggtccacaggtcctcgggcatcaggacgatcagcggagcagacaccaatggcttcagctccaagtcgaacgtgccggaaacaggcttgtggtcgctgcggca

SEQ ID NO: 433881 - DNA, 2591 bp, Homo Sapiens
  misc_feature (383)..(399): n is a, c, g, or t
  misc_feature (627)..(627): n is a, c, g, or t
  misc_feature (629)..(629): n is a, c, g, or t
  misc_feature (648)..(648): n is a, c, g, or t
  misc_feature (658)..(658): n is a, c, g, or t
  misc_feature (2565)..(2565): n is a, c, g, or t
  misc_feature (2567)..(2567): n is a, c, g, or t
ttttttttaagtgtaaaagccacgctaataattacccctgcacaatgtaacagtcacaaaacagccagccatggcctgctggaagccaggggacaattcttcatacacaggcttgcgggggagagtatgcaacacagagcaactggagtaaccctcagtcccaggacacaggatggcaggacaagcactgagcaggctcccagaggtgtcttctcctgggaaaagggctgccgagtgaccatggcggaggcaagtgctggatgtggggacaggccatgtccccaaagcccctagagggtgttctctgaagaaccccagggccagatcctccaaaatgtcttgagctggttctcccttctgcctgcccccactctgaggtcccnnnnnnnnnnnnnnnnncccgtcgtcaatgactcctgacaagggtggcacagacgcacctcacctgccaaggaccaccctggaaaagtctgtggccacagctccttgaccacttgtcaccccttcctcagatggcagggtggaggcatgggactcaagctaccaacggaagcgaacctggatccttcccagttctctctgtcaggatctggaacttccatgcagtcagactccatgccgtgagtnangaggaaggttgtgctggcngaagaccctnatcaacctgctcatacccatggcgtaagagcctggctagaggggcccctccattctgcccactgagtcagactgcttttgctgaaagcagaaatcccagaccctctgctcactcctcacggggacaagctatgagatgccaagactcctggaatccagcactgcttgcaccagtctatgtagcctgtacaaatgtgagcatctcccctcccagacagcctgaggcccaggacggcacgacaagaatgcaggcctgtgccaaatggggcatgtgcctggcaggactacttgggcaagactagaagagggggtaggaatccagaaatgagacgcagaactgtccccaggtcttcactgttgacacactagctggtttcactcacatctcagcaacaaaaacctgtatttaagcggctaattccagagatgagtagtggagagagcaaatgagcctggttagagctcactctgggaggagtatgtggacgacacttggctgtctcttcagggggccaggctgggcccccagcactcccggcagtggaaaggcagagctggctgccagctctggcctccgcctgggattcactcccatcctggctcagatctgtggctgtgcttcacccagtgggtcctccctcaaggagccaggcgggatctggaagggtctgcttatccccaccacagaacgcagactgttgctgtagtaacagaggagaaactcatcttcagtggtagggatattgctgatgtcgatgtaaacctggttcaggttgtcgctgcaggagaccttgctgtccccgacccaggcataggacacgtagtcattaacgtcccgcagccccaccttgtacagtccaatccagtcccacgggctgctggggaagtccgaggttgaagagtagctgaccatcatgtcattttccacggtccacaggtcctcgggcatcaggacgatcagcggagcagacaccaatggcttcagctccaagtcgaacgtgccggagacaggcttgtggtcgctgatgccgtacgtcatgtggctgctgtagcccctcagagacaaggagaagtgtgacgccggcggtatgggagtgtcggggccagcacagggctgccgcttcagcctccacaggatgcgatcggtccatgcaggcttgcgttttttctcactggtgtcatagtcgttggagttcctatcaaacttgtaggtgggcgggaagagtaggcggccctcctggaactcccggagcagcgggtcatgtttcttggcaatgctgagctggtccttctcccacaggccaccgtagcaccgatttttaatggattcccgaacaaagtgcaacccaaagtcctcgatccgaaagttcatgtctccaaaccagataatgaggtcgtggtccaggatgtttgggatgtctcgcccctcacaattctgcatctccaggatccggtcaaagtgctccagccgctggtaattgttggaaatgtggggaggcaggtggcagttgatgatgctgacatagtagccataaagcttcaggcagatgttgactccacctttgttcccccagtacccaaacaggccagtgggggtggatttagtagacagaatctggatatagggcaaatgctgatacttggcaaagaccagtaagaggatcccctgcatacggacatgggagacccaataacatatatgtcaagattgaggttccggttgttcagctgaagcaggtcactgagatctagagggggcgctgccgaagccacgttccaagtcacgacgtgtatgctgagcctcctgcctttcggcccgctcagcttccgcgagctcatggccgccgtcgtccccgcgcggtggtccggcaggttcgcgtctcccggccagcgggtcccggccagagncnacgtgcgggcggccggtctcacgc

SEQ ID NO: 433882 - DNA, 1265 bp, Homo Sapiens
  misc_feature (1106)..(1106): n is a, c, g, or t
  misc_feature (1162)..(1162): n is a, c, g, or t
  misc_feature (1215)..(1215): n is a, c, g, or t
  misc_feature (1253)..(1253): n is a, c, g, or t
tggaccggtccggaattcccgggatccagatcccggggtgcgcggagggcgcgtctctgacggaagccggggcggacggtcggagtccggaagaaaaacagtccgcgacagctaggcgcgtgagaccggccgcccgcagggctgctctggccgggacccgctggccgggagacgcgaacctgccggaccaccgcgcggggacgacggcggccatgagctcgcggaagctgagcgggccgaaaggcaggaggctcagcatacacgtcgtgacttggaacgtggcttcggcagcgccccctctagatctcagtgacctgcttcagctgaacaaccggaacctcaatcttgacatatatgttattggtttgcaggaattgaactctgggatcataagcctcctttccgatgctgcctttaatgactcgtggagcagtttcctcatggatgtgctttcccctctgagcttcatcaaggtctcccatgtccgtatgcaggggatcctcttactggtctttgccaagtatcagcatttgccctatatccagattctgtctactaaatccacccccactggcctgtttgggtactgggggaacaaaggtggagtcaacatctgcctgaagctttatggctactatgtcagcatcatcaactgccacctgcctccccacatttccaacaattaccagcggctggagcactttgaccggatcctggagatgcagaattgtgaggggcgagacatcccaaacatcctggaccacgacctcattatctggtttggagacatgaactttcggatcgaggactttgggttgcactttgttcgggaatccattaaaaatcggtgctacggtggcctgtgggagaaggaccagctcagcattgccaagaaacatgacccgctgctccgggagttccaggagggccgcctactcttccccgcccacctacaagtttgataggaactccaacgactatgaccaccagtgagaaaaaacgcaagccctgcatggaccgatcgcatcctgtggaggctgaagcggcagccctgtgctggcccacctacaagtttgataggaactccaacgactatgacaccagtnagaaaaaacgcaagcctgcatggaccgatcgcatcctgtggaggctgaagcggcanccctgtgctggccccgacacttccataccgccggcgtcacacttctccttgtntctgaggggctacagcagccacatgacgtacggcattnagcgaccacaag

SEQ ID NO: 433883 - DNA, 1048 bp, Homo Sapiens
ccgttaaggagaagttttgggggcccaacaacaggggttgcccgttttcagccttcccaacaggattgcgatgcggtccatggcagggcttgcgttttttcctaacctggtgtccatagtcgttggagtttcctatcaaaatttgtaggtggggcggaaagagtaggcggccccttcctgggaactcccggaggcaggcgggtcatgtttccttggcaatgctgagcctgtgccttctccccacagggccaccgtagcaccgatttttaaatggatccccgaccaaagtgcaacccaaagtcctcgatccgaaagttcatgtctccaaaccagataatgaggtcgtggtccaggatgtttgggatgtctcgcccctcacaattctgcatctccaggatccggtcaaagtgctccagccgctggtaattgttggaaatgtggggaggcaggtggcagttgatgatgctgacatagtagccataaagcttcaggcagatgttgactccacctttgttcccccagtacccaaacaggccagtgggggtggatttagtagacagaatctggatatagggcaaatgctgatacttggcaaagaccagtaagaggatcccctgcatacggacatgggagaccttgatgaagctcagaggggaaagcacatccatgaggaaactgctccacgagtcattaaaggcagcatcggaaaggaggcttatgatcccagagttcaattcctgcaaaccaataacatatatgtcaagattgaggttccggttgttcagctgaagcaggtcactgagatctagagggggcgctgccgaagccacgttccaagtcacgacgtgtatgctgagcctcctgcctttcggcccgctcagcttccgcgagctcatggccgccgtcgtcccggcgcggtggtccggcaggttcgcgtctcccggccagcgggtcccggccagagcagccctgcgggcggccggtctcacgcgcctagctgtcgcggactgttttcttccggcctcgtgccgaattcgccacccaggcc

SEQ ID NO: 433884 - DNA, 2003 bp, Homo Sapiens
atgaaccgccgcacacaccacttgtatctcctatgcccgtgtcaagcagcagcagggcggtgggaacggctgcacctgcactgtggcagctcgcaggcctccctgacgtccaggcggaggctttctcaagtgtgggtgccttgggtccgacccaggaccccctccccagctcccgtcctgaggcggcagagctgagccaaggtccaggaccagtttcaagagggtgggccaggctcctctgagtccatttctagggcagcccctgcacccttgccgtgctggactcggtggggacgtctgggtggctctctgcaggtgacacacgtgctgtggctggccaggtgggtggcaggtatgtgggggtggagctctcagctctatcactgccaggccctggggtgatgctgggcagagctgtccctgcgagggccctcgaatccaggagtgggcgagtccgggatggttccagagcttccaaacccacatccagcccaggatgtgagaagcagcccagaaaggcctgagccaggctgtcctggtggggcaggtactgtgggccccgcctgcccagctgacaggaggcagccagcggatgcccgggtgggaggggctcgagctctcagggtgtcccccagctaggactcatccagggcagggacccctcatgggaggatggggagtcacatggtgcccaggacccccgactgaggactgcagcagacccgtcacagcaaacggagtggaggcctgtatttcacacctgctcactcactccatggcttagaaaagaacacgtccaccgcggaggccgcaatgcccacctagagcaggtcgtagaagtagtccaggccctggcccagctcccagatagagaccccaacgcccagctcccgggccagctccagccgcacctgcagggacttcagggttgggtagaagacgacgtgcctcccactgcggctcttcttgtactcgaagaagtgctctgagacctggctgtcccacaccatccggggcctgtggtccttcagtgtctggatgtacctggccccgacaacaggctcacgggcatccttggaggtcgcgtagtccataccatagaagttgagccccaggaggattttgcttcgccacttggacttcgggtccaggacctggacgcaggctcgaacccaggacaggggtgcattagggccaggctgatgcgctgtagagtagtcgtaggtcatgaggctgaaaccatccagcacgggggccagctgctcaaactccttgtgcgtgaacatgcccagctggtcggtcacgcgcttctggcttagcagctggttccagacctccaccacgaagccatcgaaatgctgtttctttgccacctggaccacggtcttgctcagctcctctatctcatcctcactgtctaagacgttccggaaatcatcgtaagtccagtcctcaaacaggagccgaggcactatgtgcaggcccttggcatgcttcctgacagctcgcatccacccttggtccacgtcgtggaggcccgtgacctcaaacatctcacggccacgtctcttcagctgcagccagacgggtgagatctgtgtgaacttgctcccaaagaccttggtgacatcgtagccatggctgttccatggagtgacatagcccagtacatccccagcaaagtgtctgtcccgggcctttgccgagcagtagctgcgatgctcaagaaccacactctcagctttgaggtccgtcaccaccaaaccccggtcttgcaccggcttatctgaaaactgactcttctccagcagcgtctttgaggcggcttttttggcatctgactttgacagggtagtgtgaacagggctgcaggccagggcaagccagaggaggttgaagagtgtccgcatggtaggtgtgtcacagtagggtccaacctcggggtccagagggctgcatgtcagggaggccggacggccacaaacgcacggccggaaaacgct

SEQ ID NO: 433885 - DNA, 1587 bp, Homo Sapiens
atgaaccgccgcacacaccacttgtatctcctatgcccgtgtcaagcagcagcagggcggtgggaacggctgcacctgcactgtggcagctcgcaggcctccctgacgtccaggcggaggctttctcaagtgtgggtgccttgggtccgacccaggaccccctccccagctcccgtcctgaggcggcagagctgagccaaggtccaggaccagtttcaagagggtgggccaggctcctctgagtccatttctagggcagcccctgcacccttgccgtgctggactcggtggggacgtctgggtggctctctagagcaggtcgtagaagtagtccaggccctggcccagctcccagatagagaccccaacgcccagctcccgggccagctccagccgcacctgcagggacttcagggttgggtagaagacgacgtgcctcccactgcggctcttcttgtactcgaagaagtgctctgagacctggctgtcccacaccatccggggcctgtggtccttcagtgtctggatgtacctggccccgacaacaggctcacgggcatccttggaggtcgcgtagtccataccatagaagttgagccccaggaggattttgcttcgccacttggacttcgggtccaggacctggacgcaggctcgaacccaggacaggggtgcattagggccaggctgatgcgctgtagagtagtcgtaggtcatgaggctgaaaccatccagcacgggggccagctgctcaaactccttgtgcgtgaacatgcccagctggtcggtcccgggggtgatggcaggcgggatgaccaggagggccagcagccgggcctggtgcagagcctcggccaagtgggtgagcatgtggatgaggcccacgcgcttctggcttagcagctggttccagacctccaccacgaagccatcgaaatgctggttctttgccacctggaccacggtcttgctcagctcctctatctcatcctcactgtctaagacgttccggaaatcatcgtaagtccagtcctcaaacaggagccgaggcactatgtgcaggcccttggcatgcttcctgacagctcgcatccacccttggtccacgtcgtggaggcccgtgacctcaaacatctcacggccacgtctcttcagctgcagccagacgggtgagatctgtgtgaacttgctcccaaagaccttggtgacatcgtagccatggctgttccatggagtgacatagcccagtacatccccagcaaagtgtctgtcccgggcctttgccgagcagtagctgcgatgctcaagaaccacactctcagctttgaggtccgtcaccaccaaaccccggtcttgcaccggcttatctgaaaactgactcttctccagcagcgtctttgaggcggcttttttggcatctgactttgacagggtagtgtgaacagggctgcaggccagggcaagccagaggaggttgaagagtgtccgcatggtaggtgtgtcacagtagggtccaacctcggggtccagagggctgcatgtcagggaggccggacggccacaaacgcacggccggaagacgctccc

SEQ ID NO: 433886 - DNA, 1098 bp, Homo Sapiens
cggtccggaattcccgggatgagcgttttccggccgtgcgtttgtggccgtccggcctccctgacatgcagatttccacccagaagacagagaaggagccagtggtcatggaatgggctggggtcaaagactgggtgcctgggagctgaggcagccaccgtttcagcctggccagccctctggaccccgaggttggaccctactgtgacacacctaccatgcggacactcttcaacctcctctggcttgccctggcctgcagccctgttcacactaccctgtcaaagtcagatgccaaaaaagccgcctcaaagacgctgctggagaagagtcagttttcagataagccggtgcaagaccggggtttggtggtgacggacctcaaagctgagagtgtggttcttgagcatcgcagctactgctcggcaaaggcccgggacagacactttgctggggatgtactgggctatgtcactccatggaacagccatggctacgatgtcaccaaggtctttgggagcaagttcacacagatctcacccgtctggctgcagctgaagagacgtggccgtgagatgtttgaggtcacgggcctccacgacgtggaccaagggtggatgcgagctgtcaggaagcatgccaagggcctgcacatagtgcctcggctcctgtttgaggactggacttacgatgatttccggaacgtcttagacagtgaggatgagatagaggagctgagcaagaccgtggtccaggtggcaaagaaccagcatttcgatggcttcgtggtggaggtctggaaaccagctgctaagccagaagcgcgtgggcctcattcacatgctcacccactttggccgaggctctgcaccaggcccggctgctgggcctcctggtcatcccgcctgccatccacccccggaacggaaacaattgggcatgttcaccccccaagggactttgaacccctggcccccccggctcggaatggtttcaggccctcggagcttaggacctactctaagggggaataagcctgggccccaaatggcccccccgtcccctggggctaaagatttgcggtcaccggccccggac

SEQ ID NO: 433887 - DNA, 779 bp, Homo Sapiens
  misc_feature (33)..(33): n is a, c, g, or t
  misc_feature (38)..(38): n is a, c, g, or t
  misc_feature (69)..(69): n is a, c, g, or t
accctaataaaaatcccgccaaattgaaatctncacgnaacgctaaacacgtgggggaacgttgcttgnacccacgagtcccccatttggctcaaccgccgatgccaagtgtgtggttccggttgcgacggctccccgtgaagtggcttccggatgtgcgaatgaaccaggcagagtttcgctggccaagtagaccccagcaaagctgaagttaactcccacatttgggatgtacttcagaggtgaaacattcatccctcttctttccggatgtctgacaccgggcctttccatggttctccccctgatcctaagagtagctgaggtagagactcactgaaagatctaggcagggatatcccatcatgcccaggctctctccattctctgacctgggaacaactctgagcaggattccacatctaggaggcctcggaactgagcgggattttctgagacacaccaaatggctgctccctttccgccgctgttgagggtcgttatcctgattatccagatcacctagaaagtatccgtatccagaatcaataagatcaactctctgctcctctgacagcagaaggagcaggaccacaaggaaccaaagagcgtggaaggaaacgatgtgacaggaaagctcagagaacggccacagggggtcgtcagcaggccttccaacctgaatcatgaataattaatgaagcgcaaatcaaaggggactcgagtttcagcctgtgcaattcatccaacgggagatcgccggagggccaacacgattg

SEQ ID NO: 433888 - DNA, 1727 bp, Homo Sapiens
gatttttgttaaggaggattttggaattttctttgaaaaaattcgaagggagtttcgttgtttccggtttttcctggaatggtccaccaacattttccttggataaagagccattggttcctgaaagcgggtcaggattcaacttcatttcctcatttcaaggctttcccctcttccccggagctcagttaaaatgtccttttcttgctggtgcaggaactgatgcagctttagaaactccatggacacatgttgctgcagatgtagcttgttttccttgtgagcagcaatagcttccttctgcatgttcctcagggtctgaagctccttcagagttgtctccaagttgaccctggttggatgggcaagttcctccatgaagaaaatggacaggcatcagagatttgcaggaactccttagactgcccccacagacaaccgagcatcctgtgcattgaaagcagatcagtttcccatctggttttactgaacagtttcaggttctctccatgcttctgggcactgtggatggcccttgagtaagggtaacttcttaatcttctctaccaacttgtccagtacacgggttgaatgtacagttgttatactgacatagcatcttacactcaggacagaatgtttcctttgcttgcagcctccaaaagtcttggatacaggcttcacagaagttgtggccacagcttagcatcagtgggtctcggaaccaatcattgcacagagggcagtgtagctccatagtaatatcttgtatcaccactttagagggtaggtgggtgattgaatcattcatttcaacatagttgcctggatcgatgttggaggaggggttggtggatacctccatgaagcttcagcccaccaaggggcagaggcaggcacttgaatcagagctcagcaggcccaggatggctgcagactgggagtcagggaccttttagttttcaaggaatgggctcagagcatgatggaagaaagaaaagttcaggagctggagagaagcagcaaggccagagtgaggtctggcagattccgtgacggtttgtcagttagttttgatcatgatttggttcagagcatgatggaagcctcattagagttccgtagctgcccaacttttcttttgtaggagacaagggcagctcatttagattcgagttagtagtctaatcttaaggttcatagctccccatttctggactaaggatgctcgagatggtacttctcttgggccccacagacacctgcttctccccggatcgctattctcgactatttgcgtttcgcgaccggcctgcccctcctctttcccgctctgcccaggaaaagcgagccctcggaaggaacctgggcagccccagaaagcagtgcccatcactttccagctccatccacccagcagcccatcaatgacctaaatatgctgtctgttccacccagtcctgcccggtagttattcagcgatgagagagtaggaagcttgagctccaggagtgtgccactttcccggccctccgtggcttcccagtcccggacagagacctgagcaagccgaacccgggtgcctggctgcactgggctgggaaggaggaccgggcggccgcaggccagggagggcaattggagagagatagaagcagagggagggggaggcagaggagaaggtactcgacgatggacgcgcccaggctgggggcggcgcccacaga

SEQ ID NO: 433889 - DNA, 831 bp, Homo Sapiens
cattttgtcttctgtgctacttctacctcccagtaccactttccagaggtgaagcctcttgagcccagtacagccacacttgagtcgaacctctcaggatcatcaggcattatcttcttaatgtcaccatgccagacgctggtttggcttttggagagcaccagatttgggtgagctgttttagggtccagagttagtggagacaggcctgggcagagagtgtcctgcatttccctccataccatgtactggataggacctttgtactggcccaggttcagctttctggaaataagctctctggttgccagcaccttcattccttgctcccagctatgtaagagagttgtgatgtctttgagaaagtcgaaggagttctgttgttccgtctttgcctgaatgctcacccacatatccttggctaagagaccttgctcctgaagctggctcagattcaactctatctcctcgttcaaggctttcccctcttcccggagctcagttaaaatgtccttttctttgctgtgcaggaactgatgcagctttagaaactccatggacacatgttgctgcagatgtagcttgttttccttgtgagcagcaatagcttccttctgcatgttcctcagggtctgaagctccttcagagttgtctccagttgaccctgttggatggcaagctcctcctccatgaagcttcagcccaccaaggggcagaggcaggcacttgaatcagagctcagcaggcccaggatggctgcagactgggagtcagggaccttttagttttcaaggaatgggctcagagcatgatggaagaaagaaaagttc

SEQ ID NO: 433890 - DNA, 1966 bp, Homo Sapiens
  misc_feature (76)..(91): n is a, c, g, or t
  misc_feature (1889)..(1925): n is a, c, g, or t
gagaggagaccccctttttagggattttttccacaaagggaaaaagggggcttcccaaagacccgttgagtggggnnnnnnnnnnnnnnnngttcacgggaaggctggggaacgaaaagcccacccaagagcccagaaggtggaggttctgggccagattcgccgcttagcaggtttatgccaaagaaacctttgggatcatgcgtgtggtgccgccatctgtaaggggggtggttctttatgtagaggggtcgcaggaatgttgttacaggggggccagaggaaagatttgatggcgttgaagaaaggggggaggtggctttaaggaacaggccacggtatttggcgcattggggcagcgagagtccagagctggagcataaagccaaagggaacagaaagcagtctcagggcatatgagaaatcaaagaggtttcttatatgctgccagatagcaattttgaaaatcagtatttttaagctcagagcattggatgccaacaacccatagttcctgcacaaagacatggaaaaatccagccacaggatctgtcttgagcaataaggcatacatcatatataactgcagtgatactgatggaggctgatttttttcaaacaaactgggcagtgttagtatgtgtaaaggaagtgcagaagcactgactacagatgtggccacattctatagagtagatgtgttgtatactaagttcaatctctgagcatccatccatgcaaacttgacactgaatataaccaggtagtatatgacaaaaaaaatttttttgcagggaattatggtgggcactgttggttatacatacatctctgtcccttttcactccctcctcatcattgttcaccacacaactgccagtgtggtcttggagtggccttgtgtttgctcttggcctcctcctttgttcaataatcactacagagtcacggtgagttaggtcaatcactacaggtgctagagattcacaggtgaggtcaactacttcatcactttccccaagttctatcagttctgcatccaaggctatgttaggtgttgggcctccttctctggctatagggaatgctcaggcttgtctggaattcaccatgctgtctcagcttattatagtattccattgtgctttttggattcagtcttagagaagtaaatgatctgtgccaaggtttacagcagatattaaaactcttcgatgtctcactgctgttgttcagtcactctctgacttataagaatttagaggtcagatttccccacatatttgaacccttattctgggtccagtcctgtcttcacttccacaactgctgtgttcccacagggagtggatcttctgggagccatttgtaagatagttcaatctgaatttttaacgagatggtacttctcttgggccccacagacacctgcttctccccggatcgctattctcgactatttgcgtttcgcgaccggcctgcccctcctctttcccgctctgcccaggaaaagcgagccctcggaaggaacctgggcagccccagaaagcagtgcccatcactttccagctccatccacccagcagcccatcaatgacctaaatatgctgtctgttccacccagtcctgcccggtagttattcagcgatgagagagtaggaagcttgagctccaggagtgtgccactttcccggccctccgtggcttcccagtcccggacagagacctgagcaagccgaacccgggtgcctggctgcactgggctgggaaggaggaccgggcggccgcaggccagggagggcaattggagagagatagaagcagagggagggggaggcagaggagaagccgctctcgacgaattcgagctcggccgatttggcctgatnnnnnnnnnnnnnnnnnnnnnnnnnnnnnnnnnnnnncgccgccccgcgataacccgagcgcccatagtgatgaacag

SEQ ID NO: 433891 - DNA, 2999 bp, Homo Sapiens
  misc_feature (75)..(84): n is a, c, g, or t
  misc_feature (138)..(206): n is a, c, g, or t
  misc_feature (255)..(293): n is a, c, g, or t
  misc_feature (2919)..(2955): n is a, c, g, or t
ggttttggcaagccagccagatttccttggcaggaaaaaaaaggattttcaaagaaagatccctttgggatcacnnnnnnnnnnggcccgctcattttaggcggggttaaatttcccgggttatgccagcccgattcnnnnnnnnnnnnnnnnnnnnnnnnnnnnnnnnnnnnnnnnnnnnnnnnnnnnnnnnnnnnnnnnnnnnntcccactttgtacaagaaaggtggggtcaggaaacagctatgaccatgnnnnnnnnnnnnnnnnnnnnnnnnnnnnnnnnnnnnnnngcctcgagttttggtgttttgttgctagttttcacgtttaccaaattgccttttatttacatacgagaaaatctcaccgtgtgtccagctggccccgtcacggccgctgaaggcagcactgctgggcaaggagaaacaaggccacacctgcaacctgggctgcagggtgaggtggctccctccgcacaggccccaggacacccaccatggcacaggccaggctgctgcccccacacggcctccacgaggtcacgggtccatctccacaaccccaaggcagtaagcagtgtgcctcgctttcgccaagctgggccaatgaagaggccccgcccccaccctcaggccccgccctctccccttggaaaacaggtggttttttcctaacacaggaaaacagaaaatgagcacgctttctatggctgccaaagtacaaggagaggctctgccctgggagccactgcatggatggtgggcaaggtccgggagccagctccaaggagcaggaagcagggggccatgacggcaggacaggcccagccatagccccgggaagagagactgccctgtacatccaggtccgggagcctcttccggctgagcagggccgcgactcggcatggccccagcacccgagcaggtctggagggccctcagagcggggcaggggcgggcacgctggggaggggcagctccagggccggcgtctccgcagcctgtgccgggctgggcttccggtgatccagctgttccagcttctcgccgagctgggagtaaagctccttcactgcctctccgctctggcctgtaggctccagggccttctgcaacgcctccagcttagatggggccaccctggggtgcaggtgaatgaggagccgcagcgcgtgccggtgcacgttctccttccttggagaggcggtgaggaagaagccatcgaagaggctgctgcagaagtcctcaagggcaaattcgtcggccagcagcgcaaggttgcccgtgagcaggtggaggaagatgtcgccaaaggccaagtcgccaaaggtctccaccagcccgggcagcaggcggaggagcgcgttcttgttcctctgcttggtgatgtgcaggacgtagtacagccccacctcgcaggccatgcgctgctcctgcagaaacttagtgaagctttcgggaagtgtgtttggatatgagactggggctttctcctcagccggaagtttctgatccacattgaaagtgtagtcatccaccaggaaggacatgagcatcgggaggaacctggtgatgagctctacctccatcttgggctccttgaagacctggctgtcgatcatgtcccaggctccctggcccagcgccagcagccggagcagcagcaggaggtcggggctgtccctgggcagtgtctcctggccgaccagctcctgcaggtgcctgactgtgctcagtgccagcgtgttgatggcgaaggggtcacacaggatcatggacaggtcccccagcacctgctcctggcccttcttgacgccatcgagaaacccctgcagctcccgcgccctcttgctgtccacgaaccgctctcggatgcaggcgtccaggcaccaggtgaacttgtggcacgggtccacggtgcagatttcacccacgtccaggtcgtgcagggacatgagcagctcagcccgcagcgtgcagtagtgcacattccgcgtgcgcaggaagagcgtgcgcagaaactgcagcaccatgtcgtacagcttcacgttcttccccaccatccgcgtcagccgctgcaccacctcgccctggcgcctggtcttgggggaaggactgaaaaagttgtgcaggacagagagctctgtactgaagagagcgctctccttctccaggatgtactgcttcaggagtggggaaacctcgtccccgaagagggcctggttgtcttgccagatctgccgcttcacctccacggcgcaggctcgatacagctccttgtcagccataaccagcttcagttttttctccggaaccttgggcaggtgcttcatgacgcacatcaccacgggctgcagggacggcatcttcaccagagaaaagctcttctccagaaggtcttccagcttcttgtacctttcctcagccttcccctccgaagcgatggctgacactcgctccagcagcttgtcccgcagctcatcgaataccgactggtggaactccagccgcggcgtcccgtgcaggtccaagaaggggagggctgactgaagagatggcagcagcacaccattctctgtctggaactgctcgatggccttgagcggctccgtgcagttggtcagggtctccttcaggtcctcgccgttggccacgcccaggtcctgcagccccgcgaacatggccgaggccccggccaccgcccggctaggcgccccatccccagcccgttcccccggcgccgccgcagacaccccagaagcccgctccgccgggcctcggggaccgcccgagccccgctccccggcgccctccagctcggccaggtcccgcccgccgcgcgactccgcgcgcgtcccgcagccgcccactccccgctctcgacgaattcgagctcggccgatttggcctgatnnnnnnnnnnnnnnnnnnnnnnnnnnnnnnnnnnnnncggccgccaccgcgataaagcgcggtcccctatatatcatacat

SEQ ID NO: 433892 - DNA, 595 bp, Homo Sapiens
  misc_feature (30)..(30): n is a, c, g, or t
  misc_feature (216)..(216): n is a, c, g, or t
ttatcccatctgcacccctctccctcgtantttttaaaaacaggcaaaatatgtaagaaaaggctggtgccacgttggaaagacagagcgtgccctgtcctatgccagtgctgctgtgccctgcagccctggcagatggagtcggatgctggggcctcatgcccacttaggccaataacatactcaagactctacagcccgttcaccagcaaagtnatgccctgaggggcaacactggctgtggaagtgaagacacacaaagcagggactaaaggcaaatggggcttcacgatgcagcgacatgaagacagaactggtgtgggcgccaaaggcaacctgcagggctcacataaaaggaaaataggacagaaagccacgagttccacaagcagaatcatttctggtcttacatctgagggcatttgtagagaaaagtccaaggcaatgtcccctgggtctgagagaaaaatcctacgcaaaagagggcagacaatgcggtgctcgtcttgagggagcctgaccctgaccctgaccctgacgggctggatgcgagaggggctgagtatggctgtattcagtaaggaaactggtagca

SEQ ID NO: 433893 - DNA, 2048 bp, Homo Sapiens
  misc_feature (1649)..(1649): n is a, c, g, or t
gtgaggccggggcttcatggggagttgttgggctgaacgagcggctcggagtatgggattgggggagggggacgggggagtttggcgcaaagcctgctggggcatggagtcccggcgagctttgtgcgcatgtgcggggaggtgagggggcttggggggcctcgcctgagagagtgaggacaggctgcgggaggagctgcaggactgaggtacagaggccaggggcccagggcaggacccagcctggacttgactccctgggatcccaggaagggcacaccctttcctcaccacccgagtgagcgctgccccctcacagagacctctttgccccctgggccaggcagagcaggcgctgcggtccgggaggccccatggaggtggcggtgcccgtgaagcaggaggccgagggcctggcgctggactccccgtggcaccgcttccgccgcttccacctgggcgacgcgccgggcccgcgggaggcgctggggctgctccgcgccctgtgccgggactggctgcggcccgaggtgcacaccaaggagcagatgttggagctgctggtgctggaacagttcctgagcgcgctgcccgccgacacgcaggcctgggtgtgcagccggcagccgcagagcggggaggaggcggtggccctgctggaggagctctgggggccagcagcctcccccgatgggtcgtcagcaacgagggtgcctcaggatgtgacgcagggccctggggccacaggtggaaaggaggacagtgggatgattcccttaggcaccgcccctggggctgaggggccggcgcctggggactcccaggctgtgcgcccctacaagcaggagcccagcagccccccgctggcgcctggcctgcccgccttcctagcggccccgggcaccacgtcctgccccgagtgcggcaaaacgtccctgaaaccagctcacctgctgcgccaccggcagagccactcgggcgagaagccgcacgcctgccctgagtgcgggaaggcctttcggcgcaaggagcacctgcggcgccaccgcgacacgcaccccggcagccccggcagccccgggcccgcgctgcgccctctgcccgcccgtgagaagccccacgcgtgctgcgagtgtggcaagaccttctactggcgcgagcacctggtgcgccaccgcaagacgcactcgggagcgcggccctttgcctgctgggagtgtggcaagggcttcgggcgccgcgagcacgtgctgcgccaccagcgcatccacggccgggcagcggccagcgcgcagggggcggtagctccgggcccggatggtggaggccccttcccgccctggcccttgggttagccgcctcccggccagcgccatctcccgcccttggtgctgcccccgggcggtacctgctctctcccagcgccacttggcctcttcctctcctccttccctcccatcgtcctcctccacctgcgcctcccttgtctgaacttcccaacgccttcctattcctttccaatctccttttcccccaaatttcactttccttctcatgtctcacctcagccccccccttctccctgatttctcggcctctctctctgtgtgaaggggcctctctcctaatgtctcctccttcccccctcntctttctcctgcgtcccagcctccctctccctcctccattcctctctccctgcccttttcctgcctgaagagcagaggtgaggacctgggacccctgaggggcaggccaggaggagctcgggcgcaggccaggcccccttggtgaagcagaggctgaaggaaaggggtctgggtcttgtccctaggaattctcctccctcaggagattgggggttgggggaggcagcgggtgatggctctgaagctgaacccagggcctggctgtggtcttcttggtcttgctgccccctgtgacccaaaggcatgggatggacagagatgcctgcccccgtgaagctggttggggagggcagttcaccagcatccatagagtaataaagtcactgtgtgtagacccgg

SEQ ID NO: 433894 - DNA, 670 bp, Homo Sapiens
gctggaccggtccggattcctgcaaaaaaggcagcttcaatctcaacttgagagatttctctccagagagtaaagggctggaagtgggggcgagacagaagctacagtatcaacctctgagaagccgcgttcattcctgccagacattgcgagatacagttgggaagaatttccaaggaattcttctctgccttggcagtgagggacaggctgcgggaggagctgcaggactgaggtacagaggccaggggcccagggcaggacccagcctggacttgactccctgggatcccaggaagggcacaccttttcctcaccacccgagtgagcgctgccccctcacagagacctctttgccccctgggccaggcagagcaggcgctgcggtccgggaggccccatggaggtggcggtgcccgtgaagcaggaggccgagggcctggcgctggactccccgtggcaccgcttccgccgcttccacctgggcgacgcgccgggcccgcgggaggcgctggggctgctccgcgccctgtgccgggactggctgcggcccgaggtgcacaccaaggagcagatgttggagctgctggtgctggaacagttcctgagcgcgctgcccgccgacacgcaggcctgggtgtgcagccggcagccgcagagcggggaggag

SEQ ID NO: 433895 - DNA, 1593 bp, Homo Sapiens
  misc_feature (21)..(21): n is a, c, g, or t
  misc_feature (88)..(88): n is a, c, g, or t
  misc_feature (102)..(102): n is a, c, g, or t
  misc_feature (1256)..(1256): n is a, c, g, or t
cctgagtagctttgtgtttcngctggttgcagaaagccctcacatcaaattctgatgactcttctttgaagactctcttattctttantggctgtccaaganccacattattctgtacattgatcttcatttgtttagctttttttgaaattccaagcaaggtttcttcactggctcttggtgactgctcatttattaaaaacagtttatttagcaatttatttattcctttagctgcaatagctataggcatttttttcttaaaggcttcaaaatatggctgtcctaaaaattcagtgatatcagaaggaaaggtaaaatctttgaagtaaggcattggttgaatcctagcgacctcttgaagcaatccaaacaaaggctcatataacaaatcaacctttttaagacacctttatagagaacccataacctgctcaccagcccaaccatcacaaggtttaaaataatgaactcttgcaaacctagatgtttcacagtcaaaagaaaagttttgcagcagcagtccaacaagcggagcaacaacttgcaggctcccaaaaccttcatcaacaccaactccaccactggctgactggggacaacacatactttggtagttaagggctgattttcattggaagaaaacaactcaaacaggtcttgaattgagccctccaaattcatgtttttcaaacgctttaaacattgctcaacctgtttgagggccaaatggggtttgtggcggcccattctgttgtgattgctgtaaaggactgcacataacacatctgtttctgcatctaaggtttggctcttcagcgacagtatgacgagatggcattctttaattacagctgcaatgcaaaggtcaagggccgcgccggggttctgcactgtcactgcgctgcggttccccgccttagggattctcacacggttccacggctccaggcccggcggcaccgcagccatcatgcgaggcggggggacttacgaaaggcggagctacgcgagagcacgtccagcgaccggagtctggaacagttcctcgttctttctctggctctggatctgcgtccctgacagtcttaaagaggacagacctttcattcatgaggatgaccctcaacttggcccagtccatgtttcctcagactcaagccttgcattcctggcagaaagactgaagaaatgatgctgtgctcttctcagtgcttcgcgtcaggaggctctactctctcaaccggccccactantgggcatcttgagacaatgttctgcctacacaaaattctaaactgagaggagtggctcagaagctctactaacatggaatcacatgtgggttgcaggaggctggagactatcccagcagcacatggcacaaagcaagaaccagccccggacaggacgccattccatcacaggtgcactcacacccaccagcactcactcagactgtgcccatttagacacaccgattcatccaacatgcatatctctggggtgtggaaggaacctggattacctggtgaaaacccacacagacatggggagaacatgccagctctacacaaacagtggcctggtggg

SEQ ID NO: 433896 - DNA, 1009 bp, Homo Sapiens
ctggattcttcagaaagtgtgtgaagactcagcctctcggaatctttgcacaaaacttttggcatgaggagttcctatcactttctgagaagaatacttggttgtctttagtctggattgagaacatttaaaatcaaaactggtctcctgagtagctttgtgtttcagctggttgcagaaagccctcacatcaaattctgatgactcttctttgaagactctcttattctttactggctgtccaagatccacattattctgtacattgatcttcatttgtttagctttttttgaaattccaagcaaggtttcttcactggctcttggtgactgctcatttattaaaaacagtttatttagcaatttatttattcctttagctgcaaaagctataggcatttttttcttaaaggcttcaaaatatggctgtcctaaaaattcagtgatatcagaaggaaaggtaaaatctttgaagtaaggcattggttgaatcctagcgacctcttgaagcaatccaaacaaaggctcatataacaaaatcaacctttttaagacacctttatagagaacccataacctgctcaccagcccaaccatcacaaggtttaaaataatgaactcttgcaaacctagatgtttcacagtcaaaagaaaagttttgcagcagcagtccaacaagcggagcaacaacttgcaggctcccaaaaccttcatcaacaccaactccaccactggctgactggggacaacacatactttggtagttaagggctgattttcattggaagaaaacaactcaaacaggtcttgaattgagccctccaaattcatgtttttcaaacgctttaaacattgctcaaccaagggccgcgccggggttctgcactgtcactgcgctgcggttccccgccttagggattctcacacggttccacggctccaggcccggcggcaccgcagccatcatgcgaggcggggggacatcccggaaattccggaccggtccagc

SEQ ID NO: 433897 - DNA, 818 bp, Homo Sapiens
acatcggtgacacttttggcagtgatggtgaacgtggtgctttgtatgcttggcagactttacatactggagatacatggtatccggtttccacccccagaggacaaagcccggaccgacaaacatggcattgaagtaattataaagaatcatgacagtccaatttatcaacatgatgaaattcacacttcctccagttgtatgtaagggccaataccacaacacagagtcaatcatggccatggtagaacatattgctataacaccaagggctatgatgggaccccagtgacacagtctctttaattcttgtagattttcaaacttgataaccgaacagaatgtacccattttggcaaggaagaatgccttcctactttaaaagaattatagatttcctttttctgtgcgcacatttccatgtgccacaagtccatgtgtgttctttaattgtcatgccttcaagctgtgaactgttaacgcagattacaccattttcactgtcaggcacccaaagctctttatcttaactaggagaatccagtgtcttggtctgaaacccaacctcagtgtggtccctggtgtctgctcctcagccatcgcatatccggggcggcctgggctcacccggaacagattttttcctccttggatgactccgtcatggacacctcagcccaggacaagcagagagcaaaccctggcagcgagaggctggagtgcgggacctgctacaagccgagcacctctcggccagcgccctcgccaggactctcccgctcaggtcccctgcgcagtctctgttactgtcacccgct

SEQ ID NO: 433898 - DNA, 778 bp, Homo Sapiens
gatgtgacaatccaagatggcggtgcccggcgaggcggaggaggaggcgacagtttacctggtagtgagcggtatcccctccgtgttgcgctcggcccatttacggagctattttagccagttccgagaagagcgcggcggtggcttcctctgtttccactaccggcatcggcctgagcgggcccctccgcaggccgctcctaactctgccctaattcctaccgacccagccgctgagggccagcttctctctcagacttcggccaccgatgtccggcctctctccactcgagactctactccaatccagacccgcacctgctgctgcgtcatctcggtaagggggttggctcaagctcagaggcttattcgcatgtactcgggccgccggtggctggattctcacgggacttggctaccgggtcgctgtctcatccgcagacttcggctacctacggaggcatcaggtctgggctcctttcccttcaagacccggaaggaactgcagagttggaaggcagagaatgaagccttcaccctggctgacctgaagcaactgccggagctgaacccaccagtgctgatgcccagagggaatgtggggactcccctgcgggtctttttggagttgatccgggcctgccgcctaccccctcggatcatcacccagctgcagctccagttcccaagacaggttcctcccggcgctacggcaatgtgccttttgagtatgaggactcaggagactgtggagcaggaagagcttgtgtatacaggc

SEQ ID NO: 433899 - DNA, 1096 bp, Homo Sapiens
  misc_feature (879)..(879): n is a, c, g, or t
ttttcttaatggtttcaatgattggcgaatgccacgtagatgaacttgtactgcgcatccgtcgtgcaacatgcccgaagcgctgcgcccgcaccatctggatggtctttctggatgtcaatgtcacagtccaggccccttggtggagatgttctccatgagcatgtcgatgacaatgatggtgcctgtacgccgatgccggcgctggggaaagacgggggtgccatcagagaccagtcaagccctccccgggaagggggatacacagcgttcagctccagccacaggcaccacaggagcagcctgagcctacagtgatgagagggaatataaccagggtcaccgggcaaatgatgatggaggtttgcccagatctgcatgaacacgctccacctcgggattttgcggtgcagacgctggctccccagctgacaacatccttccctcctccaatcctcgcgccgactcctcactcatagtgagtgactgcccccaccccggagacctgggacccccaatcccaccactgtcctgccggctcccaggtactctgagccctccccgcctctccctgaaggagttatggagcgtctctcagcatggcttcacttccctgtttcctttcaagcctgacgtcagggaaaggatagccctgagacagcagggtgcgggggcacagggtcagaggactcaggggagcagtgcagtaggaagtttctctcctttcccagccctgggcaaacagacctcagggagaccccaggcccaccctcagctgagcccagcaagctgatgccctgagtcgcgctgtctaatttcaaacccagattgtcaaaaataaacccccaaaaccacttcccttcctgtaacgtctaaatnaagggcatggggctttcaagaagtgtgtgaatgtgtgtgtggcgggtgagcaggagggtagctctcggggatggggctgtcccttagagagcacaggacagagccgcgtcccccggacatgccatcgggggcacctctagatacaggcgacttgccttgtccaggacaaacagctgctgggggagaggagaagcagagccggtggagctctgtgaag

SEQ ID NO: 433900 - DNA, 1995 bp, Homo Sapiens
  misc_feature (637)..(637): n is a, c, g, or t
ggaaaatgtttcccccaggttcagggctgaaggcatgcccccctgagggccaggcaccgttcaattcctttttaagggaacccctggctcttctcctgttttgctgacccgcggtttttcaacttcttcctccctcctgttcctaggggcaggttctcatacactccctccttgttttggacgaggtgcgggaggccttggcatgggcatttttcatggctggggataggtgatgtccccgtactccgactcctggcccttctgcgactgcaggacctccagcttcttcttagtgtttcaatgaactgggcgatggccacgtagatgaacttgtactgcgcctccgtctgcaccatgcccgagcgctgcgcccgcaccatctggatggtcttctggatgtcaatgtcacagtccaggccccttggtggagatgttctccatgagcatgtcgatgacaatgatggtgcctgtgcggccgatgccggcgctgcagtgcacgatgatgggccctgcgtgaggcagactttcctgcccgctggttgatctggtccaggaagctgaggacaccccccagggctccctggggaccccatggtcgggccagctcaggtactggtaatgccagatctcccgaatncaggtctccattgtccagcggggagacctgtaaggtacggagtttgtattcggttgtgtcatgctccccgcagttggtcacagagtagggcccataagcacgctgcatgcccacctcgggcccagtatgggacgcatttgttccggcctttctccacctctcgggtggtcatgacgatgacacggctgttctcctgccacgccatctgccagaagtcattgaccgtggcctccagacagccctggctggcgatgtaggtcttagcgttctcatcagggcctagcagctggttcttgatgtagttggcattgatgtagtcggaccgggggatgttactgtccaggtccctgcaggatcactcggctgtggtcaaaggggagaatgttcttgtaagcggttcttgcccttgttctctggccgctgcccttccagacgctggtgcaagttcttcacctcctgcttctgcaaactctcaaactcctcccagaagccagccttggctgtatcctcggactcctgcttcttgttcagttccaacactcggttctcaatgtcagccgcattcaccctcgtggcatagtacggctgccgcaggtagacaaaggcgcctgaggcctcctcaatccccgtcttcttgaaatgctccaccaggtccgtgaggctgtcgaaggtctccaaaccacccactgtgtagcgtccaccctcgcacatgaccttgatgtgggtgaccctgagcggggagcctgggccagccttgggctggtcactgagcacagaaagcacgaagtctccaggctggctgaggctctcacgcacaagaaacgtccagggctcgcccttggcctgcagcagcgtctctgcctgcccgccagacatgtggccatggtaccacctctcactagtgggatcggagcagttcagcgggtacttgaggtggatgatggtgccgtcgcggtcctgcaggacaccctgctgctgagtgtagtactccaccagctctgtcagagtcgcaaacttctcccctccatacaggtcatagaaatcccctgagttctggatccgaatatgggtcacctgatcccccaccctgacggagagcgagaagtcacctggttcttgcgactgggccgagccaggaagctaccgtggacacctcggcccttgagcagggtctctgcatccagcccactgaggtctcggtgaaaccacccacgggacagcatctctctgtagggagggggaagccacggcagaggccgcagggggcggggctgagccagcggcacagctgtgcacagtggcccaagccaggtgaggaagaaccgctcagtaatcagccacttcctcctcgatcctgc

SEQ ID NO: 433901 - DNA, 2005 bp, Homo Sapiens
  misc_feature (116)..(116): n is a, c, g, or t
  misc_feature (118)..(118): n is a, c, g, or t
  misc_feature (159)..(159): n is a, c, g, or t
  misc_feature (182)..(182): n is a, c, g, or t
  misc_feature (184)..(184): n is a, c, g, or t
  misc_feature (290)..(290): n is a, c, g, or t
  misc_feature (335)..(335): n is a, c, g, or t
  misc_feature (1175)..(1297): n is a, c, g, or t
aactagttggtcggggcgtgaatccgcgttatcggtccggacagtagcactgtgcgccgcaaacgcgtattcgggcgatgaagggcggggggttacgtctgtgatctattagtgtntnagggtgaggtgtgcgcggcatccgtctccctctaacggtanaaaaatatgcggcgtacagaatntntgtcgaggggggttacttgtcggccccggatcatcacctccgtagataaagggtgggcggcggtagctgatgtatagactcgccgtgatatctgtggtgctggtgnatgtgtgacaatagtgcgtatgcgcgagtgcgttaaggtctcacnctgtttcgctggcaaatgtcgcgtgaggcgaatctgacccgagttggggaggcaaacactgtgagattgtggtgtagtgttatagcaagcggagagacacgtccgacacacggcggtgctactctggtgtgtggttaacattctgtctcttcaccacacccttaaaacgcggggatcgagcgtgtgttttttctggcccgtgttttatgcaagggaaaacgacaccacattgcacccaatagggttggataaaaaagtggatcggcgatttttccaaagggagtttgtaaaatctgcggcccggagcaggcgctatcattggaggggaacggccgccggaaagtaacttcaataccccagaggcgccttggggaaggttcttcttttttgtaaaacccacctgtacacactcgggtatggggtgggcggttcctccgggtggcctcccctatggggttacccttttgggttccctggtttagttttgagcaatataccttcattatccttaataggacacacggaccctccccatggttggagttccttgttacccgctcgttcagcctgagtggttttttgtattttttataccgccagagtggcgagtaggggtattggtgttgcgctcgcggggatacgccgtgaacgaaagtagtagttcctcgtttaagcagtgtaagatgtggcccatagtcttttccgcgctatgtcgcttcgagagaaccgagccccccgcccgaaattctaaacttcgcagtttattgcctccccgtgaaatgaaaagcgggtcctaggtttccctcctttcccagctgctttaagcggcccccccccccnnnnnnnnnnnnnnnnnnnnnnnnnnnnnnnnnnnnnnnnnnnnnnnnnnnnnnnnnnnnnnnnnnnnnnnnnnnnnnnnnnnnnnnnnnnnnnnnnnnnnnnnnnnnnnnnnnnnnnnnnnncacagtgatcccagggctttatttacaagaggagaagggttggccctgcctggggcctggctgggctatatacagggtcagggagaggtgggggggatgcagccatttaaattacaaaagaatggggcactcctaggttcaggttgtgagtctgtccatcgcgaaatgcttccacagggtcagggctgaggcatggccacctgaggacagcaccgctcacttcctcttgagggaacccttgctcttctccttgtctgctgaccgctgcttcttcactttctcctccctcttgttcttagtgtgcaggttctcatacacatcctccttgtgtttggacgaggtgcgggaggccttggcatgggcattcttcatggctgggggataggtgatgttcccgtactccgactcctggcccttctgcgactgcaggacctccagcttcttcttagtggtttcaatgaactgggcgatggccacgtagatgaacttgtactgcgcctccgtctgcaccatgcccgagcgctgcgcccgcaccatctggatggtcttctggatgtcaatgtcacagtccaggcccttggtggagatgttctccatgagcatgtcgatgacaatgatggtgcctgtgcggccgatgccggcgctcagggagaccccaggcccaccctcagctgagcccagcaagctgatgccctgagtcgcgctccc

SEQ ID NO: 433902 - DNA, 890 bp, Homo Sapiens
  misc_feature (747)..(748): n is a, c, g, or t
  misc_feature (752)..(753): n is a, c, g, or t
  misc_feature (755)..(755): n is a, c, g, or t
tttcccccggggatttttgcgcggcaaaatacttgtctaaaaaaaatttcccttccccgaggaaaggccccaggcccttgggacctgttattcctttcgggaactccccggcctttctttggttgcaggtttccaaaccacttggggtttttcaatgtttaaggccggccatttaaccccttcggtgggcatagtaagggtttgcccggcaggttagaacaaagggcggcctgagggccttcctcaattcccccgtttttcttgaaatggttcccaccaggttcgtggaggcctttggaaggtctcccaaaccaccccattgtgtggcgtccaccctcgcacatgaccttgatgtgggtgaccctgagcggggagcctgggccagctttgggctggttcactgagcacagaaagcacgaagtctccaggctggctgaggctctcacgcacaagaaacgtccagggctcgcccttggcctgcagcagcgtctctgcctgcccgccagacatgtggccatggtaccacctctcactagtgggatcggagcagttcagcgggtacttgaggtggatgatggtgccgtcgcggtcctgacggagagcgagaagtcaccctggttcttgcgactgggccgagccaggaagctaccgtggacacctcggcccttgagcagggtctctgcatccagcccactgaggtctcggtgaaaccacccacgggacagcatctctctgtaggggaagggnnggannangccacggcggagggccgcagggggcggggctgagccagcggcacagctgtgcacagtggcccaagccaggtgaggaagaaccgctcagtaatcagccacttcctcctcgatcctgcctgccaggccaatggcccc

SEQ ID NO: 433903 - DNA, 1395 bp, Homo Sapiens
  misc_feature (143)..(143): n is a, c, g, or t
cgctcatggtctggatacctgctatttctcagccatgcttcattggtcccactgaattctctagatccccagcagttcccacactctgtagggtcctgcctcaaccattaattctacttatccatttgtttaggaataattanttttctttttttcccctctaaactgggtaatttataacacgagcaatttttgtatgtttaaaggattaccatccctagcctgtattgttgctttgctgtgagggaacggttgggacagaaaaagtgtttgtgtagctctgaaacttcaatttctaggaatgcagctactcactggggcttccctgcttgaagatcatgggcttttcccttccactggagaccaaggaaaagtcgagagttggataagggatctggctctgagttctatgtttcctgctgcttgtagagaggcctgaggatgatggggttgcaaatccagagaaatgttcagagatgctgctgctactgctcttattacccccatgggatgggggtcatttgtcttgagggtcctttctccatttaaatttatggtccttccagtctcttgttgagcttcgaatgtttgtcttcacagagaaatatagtcctgtgtccactgcaaaaaggagtaccatcaccaagcagaaagagacttggtacccaggtggaaagaatgatgagatggttgacactgccaaaccttgagtgatggtgatgttcacagtctctgaagacacatttttactcccaacaagccccctgcagaagtaggagccgctgatctttgagtgtggcttttggaatgtggaagtcagaattatgatgaaaatacttcctgtctttgccattctgtaaatatgtgaccttatgcagagcagtgttcttccagctgtgacacctcaggtgaatagggtcttcctccttgaacacccaccgaggggcctggagcaacagccagccgatatggacttctagctgcaccgggtcactgagggtggagaggtttgtctggcacctgtactctccactgtcgttgactgtggcagcgtcaatgaagtagctcgaggcctggcttgagatgaggctctcattgtgaaaccactgtgtggaattgtcctcaggggagtaggctccctggcacttcagagtcacactgtccttctcaagcacgctgtaccattgaggctccaggaacaccacagcctttgggagatcttcagtccgcatgccagctgaaactagaagtagcagagcagttgggaggagcagctgccacatgatgccacactggagtggacaagtcaccaaagatatccggagccctaaagggaccaagccgactagacaggagggagtaaacagcctttccccagtccctccacccatctct

SEQ ID NO: 433904 - DNA, 451 bp, Homo Sapiens
attgtgcgatgcagcagtcctatatctactggtctgacaggctttgacattttgcccaagacctacttagagctaggactacaactctgataccattcagtgggaccactagcagtcatctcatcttagcttttatctctaagaatatcatctctggctcttaccaagtatttcaggaccctttgtttcaccctttattggtgattttcctcttccccttcatcaactcaccgatatggacttctagctgcaccgggtcactgagggtggagaggtttgtctggcacctgtactctccactgtcgttgactgtggcagcgtcaatgaagtagctcgaggcctggcttgagatgaggctctcattgtgaaaccactgtgtggaattgtcctcaggggagtaggctccctggcacttcagagtcacactgtccttctcaagcacgctgtacca

SEQ ID NO: 433905 - DNA, 583 bp, Homo Sapiens
gaactttcgaagctcacaagagactgctaagaccattaattttaattgacaaaggacggtcggagactaaatgaccccctatcctcatgctgtattaacgcagcagtagcagcttcttcttttatcttttctctttatttgctactccttcattctcaggcctctctacgagctagcatgaaacatagaactcttagcctgtatccttatcctactcgggatttttcctttttctccagtggaagggaaaagcccatgatcttcaagcagggaatccccattgagtagctgcattcctagaaattgaagtttcagatctacacgaacactttttctgtccctaccgttctctcacagtaaagcaaccccccaggctagggatggtaatcctttaaacatacaaaaattgctcgtgttataaattacccagtttagaggggaaaaataaacaattattcctaaataaatggataagtagaattaatggttgaggacaggactatacagagtgtgggaactcctccgtatatagggaattcagtgggaccaatgaaagatggctggaatagcaggtagtcagacg

SEQ ID NO: 433906 - DNA, 863 bp, Homo Sapiens
agcgggggtacggtggctggcgaggctcagtacggtgtgtggagctggagcaccgtgaggaagaagcgaggttctttttaagagttcagctgcgagatatcaaacaaagaattactctgtacaaagccagaacacatatatcaaagtaatcctgaagtatcagaacaaaataataggctgtaacagaggaggaaatgattttgaatagcctctctctgtgttaccataataagctaatcctggccccaatggttcgggtagggactcttccaatgaggctgctggccctggattatggagcggacattgtttactgtgaggagctgatcgacctcaagatgattcagtgcaagagagttgttaatgaggtgctcagcacagtggactttgtcgcccctgatgatcgagttgtcttccgcacctgtgaaagagagcagaacagggtggtcttccagatggggacttcagacgcagagcgagcccttgctgtggccaggcttgtagaaaatgatgtggctggtattgatgtcaacatgggctgtccaaaacaatattccaccaagggaggaatgggagctgccctgctgtcagaccctgacaagattgagaagatcctcagcactcttgttaaagggacacgcagacctgtgacctgcaagattcgcatcctgccatcgctagaaagataccctgagccttgtgaagcggatagacgaggactggcattgctgccatcgcagttcatgggaggaagcgggaggagcagacctcagcatcctgtcaggctgtgaagtcatcaaagccattgctgatacctctccattcctgtcataccaacggaggatctcatgacacaatccaac

SEQ ID NO: 433907 - DNA, 802 bp, Homo Sapiens
gagctggagcacgtgaggaagaagcgaggttctttttaagagttcagctgcgaggctgtaacagaggaggaaatgattttgaagtagcctctctctgtgttaccataataagctaatccgtggccccaatggttcgggtagggactcttccaatgaggctgctggccctggattatggagcggacattgtttactgtgaggagctgatcgacctcaagatgattcagtgcaagagagttgttaatgaggtgctcagcacagtggactttgtcgcccctgatgatcgagttgtcttccgcacctgtgaaagagagcagaacagggtggtcttccagatggggacttcggacgcagagcgagcccttgctgtggccaggcttgtagaacaatgatgtggctggtattgatgtcaacatgggctgtccaaaacaatattccaccaagggaggcactgggagctgtcctgcttgtcagaccctgaccagattgcgcagatcctcagcactcttgttaacgggacacgcagaccctgtgacctgcacagattcgcatcctgccatcgctagacgataccctgagccttgtgaagcggatagagaggactggcattgctgccatcgcagttcttgggaggaagcgggaggagcgactcagcatcctgtcagctgtgaagtcatcaaagccattgctgataccctctccattcctgtcatagccaacggaggatctcatgaccacatccaacagtattcggacatagaggacttcgacaagccacggcagcctcttccgtgatggtggc

SEQ ID NO: 433908 - DNA, 915 bp, Homo Sapiens
gtccagtgcttttggccactttgtcaggaatcttgtgaccgccccgtgggctttggtttccccaaaaaggggctttgccttcagccccgagttccattagcctgcccaggtcttcccgcagcccctgcacttggtgctcttgcgtttctcaccctctaccgtctcgaggcagccgatggcgtggaatctgcaagggactcgacacttgccacaagtcttgacgtggtcctgaaacttctcccgggggatcttcttcttgccgcagccgtcacaagttaaggggaacttggggcagaccttgtgggtgcgccttcacgtctgctccgcagcagggtgcccggcaatgccggcagctcaggcttctctccgggcactcgtgctccaggtggcgctccttttcaccaaggcggaccaggcctttgcacgcgggacattcggtcagcatgagcgggcagcggccttcgtggcagctctcgtattctttcagggtccccttccaggtgcatccatcactgggacagacggccggcaggctctccacctccctgcgggcagcattatctgggaaggccgaactgctttctaaaatagaaatgccttcttcatatatgccctcgtgaacacaggcagcacagttctgaggcccagagctgaggatgctggccaggcagaaggagcagtaccggtggccacactgcgcctggaagggcctgcggaggacgtttctgcaggcggagcacaggtacttggcttccagcttggtccccaggagggtcttggagaagccgggctgtagcaactccagggagccagggggggtcacgctagctgcagccatgagagctgtgacccccgcgaacaaagccccaacggtcgcagcgcgcccggaactaagatcccgggaattccggaccg

SEQ ID NO: 433909 - DNA, 970 bp, Homo Sapiens
gatatggatgaaattatttctgagaagaaggacctactgctgggatcttcaggctcttcaaaaaacttggagtgtctgtcgcacagggccgaggagcgcatgtcacacaggcggatggtccctttgctactgctgtagacgaacacgttgcactggtgcgggtggaactcggctgcagtgatgacttcggtcagctcctccatgttagcaggcttgatgtccacgatgttaaagcttctatctgtgatttctaagtgccataaattaattctcaggtcatctgcagaaagatatgtttcatgatcactatttactgaaatggaattttatatgatatgtgtgagcatttgcaaaaattcgccgtggactcgcttctaccataagatccatgggcttcaatattgggacccgtagcgccgtgatcctaaatgggtctcgaagtcttccatcttcgtctttcaggttataaccttctgctcttttatcccgttcacttattttccataattttatagttttatcatttgtagacagtagaaaatgagcagcattctgttgtggtaaccacctaattttattaattttttcctcaatttctagacttttcaaatagtcaaactccggttcatgactttgaaaggtgctgtaaacattatattctcccctagaatgagggcggcttttattctcttgttcacgctgaaaaataacaactctgccgcccttgtctcctgttgcaagaagatctccagagtaattaaactcaacggtggaaatgatgtccgcttcggccacgtcctcgtcgatggcccccttgacctgcgagaagcaccactggaagtcgttgccgcccgcggggcagccgccgcctccggctcctgccatggcagccggcggcgggacgggcggggaccgcggcagaccagggagacggcctccgcgccgctgcagccgagcgctcagccccggg

SEQ ID NO: 433910 - DNA, 815 bp, Homo Sapiens
  misc_feature (23)..(23): n is a, c, g, or t
  misc_feature (30)..(30): n is a, c, g, or t
  misc_feature (35)..(35): n is a, c, g, or t
  misc_feature (90)..(90): n is a, c, g, or t
  misc_feature (189)..(189): n is a, c, g, or t
tcgcgtctccaaattgaatttgnccccggnaaaangtaaaaagttaatggtggcaagccacggcaaataacattgtccaacggggtgccnaggctgtgtgcaggatcttcttgttgaagtccagactgtccacactgatctcgtctttcctccgcttaccccccgtacacaccttccggggtttgaagntggcgcgcggtttgctgctctctctcgaggcctcccagggtcacatccctccgcgtgtctctatcaaacatcctgaagaagttgttataggacccggtcatgatggcgctatccgaaccgttccagcaacactcaaacttgtcaaagatgcagtcgttctcatagagagagcagagcttgctgcgcaggtactcgtggacctggtgggtctccaccggcctgctctccatgttgaggtcccacaccttcaccgacaggtagtctctggtcatcatgtaccgcccactatgactgaattttacatcggatatggatgaaattatttctgagaagaaggacctactgctgggatcttcaggctcttcaaaaaacttggagtgtctgtcgcacagggccgaggagcgcatgtcacacaggcggatggtccctttgctactgctgtagacgaacacgttgcactggtgcgggtggaactcggctgcagtgatgacttcggtcagctcctccatgttagcaggcttgatgtccacgatgttaaagcttctatctgtgatttctaagtgccataaattaattctcaggtcatccgtagcgccgtgatcctaaatgggtctcgaagtcttcca

SEQ ID NO: 433911 - DNA, 919 bp, Homo Sapiens
cacatcagggcaagttttggtaatggcatggcaaacccaccgatgagtgctgtcccatggatccatgttgctgggaccttgcttcactgtgtttgggggcaggcccccgtagagtccgtccgctgaaggcaacagttcctgcatgcgcctgctccctgattcctccaggcccagggagccagggcccttccacacgcttcttcttgactgggaccactgcaagtttgcaccatgttcctgaatcgaccaactgagggatccacatcctctgggttgatgatctcatcatcctcactgaatgtcacccgtgagttcttcctcttcctctttggtctttgaatgtccagatttccctcctcaatggtaagggtagaaatccgcttgttgtgggcagtgttgaactctgtcaggttatcaagctcagtttcctcctctggaagccccagtaagcccttgagttcatcatcctctccacccatcttctcatctcctttcacagccgatggcaatgtctgaggcttctcgcgcagagtgtatgcccttgtggatgcgccaaatgagaccgtggaatcgatgggaatttgctgaggcttgtgaggttccaaccgaatgtgacccaagaaagtgccgtgtgtactgttgagatctatcaggaaaactctcttcagatgcttgtggtagacaagtgcagcatggacccgagagcaagactggtggtcaatggtaaagtcacacaaatcagggtttctcccaaataagtaatacttcttctcatcaataatcagtttctcaattagtttgtctcctttgactacatccagatgtaaaccgggagggggcttacctgcccaggttgggcagtcgaacagcgggaggctagagccggagttcgcggctgccgccatcttgcgcctccgct

SEQ ID NO: 433912 - DNA, 1259 bp, Homo Sapiens
tgcctatttcaaccccacccccaagtgtcatattacatggtttaggatgccaggagacaattctgatagacgatctcgcaaacatggaaagtttttctccctagttcattagctccccatcacccttccaccccattcccacccaatcccacccttctccatgaccaaaaatatcaaatcagcaaggaaggtgtgggcttcttgcctggccaagcctcttttgcatatttcttcttcttgggttcattttacagctttcagggttatagactgcagggtttggtgcagggattcatgttcactgctgacggcacaaccaggagtcaagttccacatcaggggcaaggtttggggtatggcatgggcaagccaccgatgagtgctgtcccatggatgccatgtggctgggagcctgcttcactgtgtgtggggggcaggcccccgtagagtcctccgctgaaggcaaagttctgcatgcgcctgctccctgattcttccaggccccagggagccagggccctccacacgcttcttcttgactgggaccactgcagtttgcaccatgttcctgaatcgaccaactgagggatccacatcctctgggttgatgatctcatcatcctcactgaatgtcacccgtgagttcttcctcttcctctttggtctttgaatgtccagatttccctcctcaatggtaagggtagaaatccgcttgttgtgggcagtgttgaactctgtcaggttatcaagctcagtttcctcctctggaagccccagtaagcccttgagttcatcatcctctccacccatcttctcatctccttttcacagccgatggcaatgtctgaggcttctcgcgcagagtgtatgcccttgtggatgcgccaaatgagaccgtggaatcgatgggaatttgctgaggcttgtgaggttccaaccgaatgtgacccaagaaagtgccgtgtgtactgttgagatctatcaggaaaactctcttcagatgcttgtggtagacaagtgcagcatggacccgagagcaagactggtggtcaatggtaaagtcacacaaatcagggtttctcccaaataagtaatacttcttctcatcaataatcagtttctcaattagtttgtctcctttgactacatccagatgtaaaccgggagggggcttacctgcccctcgtattctctgtggcagacagacaagtgccgcacgagggatcctcgtgccgaattcgccacccaggcctcgctac

SEQ ID NO: 433913 - DNA, 602 bp, Homo Sapiens
  misc_feature (457)..(457): n is a, c, g, or t
  misc_feature (464)..(464): n is a, c, g, or t
ttttttgctagaacactgcagctttattgatagaacaaccgcgtccgcaactagaggttacatttgggggcttggaggtgaaagagaggcaaatggggaacagaggctggggtggagacagacagcaaggcaaaggggtgaggatggggctgtgtgactaaaaaaacaaccccaatcatttcacccattaataagggggtctcctgttgtgcttttaccttggtggcggggtgggctggggtggtcagacatgtgggcctgggcatgaggagttttggcttttctcccaagtctttgaggtctcagggctggtgcagccccttccctccctgacccttctcctgggctggggataaaggccttgggtgagctggctactctagggcaggaagaatgcatgggagacctagagggccaccagagttgggctgagatggtgattatgtgggtggctggnaggatgncgggagggggccaggaaggagggcattcctatcctaggagggtccctgggaaatgagtgcaggcaacaagagggcaaggggtggggtgggcagatgccatccctctggacctcgcctgtacaatgggggcaccagctt

SEQ ID NO: 433914 - DNA, 1314 bp, Homo Sapiens
tttttcggcacgaggggaaacgagtgtctttgtgtatcacctggtgacttgtcagtgtctgtgtctgtgtgtgcctgtgagccagcatctctgtatcagtgttgctcatgctgtgtctttgtgcgccatggtgtgtcagtgtctgtgtgttgatgggtggcccatgagtgacccccgccaggggagaccaggctggctggatccagcacatctccccagtggcagcctcgccctctgggtcagggtgactgaggcattttgtggccttaaaacggggtgttcagggtcagccctcagggtgctggggcccttccatcccttgtccccttcaggttggtgaaaaggactccgggggccaggtgctgtatagcagcttatggaagtctcagctgggctatcctgcccttgggagcacagacaggctcctagggtgctgagtgaagcctgaagaccaagccccctcctcctggaatgctccttccacccctacctctcagagatgggcctgacacctctttctcattcattctccttttccctgtgctctgggaaagcccctggctcaggctgtcagagtgaggatggacctcaaaagtttgatcccctcgtgcagatgaagaagctgaagcccagagtgcggaaggggagtggcccaaggtcacacagctagtttgagtagagccagtcttgggagagccaagtactacagccctgggggtgtcacaccgcttgtcactgcccctgaggtctcctgccaaacaactgcagggagtttggctaacagtcctgtgtccagggtgccggtggggatgttatagatgttgctgggatcctgccctcggctccaaattctggcctctcatcccaggctgcagacccttctgccccatgacaggcctgggtgccacacagaggtggccaccctcccaccacagtgtctgcagctgctgcccttctcccaggcccccagacagaagagaccctgtttcccctcctctcccctgtgacttcacaagagcttgggctaggagtgaaggtcagcatgttctcatgtgctcatcctcttggtttccccaaagaccgggagggtcacggatggggcgtgcagaatccttgtgttttttctcgctgggcagcttgaggggctggggagtattcccagggtctttgctctggagagtccctgcagagccactggctgaggttgggttcagggttcagcggagtcctccatgcttccaaaggccgggaagcacccgcctctctatcgagtcagtgctgtgcgtgtgtgtctgagaatgtgtgtgatgtgtg

SEQ ID NO: 433915 - DNA, 453 bp, Homo Sapiens
  misc_feature (28)..(28): n is a, c, g, or t
  misc_feature (63)..(63): n is a, c, g, or t
  misc_feature (156)..(156): n is a, c, g, or t
tctttcaggctttcactcagcaaccctnaggaacccttgtcttgtgcttcccaaagggcaggnatagcccaagcttgaagacttccataaagctgctatacagcaccctggccccccggagtccttttcaccaacctgaaggggagaagggatggnaagggccccagccaccctgagggctgaccctgaacaccccgttttaaggccacaaaatgcctcagtcaccctgacccagagggcgaggctgccactggggagatgtgctggatccagccagcctggatcctcctggcgggggtcactcatgggccacccatcaacacacagacactgacacaccatggcgcacaaagacacagcatgagcaacactgatacagagatgctggctcacaggcacacacagacacagacactgacaagtcaccaggtgatacacaaagacactcattcc

SEQ ID NO: 433916 - DNA, 848 bp, Homo Sapiens
  misc_feature (20)..(20): n is a, c, g, or t
  misc_feature (26)..(26): n is a, c, g, or t
  misc_feature (48)..(48): n is a, c, g, or t
  misc_feature (80)..(80): n is a, c, g, or t
  misc_feature (92)..(92): n is a, c, g, or t
  misc_feature (223)..(223): n is a, c, g, or t
cttcaattgactgggtgggnaaactnggaagaaaaagtccaagacagnaaccttttgaggccctgcttcctccacatttnccaaaagtcccnacatccgtgccctggcactcccagcccctaagccacgatgtgggaggtgctcccatttgagaagctgggaagatgtagtcccctggtctcccttgatgcccaaagcagaagatagagagaacagtctgganagttgctacggcaaccagagtccctggtgagctgggctctccacaaaccctttcaggcgtgctctgacttgaaaagaaaatgttttctcagggatggtgatgagggtgattacatacacatatacagagatacatgcatacaggtctcaacttttaccctcggctgggagcttcccttctgcctctggaatgggcttttctcttctttccccagatagccagcagcaatgggagagatttggaaaactagcactttctgacctcagagcaggtttttgcatcataaacatctctatcttctactgtgtttcaggtttggagaagccaagcccccagtcaaggtgacctccagccatggaaggatccccctgaacatatctaaagagaactctcctttctgaagggtaagaagaaaggctgaggggctcagtccaagaggccaaggagggatttagggagccaatggtccataatggcctattctcaggctttggatccaaagcaggaactctgggggaaggccttgcctatgggggtatggggataactaaaaatcaaatccatgactaagattcacacatttgcatagcaatgtccccagcttcccagacattccccatgaggt

SEQ ID NO: 433917 - DNA, 2652 bp, Homo Sapiens
  misc_feature (47)..(47): n is a, c, g, or t
gtgaccaaagttcagaccttgattttgcccggagcacggttctactnttcaaccctctttatatcccgccgtagtccacgtatcgaatctccacttcgttggtctctccgtaggaggcaaccacttgggctcgccacccaggccccgtccgcacccaggggcggcacagatgaccgttattttccactggggtgggcaaggtggggattccaggctgagagtaacagaggtacatctgctggtcgaggctgcgcagcgcgtggaaggtagggtgtgtgtgctgctgcacgaacaggtgcccggcattgacctggttgaccacaatgacctccacggtgatgccatcaggcagcatgagccaggatgtcatcggcagagaaggcagtgccagtgaaggcaatgggggagcgtagatattggtgaggttcagctctttgaacttcttcccaatcaagttcagcgctttgtctacatgatgttgagagccttctatgtggcagatctggacgctctgggtgtaaggcagggttgaaatgtagatcttggcaccagatgtttgcttcagaaaactcacatagcgcccctgcttgccaattagccgaccgactaagtgctttggcacctcgatctcccagatgatgaggtcgaccttcttagggttggagcctgcctgggcattttggaagctctcagtcttcttgagactgcaacagctatccacggaatccatgctgttcctgtcagaacctcctgaatgatctgcttccgcatccatggtccatccatcctcagcccccaagtctgacaactcccccttcagcaccccattgctgaagggcacagtactttctggcagtggcggggtgatggccttgtccctggggctcgagctggtctctgtgcaagagtcttcaagccctgaagtgctgaaagaatctgagcagtgtcctggagaagccaccaaagggacactttggctgctgtctgacatgcaggtgacacaggtggcatcttccaccaggatgcctgcccggtccggcaactcttcactgggggtggtcagtgccaggcaggaggccagggagatgtggtgtgcagagatatttggcttactgtccttggtggggctggacagaaggctcttcaggcagctcacgtaggtctttggtggtggtgagccctctgctggtaggcctggcaaggggaggccagcatccggcggggcaacagctgcctctgctgtggcagctccgcagtgtctgggcccaagacagttttctggtgaactgggacacagctctcttccttctgcccttggagctgactggcctgacacacacgacctgcaaccttgccaaccgtggtggccagcacctgttcggttgcttctgagatcacttgggagattatctggaaggcagcccgcttaatctcctcatttctatccaagccctcctcatttctatccaagctctcctcatttctatccaagccctcctcatttctatccaagccctcctcatttctatccaagctctcctcattgcccagttctccctcgacacctctatcctgggctttggcgtctgcgactgggggtgctggcgccgcatcgtcctttgccagctctgtgtgagccgactcgatgaacctacttggcaacttctctgctacatactcttcctcctgcactggccccaccacctgggatgagctgctcttccccttatcttcttccccctctaaagaggccaggctggggcccttgctgttctccaattccaagacatgctcccgagacaacagagcttcttcaagcaccttttcccccaacacggcatcaccagtcccttcggccccacctgtctctcttgccctctccccagagctacgcttctctgcggggactacggggtagcctggctggaccttccttggcaccctgctgaagggggaatcttgcttacacacctcagctgatttgctggagaatagtacaccctttggggatgaaagggggcactctagaggaatcgatttggcttcaccacctgtcagggctagctccagctttgtactgtcgtctctgcgtgttcctggtcgcaatctcatgtctgtggtgttaggaagaatgcccgaggactctgatcttcggcaaggtgggtgtgtctggagcaatgctgggggctctgcaggcagcttgctcacggtggacagttccttttctggaggctctgtgacactggggggtgtggacactactttgggacagacgtcttccacggggagaggttccttgatggcagggtcagccctcagctgcacagcaccagcctccacctgctgctcatcatggctgctgacatggccttttttacgagagaaaaaccaccaccagccgaggagcgccagcatcccaggcaatgccaaggggaagagcgaacggaactggattgccatcctggaggcttgagtaattacaccttgctgggtagtgctcggttctgccaccaagggtgggggcgatggtaggcctgggctgtgcaccctcagcagcatggctgggccaggaatcagagtgctggagccatggctcaggtgttggtcccagcccagcctcagtgctcacaggactgttaccttcatcctcag

SEQ ID NO: 433918 - DNA, 905 bp, Homo Sapiens
taaacagctgagaaccaggataagccagctggcttgttaaacactatcctttggctttgcgaagagaacccatagttccatccttttttctcagagacgaaatgtcttctcaataggactacagtatggataaagaaaggactttctggagaggacaatgtttgttattccgatgttcatctttgacttgagtgccaagcccaatttcaacagtgcaaaaaaagactctcaggaagcagcatgggggtcaaaggcttgtgtagtagctgtctacccactgggcaaggcctcgctccaccagggaccggtttatcaacaccacttcatctccaaccacactccacagctgaatcagaggaagaccagttggactgtaacttgtcacctgagcaagcagtgctgtattccccgtcatctcgctcatggcggcatctgcttccggtgaaaactggtcatcgtctgacaggggcatcacactgtccagaaggacttctgctccctgaaacggcagggtgacaaagtcagacctgatttgccggagcacgtctactttcaccctcttatatccgccgtagtccacgtatcgaatctccacttcgttggtctcctcgtaggaggcaaccacttgggctcgccaccaggccccgtccgcaccaggggcggcacagatgaccgttatttccactggggtgggcaaggtggggattccaggctgagagtaacagaggtacatctgctggtcgaggctgcgcagcgcgtggaaggtagggtgtgtgtgctgctgcacgaacaggtgcccggcattgacctggttgaccacaatgacctccacggtgcctcgtgccgaattcgccacccaggcctcgctaccttaatacagccgaggggggctttagcctagggcc

SEQ ID NO: 433919 - DNA, 859 bp, Homo Sapiens
aacgtcacatcttgccaacgtttttcctctcccagagtcgctctttcggactacgggtagcttgactggacctcctggccaccatgctgaagggggaatcttgcttacacaacctcagctgatttgtctggagaatagtacaccctttggggatgaaagggggcactctagaggaatcgatttggcttcaccaaccctgtcagggctagctccagctttgtactgtcatctctgcagtgttcctggtcgcaatctccatgtctgtggtgttaggaagaatgcccgaggactctgatctttcggcaagttgggtgtgtctggagcaatgctgggggctcatgcaaggcagcttgctcacggtggacagttccttttcatggaggctctgtgacacatggggggtgatggacactactttgggacagacgtcttccacggggagaggttccattgatggcagggtcagccctcagctgcacagcaccagccatccacactgctgcatcatcatggctgactgacatggccttttttacgagagaaaaaccaccaccagccgaggagcgccaagcatcccaggcaatgcacaaggggaagagcgaacggaactggattgccatcctggaggcttgaagtaattacaccagctcctcggctaccatcggggtgcgggatgcggagtccgcgcagccagccgcacaggcccccaggcatgtgccaccagcaggcccaggcccgcaagcagccagcgcattcacgcagctcccccacgtgctagcccaggcgggtggaacacaagcctcgtgccagaatttaacaacccaggcctcaaccatagccgatatttgtggcttgtgct

SEQ ID NO: 433920 - DNA, 492 bp, Homo Sapiens
cctcctgctgctcaacatccatcccgccgcctggtccccctcgacggcagtccctcccggaggagggcttgccctcgggcggcgccgggttcttgtgccgggaggacagggaaggttcgtgctctgcacccggcgcccccctgcggctcccggccccagacagcgtcccttgagggccgggctcgttctccagagcctcccgttccggccggtggacgacgccgcagcttgacgtcttcggggacgtcctggggtggcggttcgcgcccccaacgttctcggtctcttcctccccggacacccggaggcctgcgggcggctcagaggacgttcggcccggcccgccgccaaagactagggcctgatgttccgctacagccagaaggtccgtctcgggcccgggccgcccccgagacgactccatactgcaggtgggggccgcaacggaggaattggttcgccccggctccggaggcagtggctgcgcctttt

SEQ ID NO: 433921 - DNA, 2313 bp, Homo Sapiens
tgcatcctgagtgtcaggctccttgtccttcagggccacttcatgcacagtttcctgggcctggagcttggccagctcatcgctcaaggagtcataggactcttccaggtgccgcttctttagctccacgctctgcatgtattccgtaagcgagcggatcttggcctcatgctgagagatgaggagctggcaggatgagagctcccgcccggtcacttccatcttgcggtgacactccacctggaggttctccagctgccggcaccgcttgaccacagacttgacttctgatttgattttgctgatgtagagtcgggccacagtgaactcctcctcgatggccccactgatctccactggcagcttaatctccccgttgcccacaatgacactgaactcgctcagatccttcatcagcccgttcagcacctcagcaattcgttttcgctggtgtccactgacctcctgtagccgctgcaactcagactccagggacagcatggtggccaccttctgagacagctcatccaccagaagctggttctgctggctcttctcctccacctcctgggacttctggtcatagttcacagccagctcctccagggcctgcagcacttccttcacctcatccttagcggcatcgttctctgattgcaggtggctcagctcccgctggaccttctcgttgtctcctcgggtggacaccagcagctcttcctggtccagcatttgctgcttgagcttctctatgagttggctttgttggttgatttcatcatccttgtcgtcaagctgcttatagagacggcggatctcctcctcgtatttctgccgctcctcgggcgcgatgcgcaccacgatggatgagttgtcattcacaggggtctcctcacagagctcggctcccagggctgcctcctccccagccaggcgctctgtctcaggcacattctctccattgcgccaccggctcagctcagcctccagcttcgcaatcgtctccttctgggcctttgtcttctccttctccttctcatatttcttcttccactgctcagcagtcaactccaaatttactgaggcagtgttcttaatggtctttgcccgctgcccaaacatcagggtggacttggtctctgcatcattataactggatggtgagcaacagatgaacatagtcgtccggcagtttcccccgagagagtcctggagaatccttgtcattttgctgtcacgatatggaacatagcttttagtgccctcagccagtgcggagatcacattgcccagagctgacagtgacttgttgatattctttgcctcgtccagcacggctccctctgctccagtcttgctgaccttctcactccctgccaggtccaccagatacagcttcccactgagcttctgctccgtttccatgttctcctgcttgatgttgatgaggaagatgctgtggctccgagagctgtgttcattcatgttggtgacagccacatgacgatttgatttcccttcatcaatcacatccagaatctcctccgggctggacacaaagcgttcagtacaacccttgacaaatggcacccggttcttgtcctcgtgcacggacagatttgtcttggtcacatccagaaggtcacgaattttgtccaggtaaatttcaaagtaagaaaccttgatgtggaactcaaggttctcatccatggagtagatgtggttgaagatgtctcgggcaattcgaggaatgattcccatcagctgagggtcgtgcagctttccctccatggtatgtgttttccctgaggatgtctgtccataagcaaaaatggtgccattgtagccagcaaggacatctttgacaatctgcatggcacatgcatgataaacttgctcttgagtcgtgtttggggggaatacacggtcaaaaacatatggcttccccccaattacgacgctgtcgtccccttggaaaatggggatgaacttgtctccccgcagaatctcagcctggttcaggggccggaatcggcagagcaccttgatgctacattcgttgttggtctccgccatggtggtagccggcgtggggctgggactcttcttgggctgcaggggtggtgtgtgctccagaggagagggctctcagcagaggccgaggcggaggacaggtgctcagtctctggggacagagttgagggcgcccgggcgaagcctggggagcagggccggggcgcgctgtctctcttctgcggcagcgggatgcgggcgacctgggcgtctggtccttcgggctctctgcctctccgc

SEQ ID NO: 433922 - DNA, 2559 bp, Homo Sapiens
  misc_feature (301)..(311): n is a, c, g, or t
  misc_feature (550)..(596): n is a, c, g, or t
  misc_feature (2473)..(2509): n is a, c, g, or t
gcaccccgggggggtaaataaaaaatagtggttggctcgacagaaggacacatatattctccagcggtgagagagctcaccacaagaaattcttttaacaaaaacgccgtcccacaggagtcatatatatgtgcaaggaggcgatgggtggggtgtgagacccaccgcacatataaaacacgcacgtgttggaggagatgggtttataatatggtgatgccccctaggaggcctgttaaaaatattctccctcttaggagggagaggttgttgggcccaccccataatgtgtgtcacccannnnnnnnnnngcgtgtgttaggggggtcctctttctacacacaagagagttccccgcggtgcgcgcggttttttcccgtggcgcggtgcgcgtgtgtgttaacgcccggcgcgccgcgggcggctaggggtgtatatagagaagggccctctccttataagggggcccctggttgcgcaagaaacgcgggggtgcgcgcggaagctggggccccctcgcgggggaagatctttggggcgcgcccccccnnnnnnnnnnnnnnnnnnnnnnnnnnnnnnnnnnnnnnnnnnnnnnngcctggccagtgtctgacctttattaagaggtgaggtggggagagggcccgccagggtgcccactccctcttggtgacccccccatctggagttaaggctccaagcagcaagtgacagaggagggtgcctggctccagcagcctgggcttggcggcgactcccccaaaaacaccccagctgggtgggtgcctgggggcctaggtgaggctggtgttggagctgctggtagcactgcctcgcttttgcaggcagcgcacagcactggggacctgcaggcctgtcgtcacctggaagctgccacaccataccgtgaaagcaggcagcagcggctgtgtgaacctggtcttgaaagtgtgcagcacttgtttggtgcgggcattgtagaaggacaggaggccttggtggaagtcacagtgcacacccaggcagtcgggcacgggggcgtccagcaccttgaccttgttggcgtgcttggccgtgaagctgacctgcagccaattgttgacgtgcaggcaccaggaggcggccgtcttgcccagttgctcgaagcggcccaggctgcggtaggccacgcccacgccgaacgccttgctgttcggctcgtagcgcacctcccagtaatgctccccgccgtcgatcagcgtgtcccccagaactgtgtaggactcagcggtgaagcggtcccgtcccccacgacctgagggcatcctcttgggagatggagtacctctggctggggagttgatgggagacgccgtccgccccttgccatctttctcgcgagccttgatatcctgcaccttcccgcccatagcgtcccactccacggagagatcatccacccgcaggttctggtgggatgtggacgcatccaggcggaacatgaacgctggtgtctccagagtcaccggctcagagaactctcctgcaactgccttgttacaggccttcacacggaagttcatgtatttcatgtcaaacttgagacctgtcagggtgtactctgtctgccggatgccctcgatgaccatccagggctggtcctccttgaggcggggcgggccctcgaagttggtccgccggtactccagcacgtagtggtcaatcttgctgtcctcatccggcatgcgccacaccagggtcacacagttatctgccaccagggactcagccaggtcgatcacgggtgcgctgggcacaggcaggaacttgagtgcctgtagcatctgccgctcttgcgcgaagtccaccatgaggtgactcatgttgtcactgaccttcgctttcaatgatagccggaaggcaggggccatggtcactccatctttgatttgcttggcagcctgaggaaagtcctcgctgtccatggcctgcagagtctggttggctgtctccagaagctcctcggagctctccagggcccgcgtgcaggcagccagctggttctgcagctcgtaggtacggctggcacggtcctgttttatcttcataagcatgccttctttcagctcctccaggagggagaagagggactggaactctgcttcgaggtcctcctgcaccttcgccgagttcgcctccacgttcagcagcatctgtttcagggagtagataaagctctgaatttcttcattcttcacagccagtgttttgatgatcttcctcagggcctccctctgttcttccatggctgcagcccaggtcaccccggcccggcccgcgggccccgcgcacgctgggtccccaagctgcctttgccgcggccggtagccaatggcccgccgagccctcgccgccgccgcgcccccggttagcgctccatcaccgcgcacgttccgctctcgacgaattcgagctcggccgatttggcctgatnnnnnnnnnnnnnnnnnnnnnnnnnnnnnnnnnnnnncgccgccaccgcgtaagcctccaggtcgcccatagtgagtctatactccc

SEQ ID NO: 433923 - DNA, 665 bp, Homo Sapiens
  misc_feature (35)..(35): n is a, c, g, or t
ggtcccgtccccccacgactggagggcatcctctngggagagggagtacttctggctggggagttgatgggagacgccttccgccccttgccatctttctcgcgagccttgatatcctgcaccttcccgcccatagcgtcccactccacggagagatcatccacccgcaggttctggtgggatgtggacgcatccaggcggaacatgaacgctggtgtctccagagtcaccggctcagagaactctcctgcaactgccttgttacaggccttcacacggaagttcatgtatttcatgtcaaacttgagacctgtcagggtgtactctgtctgccggatgccctcgatgaccatccagggctggtcctccttgaggcggggcgggccctcgaagttggtccgccggtactccagcacgtagtggtcaatcttgctgtcctcagtccggcatgcgccacaccagggtcacacagttatctgccaccagggactcagccaggtcgatcacgggtgcgctgggcactgaccaagacggaaaggagagggggtcgggattctgtgcctggttcagggggcagggggcttgctgcagggctgcccaaccacatgttggacaattttgggggcatggccacaaaggggttccatgtttggcagggtggagac

SEQ ID NO: 433924 - DNA, 402 bp, Homo Sapiens
agctgggtgggtgcctgagggcctaggtgaggctggtgttggagctgctggtagcactgcctcgcttttgcaggcagcgcacagcactggggacctgcaggcctgtcgtcacctggaagctgccacacccataccgtgaaagcaggcagcagcggctgtgtgaacctggtcttgaaagtgtgcagcacttgtttggtgcgggcattgtagaaggacaggaggcccaggcagtcgggcacgggggcgtccagcaccttgaccttgttggcgtgcttggccgtgaagctgacctgcagccaattgttgacgtgcaggcaccaggaggcggccgtcttgcccagttgctcgaagcggcccaggctgcggtaggccacgcccacgccgaacgccttgctgtccggc

SEQ ID NO: 433925 - DNA, 1126 bp, Homo Sapiens
ttctctcgtattctgtagaatcgcaccagatggcatcagttctgcattctaccgcgtgtgccctataattggaaggttcagaccataggaatcgtacgtttattagacatgtttagatttttgcaggtgtgaagtgtgatgtcatttctcattcgagcttgcaatggttatcttgccaagtagaactgcagatccattgcacttacaagtttggaaattagtgcaacaaccaagattgtcctgataagatctgaagccattttgaacaccctgacttttcaatagtctcttgtctaggaagaatgatgggcaggttaaattcatggataccagtggtgctgcatttgcagaaagcttccatctcccgttgttccagccttctttttgcaggcccaaactgtcattgcagctgtggtcccctgagcaccagtcaagggcagcagctcggctctggaagctgggaggccgcgaggacggagaatcgaggcggagacccagcccagcgcccgcgcagctcggtgccctcccgccagtgcccgcactcgggtcacaccgcttgctctcgggagaagccccaaggctcgtggtgcaccgagaggcgcccgggctggagcgccccggccgtgttggccacggagttcttcagctgcttgatgaccacgaagagcaggaggaaaagtaagaagagcaggaagaagaagagcgccaggtagagcagcaagttgagttcccactccatgctggaggcgccggcgctcgctggccctgcgcgctcggcgcgggctgcagctggagggcgagcgcgccgcccgcacacccacctcccgcactcccgcccctcgcgagggcgtcccgctatgggcgccgactccggggtccgtgctttgcctcccccggctccgaggaaacgcgccaaggagctgaggaaatccggcgcagactctcccagctggcaccaaagccttccgcttcgccgagatcctctcaggtgctcttgaggacgcgagcgacttccctaggagcgaacttccgcgggcacggacgccagaagaggtaacagctcagtctcccaggggaggtcgggactggtgttttgtaaatgatttaaaagttccacccccaacat

SEQ ID NO: 433926 - DNA, 1611 bp, Homo Sapiens
  misc_feature (26)..(26): n is a, c, g, or t
  misc_feature (48)..(48): n is a, c, g, or t
  misc_feature (51)..(51): n is a, c, g, or t
  misc_feature (57)..(57): n is a, c, g, or t
  misc_feature (89)..(89): n is a, c, g, or t
  misc_feature (100)..(100): n is a, c, g, or t
  misc_feature (145)..(145): n is a, c, g, or t
aaaactaccattgtcaactctcaccnaagctaaatttgctcccaggcnacnagtgcnacacactcactattcttctgcagcccaggccnactgctctgtncttgcgaccggcagcctgctcagcgtcttcagccccagtgtgagncgtgcagggcagggagtgatacacgttgggggagccaaccatgggctgagagaacggctgggtgtcctccaacacaatgtctgtgggcagagtagtaacaggttctgaggctgtcacctggagatcaggggccagctggctctcagcgtattccaggcccaccggctgctactcagcgttgccagggcctggacagtgggctgcatgggtccaccctgagtggccttcagagaaagaagacgacctagcacgcgaggccttatcgcctacagccctccttgcttaccttcctgttcctctgcctggcagtcccaggcccctatagctgcccgcccaccagctgcccacttaatatacctcttcgctgcttgttctgctccgtcttcccagaacccttttttttactctgttgaacttgttttctgcaatcaggctcccaggtcagtttgaattggccagctgatcctgaaacctggcccctctcaacaagttttggccaccacaccacacccctttacaacctccagccctatagtctaaggatatggggccctgggagacaccgagggaccaaggaaagaggccccctgtagaaagcaagcagaaattccttgtagacccactgaccagagttgctcgctgtccttgaccccaccgagaggggtgcaaccctgactcagcatcacctcctatctgtcatagcggggagagctttccccaaaggccagcaggggaaaacccaaccttacttggaggagccagggaagtatctcgcagatcccgcaaaaaggcacccacgtctacagctcggcgggctggaggtctgcgggccaagccaggcctctgcactgactgtggctgaagaggtgtggcaaaggtcaggttgagggatctggtgagggaagaggcatcagcattcccttgaggctcttgggagagagacagcccctggtccactccctgctgaaacactgacagtctcagcctctgtttcctcctgccaggggccagcagacctggagccagggttgtggggggctcgagctcaggaagttgcagctccaggctgccgcaactgctctcttgtctggagggttggaccgctgcggtgctggcactggcttcactaccgactcaggcatcaggatggaagattctggggcagttagtaggatgttcttcagcagcgtccgaggtgtctgttcctccaagtgcccactggcctgaatatgggccgatctgccaacagacctggctccatgggaacgccctctggctatcgtccttgtttggccactcaacttcctgggggaagccgtttcaagcagggctctaccgggctccagcccgagcactccggggtcgccgcggggtgcgcgggtccgctgtatccagcacgcgtcgcagcagcgtgcgcggcgtggagtcgctgtcagggttgtggtcagccatcgtctcggccccgg

SEQ ID NO: 433927 - DNA, 1671 bp, Homo Sapiens
  misc_feature (64)..(78): n is a, c, g, or t
  misc_feature (131)..(131): n is a, c, g, or t
  misc_feature (1539)..(1539): n is a, c, g, or t
  misc_feature (1542)..(1542): n is a, c, g, or t
  misc_feature (1570)..(1570): n is a, c, g, or t
  misc_feature (1577)..(1577): n is a, c, g, or t
  misc_feature (1600)..(1600): n is a, c, g, or t
  misc_feature (1602)..(1602): n is a, c, g, or t
  misc_feature (1625)..(1625): n is a, c, g, or t
  misc_feature (1641)..(1641): n is a, c, g, or t
  misc_feature (1648)..(1648): n is a, c, g, or t
  misc_feature (1651)..(1651): n is a, c, g, or t
  misc_feature (1664)..(1664): n is a, c, g, or t
tgtgaccggccgcgggccgcgaacttacggcagggtgtaacataccaatagacgccgctttatnnnnnnnnnnnnnnnttttccccagatttccggggcacgggaaaactgccctcttatatggcaatttnttctccgctcctggtttttctggcccaattgtaaatgcgcgcacgggggccgggggggcggatctaaattttggaataatctcggaagggcttcgcgctcttgggggaaccccgcgcgggtgggagtggggagttccccaggtaagagggcgccctcccaggaaaactcccccttgtcgggggaatttttgtttcacagggaacccgctttccggggttgtgcccgcccccggggggtgtttttgtttatttttgggggagagaaaatgccccaaggccccttagggtccatgggcccccgggggttctcccttgggggaaaacacgcttatgggcccaggtgtgcaccttaacctatctggggcccccgggccgccaaaacggaatggttttagaaaagcttcttcgaggggccgaggcggcccgacagggatgtagtaggggggtggtgtttgggttttccgtttatgacactttattgatgctgggggggtggggaggagacctggagaaatatgtgggggcaagagtccccaggtggggacagggaaagtgttgaagcctggccactactgggcagggaagacagagttgccactgtatgcacaggggatgagcagctgccggtactccaggggcaggtgccgctccactagcacgtgcagtgagacttggtcagtgaccaggccctgccgccgcatcagcagctccaggtcctctggcttcacagtcttgcggccagcatgagcagcaaatacctccagatcatcacaaagatgctggaaatatttatctaggcacttctccaccatctcaagagccttcctctccatgggcatcttggcatagaagctaaagagtttcacatagtggctcagtccagccttgtggggatcttgccggggcctggggccggtggtccggggcctagggggatgcctgaccaacagaggctctgcaggctctgaagataagactgcagcaccaggcgctggggctggctcaagaaactgatgatgtcgcctggcctggagagactcaggggtgctggaggccgactctggacttgctgccctgccagaggcatcctcatcccctgaagatgctcctggcccgtcagcctcagcagtcccctgggatccctctgcttctgtcacctctgtgtgtccctcagcctcttctaccctgctgggtccttgtgctcctgttgcctccatttcactcacactcacaccttcttcttccatctttttctctgcctcttcaactccatcgtgtaagggctctacttcatcttctccagagacaccactgctggtgctcaggaagcccagagcaaaggcattgacctcctctgcctctcctgccagaaactggggctggtttccaagggcctgagtgaaggggnganatacaggccggagacgagcaggcaaggntgcatantcagagaagggtaagatggacananaccagtctgccactgaggaaganaagcagaggagcacangacatgnttngagttctggccanatggact

SEQ ID NO: 433928 - DNA, 1009 bp, Homo Sapiens
  misc_feature (895)..(896): n is a, c, g, or t
  misc_feature (907)..(907): n is a, c, g, or t
  misc_feature (911)..(911): n is a, c, g, or t
  misc_feature (916)..(916): n is a, c, g, or t
  misc_feature (932)..(932): n is a, c, g, or t
  misc_feature (938)..(938): n is a, c, g, or t
  misc_feature (942)..(943): n is a, c, g, or t
  misc_feature (954)..(954): n is a, c, g, or t
  misc_feature (956)..(956): n is a, c, g, or t
  misc_feature (959)..(959): n is a, c, g, or t
  misc_feature (968)..(969): n is a, c, g, or t
  misc_feature (974)..(974): n is a, c, g, or t
  misc_feature (995)..(995): n is a, c, g, or t
gggtccggaattcccgggatggaaggcggagcctgcagctggctgggcggttaggagggcccggggccgagacgatggctgaccacaaccctgacagcgactccacgccgcgcacgctgctgcgacgcgtgctggatacagcggacccgcgcaccccgcggcgaccccggagtgctcgggctggagcccggagagccctgcttgaaacggcttcccccaggaagttgagtggccaaacaaggacgatagccagagggcgttcccatggagccagggtaagtacccagcccactgaccccaaagggccctggctgcctcggggaggggggttgaggtctagctctgctctggagcccaccttgaggaaatctcaaggcagacggacagactggttgcttggtgctttgccgatagtctgttggcagatcggcccatattcaggccagtgggcacttggaggaacagacacctcggacgctgctgaagaacatcctactaactgccccagaatcttccatcctgatgcctgagtcggtagtgaagccagtgccagcaccgcaggcggtccaaccctccagacaagagagcagttgcggcagcctggagctgcaacttcctgagctcgagccccccacaaccctggctccaggtctgctggcccctggcaggaggaaacagaggctgagactgtcagtgtttcagcagggagtggaccaggggctgtctctctcccaagagcctcaagggaatgctgatgcctcttccctcaccagatccctcaacctgacctttgccacacctcttcagccacagtcagtgcagaggcctggcttggcccgcagacctccagcccgcccgagctgtagacgtgggtgcctttttgcgggctctgcgnnatccttccctngctnctccnagtaaggttgggtttnccctgntggnntttggggaagntntcncgctatacnnatagnaggtgatgtgaatcaggttgnacctctcgtagggt

SEQ ID NO: 433929 - DNA, 1260 bp, Homo Sapiens
ctgcctctcctgccagaaactgggctggtttcccagggcctgagtgaaggggagagaatacaggccggagacgcagcaggccaaggctgcatagctcagagaagggtaaagatggaccagcagacccagtcctgcccactgaggaaagacaaagccagaggcagcaccaggacatggatctgaagtctcgtggcccaacatggactctgctcttggatgaaggaggcagccacagccagggtgctctaggggcacagaggggcttgaggaaggaaaactaccattgtcaactctcacccaagctaaatttggctccaggccaccagtgccacacattccctattcttctgcagcccaggcccactgctctgtgtcttgcgaccggcagcctgctcagcgtcttcagccccagtgtgaggcgtgcagggcagggagtgatacacgttgggggagccaaccatgggctgagagaacggctgggtgtcctccaacacaatgtttggaggagccagggaagtatctcgcagatcccgcaaaaaggcacccacgtctacagctcggcgggctggaggtctgcgggccaagccaggcctctgcactgactgtggctgaagaggtgtggcaaaggtcaggttgagggatctggtgagggaagaggcatcagcattcccttgaggctcttgggagagagacagcccctggtccactccctgctgaaacactgacagtctcagcctctgtttcctcctgccaggggccagcagacctggagccagggttgtggggggctcgagctcaggaagttgcagctccaggctgccgcaactgctctcttgtctggagggttggaccgcctgcggtgctggcactggcttcactaccgactcaggcatcaggatggaagattctggggcagttagtaggatgttcttcagcagcgtccgaggtgtctgttcctccaagtgcccactggcctgaatatgggccgatctgccaacagacctggctccatgggaacgccctctggctatcgtccttgtttggccactcaacttcctgggggaagccgtttcaagcagggctctccgggctccagcccgagcactccggggtcgccgcggggtgcgcgggtccgctgtatccagcacgcgtcgcagcagcgtgcgcggcgtggagtcgctgtcagggttgtggtcagccatcgtctcggccccgggccctcctaaccgcccagccagctgcaggctccgccttcccgcc

SEQ ID NO: 433930 - DNA, 1374 bp, Homo Sapiens
  misc_feature (895)..(895): n is a, c, g, or t
atgaccctatcacaaaaaacaaacaagtgttatgggaccgcaccttcagtcttttccagcagctcattcagagctcgtttgtggtggaaagacagccctgcatgccaacgcaccctcagaggccgctggtcttgaagacaggggtccagttcactgtgaagttgagactgttggtgaaattgcaagagctgaattataatttgaaagtcaaagtcttatttgataaagatgtgaatgagagaaatacagtaaaaggatttaggaagttcaacattttgggcacgcacacaaaagtgatgaacatggaggagtccaccaatggcagtctggcggctgaatttcggcacctgcaattgaaagaacagaaaaatgctggcaccagaacgaatgagggtcctctcatcgttactgaagagcttcactcccttagttttgaaacccaattgtgccagcctggtttggtaattgacctcgagacgacctctctgcccgttgtggtgatctccaacgtcagccagctcccgagcggttgggcctccatcctttggtacaacatgctggtggcggaacccaggaatctgtccttcttcctgactccaccatgtgcacgatgggctcagctttcagaagtgctgagttggcagttttcttctgtcaccaaaagaggtctcaatgtggaccagctgaacatgttgggagagaagcttcttggtcctaacgccagccccgatggtctcattccgtggacgaggttttgtaaggaaaatataaatgataaaaattttcccttctggctttggattgaaagcatcctagaactcattaaaaaacacctgctccctctctggaatgatgggtgcatcatgggcttcatcagcaaggagcgagagcttgnccctgttgaaggaccagcagccggggaccttcctgctgcggttcagtgagagctcccgggaaggggccatcacattcacatgggtggagcgggcccagaacggaggcgaacctggacttccatgcggttgaacccctacacgaagaaaagaacttttcagcttgttacttcttccctgacatcctttcgcaaattacaaaagtcctgggcttgcttgaaaaaataattcctggaaaaattccccctgaaagtatcctggtatccccaaatctattggacaaagaaacccatggcctttttgggaaaagtaattaacctgccaagggggcaaaaggggaaatcaaccccggaacgccaaattggggaaacttttgaatggcgcccccttaaaaaggcgaaaccggggggctaatatttcacacactaactgcggggcctttccgacgttttcctggggggggccccgtgggaaagagttt

SEQ ID NO: 433931 - DNA, 759 bp, Homo Sapiens
  misc_feature (140)..(140): n is a, c, g, or t
  misc_feature (235)..(235): n is a, c, g, or t
tggggccttcagtagcccttcccagcccctccctgaccccaaaagaatgggggcaggaactgcagtccacggtgatgggttgggagagtggtgatgctggggatgccaaaaccagctgccagaccatttggcacagccanacgtggatagacaccctaagattgaatagcccaagcagggctgcgtctgaaatgaccctttcttggaaggaacatcccagcctgtggcccaggancctggtcctggtggaggttgcagtgcagaccaggctgggtccagaagaggaagggtggcttcacatccaccctgagctgcccttctctccttcccccagaatcccaagcatggacaacctgggtgcctccacaataccaggaaaccccagccacatccaccggacttacaacggacacacggtgggactcggggtaatggggtgccgagggggtggacgaatatattctgagatccagggcaaccggaaagtcacggacgagactaggagctgcggaaggaaggggaacgagcaagaggggtcagggccagaggagcctgtgaaacccagaaggaggaagccagccctgggggccatggctagtcccggaaggcggagagcatgtgtccgtagagatagtgggagtgagcttcaggcatgatcttctttggcggggccggtgggggctgcagggtccccagggtggacacacggaagcccgccgggagggtctccgcggaagcgctgagcatgccgccgcgacc

SEQ ID NO: 433932 - DNA, 661 bp, Homo Sapiens
  misc_feature (28)..(28): n is a, c, g, or t
  misc_feature (513)..(513): n is a, c, g, or t
tagaacctgagatccccagatgtttctncccctcatccccatcctgtgaatagagagacagaaaaggtgcaggttcccattctgcatagattctgctgtttcctctccaccggtcccaggcagcttttcctttccatcactgccgcttagcaaaaatgtgcttcttttgaagaactggtcattttttttgagtgccctcttctcagttttgtttaaacttacactcagtagagtgttgggttgtctgctgacatggagtagaaccctggattctggccaaataggccagaatcggaaaggtgaaggtgagtgtgatagtaggtaatctcctcaccccagcacaggccctgggagagaggcaaagcagtttgatgggatctggaggggagggaggtaccctggcccttggtctagcatcagtgagtcctgcccttccaagcccctggaggctagtggcattgcattgtgcccctttttgccacccttctctgatgtgattttgagcgaagaggnagtcagtaagcccattgagaccggctgctcccaaagcccgaggactcttagctgtgtggggaagggctagcattggtcaggactctgctgacagcactgagtaggcaggaatgtatttgagatttggaagtactgttaatttggtgga

SEQ ID NO: 433933 - DNA, 947 bp, Homo Sapiens
ttctctacggaagcaccctgtccgaggggcaccaaggggtgctcctcacacgcccagaaaggtgtctcctgcagacaccggttggagggccccctgtgtgcggtggaacgcagatgtttccacaaaggggggagcacacggcccggggtaaccacgcttggggggcccccaaagggctcacaccgctggagtcaacaacgtgacacgggggccccattggtacccccgacatcacagtgccaggggaaataatggaggatttgcaacacattctccatggccactgcatgaccagggctggcaagaagctgtgtaacagagggctgcctttagtttttggcaggcgtcatcgttccatttgcctgcatctttgtttctcttgatatagatctccacgcagtcctccttgttcttcttgttgttgggctcaccatctccccagttctctgcttcttcagtaagagatttgttggttcccacccacgtccatattcctcctatcttccggattcctatccagtagtaagaacgactgaaaggcagagtcttctccagatactcaatttccgccttgttttgtatggcaactaaatctgtgtaattgtctcggcagaatcttctagccctttgccagttcatgggtttttcagaataatggtaagtccagcagtcggttccatgatgtgccaggaaatcacaacagagcattgtccacccccacaacttgaagatgttccataagtccctctgggtgctctgacatttccatggaaatatcatggctttgcttggtccttctctagttcttctgcagcccattgagcctcttgacttagcacaagggtctcaggtccttgcccaaagggagtgtgctgtgctgcaggtagactgcactgaatgtcaacagaaagccttgctttctttcatttctctaacccagtctcaca

SEQ ID NO: 433934 - DNA, 951 bp, Homo Sapiens
ggtcatctaccatggcatcagaatcctcatctgacactggaatgctctcagtggaatctacaacctcaggtttgggaggttctgctctcctaacgcgctcgcttctcttccgttcaggcggcttctcactcgccttcgcagtcaggccatctcctggcaaggaaggatgtgcaggggggctagagcccccaggtttggtctgagaactgttgattccatcccccagagtctctcccactgaagggctaggcggggcatttgggctctgtggctgcccttggggaagctcctcctcctgcccaggggagccccttcttgcagtagctatggaggtggtctcctcctcttcaatatgtggggactgcagtgttattggagaatctggagccaaaggctctagtagcccctcaggtgaacaggaatttgccccagcccctggatcaggtggtaccacctcaggggtctggccccctggtccaggctctagggtctgatctcctgcatcccatgccagggttccctcaggaccgtggtccacctccgggggagagggggctttatagagcagcccccccagccccagcaactcagtggctccatccaggactccagggtctttttccaggccagcaggggtatcaagcaggtccagggctcccgaggatggagaaggtccagggggggcccatcctcgagttggggcagtctgggattccagtagatcctctccaaattccatgtctactggtaggtctccagccaggggcttctctggcagggtcaatgggtcaaatggactggggaaatcactggggtccatgagtatggctggatatgtactgcggcagggttagtgcaaaggctacaagcctagaactgcagacagcgacggccccgcgctccttctctacctccctccctagcagccgggacaggggtcgcggccctttt

SEQ ID NO: 433935 - DNA, 1380 bp, Homo Sapiens
  misc_feature (708)..(730): n is a, c, g, or t
  misc_feature (848)..(894): n is a, c, g, or t
  misc_feature (941)..(951): n is a, c, g, or t
  misc_feature (1158)..(1169): n is a, c, g, or t
ttgatacataggtaatgggcgagtggggtgcaacaggtgccctcaaagtgaaggggagggggctctgtgaatgtcccttataaagtgccctcgaatgtagtcagagggcgcgcgctgtggggtggccacatgggtacccaggggccttaggttttgtgggagaaacgggatgggattttccaagggttggggggggcttgcacagttttaaaacccccagaggcaggtcccccaaagccaagatggggaagaaagtttggttaccccttcagggcaaaaaggccccagaaaaagggggaccctggaggagagggcctgggttctgggacactggggccacaagatgggccggaggggggaccccctggctggtttttgcagcggggttgggacgcccagccccaagggaggaggcagcttagggggggcctggggaggggctttgtttagggtagccctgggggcccccagttgttgggcagagtcactggggaggggtcagacccaccttggtgaggtcccttcccccaagccccgttcagtccctttcctgaggggagaggattcggcagggaagccccaaggtgccttcatcagggaacgcccacgcatcactttccacatgacaaaaccaagagaacccccaacatcaaaaaaacaaaagaccccgccgcctgtccccgttctgtctgtgtgcagtggcttccnnnnnnnnnnnnnnnnnnnnnnnctcaggtttacacggggtctttttaatacaacgtttaatcatctggttgatcaagaaatgcaatgctcagtctaggaacagcagcagaaatagcgagagacacgggacttttatacannnnnnnnnnnnnnnnnnnnnnnnnnnnnnnnnnnnnnnnnnnnnnnccagagaccaaaggcagcatccttgctaattttcatctacattaagnnnnnnnnnnntcttgtaactaatgtttttattttccttaaaaaaaatatttcgcttaggcacaatttgctggtggctttagaagaataagccaggtttccacagcatcccccttgagtgatatgtttccatttctccgctttttatagttaaggcatttttttcttctctgacaaagtgtatgttttgttgcttgctttcaggttttgtttactggnnnnnnnnnnnntgctcctgtcagcccaggcaacagggccaagatgcagtttcaggatccatgggacaggtcacagagtgacacggtggctgagattcggggacagggggagcgaggccagtgagtggtaggccagggccccagggagctcctggacccagtgtcaccttggccgcccccatcactccgaaccttgtcaggttggtgtggctcgatgctgaca

SEQ ID NO: 433936 - DNA, 899 bp, Homo Sapiens
  misc_feature (192)..(192): n is a, c, g, or t
  misc_feature (195)..(198): n is a, c, g, or t
tttcttgtacaacgtttaggcatctggttgatcaggaaatgcaatgctcagtctaggaacagcaggagaaatagcgagagacacgggacttttatacaaaaaaatttgttgcttacaaaacatatgcaaataatgcttaaaaaaacccgagaccaaaggcagcatccttgctaattttcatctacattaagnaannnnaaaatcttgtaactaatgtttttattttccttaaaaaaaatatttcgcttaggcacaatttgctggtggctttagaagaataagccaggtttccacagcatcccccttgagtgatatgtttccatttctccgctttttatagttaaggcatttttttcttctctgacaaagtgtatgttttgttgcttgctttcaggttttgtttactttcacatgtgcccggcggggttgtgggcttcgctcaggcctgggtggggagctgaaagcaccatctgggggtctccaaccacacctgacaccttttcctcttctcgccgtttcaaacaggctgctttgggattcaggttccgctctcgcacttgctgctccaagttcaggatgaccgagacagcctggtgcaggatgagcagtttggtctggggcttctcgctgttgaggtgcagttggcacatgcgccccagctccttaaaggcctcgttgatgtcacggacccgcagccgctcccgggcgttattggccacccggcgctccttctcccgctcggccttctgctctggggggagaaggtcgtcctcgtcctcgtctgggctggtccgggcccggggggccttcagctccttcttctcctcctccgagtggtcagccgctgacgtgttctcctcgtcctccttctcctcccgcttgatctcgctggcggccgc

SEQ ID NO: 433937 - DNA, 552 bp, Homo Sapiens
ctggcgctcggtcatcattggttcacaggtgcagtgcggatgccccctcatctacatcctccatcattggggtccgctctccagggacataatcctggttttcccggagcacatgcttggtgaggcaggggacgagggccacagttgctccatctgggaccttgtaatgctgcagtgtgttcaggcgcctccacagaccctggacctcagaagtgacatcctcgtcagaaagaatgaggtgcccggccaccccagaccgccactcaacatcaagggtgcgagggtctggccgctgggtgagaggcactcctttataaagctggtccagcatcttctcctttgcctgggagatggtgtcacagtctaggacctttacgggcacgccctgggcctctcctgccccaggccccacagccaatagtgcattcaaggtcaggggacggtactccacatcctctctgagcaggcggttgtcgttcaaggtgtatttggccttgcctgtcacactgtccactggccccttatccacttggtgcttaatccctcgaaaga

SEQ ID NO: 433938 - DNA, 1513 bp, Homo Sapiens
ttttttaagtttgaagccttgcccaagctttaatgtcatgctaaccagttaccttgttagagctgggaagccaccttttgctcaaaatgcagacttctgcctttgaaaacacaccacacctgattttaagtgcttaaaggacagaaaatgtcgttgctttaaattgttgctttgttcagagacatctggatttgctgtatccatacaagcaaaagcttttccaattccagaatcaacccacactaatttgttattgcctcgtactgtattggcccagctgtaatcaactcagcaggcttttggttgtaaattcaagtggaaattgagttggtcttatttgtgcccgttgatatctgagggctgtgaggaagatggccagtaggtcaaagggaatagtgttgaaaagctgaccagtactgggcaggtggccggctgtccctcaggcaccacaacgccgagccacggtaaggggcatgagccacatttgcagaatatagccagagtccttccagaacctcctgattcgcgccaggaggcatcccagggcacacaagtgtcaagggcctactcaggtgcttggcagagctctctgtgtgttattaacagaagaggctacggcttagagtggaaaggagcatgtgatggctagcggtgggcagcctgtgtactctgccaagtttgggtggtccaggtccccacgatttctgtgtggagggttgtccggcatctggccactaggggggccggtggttctcacacacacgcagcggggctccttagcacctggcttatacagcttcctggggacgccaatccagtctctgctcacacctccactcttctgggagcaccagagccggctgcccctggctgagctccactccgcgttgcacggcgggaatgtctgcttctcttgcagctgtagtttgttggcctccaagcctctggtgatcgcagcttctacctgggtcagtgccggggtgggcagcccatcctctccgtagaaccgtcctgtcaccctcccaacacacacataattcttctcatagaatgaaagccaattgtgaagtgtcagcatctcagcggctgacaggtcggatacgtcatccacgaggcctgcttcagaacagtccccggtcacgaaagctctggatgcgtctcggcctgcgaagccgctatagtgggacccaggctcgtagtgcctccggccggaggacacatcgtagacacggccgagcaacgccaagtacaggcccgggtcccctgggccgccgcggtagcgagacagctcctccggtatgaaaaggcgaaagccagcgcggggaccccaccagcccataagccgtgctgccattaccgctgctgcggctacagccaggcccaacaaaagcccacggcctccgcacctcaacatctatataggcccacccgctccgcacttccgaggttgccgcctctatctacagctaagatccgctctcgacgaattcgagctcggccgatttggcctgat

SEQ ID NO: 433939 - DNA, 794 bp, Homo Sapiens
ggccattttaccctccaggttggccctgctcaggaccaggaggaaacacctccagcccgcgacctcctcccacaggtggaaaaggaaagcaggaggaccacagaagctttggcaccgaggatccccgcagtcttcacccgcggagattccggctgaaggagctgtccagcgactacaccgctaagcgcagggagcccaagcctccgcaccggattccggagcccaagcctccgcaccggattccggagcacaagctccaccgcgcatgcgcacacgccccagacccaggctcaggaggactgagaattttctgaccgcagtgcaccatgggaagctctgaagtttccataattcctgggctccagaaagaagaaaaggcggccgtggagagacgaagacttcatgtgctgaaagctctgaagaagctaaggattgaggctgatgaggccccagttgttgctgtgctgggctcaggcggaggactgcgggctcacattgcctgccttggggtcctgagtgagatgaaagaacagggcctgttggatgccgtcacgtacctcgcagggggtctctggatccacttgggcaatatcttctctctacaccaatgatggtgacatggaagctctcgaggctgacctgaaacatcgatttacccgacaggagtgggacttggctaagagcctacagaaaaccatccaagcagcgaggtctgagaattactctctgaccgacttctgggcctacatggttgtctctaagcaaaccagagaactgccggagtctcatttgtc

SEQ ID NO: 433940 - DNA, 584 bp, Homo Sapiens
  misc_feature (25)..(25): n is a, c, g, or t
  misc_feature (43)..(43): n is a, c, g, or t
  misc_feature (91)..(91): n is a, c, g, or t
tccaacaggccctgttctttcatcntcactcagggaccccaanggcaggcaatgtgagcccgcagtcctccgcctgagcccagcacagcanacaactggggcctcatcagcctcaatccttagcttcttcagagctttcagcacatgaagtcttcgtctctccacggccgccttttcttctttctggagcccaggaattatggaaacttcagagcttcccatggtgcactgcggtcagaaaattctcagtcctcctgagcctgggtctggggcgtgtgcgcatgcgcggtggagcttgtgctccggaatccggtgcggaggcttgggctccctgcgcttagcggtgtagtcgctggacagctccttcagccggaatctccgcgggtgaagactgcggggatcctcggtgccaaagcttctgtggtcctcctgctttccttttccccctgtgggaggaggtcgcgggctggaggtgtttcctcctggtcctgagcagggccaacctggaggtaaaatggcccctgcgcctttaaacagccctcctcggcttgtaggccctgcttggttgctccagtttttcagct

SEQ ID NO: 433941 - DNA, 1010 bp, Homo Sapiens
  misc_feature (307)..(307): n is a, c, g, or t
  misc_feature (311)..(311): n is a, c, g, or t
  misc_feature (338)..(359): n is a, c, g, or t
  misc_feature (364)..(365): n is a, c, g, or t
  misc_feature (367)..(367): n is a, c, g, or t
  misc_feature (369)..(375): n is a, c, g, or t
  misc_feature (378)..(378): n is a, c, g, or t
  misc_feature (380)..(384): n is a, c, g, or t
  misc_feature (386)..(388): n is a, c, g, or t
  misc_feature (390)..(391): n is a, c, g, or t
  misc_feature (393)..(400): n is a, c, g, or t
  misc_feature (402)..(405): n is a, c, g, or t
  misc_feature (407)..(408): n is a, c, g, or t
  misc_feature (423)..(444): n is a, c, g, or t
  misc_feature (492)..(603): n is a, c, g, or t
caagattcctttctttacacgccgaacgtaagtacagtgctgggttgatagatcgggaacggggtcacggcgtgcagaacaataacacggagagaggtggagtagcacatgggatcaacacgtcacgctcagaatgccatgcacctgacgatggttgcacacgaggcgggcaggcgggaagggagaggatagcgcgcgccccggggaggaacaccaagcacgcaaaacacccgcgcggcacaacaggcgagccccgggcgacccctccgcactgacgtgcggcggccggcgcgagggcgcgcccgcngagnccgtgcgggggtcggggcgcagaccgnnnnnnnnnnnnnnnnnnnnnngggcnncnannnnnnnccngnnnnncnnngnncnnnnnnnncnnnncnncatccattagaattnnnnnnnnnnnnnnnnnnnnnnaaggaagggcgggaggtgcgcgggggatgccggcaggcagagaggcannnnnnnnnnnnnnnnnnnnnnnnnnnnnnnnnnnnnnnnnnnnnnnnnnnnnnnnnnnnnnnnnnnnnnnnnnnnnnnnnnnnnnnnnnnnnnnnnnnnnnnnnnnnnnnnatgccgccccataggcacaggcatagtcgttgcccagcccgacatgcaggccagtgccccttgtgggtgagttgccacagctgcccagcaagagtccctcggtcctgcagaacgatgttgctctaaccattatctgctgcacaaagagggcgcccaaggggctaggggggtgagagtcacaggcagctgcccccgccagctccctcttaccactgcttggtaatgtcgaacatcatgaccaccccgttgcagttcttgtacacgtccaggaactcagcatccagggccatttcagactccgcctcctgggggtcgttctccatctttaagccgtcgcctcgctttttgcattttcctttgtctactacatcccagacttcaaccgtcacgatgtcatccgtggtctt

SEQ ID NO: 433942 - DNA, 1688 bp, Homo Sapiens
  misc_feature (86)..(86): n is a, c, g, or t
ggaccgggccttgcagggcagggggggactccccaggtgggctggtcttcgaagtcccacatcgttctggaacccctgccaccatnggggttgcccgcccaaggcttccccatcactgtcgctgtcctgcggggcagcttttggcccccaccttctttctcgtccctggcgggggttgtgtcttccaggaagctgcggtccaggcggtcgtcaggaacaaagtcctccacactctggaccgttgctgggccctgtgcggccgggactggctctggaggtggaggggctgcctcggtggcaggtgacgtcccaaacagcctagagatgatgctgcgccgtggggcgggggctgaggggcacgcaggtgggggcagggcctctgagggtggtacagggggcacagaggatgggtggggcagcattgaggggcagctgtggggcgggctggggtgtgccggggctggagctccccgtggacacagcgcctgcaggcaccactggtgactgggagcccggggatgggctctgcccgttggccgccagtggggacgcatggccacggctgcgagcctccatcatctccaggaagatgccgtagttctggtcctccgtctcctgctgcaccgacagctcctccagcgtggcgtccatgtccagctggttcgtctccagctgccgcaacagcgtctccctctgaagctgcaaaaatgggatattgaagaacttatgaaggtactttaggccgaagctgttcttcatggaagactcagcatagcggaagtaggaggaacctggaggtctgtccaggttgtcgatgaagtcacgcacgtcgtccggcaggatgactcggtgctcgcccatgtcccggtagttccccagcacgcacactggcacgtgggtgggcacttttggaagctcccggagaatgtaattgaaggtccactgcttggtaatgtcgaacatcatgaccaccccgttgcagttcttgtacacgtccaggaactcagcatccagggccatttcagactccgcctcctgggggtcgttctccatctttaagccgtcgcctcgctttttgcattttcctttgtctactacatcccagacttcaaccttcacgatgtcatccgtggtcttgtagctccagtggatgctggtgacctggatctcctgtgtggggatgtactcctccacgaacggccggccctgcaggcggtgccacagcgctgtcttgcccgtgttcctgtctccccggatcactatcttcatgttgtactgcacccccttggcgaagcgcctctgcaacgcctggttcatggactgcagcccggcggggatgttcttgtcccggcccggggcctggtccgaccccaccagcttcttcagggcggaaaacatcttcccgctcggacgtcccagcccgggcgcggccggcgagctcagcggcggcggggaaggggtgcgactggcaccatgtcccggcggccccggcccccccggaggccggagccggcgcggccagaggccggggtcccggcggcggagcgcagccccgagcggcgactcgggaacctcagccgcggctgctccgctccggcccccgcggcctccggcgcgaccgctctccaggagtcagcgccgccatcttggcgccggctcggcgatcccgggaattccggaccggtacc

SEQ ID NO: 433943 - DNA, 860 bp, Homo Sapiens
ctcttcttttcacaggggctgcagttctgatgtgaatgatggtgccattccagcattgggcctctggcaggctgcatcaacatgatgggcccagcatgagttttgtttccgggcagttttatagaaggctttagactgtgttcccagcacctcggatttggacaccaagtcatctagcttctcacctcgctctaacagagactccatggtgttgtgcagaatgattttggtctcatctagttcggcctgcactttagtcatgggatcagcttctcgtgggttctggtatctactgaggtgaccatccagggctgggtaatggattgtagcaggggatcctactggccagtctatcctgtcgacttgcttggagaattcatctagtaccttctccagcaaggtaaaggccacccgggatgggtattcattgtcagcaatgaccacacctgcaagactatcattccggacgtagacgtggcacagatagtcttgttctttgacagaagctctagtgcctttcgatgagcgctccacaatcagttgactcgtgaaggtcatgaattcctgaacgctggatctctggaaaaagctgaaggaagacacatcgtatgcggctttgagcagcaccaccttggcctcgcctttgtagaggacgctgaggctgtacagcttcatggctccgcgccctcaggccgcccgcctgcccagctgcgggacccgttctcagggagcagcgcggccgccgcccctcgggaccgccgccgcctaccggcctctcagcagccggctgctgacggggccaccgccggcttcctccctcgtgccgaattcgccacccagcctcgtactagcctacgttg

SEQ ID NO: 433944 - DNA, 1024 bp, Homo Sapiens
  misc_feature (41)..(42): n is a, c, g, or t
  misc_feature (143)..(143): n is a, c, g, or t
tatatcattaaaggtccaaaataaggatcccaaaggatatnnccaaaagatcgaagaaaccagctgggtttcggaccttccctttcccaaaaggagcctttcccagggtttagctgaaaaaggagcccctttgggcatctacnagaaggccagtcgggaggtttatggtttcatttgccccaaaaaatacaacctttgggggacctcaaattcttttccaagaatcactaccacacatatgaatttgaacagttcgccacccttccaccatccatttctcgcaggaacttcaaaataaaaatggccagtctgcccccactctggctcctcgtctatggctgtctcttctgtttccaggggctgcagttctgatgtgaatgatggtgccattccagcattgggcctctggcaggctgcatcacatgatggcacagcatgagttttgtttccgggcagttttatagaaggctttagactgtgttcccagcacctcggatttggacaccaagtcatctagcttctcacctcgctctaacagagactccatggtgttgtgcagaatgattttggtctcatctagttcggcctgcactttagtcatgggatcagcttctcgtgggttctggtatctactgaggtgaccatccagggctgggtaatggattgtagcaggggatcctactggccagtctatcctgtcgacttgcttggagaattcatctagtaccttctccagcaaggtaaaggccacccgggatgggtattcattgtcagcaatgaccacacctgcaagactatcattccggacgtagacgtggcacagatagtcttgttctttgacagaagctctagtgcctttcgatgagcgctccacaatcagttgactcgtgaaggtcatgaattcctgaacgctggatctctggaaaaagctgaaggaagacacatcgtatgcggctttgagcagcaccaccttggcctcgcctttgtacctcgtgccgaattcgccacccaggcctcgctcctt

SEQ ID NO: 433945 - DNA, 1609 bp, Homo Sapiens
tgaaatttcaagacaactttatccagacaggcgcctctcaaatagaacacagggaagttaggcagcagttactaaaatacagtctcgccaaatgatttacaacagaacacaacaggagcaggggatctgtgggtggggctgggctgggccctctatctcacagggcctgagtcaagccagcccgccctgcaaggcaggggctgacctgcaagcggagatctcacttcctcttaccccaaattcatacctccattttccccgcccccatctctccccagggtcctcaagtgggaaagggagaggtagcatccctcggatccaggcccactccactccgtctccggcaccagtgggcaggctgagtctgggcctcaaggggccctgggcttagggtatctatggcagtaggaaaatgacatggacaggctcttcaggggtaggctaaagtcctctggccagcagtacccagagaaaatgggcagcagcaggtaaaccagccaggaggtggagtcctctgaacccacagcagaccccaccctcctgcccagcccctgcccacattgggggtcaggaccactgagactctggtcaggacagtgggtgctctcagcagtgtggcaagctcagagcagagctcccaaggaccataccacactggttcaaaacccataggtgacaccatcccagcagaagcttccatgggtgctggatcccagggctgcatcctgagcacaggtgggcagactggaacataacactaggacccaagggatccagaacattttaggcccatctcctgggctgctccagcctgttgccatgacttgggcagtgagtgggcctcctgccaggtggcagggcacagcttagaccaaacccttggcctcccccctctgcagctacctctgaccaagaaggaactagcaagcctatgctggcaagaccataggtggggtgctgggaatcctcggggccggctggcacccactcctggtgctcaagggagagacccacttgttcagatgcataggcctcaggcggttcaaggcagtcttagagccacagagtcaaataaaaatcaattttgagagaccacagcacctgctgctttgatcgtgatgttcaaggcaagttgcaagtcaaggcaagtgtcccagaggccctgggcagctgagtgcacctgtgtttgatcttcccctgatgatggacactcccagctgaccatccaaacaccaggaaaacatccccctttcctgggctcagttcctagtctacttgctggtacgaacccaacccacacactccccgcccacaatgcagctccttccaaatcctcccacaagccacctttgtgggacttggaagctgcttaggatgggccctgccctctgcgggaagccaatcctagcagaaaggtaagctaaacaacagtctcagaatctgagacccagtgactgttccccccgccccaggccttgggcctgaagtgggggcctgcctgtggcctctgtggtgggctcactcccacccccaacagtggccccaggagaggctttcccaagagtcttcaaaccctcgtgccgaattcgccacccaggcctcgctcctt

SEQ ID NO: 433946 - DNA, 2251 bp, Homo Sapiens
  misc_feature (35)..(35): n is a, c, g, or t
  misc_feature (137)..(137): n is a, c, g, or t
aaagccccccttgcccccacaattgggggggtcangggaccaactgaagacctcctggtcaagggccagtggggtgcttctcagccagtgtggcaaggctcagagccagaaggttcccaagggacccatcccaccanctggttcaaaaccccatagggtgacaccatcccaagcagaagcttccatgggtgctggatcccagggctgcatcctgagcacaggtgggcagactggaacataacactaggacccaaagggatccagaacattttaggcccatctcctgggctgctccagcctgttgccatgacttgggcagtgagtgggcctcctgccaggtggcagggcacagcttagaccaaacccttggcctcccccctctgcagctacctctgaccaagaaggaactagcaagcctatgctggcaagaccataggtggggtgctgggaatcctcggggccggctggcacccactcctggtgctcaagggagagacccacttgttcagatgcataggcctcaggcggttcaaggcagtcttagagccacagagtcaaataaaaatcaattttgagagaccacagcacctgctgctttgatcgtgatgttcaaggcaagttgcaagtcaaggcaagtgtcccagaggccctgggcagctgagtgcacctgtgtttgatcttcccctgatgatggacactcccagctgaccatccaaacaccaggaaaacatccccctttcctgggctcagttcctagtctacttgctggtacgaacccaacccacacactccccgcccacaatgcagctccttccaaatcctcccacaagccacctttgtgggacttggaagctgcttaggatgggccctgccctctgcgggaagccaatcctagcagaaaggtaagctaaacaacagtctcagaatctgagacccagtgactgttccccccagccccaggccttgggcctgaagtgggggcctgcactgtggcactctgtggtgggctcactcccacccccaacagtggccccaggagaggctttcccaagagtcttcaaactccacccaccccagccctagcatcagggactcccccaccccccactggagtgttaatatcattaatgtacaaataagatccaaagatataccaaagatcgagaaacagctggctccgacctccctcccacagagccttcccagggttagctgaaaaagagccctttggcatctacagaagccagtcggagtttatggtttcatttgcccaaaaatacacctttggggacctcaaattctttccaagaatcactaccacacatatgaatttgaacattcgccacccttccaccatccatttctcgcaggaacttcaaaataaaaatggccagtctgcccccactctggctcctcgtctatggctgtctcttcttttccaggggctgcagttctgatgtgaatgatggtgccattccagcattgggcctctggcaggctgcatcacatgatggcacagcatgagttttgtttccgggcagttttatagaaggctttagactgtgttcccagcacctcggatttggacaccaagtcatctagcttctcacctcgctctaacagagactccatggtgttgtgcagaatgattttggtctcatctagttcggcctgcactttagtcatgggatcagcttctcgtgggttctggtatctactgaggtgaccatccagggctgggtaatggattgtagcaggggatcctactggccagtctatcctgtcgacttgcttggagaattcatctagtaccttctccagcaaggtaaaggccacccgggatgggtattcattgtcagcaatgaccacacctgcaagactatcattccggacgtagacgtggcacagatagtcttgttctttgacagaagctctagtgcctttcgatgagcgctccacaatcagttgactcgtgaaggtcatgaattcctgaacgctggatctctggaaaaagctgaaggaagacacatcgtatgcggctttgagcagcaccaccttggcctcgcctttgtagaggacgctgaggctgtacagcttcatggctccgcgccctcaggccgcccgcctgcccagctgcgggacccgttctcagggagcagcgcggccgccgaccctcgggaccgccgccgcctaccggcctctcagcagccggctgcctcgtgccgaattcgccacccaggcctcgcttcct

SEQ ID NO: 433947 - DNA, 3224 bp, Homo Sapiens
  misc_feature (1086)..(1099): n is a, c, g, or t
  misc_feature (2056)..(2056): n is a, c, g, or t
ttttagttttataggcatttaatagtttaccagttggtacaataagattttttaatatgcagaaaacatgaataaattttgttttacacagtctgagagcaacaaatcttactgtaaaacacgagagcaatattatatacattcctttactgattttttaaaattgtgtcaatatcttcagtgaactcttaacaatctggggaactgttttcctcaattaccacttcagcaacgttcatacgaaatcaaggcttgccttcatgtcagtgtcaggatcaactttaactcgaagagtttgtgtttgtctctaacatcttcagagtgagctttagggatgcctgaaggatggacagtacaagcaagcagctacttccatgatacagtgggaagataaaaaggcccattcagtccagccgtgacctgtaaatccagcttgccctccccccaccccactggaaaaaaaatccaaaacctttttccaccagttttttacatgtcgcttctctaccaggagattctttgcgtcatctagatgaacacactggacttatatacagctggacatgaaagtaaccaatttaagtgccttttccttcaacaattttaacttcagttgcttaaggatgatcgagccaccgatgtcaacaaaatatcctttacctttaaatagtttttctttaattaagtttaaagaaaacctatttaacgagtgatattaccgggaaagttcacacagaaacagaaagaggcgaacgggagagcagggcactggcagcggggaggcggggcttggtaaatctaaagccaaagcttccaaagactacggcgaacgctccccagcccgggacgacttgctaacactagtgattttgagagtagtgctctgggcacaccattggtcacaccacacacagacgaaccaggacggtcttagtctcctaaagtgcaagatgccgtgacaacaggcaactaggctccacgcggtgtctaaaccagtctccatggcatgcactctcaagagcgcagctaggatttcttgggcacgttacagatatatatttgggtggcactggaatgtctgttttnnnnnnnnnnnnnngtcaataatcatctgaggatgcaattctaccagctctttatttcttaagtggccaatttgattgagaaagtgacaaagcagcagtgaacctctaaaccaattaataaaagtcctctacttacaatccaaaccagtaacctcatcattgtccttatcccaggcaaggcacagggttagacagcagacagagaaaacagagaacacagtcagaaagggcatcaacaggacagtgtcagacagcagtgcaggaaattttgcaaatctgattccaggttgtagacggactgctctcccccaccccttcgttattaaacagggctcattacatgtggacccagttgtgggccatccctgagattcaatgttcgctgcttctcacatggaggatgtctggtaactcaactcagcagcaggctgtggcaatctcccaagtaaggataactttgtttacagagtaatcgtttcctcctcctttgtcaacgcaagtcgctgtgtgctgcaggggaagacacgcttgcttcctcctgcatcggtaccattctcctttattgttcaatatctatgagtgatttctagatgttgtggcttacccttaaacaattcatgctaaaaatgaattaaaatacaagacatttatacatgtacaaacaaatgttaagatgcaccatttctatgtatttatatttctcaaaataggacagaaaatagcagcaaacaagaacaaagatattttccatagtttttgtagaaaaatccagtcagaagagctaagggaaaaagacttttcaatgtaagcagggttgtgaggcaatattgtcctgaaaattcacctactgtatgtatttaaggaattagcttaagatgtaatttttgtcctcaaaaatagccattagttctcaaaactttcccttccagagacatctctcaggaatctaaaaacaaacaagcaaacaaacnaaaagacacaagctagacataaagctgcttctagttaatatacggcctagtctctgtgtgtatctacaggacgctaactctcaccctttgtcttttgcagggaaccaattttccattaaatactaaaggggacatttaaaaaatcacatagtacacaaatgaataaaacgcagttcagaattttatctttgttaaactgtcactgttatctcattgttctgttaacttttcaaataactctcttggaaacaaaaaaaacctgttggttagctaagcaatggaattctttattaataactgacaatggaatagtgctccaaaagtcatggctaaaaattctcttaaacctacctgtaactttgggtcaaaatatacaacatatccgggttgtgtaaaatgtcgagcggctaaattagagggggacataacggaagtgattttccttcggctggaaaaaaatccccagagtcagacctagttttcagaagcattaagatcaaaaagggtttgttctaaagcatggcattccacagcaacatttattctacttgtccgttttagcactttttcaaaaacccaggactaaggacatggaggttgatgtgtatgatacacacatacagacttacccacttacagataggcccatatacttacaaacatttacatataaacaaaaggtgaaaacagtacatttttatgcacgctccattaaaccctgtcatttttttaaaacttgtaagtgaaacacagtttaaatcaatatcagattcatgttgaaaaacaaactgctgtattcctcccactcctttcaaatgggcacacagaaccttctcagtatttctgtcattatgtaatgcacattgcacatccctaaaaaacaccaaaaacgaatagtgatttgtaccatgacacactcaatggggagattaaattctacttggaagtcacatcactacacagtctaatagtatggagaatacaactagaagtatgtccagtgtggaaaatagaagcttagagtatgacagtattttttgacctgtttacaaagcattaagaccaaaatgaaataaatgagttgctattagctgctgagatttttcttgagatttacagtcattttttacataaatataccactagcctctgaaatcggggcaggctc

SEQ ID NO: 433948 - DNA, 845 bp, Homo Sapiens
  misc_feature (324)..(337): n is a, c, g, or t
  misc_feature (809)..(809): n is a, c, g, or t
  misc_feature (835)..(835): n is a, c, g, or t
aagtgggcactggcagcggggaggcggggcttggtaaatctaaagccaaagcttccaaagactacggcgaacgctccccagcccgggacgacttgctaacactagtgattttgagagtagtgctctgggcacaccattggtcacaccacacacagacgaaccaggacggtcttagtctcctaaagtgcaagatgccgtgacaacgggcaactaggctccacgcggtgtctaaaccagtctccatggcatgcaccctcaagagcgcggctaggatttctgggcacgtacagaatatatttgggtggcactggaatgtctgttttnnnnnnnnnnnnnngtcaataatatctgaggatgcaattctaccagctctttatttcttaagtggccaatttgattgagaaagtgacaaagcagcagtgaacctctaaaccaattaataaaagtcctctacttacaatccaaaccagtaacctcatcattgtccttatcccaggcaaggcacagggttagacagcagacagagaaaacagaggaacacagtcaggaaaggggcatcaacagggacagtgtcaggacaggcagtgcagggaaattttgcaaatctggattccagggttgtaggacgggactgctctcccccaccccttcgttatttaaacaggggctcattacatgtgggacccagttgtggggccatccctggggttttcaatgtttcgctggtttctcacatgggggggatgttctggggtaacttcaacttcaggcagcaggttttggggcattttttcccagtaagggttaantttgtttttacagagttattcttttncccccccctt

SEQ ID NO: 433949 - DNA, 471 bp, Homo Sapiens
tatatttgggtggccacgggaatgtcctgttttccaacacacacacacagtcaataatcatctgaggatgcaattctaccagctcttttatttccttaaagtggccaatttgattgagaaagtgacaaagcagcagtgaacctctaaaccaattaataaaagtcctctacttacaatccaaaccagtaacctcatcattgtccttatcccaggcaaggcacagggttagacagcagacagagaaaacagagaacacagtcagaaagggcatcaacaggacagtgtcagacagcagtgcaggaaattttgcaaatctgattccaggttgtagacggactgctctcccccaccccttcgttattaaacagggctcattacatgtggacccagttgtgggccatccctgagattcaatgttcgctgcttctcacatggaggatgtctggtaactcaactcagcagcagctgtgg

SEQ ID NO: 433950 - DNA, 788 bp, Homo Sapiens
  misc_feature (596)..(639): n is a, c, g, or t
acaggagtcttcaatgcgtgccagggtcacgtaagctccttagtctggcattgaggcccttcacagtctgccctgctgctgtcatcttgtctctgctcccttttgattttaagtttgtactgaagcaaaaaattgcatatgtcatgtctatttttatgaattttcaccaagtgatcacacccatgaaaccagcacccagatccagtaatagagcattaccaggaccccagaaatcctcctcatgtcctacttccaatcgctatcctcctcctcgtcaggggaacagctatcctgacttttaatatggtttgcctgttttcatacttcatataaatggaattataaaacacagactcctttcttctgacttctttggttcaattatcatgtttgtgagattttaaatatcctttgcacccggtagctatttattttcttgtaactgtcggtttccctttaggttctccctgtttttgctctctttccagagtcttcaggaggttttttgtttgtttttgttcagagctcataattgttaccggtatgaaggttgatctgataggagctacttcgcctattacaagcagaacctctcnnnnnnnnnnnnnnnnnnnnnnnnnnnnnnnnnnnnnnnnnnnnggatcattgaatttgcctttcttctcgtactcctttatttccctttcatttttttggaaatgttactgtccaaaagcctcttccctcccttttcttttcctatgtacttccttcatacttgctttactgatcaggcaggcaatagccat

SEQ ID NO: 433951 - DNA, 2804 bp, Homo Sapiens
  misc_feature (1731)..(1739): n is a, c, g, or t
  misc_feature (2288)..(2296): n is a, c, g, or t
ttttttttggtgtttctctcttttatttaaaaacagtgcttcattaccatgtgcaaaggctgaggcagtgctcctccttcgcttagagtttataaaagccagcaacatgatcaataatttatacacatggagagtaatacaaaaaaataaggaataaaagctaaagatctaactactccgaccttcacaattccagctacttgataataataggagtaacccaatgaatactgtatggtctgaaagctactatacaatatgattcttaacgagaagggaagggaattagagactgtcacaaagccctgggatgcttctctggagttagcagggaaacaggaccctgggcaagcagctcgggtgtcctaggaagtgattctgggggaggacgggaggggagagagaaggctaggtggtcgattacacaagcatcccatgtaatgcccccatgccccaaaggtacctgttttgccatggcaatgggaggggctggaggaacagcatgttgcatgtagggatggtccggtccctgccatggggagtggggagaagaggagaggttctgtggcattttgagccttgcaaagatttggactgaaaagctcagagactcaggtaggtcagcctgtcagggacaagtacactccaccggctctcttctcgctttgcagccctagcttacgcgtgtcagccccaggtttgctccagctattcacaagcagaatataacacaagaaaaacaattcatatcccttagggaaaaaagaggatcaattcatcactcaatatataatacagccaaaatgagctgccaaaacaagcacacacacaaatactgtgaacagaaaaatacaagaaaatgactaagctgggagtcttgacggggtatggacattgcttaaagcacttatcagtccccagaaaaaccaaaccaaaaacattttttaaaaattcagaaactcatgtaccccctgggaaactggtgttggtaacaaagggcagggggtggggagagaaaagagaatcactgctccctttttgctcgccagtgtgagtggagtcctcaggtcaccggcatgtacacaagtaccagacaaggaggaccaagtccctctgctggtggcctcctaaaaggcaaggcttgagttttggctgatgagcagttctctccgttaccaatccctgccaaccagcactaccatggctgaattgatctaccgttttcctgagtaaactgtaactggctacagtttcggtaacatggaaaagaactcagctactacagccaactgcaatacttcaggaaccccctccatccctgggctcctcactcctagtgcatctgattgaggaatctgataacttgctgcagtctggtctgttagcctcatttgcaaagaaaggtgccagggactctattacactcactaaaccagagggcacacgctggcttaggacacccagagcctacttggaaagggccctgtttcatgctctagctcttggatggctattgcctggctgatcagtaaagcaagtatgaaggaagtacataggaaaaggaaagggagggaagaggcttttggacagtaacatttccaaaaaaatatagtgttttatgcaacagagaatcaagtttcactgtgtatactacaaatggtcaaacattttcaagagcatgacaaaataaaaacacacaaatttacgtctgatgttcaccttgcccactannnnnnnnncctatcttaaaacagtgcaaacaggtaacttatgcttttaaaacaccacgaccccttccccaccccccaaagtccctttcctcctagtatctgggggaaaatctgcaattctgcaaatgttactgcgctagaggttgcaagcagcggagaactggctgaacttggcaaaaggcaaggactggtcaaagcttcccctttctcctccttaaacatctaagtgctttccagtctgtcccttggttggccttgttctcctgccagagggaagggggttcatcatgcccttcttgcatatccttggggttgcttccatccctgtttgatgtctccctcatgtctggaagctatataactagttacaggatggtagtgattaacccacttatctgctagatctctagtaaagcataattctaagctaagagcagtttagcccctgaggagtcacacatttgaggaaaagctgctatcgatgacttctattgtctagatttccactagctcccctcagactaaaagttgtgccccagtccacttctttctcaaagnnnnnnnnntgttggctcaattcagactgtggctgttgaaggatgatggtgatagtaggttttgttaaacctgagagcctgacaaatggtgaatcacaatggctgatctgagttaatggaaattgaactaggtgacatgaggaattctggaaaatgcctatgggcagctctctgggctctaagagggacatggagataaaggtgttcactagaggcctcctttaaggagcccagcttccaagagtacagaaagtccaggtcatgaactatagtaaagctgaaaaagaatcatgcatgtactgtgatttagcatcagtaagttttctggaattatcagccagcatcctctaacaaactcacgaaatgccagactcctctgactctcttttttaatacagtgagaaccagagtcaggaacagacaagcagtgctgcttcgagcaacctgcctctggtgaagttgaccgtacggagtctcaaagttcaaaaggtgacggggaggttgatactgtgaaatc

SEQ ID NO: 433952 - DNA, 629 bp, Homo Sapiens
  misc_feature (54)..(63): n is a, c, g, or t
  misc_feature (475)..(527): n is a, c, g, or t
  misc_feature (566)..(574): n is a, c, g, or t
gtttccttaccttggggggtaggaggagttaaaggaggagaaattttactattnnnnnnnnnnaaacgaacacaatcaaaataaaaccttattagtgtgtccaaggttaaatagagtgactcaggctttgattcacagtggacaggaaaattttactactgaatactggaaaataaatcaaggatacctcttaatatcttgatctccttaagctggcaagactggaatacaagttttaatgaatagcagcacaaaatcacttgcaactcttacattctggcattgggtaccacataagtaaagttcatcattttgatggtcaaaggagcctcgattctattcctctttcaaagctgaacccaatggactcctgtgggaaatagtattgtctctcgttcggtcatgcttaatgtaaacaactccatagcacaaaaagatgcaatgggcacctaaacaaatcttagtgggtacagannnnnnnnnnnnnnnnnnnnnnnnnnnnnnnnnnnnnnnnnnnnnnnnnnnnnacaagtttgttggtggcatgaaaaagatgccacacatgnnnnnnnnntgctacagcttgggtcaaagattgaatttttagcaaactgcttggtaatctacaa

SEQ ID NO: 433953 - DNA, 737 bp, Homo Sapiens
atgcagtggcatgtggactttttgaatgggatgccatttgcagctttcctttgatggactcttgttcataatgccatgttttctttaatgaatcatttaggattcttaggtgatatttctggaacagcaccatcaacagctttggccacatgcacttagagcaactaacttgcctcctgccggggtgtaggtgcgttggtgacagtgtagaagggtgattcgcaggcccatgttctgcccaccagcaaagccccactggagaagggtagactcctgtgggcagtctcagagctgggacctatttgcttctgcttgattctgcgtgggtggacccacatgagcagctgtatacccaggaggtcactaagactttataaaggcaggttttaagaaaaccagccttggcatcaccaccagcagatactgaaagcctccccaggaacctgtctggggaaggatgatgcctctgctggtctgatcgtgctgagtagcaggtgggctacggggactggggagttaagcattttgtgcagtgatagagaagtcaagcatatcgttagcgctctctcaacttgggcagttcacaagcttcttcccagctcagaagccctctctatgctctcaggggaagcagatggggtggatcagtacatctgtgttacccttccagaatattatttgaaaattctacagtatgttctactttctccccttcctgcttccatggtttcactgtg

SEQ ID NO: 433954 - DNA, 1636 bp, Homo Sapiens
gaaaggtccctataaaacacctcccacttctatttttaacacttctttgtgcaaacattttggtattttagttgaccaaaaatttcttgaaacatcttcgttgttaaaaacacccggaaccctcttgaaactcttggggattcttccagggttgtttacctaaaaaactttgggacacacccggacctgtcaagttgtttgatcattcagactaatccattatgtccataattttcttaggcctacccattgactcctgttcatttcctttgctcataaaatctgtcccaaaaccagggatcatccccaagatctgactgaaggggcccattttcatgatattttgaaattgctcatacatgtctcgcaacgtaaactgaccatgtttcaacttctctataagtgcttcattgtcatccaacttcaactcgttgactttatctatcagtccttcaatgtcgcccataccaagaagtttgctaataaaaggctgtgttttgaaaggttcaaagtcatctatatgttcccctgtaccaatgaaaataatcggactttttgtggcagcgactgcactgagtgcaccacctccttttgcatggccatcaagttttgtcactattactgaggctacatctactttatctttaaaagccttagcctgggcttcacaagcctgcccaatggaggcatccatcacataaacaatgttatcaggttgtatagcattagcaacttgaagcatttcttcaaacaaagagtcttcttgtttgtggcggccacttgtatcaacaataataatttcaaaattttcatttttaaatttctctactccttcagaagcaatgatgacaggatccatttctgtatagcttccataaaatggaattcttgctttggtagcattctgttttagttggtcaaaagcccctgctctgaatgtgtctgcacatattaaacaggtcttccaacctttcctctggtaataatatgctagctttgaacatgttgttgttttaccactcccttgcaatccaacaaacataatcacattttgttttcctttagtgggtgtccatgccttaactccagggtctacaagcttcacaagttctttaaatacagcatgctgaatcatttttcttttgttaagaccagatgccatctcttcaagatcaatagcagacttaacattttctcttagttgcttcactagtttaatattaacatctgcttccaacaaagcggtacagacttcttttagcatagcattcaatacctcttcattgataatggtggcattgctcaacgagcgtaatgctgatgttatttttcttccaaggtctgctagaaccatcttgacagctttaagatgtacttacgaagaactcgcaaaagacaccgctaaagccgtggccctgaggggccgggaattccttagcgaggccccacgccgtcggaagaaacccaagaaagctgggagcagacagacaggtatgaccccacaacccaacttcccgaactagataaagtagggtcccaacgcccagcaccacgtcgtcaactcccaccagctggaagaccaacggagtgccagcgaaccttccgcccaatgaggaaacgtcaccactcccccgct

SEQ ID NO: 433955 - DNA, 1360 bp, Homo Sapiens
ctacatgagtctagcagtggcccttctcccggttcctgttctttcaagagccggcatcggccgtggcctcgtttctcaatggcctggccagcctggtgatgctctgccgctaccgcaccttcgtgccagcctcctcccccatgtaccacacctgtgtggccttcgcctgggtgtccctcaatgcatggttctggtccacagttttccacaccagggacactgacctcacagagaaaatggactacttctgtgcctccactgtcatcctacactcaatctacctgtgctgcgtcaggtgagcctgcctgggtggctgcaggggcaaaatcgaaccctgggggcagaaaggggtcacccagccttcccctgggggccttcttcactagtctcccaacacctacgccccccaacccccaacacatcagctgtcctgggtgaggactctggggtaggactgggggccctggctcctgacaaggagctgtagcacttgctgcccagctgtggcctgtttggtggggagaggggtagtgacttcagtggccatgcaccaatgttggggggaggagatgcttcagggaatgctgctctggggatgggcacacctgccctctgagcaagcactggacggtggggcaggaccgtggggctgcagcacccagctgtggtcagtgccttccgggctctcctgctgctcatgctgaccgtgcacgtctcctacctgagcctcatccgcttcgactatggctacaacctggtggccaacgtggctattggcctggtcaacgtggtgtggtggctggcctggtgcctgtggaaccagcggcggctgcctcacgtgcgcaagtgcgtggtggtggtcttgctgctgcaggggctgtccctgctcgagctgcttgacttcccaccgctcttctgggtcctggatgcccatgccatctggcacatcagcaccatccctgtccacgtcctctttttcagctttctggaagatgacagcctgtacctgctgaaggaatcagaggacaagttcaagctggactgaagaccttggagcgagtctgccccagtggggattcctgcccccgccctgctggcctcccttctcccctcaacccttgagatgattttctcttttcaacttcttgagcttgcgtcattactggatgtgggtcctgaatcttgtggtccgcccaccccctgttggccctcactatccttggagtctgttctagggaaggcctcccagcatctgggactctgagagtgggcagcccctctacctcctggagctgaactggggtggaactgagtgtgctcttagctctaccgggaggacagctgcctgtttcctccccat

SEQ ID NO: 433956 - DNA, 1088 bp, Homo Sapiens
  misc_feature (9)..(9): n is a, c, g, or t
  misc_feature (14)..(14): n is a, c, g, or t
  misc_feature (18)..(18): n is a, c, g, or t
  misc_feature (26)..(27): n is a, c, g, or t
  misc_feature (31)..(31): n is a, c, g, or t
  misc_feature (33)..(33): n is a, c, g, or t
  misc_feature (36)..(36): n is a, c, g, or t
  misc_feature (38)..(39): n is a, c, g, or t
  misc_feature (43)..(44): n is a, c, g, or t
  misc_feature (49)..(49): n is a, c, g, or t
  misc_feature (55)..(55): n is a, c, g, or t
  misc_feature (57)..(58): n is a, c, g, or t
  misc_feature (68)..(69): n is a, c, g, or t
  misc_feature (83)..(83): n is a, c, g, or t
  misc_feature (96)..(96): n is a, c, g, or t
  misc_feature (98)..(98): n is a, c, g, or t
  misc_feature (123)..(123): n is a, c, g, or t
  misc_feature (125)..(125): n is a, c, g, or t
  misc_feature (140)..(140): n is a, c, g, or t
  misc_feature (153)..(153): n is a, c, g, or t
  misc_feature (160)..(160): n is a, c, g, or t
  misc_feature (193)..(193): n is a, c, g, or t
  misc_feature (196)..(196): n is a, c, g, or t
  misc_feature (199)..(199): n is a, c, g, or t
  misc_feature (206)..(206): n is a, c, g, or t
caatttaanaattnaaanaaaaaatnntctnanggntnngggnnagggnggcccngnngggcgggggnngatccccactgggncagactcgctccnanggtcttcagtccagcttgaacttgncntctgattccttcagncaggtacaggctntcatctnccagaaagctgaaaaagaggacgtggacagggntgntgntgatgtnccagatggcatgggcatccaggaccccagaagagcggtgggaagtcaagcagctcgagcagggacagcccctgcagcagcaagaccaccaccacgcacttgcgcacgtgaggcagccgccgctggttccacaggcaccaggccagccaccacaccacgttgaccaggccaatagccacgttggccaccaggttgtagccatagtcgaagcggatgaggctcaggtaggagacgtgcacggtcagcatgagcagcaggagagcccggaaggcactgaccacagctgggtgctgcagccccacggtcctgacgcagcacaggtagattgagtgtaggatgacagtggaggcacagaagtagtccattttctctgtgaggtcagtgtccctggtgtggaaaactgtggaccagaaccatgcattgagggacacccaggcgaaggccacacaggtgtggtacatgggggaggaggctggcacgaaggtgcggtagcggcagagcatcaccaggctggccaggccattgagaaacgaggccacggccgatgccggctcttgaaagaacaggaaccgggagaagggccacttgccatggaactgaggcactttgtgaccttcctggaggtagagcccaacggtgacccacatacactcatacttacagtcgtcccgacaggtccagcctgctagactcatgtagattggctggcgggagcggaagtgattcagagcgcccccagagcagttctgctcttcgcactgcagtacgcagtcgcggtacaccggctcacggtcgccctgggagccgctcgccagcgccgctgccccagctagcaggaccaaccgcgccgccaggccggccatcctttctccctggctcgccg

SEQ ID NO: 433957 - DNA, 1054 bp, Homo Sapiens
  misc_feature (877)..(877): n is a, c, g, or t
  misc_feature (901)..(901): n is a, c, g, or t
  misc_feature (964)..(964): n is a, c, g, or t
  misc_feature (983)..(983): n is a, c, g, or t
  misc_feature (988)..(988): n is a, c, g, or t
  misc_feature (1007)..(1007): n is a, c, g, or t
  misc_feature (1030)..(1030): n is a, c, g, or t
  misc_feature (1043)..(1043): n is a, c, g, or t
caaggccgctacgagagcgcaggaagccctcgaggagcggctgcctgggggcgcaaggctcagggcgcgcacctggtttagaagatcatgaccacatggatcatctaactaaatggtacatggggacaaaatggtcctttagaaaatacatctgaattgctggctaatttcttgatttgcgactcaacgtaggacatcgcttgttcgtagctatcagaaccctcctgaattttccccaccatgctatctttattggcttgaactcctttcctaaaatggtccttctgttgatcctgtcagtcttacttttgaaagaagatgtccgtgggagtgcacagtccagtgagaggagggtggtggctcacatgccgggtgacatcattattggagctctcttttctgttcatcaccagcctgctgtggacgaagttcatgagaggaagtgtggggcggtccgtgaacagtatggcattcagagagtggaggccatgctgcataccctggaaaggatcaattcagaccccacactcttgcccaacatcacactgggctgtgagataagggattcctgctggcattcggctgtggccctagagcagagcattgagttcataagagattccctcatttcttcggaagaggaagagggcttggtatgctctgtggatggctcctcctcttcctcccgctccaagaagcccatagtaggggtcattgggcctggttccagttctgtagccattcaggtccagaatttgctccagcttttcaacatacctcagattgcttactcagcaaccatcatggatctgagtgacaagactctgttcaaatatttcatgagggttgtgccttcagatgctcagcaggcaaggtncatggtggacatagtgaagaggtncaactggacctatgtatcagccgtacacacagaaggttcaagctattctcatgcctcagcctncagaggggcttaggctggntcttnaactcttggcctcaaagtnatcttgcctgctttggccttccnaaattgctggggnttatggggcgt

SEQ ID NO: 433958 - DNA, 1080 bp, Homo Sapiens
  misc_feature (159)..(159): n is a, c, g, or t
  misc_feature (212)..(215): n is a, c, g, or t
  misc_feature (220)..(220): n is a, c, g, or t
  misc_feature (226)..(226): n is a, c, g, or t
atgccacaagcggttgggcaatttacccaaaccggaacaggatttgtggctggtcccggaggccccccgagtccaaaagattttgagagggaaagaccccagggacctggcctggaacttgggtcatgaaggagggccaaaggacagggcagggaaganctgggggttttgttttcccacccctgggtcctgggtggtggccccccttggtnnnnccttnaccatncccccccctcccgggagaagtggcccactgctttcttcaggatgtgagcctgagccagggagatgcagagatagcgaccgcccaccttgcaggacacggccaacctcagccagcatcctgtccacctgttgtaaggtcttctcttcctcatctgtcaggacagcatccagggtgcccttgtccaacaccacctggaacgaggcatcaggaaactccatctgcgtcatgtccatcttcaagaagctcatctggggccgtcgggtggcattacattccttcatttgcttgatgacaacctcactgatgtcgatgttcactatatcccgatagcccacatcatacagttgctcactcagttctgagttgccacacccaatcaccagcaccttttccctgggcttgatatatttatgtagcaccccgcacagttccaggtaggttccataccactcgaaagctttctttcctcgctgctggaagaacttctcccaatagtcaacggagccaaactccctggaacttttaggtaagaggttcatgttcctactgccgaagctgcgttttcaagactcccctattccctgtgagataccatttgaggagcttgcccaccacacgcaggctccgggacactgcagtgggaattctttccacggaaaaacagccacattgatttgttcccccactccaaaccccaggaatgacccttacacgacaaacgcacgcatggaccactgaatctcacacacgcttgccccctcctccgcgcctgctgttccttccccacgtgaagagcccctcacacttttcccgaactagatttccgatcccgggaattccggaccggtaccagc

SEQ ID NO: 433959 - DNA, 1068 bp, Homo Sapiens
cagtgatggattcaagcctcgtgaacgaagcggtggggagcaggcacaggactgggatgctctgccacccaagcggccccgactaggggcaggaaacaagatcggaggccgtaggcttattgtggtgctggaaggggccagtctggagacagtcaaggtagggaagacatatgagctactcaactgtgacaagcacaagtctatattgttgaagaatggacgggaccctggggaagcgcggccagatatcacccaccagagtttgctgatgctgatggatagtcccctgaaccgagctggcttgctacaggtttatatccatacacagaagaatgttctgattgaagtgaatccccagacccgaattcccagaacctttgaccgcttttgtggcctcatgggtaagaagccttagaacaaagttagaatgaacttgtcagtagggaagaagggaggaagaggaaaagggagaactaaatgtggatttttaagcgagaaaatgggagaacaacatgattaataccaggacaaggactgttattatttttctatgtttgtggaaactccactcctgttcttgcagtagcttcctggctgagtgaaagagggagtctgaacccatcactgtacagctagccatatgcttggcaactgtttgttcctaacatttcaggagtccagtctagatattaagcacacagggaacttatcttatccatggggttttccttgttcgatgactgggacagaaggactgtggtctccatctagctctgaactcttttttcccccttctagttcaacttttaccacaagctcagtgttccgagcagctgatggcccccagaagcttttgaaggtaattaagaatccagtatcagatcactttccagttggatgtatgaaagttggcacttctttttccatcccggttgtcagtgatgtgcgtgagctggtgcccagcagtgatcctattgtttttgtggtaggggcctttgcccatggcaaggtaaggtctgggctcaaccctgaaattcttggtagagctgaacttagtatagaattccc

SEQ ID NO: 433960 - DNA, 1076 bp, Homo Sapiens
  misc_feature (730)..(798): n is a, c, g, or t
gggactttcaaaatggcagccggaaggaaatttgtgattagaagccgcgctgttcttatttaagagcgttagcgcaacttccggtattgttgcaagatggccgcgcccagcgatggattcaagcctcgtgaacgaagcggtggggagcaggcacaggactgggatgctctgccacccaagcggccccgactaggggcaggaaacaagatcggaggccgtaggcttattgtggtgctggaaggggccagtctggagacagtcaaggtagggaagacatatgagctactcaactgtgacaagcacaagtctatattgttgaagaatggacgggaccctggggaagcgcggccagatatcacccaccagagtttgctgatgctgatggatagtcccctgaaccgagctggcttgctacaggtttatatccatacacagaagaatgttctgattgaagtgaatccccagacccgaattcccagaacctttgacccgcttttgtggcctcatggttcaacttttacacaggctcagtgttcgagcagctgatggccccccagaagcttttgaaggtaattaagaatccagtatcagatcacttttccagttggatgtatgaaaagttggcacttctttttccatcccggttgtcagtgatgtgcgtgagctggtgcccagcagtgatcctattgtttttgtggtaggggcctttgcccatggcaagagatgcgannnnnnnnnnnnnnnnnnnnnnnnnnnnnnnnnnnnnnnnnnnnnnnnnnnnnnnnnnnnnnnnnnnnnaccacacccagcttgttactgtatttttgaatgtctgaagtgaagaatgaatctaagtggggactgcttggctcggtcattcagttacatccacagcacagagaaactgaggattctttgttgatgaggtgtctggatcgtatctattccagagtaaagtcatgatggctttatgacgttctgaggtgcgttttgcaggaggggacgttgttgagttccaaacaggtgaggtattgcacactagcaaacacatgagaagaaggcggaggaattgggag

SEQ ID NO: 433961 - DNA, 1047 bp, Homo Sapiens
  misc_feature (73)..(73): n is a, c, g, or t
  misc_feature (75)..(77): n is a, c, g, or t
  misc_feature (79)..(88): n is a, c, g, or t
  misc_feature (90)..(91): n is a, c, g, or t
  misc_feature (94)..(96): n is a, c, g, or t
cttaccttatggggccggggggccaaagaagggttttagaaagttctcgagggccgaaggggccgaccagganannntnnnnnnnnnnannaannntttttgcaagaacagtattcataggataaacaaatagcaaatgtacagccttggcttccccaaactccacagtctcagtgcagaaagatcatcttccagcagtcagctcagaccagggtcaaaggatgtgacatcaacagtttctggtttcagaacaggttctactactgtcaaatgaccccccatacttcctcaaaggctgtggtaagttttgcacaggtgagggcagcagaaagggggtagttactgatggacaccatcttctctgtatactccacactgaccttgccatgggcaaaggcccctaccacaaaaacaataggatcactgctgggcaccagctcacgcacatcactgacaaccgggatggaaaaagaagtgccaactttcatacatccaactggaaagtgatctgatactggattcttaattaccttcaaaagcttctgggggccatcagctgctcgaacactgagcttgtgtaaaagttgaaccatgaggccacaaaagcggtcaaaggttctgggaattcgggtctggggattcacttcaatcagaacattcttctgtgtatggatataaacctgtagcaagccagctcggttcaggggactatccatcagcatcagcaaactctggtgggtgatatctggccgcgcttccccagggtcccgtccattcttcaacaatatagacttgtgcttgtcacagttgagtagctcatatgtcttccctaccttgactgtctccagactggccccttccagcaccacaataagcctacggcctccgatcttgtttcctgcccctagtcggggccgcttgggtggcagagcatcccagtcctgtgcctgctccccaccgcttcgttcacgaggcttgaatccatcactgggcctcgtgccgaattcaccacccagcctcgtacctagccgaagttgtgtccctccc

SEQ ID NO: 433962 - DNA, 781 bp, Homo Sapiens
tgtttccctttgtctttggtgcaaatgtggaaaaactgatctgtgaaccttacacgagcaaggaattattccgggttttggatacaccctacttactaaatgaagactgggaatactatctctctgggaagctatttaataaatcaaaaatgaagctcacttttgaacaagtttacagtgactgcaaaaaaaatagaggcacttacggcactcttcacctgcagaacagcttcaatatcagtgaacatctcaacattaatgagcatactggaagcataagcagtgaattggaaagtctgaaggtaaatcttaatatctttctgcttgggtgcagcaggaagaaaaaaccttcaggattttgctgcttgtggaatagacagaatgaattatgacagctacttggctcagactggtaaatcccccgcaggagtgaatcttttatcatttgcatatgatctagaagcaaaagcaaacagtttgcccccaggaaatttgaggaactccctgaaaagagatgcacaaactattaaaacaattcaccagcaacgagtccttcctatagaacaatcactgagcactctataccaaagcgtcaagatacttcaacgcacagggaatggattgttggagagtaactaggattctagcttctctggattttgctcagaacttcatcacaaacaatacttcctctgttattattgaggaaactaagaagtatgggagaacaataataggatattttgaacattatctgcagtggatcgagttctctatcagt

SEQ ID NO: 433963 - DNA, 774 bp, Homo Sapiens
  misc_feature (29)..(29): n is a, c, g, or t
  misc_feature (69)..(69): n is a, c, g, or t
  misc_feature (74)..(74): n is a, c, g, or t
  misc_feature (512)..(512): n is a, c, g, or t
  misc_feature (516)..(516): n is a, c, g, or t
  misc_feature (520)..(674): n is a, c, g, or t
tgtcttttcacatcatcctcctcagaaancttcctggaggtaaacaggcttccatatttaaagggtggnataancccaagtaggatgaccgttattttgggaaaaccctcccccaaaactaattccccccctggcagtgtttctctcctaaagccctgcttttagaatctgcacgcattcgggactgctctattatgactgatgagattacttgccattgcagtggaaaaatcaaagagtgccatggtgcaatccatggggtgaatatggacaagccgcccagttagcctggcaacctagacaagcctcagtagctctctctctctgccctgttgggaggctgaagagtatgacccatagcagtggagctagactttaggtagggttattattttgatcttaaaagcatcctttgcaaaataagcaacaaaaattcataattacttgtcaaagctacaaactaatggcttatgtcaagtcctgttaatctcggcttgggatggcctcctccntgcntgannnnnnnnnnnnnnnnnnnnnnnnnnnnnnnnnnnnnnnnnnnnnnnnnnnnnnnnnnnnnnnnnnnnnnnnnnnnnnnnnnnnnnnnnnnnnnnnnnnnnnnnnnnnnnnnnnnnnnnnnnnnnnnnnnnnnnnnnnnnnnnnnnnnnnnnnnncagaaggggtgcgagctggtcacgagcaccaagcagggggccggctggctgactcccttctctcacgtgaggtgctgaggacaaggatctaccaagtcat

SEQ ID NO: 433964 - DNA, 1431 bp, Homo Sapiens
  misc_feature (44)..(297): n is a, c, g, or t
  misc_feature (382)..(433): n is a, c, g, or t
gttgaccaagttgctgggttgttttgttttgttttgagacagannnnnnnnnnnnnnnnnnnnnnnnnnnnnnnnnnnnnnnnnnnnnnnnnnnnnnnnnnnnnnnnnnnnnnnnnnnnnnnnnnnnnnnnnnnnnnnnnnnnnnnnnnnnnnnnnnnnnnnnnnnnnnnnnnnnnnnnnnnnnnnnnnnnnnnnnnnnnnnnnnnnnnnnnnnnnnnnnnnnnnnnnnnnnnnnnnnnnnnnnnnnnnnnnnnnnnnnnnnnnnnnnnnnnnnnnnnnnnnnnnnnnnnnnnnnnnatgggccaccacacctggcctcagctgttcaattaaaagtaaatacaacttaaaattctatgtttcattggcagtagtgcaacannnnnnnnnnnnnnnnnnnnnnnnnnnnnnnnnnnnnnnnnnnnnnnnnnnngtacagaatacttccatcaacatagaaaattctatcagtctagctctaggggcagatagtccttccactgacttgggcaagtcactctacaaatggcatctacctcacatggttatggtgagaattcagcgtatgtatgtacatgcaggcacacaatatgcacacagacacataacatagtacaccctttcctgaaaagcctgacacatggagctcaaacatgagtgccacccacccctgggcagcaccaagatggctctagtctgggtgcctttgtctcacccccatgcctttgctcggagtgtgctcctcatttttctgccactttgaccctgtctctgatttggtcctgtctgacatcactgctatatgctttgctcctctcaatttcctctgccctcatgccagcaggagtcatgccagagatcatatctgagaaagcaagacaattttgtgtgtgtgtctgtgcccatagaggagtgctggttgtgttgatatagttgtagattggttgtgtttacacagttgtatatattgacacccttgagtgttatgacttcttttgggggtggtcgccttttaaatcataacttttaatgggattccattttagtctttgtgaagacataaggttgttggcaggcatctgtccctgggagcatccaagcagaaaagactaagactcccttgtagacagatcactggccgccactgaagtgtgtctgcatggcaccacagggctggaagacccttgaaggcaggaattcaaggaaatgtatgatgaattttggcattgccatcaaaagcagaacaggcatggaaaacttgggtgagtgggcgagacaacctcctcaccacagcagagttccatccatgcctggataatgagggagggatttgtgtccactgcagtggggaaccatgaaggacacatcaagggtgtggttggcctgtggtgctctttggaggaatgaataaaaatgaatagaaatccaaaa

SEQ ID NO: 433965 - DNA, 1367 bp, Homo Sapiens
  misc_feature (116)..(131): n is a, c, g, or t
gttctccaatccatgaagcaatcctgaaaagacagtgttttattacaaaattaggcaaatgttccgtctccatcctttctttctttttctggtatgtgtgtatgggtgtgtgtggnnnnnnnnnnnnnnnnctcccttctctcctttgccctcacaacacggcgagaggaagccaatcacatttttcagtttattaacctggctggcagtccaatcacactgcagagtgaaaaaggcttctggcagcccagctctgcccagctcactgtgccttggaggcggtggtggtggtggacgcagccccgctggcagaggccactgtgaagagagagttctggatggactcagcagaggtggaggtggcgtgaagtgaatccaagtttgattcgtctttgtttgaaggtcttggctaactgctcaagctcctcaaggtcactgggctcctccaagctgggagtatccattcgctttggtgttgactggctctgtggaagtgtctgaattggggttgctgctattgtgcgtgttggggttgctggctgggaggtgagggtgatgcttggctgcgactgtaggaggttggcttggctttgctgaggtagttgcgttagaagattttgcgcttgcaggagaccctgctggccctggggcgtctgtgagatgataaactgcgctggctgcaaattggtggttggatgcaccaacacaaactgttgcaggttgagattctgctgttgaagctgttgcagttgttgaagatcctgtgcgatctgtatgggctgagacagggggatctgcgtcatgggcgtggcagcagaggcggagatggtggctccagcagcactgtgctgctggctggcggagtgctgctgcactgcagcagccagcagctgtgcctgtgcctgtgcctgctggagtagtaactgttgctgggcaggcgtcaaagtaagcccagttatctgtcctccagctagcataagctgggtctggggaatggctgcctgcactgaaggctgctgggaaggctggcttggctgctgcgaatcccccgattcttcattagatttagactgtacatttaaagactgagcagcagcctgtaaacttgttccagcgagttggacctgatggagatgtccaaggaaagcctgcgcctgggctgttgagattgctcctcctacaggcacaggctgcttctgaaagtccagaccattggtttgtgtgcctgtgttgccatctccactctccatagatggtttactggtttctgacggattgttcattcttgagtctgctgctgctgccgccgcggctgaactctcatcttgactcgctgctcctccgtccgccattttgaatattttttc

SEQ ID NO: 433966 - DNA, 1160 bp, Homo Sapiens
ggataccttcatttctgactcaatatcctagatccaaaggacaggaaattagggaaggcttcaccctgtgggatcaagataagaagatcccatacttcttcccaggtaaggaggcctgtggcaggtcatgattcaaagctgacttggaatggcagaaactgctgagaggccacccttgcagatttgtgccttcaaagatgggtttcatgagtctcagagaggaaaagacttgtcagctgggttgattttgcatgattattgaactagagctggtagacacgagcttctcagatggcagtggccagatcctccatctgtgagaatccgccacttgaagtggtttcctgagagtgttcacttggcagttgctgcgtttctcaagcccacctggcaaggtctcgccggacccttccctccaagtgcacttacttcttcatccccatgtacatctctaactttgagattgtttacctctcctacaaaaatcttaccttttgacctgagcagagtagcaaagccctgttcactctgagggagcagctggcgtgttgaaggggaaaggccaggcacagcactgtcctcagaccacaccatatttggagcagaattgtgatacatgtcatctgtgtctattctggaaggttctttgttcatcactgtactcgcatcagcaaattttcagggtcctacctgtcactccaggctactgagctgaaccctcagaagctgaggtctccgagcatgctaagtaaccttttagaaaagctggaggcaaactgtcgaatgctagcaggctttatgaaaggaaacataaggagtttgtgtagtcagaacttgcttaaatttgcttcggaattaggcaccataaactttagttggagaatgggacttaaattttcacatatatgtatacttaattttcagcaattatgacacaataaaaagaatatgcaaatttattgttgttttcagaaggttttgcaggactggggaacgctttagtgttcattcaacagttaaacctcaggtactgttctggcacagtttcaggaagtaccatacccgggtattgtggagtgggcaagaacgccgggagacagagatgcttctggtaggtgagggccagagaaaccagctctcctcctttttgacagcatttt

SEQ ID NO: 433967 - DNA, 1677 bp, Homo Sapiens
  misc_feature (144)..(144): n is a, c, g, or t
  misc_feature (270)..(270): n is a, c, g, or t
  misc_feature (1545)..(1545): n is a, c, g, or t
aggttttccgtttgggggccagggaaaggggtttaattggttaagcccaaaattggggcccagggccccagtttttcccagaaggtttttcagggggccaaggccaggggaaatgtggtgcccttcctctgccccagacccttntgacctttgaggcagggcctgtcatgcctctgggtgctagagcagagacccaggcagcagcagcatggggtggccaatggggcgggttccacaggatgggagatagggcctcccgtgccctgactncctgagggtctggtcagtcgcgatgggtagactggtggccgagctgccggtcatcgtaagtgctgtagcgcttgacgtggatgcggcggacacggtcccgcagttcaaaggtctcctcatcttcactgggggaagccctggctgcggcctacggctttgtggcctccaacaaggagttgtcggggacgcggtgagtctcatagagtaggacgttgagtgtctcctcatagattcgggcctctgggaaattccaccttggtctgcttcttctccgtggcatacacgatggaggtacagcacacctctgccagcttacggccctggccataaaaggaccagcagcagatctcgtcaccaatgacatccttgatgaagagcacgcggccgttgaagcgcagggagagcttgtcaaacagctcgatgtttttcagcaggtggtcgtcagagttgctggtgtaggaatacttgttgttgcttctgttgtacagcagcttcaccacgggcttggtggaggattcgatgagccgctcctcctcctttagggatgtgatgatggggatgttgcacacaggctggtaggagtccttcttgtcctgcagggcactctggcacatattcaccagcccctggatgaggtaatactttgcttcagccatcaattccttgatttcttgccggttctgagggagggtgatggtgtcatctcggaggtaattcaaaatggtgccaaagtgctttccacaacggtctatgaggatccagccttctttgtcggtcagcacctccatgcgcccactgaacatggccttgagcatggtgtcgtggcgggtcagggcccgcacagtggtgtagtacagagagccgcccacgttgagctggacatacttgttgcccaaccctcctcccttgaagccactgagcttgggcttggcccctgaggctgggcacaggcaggtgtcccccgacatctcccgctgcaggtagatcaccacacggcaggaggtaggcttggaaggctccgccgtggtggaaagggtcacgagtgagtggccagtggaggccagagcctcataatctcagtgcgtccccgggggcgcctctcctctcagctgggtggccagcggactccgagccgcccctagcctgcagccgcctgcccctcagcagtcccaagctgtgagctcacatcctgcgctcgtcgactccgcccggagtgctgcccagcccagccggctggggagcctgagactacaagtccctgcatgcatagcgctnctatccgggaaatgggtggaggcggaatcccccgagggtcttcgcggagagagcagagctacttctggccgccttgccggcgctaaggcttctgggtcttgtaggccggcctcccctcggcctctgtttccc

SEQ ID NO: 433968 - DNA, 613 bp, Homo Sapiens
cccctccctcagtattgattctgcagggaagtggggattagggtagaaagacatgggtcaaggagattatcaacctcctgaataacagtacaaagtgctttaaagaaacagatcccacaggcatggagaagggccaagggttctgtcatatgtagggtcttggcaccctggagggcaaaagaaatgctcagtttcctcattactagatttagaattattcatttcctagattattttttaaaaaccaaacttatcaagcctgtgcttaaacaccttaggaaaaaagacgtcccactttctgcaccagggcctctacagcaccagaactgcctttcccccagctgaggcctaaggggcagtagcccttctgcacagggcctaggggaaggttctcagcaggaggtgggtcagtccatatgccccagggagcagaagcagctccgtcgggcaggaagggtgatggtgagcagataggacaggacgcagtttccagaagtgctcaggggcaaggcaggggaatgtgggtccctcctctgcccagaccctctgacctctgagcagggcctttcatgcctctgggtgctagagcagagacccagggcagcagcagcat

SEQ ID NO: 433969 - DNA, 511 bp, Homo Sapiens
  misc_feature (330)..(330): n is a, c, g, or t
  misc_feature (447)..(447): n is a, c, g, or t
  misc_feature (457)..(457): n is a, c, g, or t
ttttttttattgcttcctctttatcccctccctcagattgattctgcagggaagtggggattagggtagaaagacatgggtcaaggagattatcaacctcctgaataacagtacaaagtgctttaaagaaacagatcccacaggcatggagaagggccaagggttctgtcatatgtagggtcttggcaccctggagggcaaaagaaatgctcagtttcctcattactagatttagaattattcatttcctagattattttttaaaaaccaaacttatcaagcctgtgcttaaacaccttagggaaaaaagacgtcccactttctgcaccnggggcctcttacaggcaccagaactgcctttcccccagctgagggccttaagggggcagttaggcctttcttggcacaggggccttaggggggaaggtttttcaggcagggagggtngggttcagtncctttttggccccaggggaggcaggaaggcagtttccttcgggggcaggaaggg

SEQ ID NO: 433970 - DNA, 767 bp, Homo Sapiens
tagaaaactgagacccagagaaattaaatgacttgttcaaggtcatgcagttatttaatgacagatctgagaccagaacacgagtcttttggctattagtctaatgcattttctaccacacccactgcctctgagagcagtgatgctttggagaagatccatcaaagaatccatactgtaattggagacatagtcttatatgtcaatacgtatatgtcaatactacttggacacagcccttggaaatcacctgactgtaccaatacaaaccatactttggaaaccaccattctctgggtagaaacatctatggactatcaattttgtcagaaatcagtgaacaagtgaagagtcaattttttttagtcaaatattttctcttctcaatgaagagaagactaggacagtgacattttgaagcataccttttatactccttgtggttcttatgacagtctgtgatggtagtagggtaaagtaggctaaatccttgattcagagaggggaaaacatgtggaaagaaactgaacgacttatccaagttcacatgacaagttagtggcagaaccattattgcaatccaggacttaagacatcttgtcctaggatttttcctccacattatattgcactgctctgaggcttgcttatatttttcatacctggatttccagggtggtgacgtgggggagggaagtattcaattcagaaccaccgtgaaccaagatctctggaaccaaactctgtactatttctccttcatctct

SEQ ID NO: 433971 - DNA, 1065 bp, Homo Sapiens
  misc_feature (574)..(574): n is a, c, g, or t
  misc_feature (870)..(870): n is a, c, g, or t
  misc_feature (890)..(890): n is a, c, g, or t
  misc_feature (898)..(898): n is a, c, g, or t
  misc_feature (901)..(901): n is a, c, g, or t
  misc_feature (915)..(915): n is a, c, g, or t
  misc_feature (918)..(918): n is a, c, g, or t
  misc_feature (930)..(930): n is a, c, g, or t
  misc_feature (937)..(937): n is a, c, g, or t
  misc_feature (947)..(947): n is a, c, g, or t
  misc_feature (951)..(951): n is a, c, g, or t
  misc_feature (958)..(958): n is a, c, g, or t
  misc_feature (961)..(961): n is a, c, g, or t
  misc_feature (970)..(970): n is a, c, g, or t
  misc_feature (975)..(975): n is a, c, g, or t
  misc_feature (978)..(978): n is a, c, g, or t
  misc_feature (984)..(985): n is a, c, g, or t
  misc_feature (990)..(991): n is a, c, g, or t
  misc_feature (1000)..(1000): n is a, c, g, or t
  misc_feature (1007)..(1007): n is a, c, g, or t
  misc_feature (1017)..(1017): n is a, c, g, or t
  misc_feature (1025)..(1025): n is a, c, g, or t
  misc_feature (1027)..(1027): n is a, c, g, or t
  misc_feature (1030)..(1031): n is a, c, g, or t
  misc_feature (1039)..(1039): n is a, c, g, or t
  misc_feature (1050)..(1050): n is a, c, g, or t
  misc_feature (1054)..(1055): n is a, c, g, or t
  misc_feature (1062)..(1062): n is a, c, g, or t
tttcctcccctccccctcctcccttatcccttcgctttcgctcttttccgtcgaggccgacccctgagttgtgagtctggggtctggttggtgaaaaagagcccttgaagctggaagacgggagaggacaaaagcatgtcttcccttcctgggtgcattggtttggatgcagcaacagctacagtggagtctgaagagattgcagagctgcaacaggcagtggttgaggaactgggtatctctatggaggaacttcggcatttcatcgatgaggaactggagaagatggattgtgtacagcaacgcaagaagcagctagcagagttagagacatgggtaatacagaaagaatctgaggtggctcacgttgaccaactctttgatgatgcatccagggcagtgactaattgtgagtctttggtgaaggacttctactccaagctgggactacaataccgggacagtagctctgaggacgaatcttcccggcctacagaaataattgagattcctgatgaagatgatgatgtcctcagtattgattcaggtgatgctgggagcagaactccaaaanaccagaagctccgtgaagctatggctgccttaagaaagtcagctcaagatgttcagaagttcatggatgctgtcaacaagaagagcagttcccaggatctgcataaaggaaccttgagtcagatgtctggagaactaagcaaagatggtgacctgatagtcagcatgcgaattctgggcaagaagagaactaagacttggcacaaaggcacccttattgccatccagacagttggtttctcattttctttgatgatggctatgcttcctatgtcacacagtcggaactgtatcccntttgccgggcactgaaaaanacttgggnggncatagaagacatcnccngccgggacttcntagaggngtatgtcacngccnaccccancgncccatgggnctgcncanagtggnngcttnnaaagactanagtgggnaggacgtggnggagtccncnttnngggggggntggggcctgtnggannctctccnggt

SEQ ID NO: 433972 - DNA, 2100 bp, Homo Sapiens
  misc_feature (46)..(55): n is a, c, g, or t
  misc_feature (202)..(202): n is a, c, g, or t
ggggttggagggaggaccaggaaatatgtgggggtcccagtatttnnnnnnnnnnagtccctggaaggtgttttcagagagtccgttttctttctggccccgggtctccctccgggtagcatagctccccccacactgaactggtgctgaagtcctcatccttccagaagttatcatctgagctatcatcattggactcttncagggtcctctgtaccgctgttgccatcttcctggtccttcaagtctacaccactgctgtcagaggaacagggggcatcactttcatatcccttctttgaagttttctccgctctcgatatggtccagatttgcaaagttctcatcaccccatttccagaccttccttgtctgcaaagtcatctgtcaggattttgcctgcataaatacaaacaaaagagcctttggcaatgtcatccaagcagcggataccccagcccttgttctgtgtcttgaatagctgtagccgaacttgtagtccatgttgcaccaaccggtttgtgcacatgtttgggtcacatttgcagcgtttgttacactcatatacccctgtgggtagacactcttctagtctcttgtactggtagccagagttagggttgatttggcctcctggggtacaggctgtagcctggatagttagttgatggcaggcacacttggacttgtcccgacacccatccttgcagtcacagccaaccagaaattcagggcctgtgttaatgaaaacacccttgcccgggatacgttccttgctgtaggccacctggggtggaggggttgtgtcaatctcattgacacaggataggggaacatcttccttcccataagtgatgtccaaaatatagtaaaaaggcttatagggctgaaactttcggtccacaagaacatatggatccaaacagaacatctccaggaagaggaagtcacagccagtctcgaaaaggtagcgttctatctcctgcattgtccgaaggcagagaccacaaggtgtcttatagataacatgaaagcccatcttgcggttaactcgacgccgggctgtcatccgccggaagtcatatagtaacgggaccagcagagggttcttgccccggtactgctcattcctcataggtctgactcgagacagacaggtatagctgcagacatgaggtaagtagaaaagcttctccatgggagcacggtaggagggctctgctggggcccgctccagcatgccatggaagactgggggtgctggaggggccgggagtgctgagggtgctggggcagaggctgtggagcctaaaggtgatctatatgtctggttgatcccgggttttcccagccagagacattttccactgagtgcaggagatgtaggggaggaatgaccagagcccacagatcctggtcgaaaggacgtgctctttttggctacctgcttccgtgactgggcaagctggctttccaagctttcactgtcacctgcttggggggatagaggtggagcaggtgggaaaggtggggcaggtggagctgtaggctgtgggggttccactggcttgaactgggttccagtaccggtcagatcctgtgtgtactggacaacagggcctttgctcctcacagcacccatatttggacgtgtcctgagctgtccttgcttcttctccagtgcagaggctgaggatgttttcatgctgaacatgggctccagccgtgtagagcctcgatagatccactcacatcttttgtcatccaggaagaggatcctgactaggctgccatccacctcctcaactcgggacttccaccacgtgccttcccactcagtcttgataagctggccactcttgagcagtaccatggggcggttggggtaggcagtgacatactcctctatgaagtcacggcaggagatgtcttctatgtcctcccaagtctttttcagtggccggcaaatgggatacagttccgactgtgtgacataggaagcatagccatcatcaaagaaaatgagaaacctgagcttgtttttgacgtttggtgtctcagctacaatgccagcatagagccagacctgattcccatctt

SEQ ID NO: 433973 - DNA, 671 bp, Homo Sapiens
aagtgtggggaagttataattcagataatttattttcaacaatgacctgcagaggaacaacaaaaagggcaaagtaaaatttgaccaaaaacagtgagaacacatacgaggataagaaagaggaaggctatggaatagctataaaaccatcctcattactgcttcttaagttccccccccaccaacctctgcctccaaaattgtagagaagaacagtaccaggaagaggatcctgactaggctgccatccacctcctcaactcgggacttccaccacgtgccttcccactcagtcttgataagctggccactcttgagcagtaccatggggcggttggggtaggcagtgacatactcctctatgaagtcacggcaggagatgtcttctatgtcctcccaagtctttttcagtggccggcaaatgggatacagttccgactgtgtgacataggaagcatagccatcatcaaagaaaatgagaaacctgagcttgtttttgacgtttggtgtctcagctacaatgccagcatagagccagacctgattcccatctttgtatttggcgaccacccgactgcccacatacagcttgtcagcaggagggtggtaatcataggcaatatggttccccgacagtagactctttcctttgttgtcaaatttcaccttcc

SEQ ID NO: 433974 - DNA, 449 bp, Homo Sapiens
  misc_feature (36)..(36): n is a, c, g, or t
  misc_feature (45)..(45): n is a, c, g, or t
atgaaacaaataaaaactgtaacctccttttggganccaaactgnacctctgggagccaaaagacatcaaccaaacttaatgcctctttgaagactgaaataccaaaaacactagggcttttcaactggatgtcctaagaagaaatacaaggtagaggagaaaactgagctaaggaataagggagaaaacactcacgtggccggcaaatgggatacagttccgactgtgtgacataggaagcatagccatcatcaaagaaaatgagaaacctataaaagaagagtgacagcagaaagatctgggggttatgatatttaacatgatccacagaaattattttatcatagcttctacttctctggatcacaacacgatgcactccagggaagacaatccagtccactactttcttcctgtttttctttcttctcaacttgagagttaggag

SEQ ID NO: 433975 - DNA, 1209 bp, Homo Sapiens
  misc_feature (1099)..(1099): n is a, c, g, or t
  misc_feature (1180)..(1180): n is a, c, g, or t
ggctggtacggtccggacttttcgggatatcgtcgaccacgcgtcagccacgcgttcggtattgtctctttcaatcagtcggcatcctctgtttttgttcttggtgagagaaactttttttgccttaaggataatggacaaattcgattcatgaagaagcttgattggagcccaagttgttttctgccatattgctcagtttctgaaggaacaataaatactttgattggaaatcataataacatgctgcatatttatcaagatgtgacactgaagtgggccacccaacttccccacattcctgtagcagtaagagtgggctgtttgcatgatttacaagggagtgatagtcactctgagtgatgatggtcacttgcagtgttcatacctggggacagatccttctctgttccaagctccaaacgttcaatctcgagaactaaactatgatgaaccttgatgtacgaacatgaaagaaccttcagaacaatcatcaaagatgttaaccaaatcacaaggtgtttggcccatgactgagagacgaagatgacttgaacgtttctgtcgtggtttctcctaactttgattcagtttctcaagcgaccgatgttgaggtgggaactgaccttgtcccttctgtcacggtgaaggtcacactgcagaacagagtgctattgcaaaaagccaaattatcagtctacgtgcaaccaccattagaattgacttgtgatcagttcacctttgaatttatgaatcgaaatcctgatggcattccgcgagttatccaatgtaaatttagacttcccctaaagttaatttgcctaccaggtcagccttcaaaaactgcaagccacaaaattactattgataccaacaaatctccagtcagtcttcttagtctcttcccaggttttgccagtcagtcagatgatgatcaggtgaatgtaatgggttttcacttcttagggaggtgctcggaattactgttcttgcttccaaaacttcttcaacggatattcgcattccaggagtggaacaatttgaaggatctttgggcttcattaaccaatggaggcttatttcttcggctttcaaggantatttttggaaaaacaggggagtccaaaggattttgccaggttctttttcgggggtctataaccctttcaaggatattttngaggtggatggaccatcatttggaggcta

SEQ ID NO: 433976 - DNA, 2101 bp, Homo Sapiens
  misc_feature (354)..(376): n is a, c, g, or t
gaccaaggcccgggcaaggccttggaaagccccccccttccccattcctttgggcccgggggcctgggaaggccccccttttccttctgaaaaaacccccaacgttgggggcagccggccacccggcaattccaaccttctttcttggtccccaattcccattcccggccctgggggcctaggggacaccctggggaagcgaaacttgggtgacttctctctgacgaggggacttgggggctgcatcgccctcctgcccccgagaggctttagaaggggccgccaggcctacacgtggcaagcggacccggacccggccccggcgacccgaggccccttccccactgccctctnnnnnnnnnnnnnnnnnnnnnnnggggctgggggacctttcccccagtgaccatctcactttggctgaagcccactcggggcagcctgagtttggggctcttggccttctcaccctcctcggccccctccttggcccgcaccaggccaaaccgggggcagccgtaccttgagcttgtgtccggcctctccctccccctttgccacctggtactcggcatggttgcccccggatggcgagagctccacgtcgggcagtgagaggcagaaggtacgctcggcccctgggggctgctcctcagcaccctcgccccccaccctagctctggcccccagtgtgggcaacttcagcctcagcccaccctcgcctgtggccgcctcgcccgcctgtgcctctcggcttagccccacgtccagctcaagctggggcactgtcacggtgggcatcttaaagacaccctcacccaccagcagctcaccacctgcaacctgggctccaggcagagacagggtcacctggggcacctgaaccctgtagcctgctgtgccctctgctgaagggactgtactctgagcctgctgccctggggtacctgcctccccaaagccggtcagctccacctgtggcagggagatgcccagcggaggcatcctcagccccgcgtcatggccctcagtgaccacctgcctggctgtggacaccttcaggcctgacagctgcattccactgacggccacagccccctctgccctcccttcctcctgggcgcccagcgtgaccagctccacctcggggatcttaagctgcacagcggtggactcagccttttccccccggctggcacgatcaccttgaacttctgcttccttccctcgagccagcccaaaggaaggcatcttcagcttgggcatcttcaccctcccatcccagccccagcccttgccctccaactcagccacccctggcactagttctgctgcctcagtgtcccggcctctgaccccaaacttggggagagcaaacctgggccccttgaacttgaggtcggcccctgccacctctaccttgcctgagggcaggtgggcatccaggctgagctgtgggatggacagatcgagggcaggcagcaggcctgcctccccagcccctttggcctcagcctcagcccccacccgagccttggggagtgagatggcaaatttggataccttcagcttggtagctcgcccagccccctcagcctctgccttagccacctttggccccgagagtccaaacttaggtaaggagaacttggaagagggcttgacttttgtctccatcatctccagccgcccttcctcaatttccacggcgggcagctgtggggtgacaatttcaacagagggcactcggaagcccacttccctgacccctgctgccacctgcgggccctcagcccgctctcccttgcccattttagcggctgggacctgcccctgcaggccaagtgctcctggcaggtctagctccactgaaggcagagtgagagagggacacccacatgagcctcaccatccacctctggctgcagacagggaagtgttaccagcttccctgagacctcagcacccgcctcgcctggcttgccacgtgatggggactctgccctccctagcttgggcatggtcatcttgggcatcttgaagccaaattccatcccttctgcctgttctgccttggtggcctttagctgcactccggagcccc

SEQ ID NO: 433977 - DNA, 714 bp, Homo Sapiens
  misc_feature (634)..(634): n is a, c, g, or t
  misc_feature (692)..(692): n is a, c, g, or t
  misc_feature (698)..(698): n is a, c, g, or t
cttgcactctgcagtttaatttcccttaagtgtctccctggggactctggaaagagtgggaaggtgagtctgggattggcagggtgctcagggatccaaacatcagtcgcccccagcagccaacagcagaagacagcttcctgtgggacgggaggaaggtgctgtggaccccacccagcctctcccaggaagggagctggcagccattccacagcccgagcctggcccagcaagggagaagctcagctcttctcccctccggcctcagcaggctgctcagggactcagcctggggtcacataaggcctttccaacaggccactctgcatcccctgtcggcctcccaaatggtgagaccaagagtgtccaggacatggggaaactggaaggcagcagcctcgagggccgggtccaggatccatgtcctccagtgaaggcctggcgcccttggccgtaacccagcagaggaaagggcgggccgtggacttggagaaggttttcccttggaccacacagaatgcggcactggcctggacacgatcacgctggtcactcgtatgcccatgttcagcctgctcagggagacaggcccggcgtggagaacagactacaggagcagcaggctgaggcacgnccccaggcaccccgtgaggcgggcagggcagggaagctggtgctccaggatgcgtttnctgccngcgcaccaggcttttg

SEQ ID NO: 433978 - DNA, 450 bp, Homo Sapiens
cgacgcagcaaagaaggtggcaactcctcccaacaaaaccagaagcaggccgcttccgcagccgggaggaagcactggaaagctcgggatggtggcagaccggcagaaggaactgggacaagagccagagtgtgtgctcgggaaacccatccatagtggtggaaggaccgggccagctatctcaactacaagctacaagctcctctaagtgaacccacgctgagccagcatactcagggtaagtccttccagcttcctcaagctcagacaagttcaaataaattcaaaaggggtggtataacagatcccagtgccccacactgtcctgatttccatgggtgatttgggctgggtctcaaatcatcgtgactgtgaatgtttgctggggcctcattctgtgatcctccctctgggcctcctcagaggaaggatcccagcctcagtgcaggg

SEQ ID NO: 433979 - DNA, 1542 bp, Homo Sapiens
ccatgtcacaggtgaacgacattcctggtttgtttactgctaccctttcctcagcaggctcctggttggtaagcttgagggactgaatggtttcttgcaaagacttctgtacctttcttgggaatctgctcccaggagctgagcaagtgctccagcagaaggctggactgtgacaggtgcttagggtacagctgcctccagacgctggcactgagggggtccaccgtcaggcactcagtcaggctgctcaggagctgaatgtgctgtctcttgggatccatcttctgagggtgaagctcgagtgagcggggcaggcagctgtcaacagggagctaaggaaaagcctcagaatgggctctctttcttcatctcagggggacagctaggggtggctctggacaggaaagaagggaagtaggtatgcagggtggaatccggctttgctccaaatgccagcattttcagtcgggggtagagctgacacagctgctcctgcaggctgggtgtcagggagttgttcggcatataggcaaagtccagaagtgggaagaagtccttggggccaatcatgccgaagcccttggtaaggttgggatgcatcaggagcagccgatccaggtatgtgatggcaaagggagacagagacttgatgcccagcacaggcagcatgatccccagccacactttcagtccctcggtgaggttggcaaaacctgcttgacccagggcccacatgatggtgagacactttgctggtcggctctggtgggacctcagcagttccaggaacttgcctaggtttgccgtggcaatcttgggcttgtcttgcaggatggcctggatacagatgcggtaaccatgtagtgactcccctggtgtcttatccagctcttgcaacatggtgaacagacagtggtcaaaaaagagctccagagaccctgctgccttcgccagcagccctcggatgatcccacgtagctcccggctcaccaggctgtagggataatcatgagtatgctggctcagcgtgggttcacttagaggagcttgtagcttgtagttgagatagctggccaggtccttcaaccatatggatgggtttccagagaacacactctggctcttgtccagttccttctgcaggtctgccacatccagagctttcagtgcttcctccaggctgcggaagcggccctgcttctggttttggttgggaggagttgccaccttctttggctgcttcttgttccctggtttcttaggttccacagcagggggtgggacctgctccttattctgccgcttcatgatattctcaaagccccgctcataaagggtgcttgtggtctggattgcaggggtcaggtcgtatttccacactccgtttgcttccccgagcgccctgcggttcctgccgcctcctcggccgccggcgccggcgccgaccccaggccgccgacccttcttcactacctcccaccgccccacgcccgccgtcttggtcgccatggctcgcagccctccctcctcggccacttcccc

SEQ ID NO: 433980 - DNA, 2200 bp, Homo Sapiens
  misc_feature (178)..(273): n is a, c, g, or t
aatatccccagagcccatatatttcattggtccacggggattctttcttttggagaaccacagggtattggacccactgtttcccgttttcccttcaggggggccgcccggggccacaaacgaaaagggttttagaaaaagtttttttgaaggggcccaaggcggcccgaccaaggcnnnnnnnnnnnnnnnnnnnnnnnnnnnnnnnnnnnnnnnnnnnnnnnnnnnnnnnnnnnnnnnnnnnnnnnnnnnnnnnnnnnnnnnnnnnnnnnnaatctgtgtcctttattccacctggtagggcatacccaagaaccatatactgagtcctgtctcaggttgatggagggttccctgggcccaaggcacacaactgcctgtgctctgctctacagatgataggagggatggacagtggagagaagctgagccttgtgaccaagacccccagcatgatggggaatggaaagttggaagaagtaggactacaagggaggggacagggaggggcttagaggcatttggggcaggctgggcattttgaagtgagaggcatttccatccagctccccatgtccactgacagccacacccaggcttcaggtggaggtgaggctgctgtttcccaatgcggtgctatattcttctggaagcccctttccttctgctgtggctagagctgtgaccaagaatgggaacaggaggctgctaaagtctggagaagcaggaatcatttgtcagaagaacacagaagccacctgctgggagttctatctttttagagatgagctgtttggggtttagaaatgagatggaaggaagtggaaggcagagggcaagggcggagttgtgagaggctaccagcacaaggatggaggctgggggccatgtgcagtagggccagaaaagtgttcagtggaattgtgggtaggaggctgagatgctgctgggccctgtccccaccaaagatggaagaactgaggtggaggcaactggccacttgcctaggagagaactcaggcaccaagttaaaaagactcccatgaagaactgccaccttctacccgctgcagtcttggatggtctacccatgcagaaatcagtggccaggaaggcagggcctactgctgggatatcagggcaagtgcccagtccaagaaagccactgtaatgtcctgtaggcaaagccaggtccagtggacagcctcactgagctgtgtcttcatgcagtcccaggtcacctcacctctgcatgcctcatggcagtgctccctgggcccaggccagggcctcaaagcaagaggtgccacagtggcagcagcacattctggtggaaaagcaggggcagctctctcagatagcggagtagctgattcacggaatcggggagctggatctgtagcctctgagagagactggtgagactgtcaccaaaccacgcaaggtgagaggcacagtgggcagaaaggaagctgactgtggcattggtgtgagcccaggccagctgcaagctgggccgcaccacggtgagcaggtgggagccccagagcggcagtgtctcccccagccagctgtagccttgcagactgtaggagtagagcttggcacacgcttgttggctagcaggtaagaagccagatgatcgaagcaaccggccagtaagggaggcctggaaggagctgtgtgaccggaggtcatggcacaggaagcctacagcgaagaccagcagcaacaggaggagccgcgtccagggcagccgaggaccctgaacctgctgcaacaggcccttgcaggccatgtcacaggtgacgacatcctggttgttactgctacccttcctcagcagctcctggttgataagcttgagggactgaatggtttcttgcaaagacttctgtaccttcttgggaatctgctcccaggagctgagcaagtgctccagcagaaggctggactgtgacaggtgcttagggtacagctgcctccagacgctggcactgagggggtccaccgtcaggcactcagtcaggctgctcaggagctgcacagcacgacagagggagaggctgctgggggcatggggctggcagaggcggggagtgctaagaggtgatccccttcccgtaagcaaggccatccaggccgcacatccaccctgaatgtgctgtctcttcctcgtgccgaattcgccacccaggcc

SEQ ID NO: 433981 - DNA, 1211 bp, Homo Sapiens
agatgttcccaggacgcgagctaagtctgcccggccggcgcgcgccgcttccgctttggtgggaaggacctcccttcccccttatagaaacactttctccaggccgggccgggcttggtaaacctcagccgtgcctgggtagaggacgccgggctgggccgagcgggggtggaatgagggcgtctagaacagagaaaactaagatggggtcgtccccccagtaatctggaaaacagttacagcaacaggctcctctcatcagacggcagtgctggtcgtttcctcactggtttgcggggaaggctgggcagaaaaaggatgcaaccttgttctcaaccacttgctatctcgtgattcagggattggatgagtctctatggtttgttttgccctgaagagcagaaggcttcgtgtcccaactggttgttgccaaaagcaacatattaattccatgccatgatcctgggtcaaagatctgcacaatctgattgggcatgtcacctcggatggcaagggagtggaagtggtcaaaatcatggagtcccagctttcggagacgccttgcagctgcccggtaacacttccagggttggggctccacaaggaggtagtggcagagggaggaaagatgggccaggaactcccataggccatggtctccatgattcagatgaatccacatggttattgacatgcagaagcccaatgtcaaaaactgaacgtccaaattggcttaagaaagagctcaagagaaccttccgggtcctttgattcatgaagtccagggtgataaaagtcaaggcatcaggaaaaggacattctttttcggctcgcttcaccaggactggatctatgtcgcagcagaggagacggaattctcttgaggcatctgagcaggtttccccgtcaggtagggagaggaagtgtttgtatagagccacactcagatccccggagttacaccccacgtcgagccccagaatcggcccgttctcgggactctcaggaaagagctgtcgaagcagctccgggggcaggaggcggagccgttgctccggagggtggaagcgagaataatgaggaaaatttccgaacggggcggcgccaggtgccagaactcgcgattcctcttccgctgcggtctccttaacactccctccatccagttccgtgggcaccgccattagcctcaacacagcctctgggccccc

SEQ ID NO: 433982 - DNA, 503 bp, Homo Sapiens
aggtgtcctgccctcacatctgccagccctcaggccggccaggtctcccttcaaaccctgagtatttgccttcctcacttctgcgaagaggggaacagaatcttgaagcttgcaaaatcgattctggaaaaagcaggcaagcaaagcagggcctgtggggggaagcagcgtgagtcaggcctcaccctggtgcaagggcaccagcaggtctccctcctctcccctcctcaccatccctacgcgtctcctcaccatccctacgcgtgactgactttcctgataaaaatgggatacttcctactgggtgtcagcactgtcatcctaaggcaactcagacgtgatagttttagactatgatcaaatctcacacaaaccattatcagaatcttgtttcacaccatctctcttttcaggcagttatgaaaagaaactctgacctggccctaaatcccatcagcaaagctgactaaggtggtctgagatatgttcttactcctaaactc

SEQ ID NO: 433983 - DNA, 2987 bp, Homo Sapiens
ggctgcaaccgtggtttatttcaaatgtgcaaagctaaatatgcaactacaaatctaactcaggaaggcctgccagtggccctgagaggtggccgtgctagggtggtccacagccagttctgattggctaggagacgttcagacccctcagaccaatccatgagtctgaagagactggggctcgggggctcattagagactcttccttatctagaaaccagaatatcttgctaaagaagaaagcagaaatcacatgggtctgggggcagggagggggtaatagaaactgttccgctggctggggctctctctcttggggtgcagtgggggagggggcagactctgtcaagcctcatatactctgcagggtggggctggtggcaaaggcaggctgggggtgctggactcaaagcctgctgtcctggaaggaagcgtcttccacctcttacggggcatggggggatcctaggagagcccaagaggatcgcagtgcagacaggcccaagctggattaaccgcagctggaatcggtggtcacccaattagcctcgcagctgagggacctctgccaccagggctagaggtcaggctgcgggcagagccctaacctgaggtgggggctgagagggtctctgcggcttagcctggccgggcattgggggctcgctctctggacctagcgggcctgatgtgaccgagacattctttcaaggggacccgaggtgacctggggcctctggcagctgctggacagcggataagggcagtttccatgggggattcttcaggggagtctaagtgattagatgcactgagcagtcggggtggaggcgcagccgtcactgtcacgggggaggccccggggtatcactgccacaagtcaccagccgcagccccgttgtcattctcgtggaacttgtgcaggtggtcagcgaacttcttggcgcagaaggtggcacagtccctctccatgctctcgctccatgccagcttgtagagcaccaggaagaccaggcagtgcaggaacagtgtgtagaagaagccgatggtgcgcgccatcttgttggagagaaccagacgccccatgctgagggtggccttgtcccagggactcaagctcaggtacttcctctgccgctcccgcttgctgaaggaggagaaggggtccaggcgctcctcgtactgggacgagtaccgcagctccgtgtcatcactgccgctgccccggccagggtagctctgcaggaacttgatcttctcaaagagcttgatgttgtcggcgcgcaggctgtccagctcactctgcagggcctggagggtgtgctgggccaggcggttctcggcctcaagctcctggttccgggcacggaagcgctccctctggctggagatgatggaaagcagtgaatccacctggccctctgggagggcaccgctggctggtgctgcaggtccgtagaatagggcagtggcctctttgatgggctctgggatcttctccaggcggtgctcagtggcaccctcggcatcgggccgctggatggactgaatgatgctcaggtcctgctccaggcgggcgatcagctctctctgctcagtggctgtggccacagcctcagtgatacggacttgcagctccgcacagcgtccgctcaggtcgctgttggagattgcggcagccgcggcgttctcggactgcagcgagcggttcttctccagcacacagcacctccaggggcttggccgcatcctgtgtcccagcgccctcggacggtgccaactccatggacttcagaatgttcagctctttcttcacctcttcatagtcagcctggcctttgagtttttcttccagttgtttgagtgtgctgtttttggcgctcagctgctgctcaagctgtgagatctggctggccgaattctcccgcagcttggtgaggctggcctggagtctctgcacgtcctccaccagctgtgcgatctcccgctccttggcggccaactcaacttctaggctggagcgggtcagcacctctatggcctgctccacgtctggtgccttctggatctgtgaggccagctggagggagtgattggccgatgagagctgttcccttaaggtctccgcctctctctgagccacctctgccctctggtttgccctttcaaggtccgtcatgatcatttcaatctcgtcggcctttgcagtagtttcttcatcgtatttggttttcaggtcaaataattctgttcgagtttgtttccagggctgtttgtaggctctgaaccttatgctcagcttcctccagctttgaggtggtggacatctgtgtctcctgcagctttctctccttttctgcaaagtcattctgtaacttctgttccttctcaagagctatggtttcggcttggttcttcagtgtctgttcatattctcggattttctctttaagtgcttttatcgtaacctcttgatttttcacttcagcaaattccttgttgtattcttccagagtttccctaagtttctggttctctgtttcaatatcgtgcaggcgctgcactttgagctggagttgctgtccgagatccaaagctggtacgggatctgggacgtcaatcaatcttttgtagacattcaagaaagctgcttcagcttccttgcttcttttactcagtgcatcaatctctccttggaaactcttcagcagcggcgctacctgcttgcgcaaatcctctggagtgttcttcttgaactcccggctctgttcgataagccgctttctggactgctcactttcatcctgccggttcgccaataccgttgcggtggcatcgagttctctctgcagctgctgtaaatcaaagcgcttccaatattgaaacatcgatcccacattggccgccatcttgagacatattgagacggagtgagcggctgatagagagggggctggagttcaggagccgccaggaggcacaccgct

SEQ ID NO: 433984 - DNA, 1149 bp, Homo Sapiens
catagcattaggcaaagggattgagaagagctgactgacctgggagaagatgtcacatccttggctgcttgaaggctcccaggtagaatcacaatactgttgaatatcccaaactcattggactggtcactggttgtctggtcccgtccttcctcaaactcttcactgtgccattcatagggactgaagcggctgaccaggaagaggacaacactcactccaatgtaggcaaaaacaatgcacatccaaatctcataagccaaaggatcaaggaaggagaagacacccggcttggatttctgtggtttttttaatcatgatggagatccccaaactcataaatggtttggagaaatctataacttcttcccggaccaaagtgatagttaagggagccacagccacatctgctcttccatagaccagctctcccaccatgccattccaggccttcgtgtcagggtctcgggctccgtattttccatcactgacaatctccagacggtaggagtagcccacgtgcttggcaatctctgccgccagctctacacagtagcccctcgtaacggtcattgccctcaaactgattggcgttcttcttgagcatcacataaggatcttctaggattgttgtgacgatgtatgttctgttctgaacacttgaattatcgcccccagcttgggcatcggtggctgcagggacaaacttatcatcttcattccagtaaccaatctttcggatgccgtcatgtttcatttcaatcacgtggagcgtgtagttggtccggcgtcctttctcattaaactgcacgtttcctgttaaaccttcaaatcgcacctgctgcagagctctctggatgtcgatcccttggccccagggaacagctgggttagccagacaatccccagcattcccccggcgagatatatcaattctctgcctccgcaggctctggaaagcctcagccatcaccttcaccccaccgtaggtgagcgcagaggtgtacttgggtctcttccagtccacccgtgtgtggtctcgagcatcactattcttccactgctgcatgatcttggccggaatagtgtctgtgtagttcaccagctggaaacctgtcacattggcgccactctccttgaatttgttta

SEQ ID NO: 433985 - DNA, 840 bp, Homo Sapiens
tttggaaagctaacgcactgtttatttgggggattggggggaagcaccgtgccgctgctcactggtagccagccagctgcaggatggtggggtagcaagtacgatgggccatgtacttctggcggtcgatgaatagactgttggtcatggcggtgacgtccttctccaggctcatgtggatgtcctcgaggttgcacagggactgctctgcttgtagaagcttctcccgcggcactgtgatggacttgtacagctcctccacctcactcaccagcttgggggtgttggggggtgtgagctggggctgaactgggctgcttcgcggcacagctgcatgttgggccggtgtgagggcaggtacagccgggtctgggctatgtgcagaggttcctccttgtccttgatggcctccttcagtgccaccacgttgtgttcctgatctgtgatttcccgcagcatcttgtgcaggtggtgctgcagcttgtgccgcacatcctccagttcctcacagcggcgcccgaaggccaggttcatggcgtcacactggagtcccaggtcctcggaggtgtcgcgaaggatgcagtccacaagcacccacaggttggccgagtccaggcgctcgcgctgggcgtggcacagattgtcctgtgtgaacttggtccgggtctctggggtggaggcgctgcggggcagagatttattcgtttcttgttgctcttggaaacacccagaggacactggaaacatagccacagggacatagaaccaagccccagggctgctcagctacacgaccgccgctgggatccgcacttccggaggaaaatggcgaagtggccc

SEQ ID NO: 433986 - DNA, 1039 bp, Homo Sapiens
  misc_feature (108)..(133): n is a, c, g, or t
  misc_feature (398)..(398): n is a, c, g, or t
ccacaaagggggtgccataggtttctcataattatgcggtgggtggtttataaagagggcgcggtcctcttgggcggtgttttgttgttggtgggcccggacaaaaannnnnnnnnnnnnnnnnnnnnnnnnnaaggcaaaccttgttggggggagaatggtgttgttgtggaaggaattgggaagtgtttttatttgggaggagggtcccacaagccgaaggaaggtttggaccggggggcacacctggggaactgccttcaggaggccccaggccagtaccctgaactggggctgctttcgcgggcacagcttgcattttggggccggtgtgagagcaggtacagccggggtctgggctatgtgcagaggtttcctccttgtccttgatggcctcnttcagtgccaccacgttgtgttcctgatctgtgatttcccgcagcatcttgtgcaggtggtgctgcagcttgtgccgcacgtcctccagttcctcacagcggcgcccgaaggccaggttcacggcgtcacactggagtcccaggtcctcggaggtgtcgcgaaggatgcagtccacaagcacccacaggttggccgagtccaggcgctcgcgctgggcgtggcacagattgtcctgtgtgaacttggtccgggtctctggggtggaggcgctgcggggcccaacccaggccgagccagaacctattgcagttggcctgggaacctcttctctctgtccgtcaagattgggaggccagcggaccttcagggactggtgtggtctgagaaacatccttgagcctcgccatgactcagtttccccagatggcagcaggctggagcccatgcagggcaggatgccaggctccaccttttgtctggaacctgcatttactgggcacctctcagagatttattcgtttcttgttgctcttggaaacacccagaggacacaggaaacatagccacagggacatagaaccaagccccaggcctgctcagctacacgaccgccgctgggatccgccctcgtgccaagctt

SEQ ID NO: 433987 - DNA, 1851 bp, Homo Sapiens
  misc_feature (1288)..(1288): n is a, c, g, or t
  misc_feature (1291)..(1291): n is a, c, g, or t
  misc_feature (1294)..(1294): n is a, c, g, or t
cccagggactgcagggctcgggaacccccaggagggctcccccaggaacggctttagggcagacaaataggaggctctctcccaggaggcgggccctgaggggaatgagtaccgggcggcgaatcgcgacccgtgacagggacaggacgggccctcagcccgaccagggctcaagttcgtgtcaatcccggaatatttgacggaaaggaggcacccagttcttgaagggaacctgaggacaggaaggaagaaaggtacttaggctcagaaggggccaccaaggcatccgttaacaagggacacaaaagggacggccaatctatgccttgtagcccagggcgtaggtcatactttccaccagaggtggggactgcaccctcagggcagcagggaatggccctctctggcttctctggccccgtggcctccaggagctcatcttgtctgaaggagcttcctcccgggaagatgaggtagcacagggtggggtgagaccacgtgggcacaggtccctggcacggggaggcccccgacccatgacctgcccagtgtcatgtctatatctgtgtgtttaaggcgtgcttgcatgttgtgtgtggccgcagagtctccctcccctctcagcacctgtgggggatgtgtgtgtggagattggagtgtttattggagagggtcgcagcgaggaggtggatgggggcacctgggactgcctcagaggcccaggcagtacctgaactgggctgcatcgcggcacagctgcatgttgggccggtgtgagagcagctacagccgggtctgggctatgtgcagaggttcctccttgtccttgatggcctccttcagtgccaccacgttgtgttcctgatctgtgatttcccgcagcatctgcagacaggacagtgccccttgggcctgtgcccccatgcccgggcatatggaatgtagagaccagtctggtcctacccagctcctggggctgtgtccagagggtggtcctgaccagtggccctggggaggcgtgggtgaggggaacaatgtgcacggggcccccagcgggctctggagagtcaggcagcctgttgtctcttagctctggtccaagaaccccccatccttggtggtcaccaggacccaaatcctgctcaaggactggggactcagaggtggtaaaggccatgctgaggccctagagtcagagccctgcctgccaggccaggactcttggggacctcccaggcagtcaatgctccccagaccagctcctgcctccatccttccccacagctcntcnttntcagtcatgggggttgcaacacactgcgatcatacccagtgtcacctggttttacataggtttacggagaggtgacacttgcttctggggtccctcgggataagtgggacagaggagaaaggtgttgagggcccaggccaggtgatgagagggggcagagtggtgggcaggcgccggagccgtcttcggggttcagggtgccccaccttgtgcaggtggtgctgcagcttgtgccgcgcgtcctccagttcctcacagcggcgcccgaaggccaggttcacggcgtcacactggagtcccaggtcctcggaggtgtcgcgaaggatgcagtccaccagcacccacaggttggccgagtccaggcgctcgcgctgggcgtggcacagattgtcctgtgtgaacttggtccgggtctctggggtggaggcgctgcggggcagagatttattcgtttcttgttgctcttggaaacacccagaggacactggaaacatagccacagggacatagaaccaagccccagggctgctcagctacacgaccgccgctgggatccg

SEQ ID NO: 433988 - DNA, 1154 bp, Homo Sapiens
  misc_feature (403)..(406): n is a, c, g, or t
tttttttatgttcactacagatgcaagcatctgattttatttcaaatattttgcatccaagtttgcttacatacacagatattaaacctacagatacaaaaagctgagtgtacttacaaattaataactgtacacaggcagcataaaattctctttgtacatgccaaaaacattccgtgtccacccagggtgaacacagccacttcacaaacagggtgtaaataaggaggttcactaagtacaggaaagttacaagaccatattggcattttaacagccattcctgagaaagagaatgggaaagggcttaagagtcagaggagaggaaaagaggaaaacagatgacctcctacatcagaagatggagcagtgagaatacagaatagggaagcaatagttaaannnnaaaagtagaaaacaggatttgatgtcaatttgctgtgcaaagggtaaaaaggggagttttatttccaggctatctgccatgatcacagctagtttgttactggtgatgtgaaatttggaaaaataaaagaacaatatgatggccagaagtgatacagacttggacacatcatgtttgaaatatctgaggtcccatacgtagggatgtccaattgacaattgggaatacagttccagagttcacaagagagatcaaacctcctggagctccaccaggctcctgtggcaaatacctgagaaaacttgcttcttgcttccacctgaaagtctcaggtttagggtttcttctactatccatggctctgctccttgctctagcttgaagatcatctcaggtttggtaatgcaatgccccaatgataccaggctgctgtaggtctccagcatcacgtccctgtacagggtcctctgagcgtcatccaggtcctgccactcctcccaggtgaagtgcacagctacctcctcaaaggacaccaactccagagatttattcttttcttgtagctcttggaaacagccagagaacactggaaacatagctgcacttcaggccctgcccgcccgcgatgcgcccacgcgtctgctcccacaactggggaacactggtccggccccccgggatcccccgggcccacgggttcctcttcgccctcgcaccgacccgcagggacatagaaccaagccccagg

SEQ ID NO: 433989 - DNA, 458 bp, Homo Sapiens
tttttactttataaagatatttatgatgttttcttttctttttacagtacgcattgcatttataattggagatacaaaaaaaggtgactgttactgtttgacagcaaggcagtagtattatcttcatcaatatttgcaacttcattcgcaggaacccgtcaagttctatatcacaagaaaggcgctgcagacggtgacattttcacgaaggagccacagcccgcatcaccccctgaaagctctgaagttgcgcacgggtgggtcacgcagcaggtggatgtctcagttcccatagagtttagcagagcaggcggctccctgggctggaagaggtgcgatgctctggaaaccccccgcgggtgtgtatgtgagaggacaccgagatgtgcagtgggctgtgcagtgaggaccagacacctccgatttgagcaagggaggtgcacttcgcagggtcccac

SEQ ID NO: 433990 - DNA, 473 bp, Homo Sapiens
  misc_feature (66)..(116): n is a, c, g, or t
aattcccactgtatttttaatacactgatgttattcttacacaaagtaaaaagcctgggtaagctnnnnnnnnnnnnnnnnnnnnnnnnnnnnnnnnnnnnnnnnnnnnnnnnnnncatgagtcactgctcccagagaccagccaagacttttactttataaagatatttatgatgttttcttttctttttacagtacgcattgcatttataattggagatacaaaaaaaggtgactgttactgtttgacagcaaggcagtagtattatcttcatcaatatttgcaacttcattcgcaggaaccagagatttattcgtttcctgttgctcttggaaacacccagaggacactggaaacatagctgtcatcccagcccccgccagggtccacggcccgcacctgcacttcaggccctgcccgcccgcgatgcgcccacgcatctgctcccacaactagggaacactggtcctcg

SEQ ID NO: 433991 - DNA, 701 bp, Homo Sapiens
  misc_feature (441)..(441): n is a, c, g, or t
  misc_feature (475)..(475): n is a, c, g, or t
ttcccgctcgccttgtgcgcctgtcgtgcctaccttagtagtctttgctctctttggtgcccctttggtaccatggatgtctgggtacgccgtaagctgggtcctccttccatggtatgtctgctggtagcgtcgcggccctttgtttgttgtgtttttgtgtaaagctacgcactgtttatttggggggattggggggcaagcaccgtgccgctgctcactggtagccagccagctgcagaatggtggggtagcaagtacgatgggccatgcacttctggcggtcgatgaagagactgttggtcatggcagtgacgtccttctccaggctcatgtggatgtccttgaggttgcgcagggactgctccgcttgtagaagcttctcccgcagcgctgtgatggacttgtacagctcctccacctcactcaccagcttggggngtgttggggggtgtgagctggggctggggagggncagaagtatgcacctactggggtggaggggacccaaaactcccaatgggagctggcaggaggtcctgggaagacgccatgaaaggatcctaccaggaaagcggctctagggcagagcataaattacgagggtcctcccagggagcgcgggcctgagtgggaatgagtgacccgcgtgcaatcgacgcgtgggtcgacgatatcccgataccttcgggcggtaccaa

SEQ ID NO: 433992 - DNA, 1016 bp, Homo Sapiens
  misc_feature (45)..(53): n is a, c, g, or t
  misc_feature (136)..(137): n is a, c, g, or t
gtccttccccctggaaaaaaaggccaagccaatttaggggacctnnnnnnnnnaccccccaagcattttccccacaggcagctggccagaaaaggtgccccagacagtttacttgatggggcagttcctactgacnntgggtctccagccagtccacccatcaagagctatccagccagtagcaactcaagcaattcccttggacagagcttcccaggagcaaacgaaattttctctgccattgcctctgcagtgaaactgcccttgctaccctcagaatatcaagggagcaaagaccctaagtgccatattgacacctccaataagctgcggttgacccaatgaacaagccagtccatctcccacgggtaccacacacccccacactgctcatcaccagagagggaacactggcttggcctcagaacacagaccctccatcctgggctgattacgctaagtgattgctaactcacatctctatgggatggagtacccaggagacaagcagagtggtggagcagcaagtcaggtgatgtggagcccagagggcagggacagctatctctctaggctccacgtgcctttgtgagatactttatcccagcactttaggaatgctaagttcagatcagccccatctcatgttcaagactgcccagcagagatcagttcccagagttcccctcttcaaaaaggggacttgctcaaaaaagaagcctggccatgtttgtgtaaagcagctatgctgtgccgggggttcacttttgagacagttctcctctgagacctgatctctgctgggcagtcctgcacatgagatggggctggtctgatatcagcactccctagtctgcttgcctctcccaggaattggctaaaactcctatggcagagatttattcgtttcttgttgctcttggaaacacccagaggacactggaaacatagccacagggacatagaaccaagccccaggcctgctcagccctcgtgccgaaatcgccacccaggcc

SEQ ID NO: 433993 - DNA, 1591 bp, Homo Sapiens
  misc_feature (1472)..(1508): n is a, c, g, or t
  misc_feature (1517)..(1518): n is a, c, g, or t
  misc_feature (1564)..(1564): n is a, c, g, or t
gagcaatactcaagggaaaaggtgtttatttagaacaatgaaaacaatgagacattaacttccagcttaaataaagttgattgtgtgcataaaaatggtgaaaatattggactttcttggcaaaagaagaaaggggaagactttatattttctgacataatattcatcatttgtctttggtttgtgtattatgtgtatgattttgaaaaaatgcatcaaagatataactttctggtgtttgctttgatattatccttgcaaacagaaaagttggcacatgtttctgtataaaactggtcaaagttggcctaggaatgatcttacattgtactttcactttacatcatactgtaagagtttaataatagctaaggcatcagcattgatgtggacttactatacctattcaagaggtggtgtgaggtttaggagagttatgtgccctttatcataaaacaaatctatgaagcatttatataaaaacccagtatttctggtttcaaattcagtactgtgccgtctgcttgatagatttgttcgcaggttagagacattttattgcataacttccatgaaatatcacagttgtactcttgactatgtttgaatcacaaaagactttaatctgcactcagttcttgtaactaaaatcttcagtttggaatatgaatttcacttaaagaacatccctagaaatttcagagagaaaaagactttacttgtagaatacaatctgcatttgctttgacaactagttagttcacatatgtaaaataagtctacctgtctgtatgcataattaagatgtaacagtagtgtggtaatgacttgttaaagcaattagaatggcagtggatcatggcacaatttaccttaaaagccgtgagcagaatacatcacaagctatgatacaatgaatagtcattaggtttaaagtagtatccacatataaaaacacaaagcatattttagctctttaaatgaaagcttcattcagtcaatattggtcttcctgtagatgcatttatgaaacagaaccacaaaacatacagcttacccgcttctcaaaactcattgcacaataggttgagggacttctctacaccaggacctattattaaaaccagtaagtcctcagtgaaaatcatttatttgcccggagtgtcatctgatgtgtctgttgtaggcagctgtggcagtggtgggtggtttagtgacacggaccctgcccacgtctgtccatccatcagtgggctagtgtctctctggctgcacctgagaagggtcagagatttattcgtttcttgttgctcttggaaacacccagaggacactggaaacatagccacagggacatagaaccaagccccagggctgctcagctacacgaccgccgctgggatccgcacttccggaggaaaatggcgaagtccgctctcgacgaattcgagctcggccgatttggcctgatnnnnnnnnnnnnnnnnnnnnnnnnnnnnnnnnnnnnncgcccgccnncactgcctggaaaaaaaatcccccgcaaggggggccgctctcaatntattggaggtggctagttagaatttcc

SEQ ID NO: 433994 - DNA, 1092 bp, Homo Sapiens
ggtccggaattcccgggatgccaggagctgggcgccggccccgggctgccagaggacgcggccgggacgctgctgccgctggccgccgcgctggccgcgctggtgctcgtgctggggttcacctgcttgctgctcgccgcgctctgtggccacctgggcgccgagctggcgcgggggcctggccccaggaggtctgactggtttctctacgactgccgcctcctcagacatgtggcccttggccttttctgctgtgggatctccgtctatttagcagcactgtccatctatgccttgctacttttcgagatcgagacaggcgcagcagctgcttccatcctcggctcgggcaccctggttctggtggctgtgctgacccacactctcctccgggctgcccgggctgcccgccgtgggctccatgagttgtccccgccatcctttgaagacgacctcgcccgccctgccgaagtctccaaggccagccccagagctcagcctcagcagggtatccatcgtcggaccccctattcaacctgtccagagcctggggggcccctttgggtccatggccactgccacagcacctgcagccctggagggaggctgggagagcagcctgcctgcatccagaatgcaccggacactgtcggctggcctggggcactgggacggggttacgcacgagatgcgtcgaatgctggggccacagaccgggaggcaccgggaaggactcccccctggtgtgaacccaggggatgagggaataaagacctgggggtagaaaaaggataccataaagaaaaggttccgggttccacctggcggtaaccattaagcactttgatctttcccctcacattaaattgcaatccctgggcttatggccccaagggatgcactcccggggaaacaataataatttgccaaaacttccaggcctttcccctccctcatttcctgatgggaaaagccccttcggcacaccgccggaccaaatggccacacctcgaaaaatgtacactcgcagtacgccacccgacacacttaccccgttttagcaggcctcttggacatactgatttctgtatg

SEQ ID NO: 433995 - DNA, 1181 bp, Homo Sapiens
cacgtgtcttccccccgggaaaagtacaatatttcccccccaggggtgtggccaacccaatggggccctccgggggggaaactgggacgttgctcccaccgggaagggaaacaagccgcccccacggggtcggggcggccttacccgcccctcccttttcaaattccccggttcacaggcccaggcttatccgaggaaaatacagggcccacccgccccgggtttgtttcttcatttcccggagatttccagtcagccccgttactggaagcggatctcgttcacaaatcccccgacaggcgtcgagctgtttcaaacttctgccaaggctgtctccccctttcagcttcgagcaagggttcagcatgatgtacttgatgaagttctgaacgctctcggtccaagctgccagccacgtgacggtgttatcggagcgcacctccttccactggtgccccgccggcggctcggggatcttcgagtccctgctgcagttgataaccacatcctctggcgtgatccttctcttcagcatccccatcttgggatggtcgccacggccacggaacaagccaggcggctcaatcttgaagttgcctattttttcttggtgaccatctaaaatacagtagccgaactcttgctgaagtttttctgcctcttcttttagcttctgcttctcctccctgctcaggactttccgggctgcggccttgtccacaaagtatctgtggatctccgtgaagtcacacttgtccaggctcttgatgacttccctctcttccaccgccatttcctttcgccagtcattgaagaagttcttccggaaaacctcctttgttgtgtattcatgatctaacatcctcccataaaaagtggcgacctcctccgctgccacgctcaatctcacaggccttccttcatagaagaaacgcactccgtcgggaaggggctcgtatgggggtgcgaagtacgggcccttgtgctccagctgtctccacttcaccccgtcttcgtgcttctccttctcccacctggctccactgcccttctgcgtcctgcgcgagcccgggacaccccgggaggccgggcggcgggggacctccccgagcagcgtcagagccgcccggagccgcagcagccgcaccacgcgcatctgccatcccgggaattccggaccg

SEQ ID NO: 433996 - DNA, 1241 bp, Homo Sapiens
  misc_feature (218)..(218): n is a, c, g, or t
gagggggcttttcaagggcgggtttgggttccaaccctttggaaagaggttcgtccccgggggtgccttgttttcccataaggagccggaatgtttttgtacccccggttttttcccaccgccactttggtgtaagtagcggatgcaatcctttccccaagaagtcaaatttcccacaccgggttgggcaggcatcgggcctccgggtgcagctggancgtgcttcacgcgggagggaacagcagccccacggtgtcgggccgcttcaccgtcctcctttctcatttcctggctctcagtgccagcttatcgatgaaatacagggccaccgcccgctgtctcgtcttcatttccccgagacttccagtcagccccggtactgggagcggatctcgtccacaaatccccgcaggcgtcgagctgtttcaaacttctgccaagctgtctcccccttcagcttcgagcaagggttcagcatgatgtacttgatggagttctgaacgctctcggtccaagctgccagccacgtgacggtgttatcggagcgcacctccttccactggtgccccgccggcggctcggggatcttcgagtccctgctgcagttgataaccacatcctctggcgtgatccttctcttcagcatccccatcttgggatggtcgccacggccacggaacaagccaggcggctcaatcttgaagttgcctatttttttcttggtgaccatctaaaatacagtagccgaactcttgctgaagtttttctgcctcttcttttagcttctgcttctcctccctgctcaggactttccgggctgcggccttgtccacaaagtatctgtggatctccgtgaagtcacacttgtccaggctcttgatgacttccctctcttccaccgccatttcctttcgccagtcattgaagaagttcttccggaaaacctcctttgttgtgtattcatgatctaacatcctcccataaaaagtggcgacctcctccgctgccacgctcaatctcacaggccttccttcatagaagaaacgcactccgtcgggaaggggctcgtatgggggtgcgaagtacgggcccttgtgctccagctgtctccacttcaccccgtcttcgtgcttctccttctcccacctggctgcttatgagagagccctgcctccgaggagctgggggaagggggtccagcagtgcagccagtgcctcgtcccgaattcgccacccaggcc

SEQ ID NO: 433997 - DNA, 1026 bp, Homo Sapiens
tcttattggaatgaaattaccagggggccacccgggccccgcggttcttggtctttcattttccccggagactttcccagtcaggccccgggtacctgggagccggatctcgtgcccacaaatcccccgcaggccgtcgagctgtttcaaaacttttgccaaagctgtctcccccgttcagtttggagcaaaggggttcaggcatgatgtacttgatggagttttgaatgctctcggtccaagctgccagccacgtgacggtgttatcggagcgcacctccttccactggtgccccgccggcggctcggggatcttcgagtccctgctgcagttgataaccacatcctctggcgtgatccttctcttcagcatccccatcttgggatggtcgccacggccacggaacaagccaggcggctcaatcttgaagttgcctattttttcttggtgaccatctaaaatacagtagccgaactcttgctgaagtttttctgcctcttcttttagcttctgcttctcctccctgctcaggactttccgggctgcggccttgtccacaaagtatctgtggatctccgtgaagtcacacttgtccaggctcttgatgacttccctctcttccaccgccatttcctttcgccagtcattgaagaagttcttccggaaaacctcctttgttgtgtattcatgatctaacatcctcccataaaaagtggcgacctcctccgctgccacgctcaatctcacaggccttccttcatagaagaaacgcactccgtcgggaaggggctcgtatgggggtgcgaagtacgggcccttgtgctccagctgtctccacttcaccccgtcttcgtgcttctccttctcccacctggctccactgcccttctgcgtcctgcgcgagcccgggacaccccgggaggccgggcggcgggggacctccccgagcagcgtcagagccgcccggagccgcagcagccgcaccacgcgcatctgcccctcgtgccgagttcgccacccaggcc

SEQ ID NO: 433998 - DNA, 1084 bp, Homo Sapiens
  misc_feature (30)..(30): n is a, c, g, or t
  misc_feature (56)..(56): n is a, c, g, or t
  misc_feature (64)..(64): n is a, c, g, or t
  misc_feature (125)..(125): n is a, c, g, or t
  misc_feature (236)..(236): n is a, c, g, or t
  misc_feature (244)..(244): n is a, c, g, or t
  misc_feature (254)..(254): n is a, c, g, or t
  misc_feature (380)..(380): n is a, c, g, or t
ccccaccgggtgttcgggcccgcctttcanccggtccctcctttttccaatttccntgcttttncagggcccaggcttatccgatgaaaataccagggcccaccggccccgctgtcctcgtcttncatttcccgagactttcccagtcagccccgttactgggagcgggatctcgtccacaaaatcccccgcaggcgtcgagctgtttcaaacttctgccaaagctgtctcccccnttcagctncgagcaaggnttcagccatgatgtactgatggaagttctgaacgctctcggtccaagctgccagccacgtgacggtgttatcggagcgcacctccttccactggtgccccgccggcggctcggggatcttcgagtncctgctgcagttgataaccacatcctctggcgtgatccttctcttcagcatccccatcttgggatggtcgccacggccacggaacaagccaggcggctcaatcttgaagttgcctattttttcttggtgaccatctaaaatacagtagccgaactcttgctgaagtttttctgcctcttcttttagcttctgcttctcctccctgctcaggactttccgggctgcggccttgtccaccaagatatctgtggattctccgtgaagtcacaacttggtccagggttttgatgactgtccctctcttccaccggcatttcctttcgcccagtcattgaagaagttcttccgggaaaccttccctttgtttgtgtattcatgatctaacatcctcccataaaaagtggcgacctcctccgctgccacgctcaatctcacaggccttccttcatagaagaaacgcactccgtcgggaaggggctcgtatgggggtgcgaagtacgggcccttgtgctccagctgtctccacttcaccccgtcttcgtgcttctccttctcccacctggctccactgcccttctgcgtcctgcgcgagcccgggacaccccgggaggccgggcggcgggggacctccccgagcagcgtcagagccgcccggagccgcagcagccgccctcgtgccgaattcgccacccaggcctcgctac

SEQ ID NO: 433999 - DNA, 1364 bp, Homo Sapiens
  misc_feature (323)..(331): n is a, c, g, or t
tcttttgttgttcgcgggattgggaaaaatttttgcccagtggtggggccaactttgcgggtcctcgcgggaagtgggttgtctggggggtggggttccacaatatgtatcccgcgagaaggggagacttttttcaccagagttccacaagatcgccgcggggtataaacctggggggaagggcgccggggaaatttttttgggtggcccccgcgcaaaaaattctccccccgggccccagggggcactgtttcgaaaaggattggagtttttgcgcaaaaacattttatattggcccaccaaaaaagatttggttttgttgnnnnnnnnnttttttcacaggtactttttcaggaagacccaaaagggggggtttgtcaaagggggcaaatggaaatgggtaaccccttggggaagtgtgagagagttttttcctgtgaaaaatttggccttcgttagcgggggttgcccacaaaaaggtcttcgcccaagaagtccccagcgggtgagaacgggttcgttatatttgcgggaaagcggtcacccctccctgttgtcccatgtgggtgggcccccgcctccggggggtcttcggggggattctttagaagatgccctggctggcaggttgattaacccaacatccctcttgggcgtgatcccgtctgttcaagcattccccatctttggggatggtccgccacggccacgaaccaagccaggcggctcaatctggaagttgcctattttttcttggtgaccatttaaaatacagtagccgaactcttgctgaagtttttctgcctcttcttttagctgcttctcctccctgctcaggactttccgggctgcggccttgtccacaaagtatctgtggatctccgtgaagtcacacttgtccaggctcttgatgacttccctctcgttccaccgcccatttcctttcgccagtcattgaagaagttcttccggaaaacctcctttgttgtgtattcatgatctaacatcctcccataaaaagtggcagacctcctccgctgccacgctcaatctcacaggccttccttcatagaagaaacgcactccgtcgggaaggggctcgtatgggggtgcgaagtacgggccctttgtgctccagctgtctccaacttcaccccgtcttcgtgcttctccttctcccacctggctccactgcccttctgcgtcctgcgcgagcccgggacaccccgggaggccgggcggcgggggacctccccgagcagcgtcagaagccgcccggagccgcagcagccgcaccacgcgcatctgcccctcgtggagaattcgccacccaggcctcgctacggaggagtgtagtgaaccat

SEQ ID NO: 434000 - DNA, 1112 bp, Homo Sapiens
  misc_feature (4)..(4): n is a, c, g, or t
  misc_feature (10)..(10): n is a, c, g, or t
  misc_feature (13)..(13): n is a, c, g, or t
  misc_feature (16)..(16): n is a, c, g, or t
  misc_feature (22)..(22): n is a, c, g, or t
  misc_feature (25)..(25): n is a, c, g, or t
  misc_feature (38)..(38): n is a, c, g, or t
  misc_feature (42)..(42): n is a, c, g, or t
  misc_feature (44)..(44): n is a, c, g, or t
  misc_feature (53)..(53): n is a, c, g, or t
  misc_feature (57)..(57): n is a, c, g, or t
  misc_feature (69)..(69): n is a, c, g, or t
  misc_feature (72)..(72): n is a, c, g, or t
  misc_feature (89)..(89): n is a, c, g, or t
  misc_feature (94)..(94): n is a, c, g, or t
  misc_feature (110)..(110): n is a, c, g, or t
  misc_feature (119)..(119): n is a, c, g, or t
  misc_feature (130)..(130): n is a, c, g, or t
  misc_feature (142)..(142): n is a, c, g, or t
ccantggttntgnttncccccntcntcctttcatttcngcgntntggccccgnaaanataagcctctgnccncctctggagtgtggctnacaanaatgacatgaccatgnacttgcctntcccctggagncccagacaccanccaccaacacatcagtctgatccaacaggtactcgatggcactgtcacaccaattcatctggtcatccaccaacttgatgctgtgcttcatgcgctctgggggcagtagtttggcctgacccacgacagggtccatggctgctggtgcggcagtgcccatgccccggttctggatttggtacacaggctgtgtgggtctctgcccctccttctcccccttgggtggcgcaggggctgcagggggtggtggggcggtgccctcaggggtagaggcacctgtcacggccacaggccccttcccctcctcccgtggcttcatgagaacgatgggcttctccagaggggctggagcaggcggggcagcaggggctgttggaggtggtggctgttttgaccgctctgctggaggttttgagaggatgatgggggttttctgcatgacggaagtgcttgtctcttcgctggcatcccttctctctctttcccatggtgcaatgtagtccctctcccgaccaccaggcccagagagattctgggggccaccagagccaggctccttccaccgtcgccgccgctctatcccatagagtccaggctgactgtgtccagactcagacatggttacctaacgcggctgctgattggttctcggggcgcggtgtgcgctctcccgtgacgggagtcgggtgggggcggggaggctgacccaagccacccgcctgcaaatggcgtctgggggccaggaacgtgggaaggagagaaaatgggcactccccactccgaaaccggcctcggcgtccgggttgcagcccctaaggaaagctgggccgaaggaagaagaggaggaggatgtaacgcgggcccgagctgagatcagttccctcaggcgactcgtcctgcgcatgcgctgagggctggagctcgagaactccgctctcgacgaattcgagctcggccgatttggcctgat

SEQ ID NO: 434001 - DNA, 1589 bp, Homo Sapiens
  misc_feature (101)..(101): n is a, c, g, or t
  misc_feature (103)..(103): n is a, c, g, or t
  misc_feature (151)..(151): n is a, c, g, or t
  misc_feature (224)..(224): n is a, c, g, or t
  misc_feature (363)..(363): n is a, c, g, or t
  misc_feature (391)..(391): n is a, c, g, or t
  misc_feature (631)..(631): n is a, c, g, or t
  misc_feature (658)..(658): n is a, c, g, or t
  misc_feature (669)..(669): n is a, c, g, or t
ccttcgtgtgtccgccgtctcggagggaatagagcctcagcgagagtgtatggagcatagtcggttgaggatcgtcgacacgtttgtcgcgcggacacggnanttctcgaataattgctgttttctgtcgctctccgcgcctttgtatttncggttgctcgtcgagacctacgtctaggcctgtcgaagagatgaagatagtattctgtaggaccgtgggttgngggcgcggtgtgtgtctacgcttgtgcactagacttgggcttatcttgtaggagtatgtgcacttgtaagctgtgagattatagattggcatacacatacaaatcatccaccttcgcgtaaaagatattaaatagaaanaattacggtggtgggtaagtaggtatangtcgtgcagtaggtgttttattttcctttcgtcacgcgtcttctagcttgatttttatgtgcatttacgttggtgtgcgatatgtcgagggtgtatgtgtatttaactagtggcggattatgtattgagttagacatcttacatgcgtggcctgtcatctggaccactgatttatatatcgtttcagtttatcgtatagtgttactgtatttgtatcgcatctggcacgtgtgcgatcanaccggggctgtatgaaatgagggtttnatgtagcgtgnggctcgtgcgttggatgtgtgtactatgtgattgattatggatgcaggtacgtcgcgttcgcggtggttgttttgtttcgttacgttctgtctgtcttatttatttccgctgtgtcttgttctggtgttatgagggcaattacgcggctcgggatcgtttctaatatatcatgtgctttaggttcgtgtctattctgttatggtaactctgtatgtattattgcgttgagcttctggtgatgtggggtgattggccgagaataaacgtgcctaattttgacggacggattttttttgtgtagttgttgtgattggtttttaatttatgagggtgatgtgttttgtcggttaagtgggttggtgagtgtgattgtcattgggtttttaatgatttggttaaggtaaatttttggtaactggctgttcacgtgagagtgtctatctaggcttgggggatatgttctgtatgagtagacgtgcgtgtgcaggggtgtaagtggtggtgcgggggttgtgggtgtgcgtgtcttcttgggtattgaagtcatttaactcgtcaaaaagcctggcttagctggtcattgggaggaacgtgaccaaaaaagtcagccccttgtactttactgtcccaaaatctatacggaaattgcaaggcaatcttttcaatgatgcctgcgcctaagctgttgatagccttcatcttcttctctgacaacggtggattaaactgaatggcacctttctgtagtaaagccagtggtaccacccgcctgcaaatggcgtctgggggccaggaacgtgggaaggagagaaaatgggcactccccactccgaaaccggcctcggcgtccgggttgcagcccctaaggaaagctggcccgaaggaagaagaggaggaggatgtaacatcccgggaattc

SEQ ID NO: 434002 - DNA, 1017 bp, Homo Sapiens
ctattttagaaaggccttatggtgtacaaaggacaaaaattgctcaagatattgaaaggctaatacatcagagtgatatcatagatcgtgtggtatatgacttggataacccaaattacaccattccagaagagggagatattttgaaatttaactccaaatttgagtctgggaatctgcgcaaagtaattcaaattagaaaaaatgaatatgatcttattctgaactcagacataaacagccatcattatcatcagtggttttactttgaagtcagtggaatgcgaccaggtgttgcttacaggtttaacatcattaactgtgaaaagtccaacagtcagtttaattatggtatgcaaccactcatgtattcggttcaggaagcattaaatgccagaccatggtggattcgtatggggactgacatttgttactataaaaatcatttctcaagaagttcagttgctgcaggtgggcaaaagggaaaatcctactatacaattacatttactgtcaattttccacataaagatgatgtttgctactttgcttatcactatccatatacgtattcaactttacagatgcatcttcaaaaattggaatcagcacacaatcctcagcaaatctattttcggaaagatgtgttatgtgaaaccctgtctggaaacagctgccccttggtgactataacagcaatgccagagtctaattattatgaacatatctgccatttcagaaatcgcccttacgttttcttgtctgctcgggtacatcctggagaaactaatgcaagttggggttatgaaaggaacgttggaatatctcatgagcaataaccccactgctcagagcttacgagaatcttatatttttaaaattgtccctatgttaaatccagatggtgtcatcaatggaaatcatcgctgttctttaagtggagaggatttgaataggcagtggcaaagtccaagtccggatttacatcctacaatttaccatgctaaggggctgttg

SEQ ID NO: 434003 - DNA, 932 bp, Homo Sapiens
ctccagaggaactgtgagagtgacactgaggaggacatcgccaggaggaaagccctccacccacggaggaggagcagcacctcctaactggcctgacctgcagtggccgccagggaggtctgggcccagcggggctcccttctgtgcagacttttggacccagctcagcaccagcacccgggcgtcctgagcactttgcaagagagatgggcccaaggaattcagaagagcttgcaggcaagccaggagaccctgggagctgtggctgtcttctgtggaggaggctccagcattcccaaagctcttaattctccataaaatgggctttcctctgtctgccatcctcagagtctggggtgggagtgtggacttaggaaaacaatataaaggacatcctcatcatcacggggtgaaggtcagactaaggcagccttcttcacaggctgagggggttcagaaccagcctggccaaaaattacaccagagagacagagtcctccccattgggaacagggtgattgaggaaagtgaaccttgggtgtgagggaccaatcctgtgacctcccagaaccatggaagccaggacgtcaggctgaccaacacctcagaccttctgaagcagcccattgctggcccgccatgttgtaattttgctcatttttattaaacttctggtttacctgatgcttggcttcttttagggctacccccatctcatttcctttagcccgtgtgcctgtaactctgagggggggcacccagtggggtgctgagtgggcagaatctcagaaggtcctcctgaaccgtccgcgcaggcctgcagtgggcctgcctcctccttgcttccctaacaggaaggtgtccagttcaagagaacccacccagagactgggagtggtggctcacgcctataatcctgcgctttggcagtc

SEQ ID NO: 434004 - DNA, 754 bp, Homo Sapiens
  misc_feature (703)..(703): n is a, c, g, or t
  misc_feature (737)..(737): n is a, c, g, or t
cgatttttgaggatttatctttaggccaggcttgcctccgtacttatccctgctctcccatttctctcttgtttgagagagaatgaggaagcaaagagtgagaaagaataggggctgaagacgccactcccagatggctctttctatcctgctcttctgttgaaacacacgtgctgtgggcctcaggcgtttctgaagtgctctttcttggattggacaggagatcagcagcgtgcacatctgctgtggtctgaagtggtttgcaggtcagcctcctctccctagtgtagagcaagccagtgtccttcgaggaacccacccggctggccgggaagttttacagcaaggcgcctgccttgggataattccttggtgaaattcaccttccccccgcctctgtctggagccccatcctgtgttatctgtggtttttggacccctaatgtcagcttggctgtaggactccccgaggtttggtatgtgctagaacaatgggaggctgtgatttgctgtgtaagctcacatccagccttggaatctaacgggcattcacaacccgagttaccactttccactccctgcttaggattctgttccctggggctgaaactgaaataagctaattttttggggtcacggtgggcagtaggggggaacctagggagggtgtgagtgggcatttgtcaggggatttagcccatgnacgtgtttcttgaaccctacttttctgggaagtnggagttgactctgggaa

SEQ ID NO: 434005 - DNA, 787 bp, Homo Sapiens
ggttctctgtcatctattctactctattgtcataccccagtattggcaaagctagccatggcccacctattattattctgcccatcaatccactctccaccttcatgctccgttttcccctcgatggggataggaatggccgtaccttgtctttacggtgtatttcacgtccaggatgtccagcttcagagtggtcctccctcgtccacgtttctgaggcatggtgcgttcgtgacctccctcttctgggacactgtcctcctctgcctcagcacgtggacctacaggtctgatgctgggcttgcgtggtcggtggaacctttggtatacacagtcctgtcggcgtccgggtccggtttgccaatggggagagttcaccttaaagccagagctagccctacatggtggctgggagctacaccaaagatgccacagccttcgagacagtgacttgaagtaggacgccacagtggtacaggcaggtcagaggagcacgtatggggctgaatccctgacaaatgccactcacaccctcctaggttcccctactgccaccatgacccagaaaaattagcttatttcagtttcagcccagggaacagaatcctaagcagggagtggaaagtggtaactcgggttgtgaatgcccgttagattccaaggctggatgtgagcttacacagcaaatcacagcctcccattgttctagcacataccaaacctcggggcctcgtgccgaattcgccacccaggcctcgctaccttaacccgtagagttactgccagt

SEQ ID NO: 434006 - DNA, 1467 bp, Homo Sapiens
  misc_feature (1418)..(1418): n is a, c, g, or t
  misc_feature (1446)..(1446): n is a, c, g, or t
acaaaaatccaatgtaagaccattgtgctcgtgacgaaaaggggtggggtggatggacgtggcatggatatcaaagcttccccccacaaactaggagctccccactctgtccggcgcagctcccagaaagatcccatccttccggacaggaccccagctggtgagccctggcctgaggcacagtccacacggaggagcactgcccagggagccagcgctcacagtggcctgcagagccctgggacggtgttatggtaagacagcccaaaccggagcagcaagccggccacccagagaacgaggcgctcctgcaccctgcgagccaggacaaggtggccaggggcggcccacagacagccaaggagacccggggtctgtggcgccgctttcccatctcaagcgagtcacaggtcggcggctttcccgtggtgagaagcacctgaccagtgacactgtggccaccttgctgcctctcgctgaggagggcgtgcccctcagagcctgtctgcagtccttcaagccagtgttcctttcagggtcaaggagggctgtccttgttggaagcaccggcaccacagccctccctgcggcatgttttggtgtcagaccactcagcccttcttagatccaccagtgacattcggggcccgacaacctggctccactaaagggagaggccctggctccaccacacagacggccccagctcactgagtcccgctaaagggggtcccaccacacagacggccccggctcaccgagtcccactgaagtcagtatgtgagttcctcacattaaaagaaaccagatgaaatagcagccacaatatagcgccacacaccacactctttggctccccgagggaagaaggctactgctaaaaggaatacaagtcaggagtcaggtagagggcaactagaaagttctgaggaagggcgtctgacccccactgctgggaacataaccacactgcctcagcaggggagctacaggctgatgctggggttgggggcggggaacctttggaaacacagtcctggcggcggccgggtccggtttgccaatggggagagttccctttaagccgagctagccctcacaggtgggtgggagctacacaaaagagcccagcttcaaaacagtacttgaagaggacccacgtggtacaggcaggtcagaggagaacgtattccaagaaatagaagcacaggatgccaaggtctagggaagacggaactggcttaaggcatgtgcatgaccaggacaaacctgagcttttgttcagttgctagaaaacttccagagtcaactccacttccagaaagtagggttcaagaaacacgtcatgggctaaatccctgacaaatgccactcacaccctcctaggttcccctactgccaccgtgacccaaaaaaanagcttatttcagtttcagcccagggaanagaatcctaagcagggagtgg

SEQ ID NO: 434007 - DNA, 1140 bp, Homo Sapiens
  misc_feature (10)..(10): n is a, c, g, or t
  misc_feature (18)..(18): n is a, c, g, or t
  misc_feature (25)..(25): n is a, c, g, or t
  misc_feature (38)..(38): n is a, c, g, or t
  misc_feature (41)..(42): n is a, c, g, or t
  misc_feature (48)..(48): n is a, c, g, or t
  misc_feature (61)..(61): n is a, c, g, or t
  misc_feature (64)..(64): n is a, c, g, or t
  misc_feature (69)..(69): n is a, c, g, or t
  misc_feature (71)..(71): n is a, c, g, or t
  misc_feature (84)..(84): n is a, c, g, or t
  misc_feature (93)..(93): n is a, c, g, or t
  misc_feature (100)..(100): n is a, c, g, or t
  misc_feature (110)..(110): n is a, c, g, or t
  misc_feature (152)..(152): n is a, c, g, or t
  misc_feature (220)..(220): n is a, c, g, or t
  misc_feature (1122)..(1122): n is a, c, g, or t
ccctcagtcncatccggnggccatntctggtctcctancgnncgttgnatctgcccttgtntcntcacnanagcatcccatggnagtggtctngccaatngagatggacnagaaattttccaagacgcttttgggaaatctttttgtagctnttaaagagatgtgcggggaagacatatggatgttagcagccatattggaactgagaacacaggaatgntggaaaggtagaagaaacagagtttttgttgccgttgtgaaattgttgaaatttccttcatgccaagcttcttgttatatgagataattacgcccttattgtataagacaattttagttgtatttggttacttgcagcctgaagtaccgtaactgcactaaagggacgtagtgtgaacatcccgcagtataggcttaagtcacttttgtgaaatttgacattggcatagaatctttttctatccagtcaggcattgcctattctttccagtaactactgattcccccacttttctgtcttagaaaattgtgggaatcccccctcactctgcctatgttgcactctctctcttcccaaccataactctgccctcagctattaactgtgctgtgtatttatcaagatggtatgttgtatgtacagtgttattcatgtcatcatgagaatgttgaacgcttgttaaatatcttttgctagcctcttcatatgctgttgcatatgactctcatcacaactcagtgagatggaaagtcaaatcctatttgtacaaatgagaaaactgaactctttagagtaactagctcagtattggccagctggtaaatggcagtgttgggattaaaatccagttcttatctactctccctttattcagaagcatttattggatgttgatctttgtttcaggttttgattttcgttacttttttatactgtgtatattttcctcagtctacccttctgctctagattgtctggactcaggagattgtggcagttactggatagttatttttaagataatgattgcttttctctgtttatataagtcatgtgtacttattgtagaaagtttgtaagatgcaaaaagtataacaattaaagttatgcactactacatntcaatatattttctccca

SEQ ID NO: 434008 - DNA, 1512 bp, Homo Sapiens
  misc_feature (1498)..(1498): n is a, c, g, or t
atcacaatatttcccaattttggataaaatccccccgccccatgttaaataggtggagggccaagattttttgttgtgaaaagaaaagagaagtccaaccttaggccagaatgaggggggggattcccacaatttttttaagacagaaaagtggggggaatcagtagttactggaaagaataggcaatgcctgactggatagaaaaagattctatgcctttgtcaaatttcacaaaagtgacttaagcctatactgcgggatgttcacactacgtccctttagtgcagttacggtacttcaggctgcaagtaaccaaatacaactaaaattgtcttatacaataagggcgtaattatctcatataacaagaagcttggcatgaaggaaatttcaacaatttcacaacggcaacaaaaactctgtttcttctacctttccaccattcctgtgttctcagttccaatatggctgctaacatccatatgtcttccccgcacatctctttaaaagctacaaaaagatttcccaaaagcgtcttggaaaatttcctgtcccatctccattggccagacccacctcccatgggactgcctcttgtgaagcacacaaagggcagataccaaacggtaccgttagggagacccagaagatggaccatccaggatagagacatgaagggcagaagagggcccagggatgtgtgtccctcagctggactacagggaaggagttttggtcaggggaagaaaagcctcatttcctatcagtcactggtggaatgactaaagatgctaatggactcaaccaaaaaaatggccggaggcgtgagacagaagaacaagaaaaggtgtgcaggtgcactccgtccacagcgctgtagaaggagacattcccagtcccacgatccaggtaaacccccactcggtggagagctggctcttgctgggtgggagttccagggaagcctatcaagggccaatagccagcagcactccaataaatcgcccagatgcccacatctggggacatttttgaacgatcagtaattcccatgacgtcctcccgacacaccccaacagcaacctccagactatctctactctcaacttcccagtaatgtttccctgaggtgaaaacgttttttcccagaacacagggtaagtgctgaaatctctctacaaaagcagtcttctgaggattcctccatccagcaaagtagttccatgctgaagaaaacactggccaagaactggctgatgctgtatttttcacgtatctcccttcctgggagaagacgagtttgggatgagctgtgtcttcagctaggtttacagccacttggaatcgctttagcatttccttcatcaatggtatctggcacactgtcttcacctttacagcttcaagagaatagttcacatcctggatctcactcctggtcaacacttcttttggattctgaagcagctccagggtgggagcctggctcttctcccngcgtgccaagcttg

SEQ ID NO: 434009 - DNA, 569 bp, Homo Sapiens
tgaagaaactgtgctgcagagcataataaggttgaattcgagttttggggtcataatcaagcatccttaaaatgaggtctttgaacttcaagtagtcagcgaccgtatgacctgactccccagcacgtcgcccaccaggtcctcctgtttccactccaagaatgttatgaagtttacgggttcctggtggtttgtactcccgttttccatctttggtcttctttaagttccaagtgccatctggcaacttctcaaagaactttcttgcttttggtgcttggtcaagaatatgagcaggtggaatacccagaacttccactattttattcatctgatctacctcattggcagcactgaacagaggttctccagtgtgcatttcaaccagaatacacgcgagggaccacatatcaatggcaaggtcataaggcattcccagtagcacctctggagaccgataaaagcgactctgaatatactggtatatcctctgccccaactgacaagaactgccaaagtcaactatcttgattgcactgcgtttggggttacaaagaaggatattttca

SEQ ID NO: 434010 - DNA, 925 bp, Homo Sapiens; identical to SEQ ID NO: 125705

SEQ ID NO: 434011 - DNA, 759 bp, Homo Sapiens
gtttggggggggaatccaaagccctttattctgggcccaagtttttccttggagaagcaggtataaggcccggtttccaatttcccttaaggggggcccggcggccccaaaggaaaagggtttttaaaaagttttttcagaggggcagagggggccccccacaaaaaaagagctgagatgtattattacggagagattgcggtggggaagggggatacggggtgggggatttttttgaggtttgcaattttattaagaaaacaaaaattcaacctatacaaaaaggaaaatgcttccgttccaggaggcggtactgcggtgggagcagcagccaagtccgcgggaaaccgagctgctcgggcctgccctgcaccccccgcgcccccggccaggctaggcgtcctgctgctggatgaaggggttggggatggcctccatgccgtcctgcgggcagattagcaccacggacgtgccccggcacaccacgaggcccagctgccgggtgtcctccgtgagcttgtactggtcgtcagggtctcgcatgtactcaatggtgccgtccagcacaaggttgaggagtgggtcgaagcccttcaggattccactggcttcgcggcctccctggaactttacccggatcgtcttgtcgatgtacttggacaagtccaagatgctctcctttttcttcttctccttatccgccatcttgtcgcgccgtgtggctcttcgcaggcaccgccccgcgccctttgacccgct

SEQ ID NO: 434012 - DNA, 1075 bp, Homo Sapiens
  misc_feature (43)..(43): n is a, c, g, or t
gccccctccgtttatcgggctctggggtagcgggttgatcttnaatcgtgtatggtgtgtcgaaatgggtacctgggtggggtggatcttgttgggatagggctcttgtctctcgagattatcaggtgtctgatagtttggttggttggaagaaatatatgtttgttcctcctcaaccaaaaagcccttttcttgggggaaggggttcagagtttcatggattcaccgggagggtgcaagtaggagtgtttctgaaggacactgctggggccggggtcggtggcggggaggccatggcttgggcagactgcccaaaagtccagcttcttaggtcagagctctgctgcccatcctgcggtggtcttgccagggaatgcccaggcatcctggcttcacagagcctccctctgggggcccccatgggcttgctgctgtccatctgtctatgtggaccccagaggccagcagaggggccagtcctccttggcaggtccctctggcttggctgcttttcctgggactccccaaaaagccagtccagggggtccacagtatcagccatgggcagtgtgggctgctggccactgaaacgtgcggtgatgtctcgcagggacacagcagggcggcccttccggcaggcctgggctggcctgtggggtggcctgggttggccctgggccgtggccttgtccagcacagaggtgggctgtgccagtcgagatatagacctcacgtagtcatccaggctaggagagggtgggggctcctgtccaggacccccaagcagcatctcctccgtggtctcccgaattgtgggcagatgggccacggagagcagaagccgggacctcatcactctggcgagaggaggtggcaacctggagctgaggaggtctgggggtggcaggagaatggatgagcagggacagtccagtccaaaggaagcccctgggaagcttgggggccgaagggtggagggtccggcagggggtccagcgtggggtcgctgggaggaggacagtgcactgagtctcacagtccaccgtagcaggctcttcccgggaattccggaccg

SEQ ID NO: 434013 - DNA, 889 bp, Homo Sapiens
tgtaggggcacctctggcagtgcactgctgagcctggaccagctgggtctctcacgttcggtgctcacgtttgggaagagacgcgtgctcctgacggaggttctggcctttcccacttggcctgcctggccttcggggcaggttcctgccggtagcagggaggcaagaccttgtccccgttctccatggacttgatctggctagggtcagcgactggaactcggcctcaggcccctcccctcgggaccgctcagcattgatcttccagaatgacgcttcctcctccttcctggtggggcccagggcgtccaggctggaggacctgctgccttgggaggacttgagggcctgggagccctgggaagctttggacagtggtctgggctcgctggcggcggtgccgttgctcggctcctggatggatagggcggagatactgaactccatctgactctttgtttcccaggagaaaggggcagagtgctcatcttgccaagttagatcctcgtccccgaagcgcaccaccttctggcccgtgggcccgcgcaagccggggaagcgcgtgagctcctccgagtccccggggtctcggggcgccggggcgcgcggccccaccaggcaccggtcgatgatctcgtcctgctgcgcgggcggcagccgcgcccactcgggcccgtacttctcgcggatcttctccttgtcctgcatgatcttcctggccatggggctcagcgacgagaagtaagtgaagcgctttcgctcccggtcgtccagaggccggttcccgctcatgaccgccgagcgcgaagccgcgatcgccgccgccatggacgccatgcccggcctgccccgctctcgacgaattcgagctcggccgatttggcctgat

SEQ ID NO: 434014 - DNA, 1661 bp, Homo Sapiens
  misc_feature (159)..(159): n is a, c, g, or t
  misc_feature (486)..(498): n is a, c, g, or t
  misc_feature (912)..(912): n is a, c, g, or t
  misc_feature (1015)..(1015): n is a, c, g, or t
agacaggtggcaaccttggctcaaacactggacttaatttattttattcttgctagtctttcacttctcaaagacgatgctctcaatcttcatccaggtgaactgctcccactaatctagccaccattcagtcacaccctacgtcctcgtttcctcatntttcagcgttccgacacctcagtgcacttgaactttagaggctatggttcggttgtccttcaaggaaaaaactgcaacatgaccatcatttgttttcatttcctgagtaagcttcgcagtccctcacagacctgtgaataagatgaatcacataaagtgaatcatatcctccaggggggcttatcacaatcaagatttgccaaaaaacagccaggcatggtggcttgtgcctgcagtcccggctgcttgggaggctgaggtgggaggatcccttgaagcaaggagtttgcaaccagcttgagcaatatttagcagagccctgtctcnnnnnnnnnnnnngatttgccaaaacacaaaccttcagagtagtgctcacaggattccaaattaatgttaaagtcacagtctgatgagggatttgaaaacattcctgcacactctgaaggctgggcatttgctagccagttgagacaaaatcaggtgttggttgcctgggtatgagaaggtgaaagccccattcataaatccctatgccttcccatttaaagtgtaccaaaccccttcaggtagacttgttggataccaggtgtgtgataagatttccacgttacagggtcatacacgactgattgctgtggacactgagtacatgacgggacttatgttcccttggagagaagcagggttggatcacagcggggaccattagggcacccgtgtttaacactgccccaagcctgtgattcttcattnccctgattcatgcatatccttgctttttataggactcacagaaaacaaccatttagcaattgtgaagctcaattctgacagagacttaggagagagacctctnttcttcaggatcaccaattatgccaaggtctcaatatacagaggtttaccacgctgggctggtcaggtgggcaggaaatcggtctgattaaggcagtgagcaaggtaggagagctctgaaacagattcgtgttaacgaagtacaaggactgagttggcaactgctacggagttaagagaattgtagttatttacaccacacagtcctagtttttcttacacacgagtccgcacaatcattcactgtaaaatttggtagtatgcacagagttttctttaaaataaaaacttgaaagaacttgaaggcaggaaccagtggcttcatcttggtattatcatcctttctatggcacacaggatatggtccccagtttttacaaaatatagcaagaagagtcacggcaaagaaggtgccaagaatgtggcagcgactcttcatcatgggtgagacgacttcgcgatggtggacacacacactaagatgacagtcatgaaggccaggatcacgttgatgcacctccccaggagaactttagcattcacggtgtctgtctgcagagcttgctgctcttgctggtggagctccagcttagaaatgcgagtctggcaggattccaaggcttcctggatgtcccgcgagcgctccc

SEQ ID NO: 434015 - DNA, 533 bp, Homo Sapiens
  misc_feature (488)..(488): n is a, c, g, or t
  misc_feature (517)..(517): n is a, c, g, or t
gtcggaactcgtgtgtaagaaaaactaggactgtgtggtgtaaataactacaattctcttaactccgtagcagttgccaactcagtccttgtacttcgttaacacgaatctgtttcagagctctcctaccttgctcactgccttaatcagaccgatttcctgcccacctgaccagcccagcgtggtaaacctctgtatattgagaccttggcataattggtgatcctgaagaaagaggtctctctcctaagtctctgtcagaattgagcttcacaattgctaatggttgttttctgtgagtcctataaaaagcaaggatatggcatgattcagggaatgaaggaatcacaggcttggggcagtgtttaaacactgtgggcctatttgtccccgtgtggattccaccctggtttcttctccagggggaccattaggtccgttccatggttactcagtgttccacaggcagttcagtcgtgtattgaccntgttaacgtgggaaatcttattcacacanctgtttattccaacat

SEQ ID NO: 434016 - DNA, 902 bp, Homo Sapiens
tttttgcccagctctaaggtaacttcatctatagctgctcagactgatgcatttatggacacctgtttccagtcaggtggggtctccagagaaactcaaaccagtgggatagaaagtccaacggatgaccatgtacagatggaccaagctggaatgtgcggagacatttttgagagtgttcattcatcatataatgttgctacaggtaacattataagcaacagtttagtagcagagacagtaactcatagtttgttacctcagaatgagcctaagactttaaatcaagatattgagaaatctgcaccaattataaatttcagtgcacagaatagtatgcttccttcacagaacatgacagataatcagacccaaaccatagatttattaagtgatttggaaaacatcttgtcaagtaatctgcctgcccagacattggatcatcgtagtcttttgtctgacacaaatcctggacctgacacccagctcccatctggcccagcccagaaccccggaatcgattttgatatcgaagagttcttttcggcctcaaatatccagactcaaactgaagagagtgaacttagcaccatgaccaccgagccagtcttggagtcactggacatagagactcaaacggacttcttactcgcagatacctctgctcagtcctatgggtgtaggggaaattctaacttcttaggccttgagatgtttgacacacagacacagacagacttaaactttttcttagacagtagccctcatctgcctctgggaagtattctgaaacactccagcttttccgtgagtactgattcatctgacacagagacccaaactgaaggagtctccactgctaaaatatacctgctctagaaagcaaagtcagttgaacagtc

SEQ ID NO: 434017 - DNA, 215 bp, Homo Sapiens
atgatgattcaaacactgtcatcaattgagaactaagtggcatttcactttccaaatggccggcaaatttctattcctaaaatctcatgttggactgattggttttcccctagatttctcattatacaaatggttatgctgggtctttaaatgccccttattttcatagagcaattaatcagacatgattaaatttctgtattaatcctacgtaa

SEQ ID NO: 434018 - DNA, 797 bp, Homo Sapiens
  misc_feature (67)..(104): n is a, c, g, or t
  misc_feature (244)..(264): n is a, c, g, or t
ttggtacactttggaaattcagtggcacaaggtacactgccataaacttgagggacattatacagtnnnnnnnnnnnnnnnnnnnnnnnnnnnnnnnnnnnnnnttctcctgttccaaacactgcattacataattttacctgcccaaacagaccatttacaaatattaggtcaataaactgctaacatccataaaaagatagctttcttactaaaatgcaagaatttaaaagattggtatctnnnnnnnnnnnnnnnnnnnnntggaatgaaagcctaaatatcacatctaaaatcggggttttttgtttgggccttcgtactcttctctccctctaccatatcctgctggagttccaggccccattcctctaggaccctgtccacccacaggccccgcacctccctgcccaaagcgctcagtacgcatgtcacttcccatcatggaaccactcatggttgctggtggaacgccaggattagcttcataacctatgccaccaccacctcctagaggtggaaatttctggcctcctgaaccatagggatctcccatgttcattgctcctccgccacccattcgcatgtctctttcccgtggatccatgtagcccattcggctgtaactttcctctctttggcgcctcatttgttcttccatctcacgttgacgaatcatcatctcttcctctcttctacgtcgttcctcctcttgcctcaattgcatttctttacgtttctgcatttcttgattgtgaagttcttcccatgcgtcttaattcttcctgtcgtctcat

SEQ ID NO: 434019 - DNA, 1417 bp, Homo Sapiens
tctcgttggttttctggacacagctcacctgatcctgctataaacgttgtcagtctgcttgtggcttccctccctggattgactcacgctgtgtgatgtcttgagaagtatctatccacttcaatgtgaatgagcactccaatatccagccaacatcaatcatttttaccatgtcacttcccatcatggaaccactcatggttgctggtggaacgcccggattcgctatcataacctatgccaccaccacttcctagaggtggaaatttctggcctcctgaaccatagggatctcccatgttcattgctcctccgccacccatttcgcatgtctctttcccgtggatccatgtagcccattcggctgtaactttcctctctttggcgcctcatttgttcttccatctcacgttgacgaatcatcatctcttcctctcttctacgtcgttcctcctcttgcctcaattgcatttctttacgtttctgcatttcttgattgtgaagttcttccatgcgtcttaattcttcctgtcgtctcatcagatcttggcgcaaaagatttgcctgatgttcatgataggcatcttccatttcactttccaatttgtcttttgcatctttcatgtttttttcaacttgttccctttgctgtttttccatttcatccaaagacttccatcgctgagaatattcgtactcaaacgtgccatgctgggcaaaacgaggaggggtttctctctccttttgatacattggattcttctgggcaagtttttcaggaagaccatcttcatcatctagttgttcaagtggttccacaatgactggacgaggagttgtcgtcagtaagaaaacaccttcactgcatcgttcaaatgcctttcttgctgctggcttagaagcaaattcaacaatgcctttccctgtagatcttccacgatcatccactattacaacagccctttcaataggaccaaattggctaaaggcttcttccaacagttcattggaaacataaggtgaaagattacgaacagaaagggcagcagcatgtgtggcaaagcgaactcgaagctgtctacctctcatgggtgtatcatccagttcggctttggcaatttcagccaaagctctagattcaagcttaataaatccgaatcctttgcctttgttgataaaaacttctcctggttctccatatttagcaaatagtcttttgaattcatcctccgtgatatcagcaggtagattcccaacaaacaaccgacatcgctgtgtgtaagttttctctccaggcctcctcaagagagacaaattggctttaaacccctccgagtccgagatcttctcctcgctgcggccgccgggcggggtcggagtcgggcctggccctcgtgccgaattcgccacccaggcc

SEQ ID NO: 434020 - DNA, 1202 bp, Homo Sapiens
  misc_feature (1079)..(1092): n is a, c, g, or t
  misc_feature (1125)..(1144): n is a, c, g, or t
ttttttttaattaggataatgcctttattaacgagaatgaaacgttcattcctccttccactccttctcgttggttttctggacacagctcacctgatcctgctagaaacgttgtcagtctgcttgtggcttccctccttgattgactcacgctgtgtgatgtcttgagaagtatctatccacttcatgtgaatgagcactccaatatcagccaacatcaatcattcttacctaaagaataataagaaaaagttaatataaaagacaagggtataaaataaaggtttgaaaatgctagtcaacttcaaaatttaaagagtaaaaatccagagataaagattgggggtaagttacagcataaaaaaataggaagaaacttcatggtgggggggaaatctaaaattattcttacataaaataagtagacacctgaattagaatgaaaactgtattttctttaaaatgtaaaagcctgactctcagtttcaccagtctgagcacaagtttgactgcaacccaaaatatactatcccttattttaatttattttacaacttttacctcaccaaattatttttaacatcatctcttttttcatattaaatcacatacccttctccccattcaattatttcttccattttcattcattcttaccaccttcatcattattcctccaatatttcccaactccccttccctcattacacaactctttattttttttccttcaatcctttttatttacctcattctttcccatctaattcctcacttatttttaaatttagggctttaaaagctattccttactggtacagcaattaaccaatttttttcttatgtataatacattcaccttcactatattccttgcatggccacatttcacaaaacaaatatcatccttcattcaatttccatttttttcttcctcccttaattattactgcaaagtttatattaattaatatttcccttttcacatttaccatccataatggatactatatcttttttcattcttccccccattctccacattttcctatcttaagtccaagcccttttcactctcnnnnnnnnnnnnnntatttttttcagcacttttgttcaaaagcaacnnnnnnnnnnnnnnnnnnnnaccagcaacttttgatatttccagttgattcttaaaaatttccaatcattatctatca

SEQ ID NO: 434021 - DNA, 843 bp, Homo Sapiens
  misc_feature (729)..(729): n is a, c, g, or t
  misc_feature (795)..(795): n is a, c, g, or t
ttcgctttgccacacatgctgctgccctttctgttcgtaatctttcaccttatgtttccaatgaactgttggaagaagcctttagccaatttggtcctattgaaagggctgttgtaatagtggatgatcgtggaagatctacagggaaaggcattgttgaatttgcttctaagccagcagcaagaaaggcatttgaacgatgcagtgaaggtgttttcttactgacgacaactcctcgtccagtcattgtggaaccacttgaacaactagatgatgaagatggtcttcctgaaaaacttgcccagaagaatccaatgtatcaaaaggagagagaaacccctcctcgttttgcccagcatggcacgtttgagtacgaatattctcagcgatggaagtctttggatgaaatggaaaaacagcaaagggaacaagttgaaaaaaacatgaaagatgcaaaagacaaattggaaagtgaaatggaagatgcctatcatgaacatcaggcaaatcttttgcgccaagatctgatgagacgacaggaagaattaagacgcatggaagaacttcacaatcaagaaatgcagaaacgtaaagaaatgcaattgaggcaagaggaggaacgacgtagaagagaggaagagatgatgattcgtcaacgtgagatggaagaacaaatgaggcgccaaagagaggaaagttacagccgaatgggctacatggatccacggngaaagaagacatgcgaatggggttggcggagggagcaatggaacatggggaagatcccctatgggnttcagggagggccagaaaattttccaccttcttagggaagggtggtgg

SEQ ID NO: 434022 - DNA, 672 bp, Homo Sapiens
  misc_feature (103)..(103): n is a, c, g, or t
  misc_feature (131)..(131): n is a, c, g, or t
acgtgacgatcatcattcttctctcttctacgtcgttctctctgctcaaaatgcattcttacgttttctgcatttctgatgtgaaagttcttccatgcgtctnaattcttcctgtcgtctcatcagatctnggcgcaaaagatttgcctgatgttcatgataggcatcttccatttcactttccaatttgtctttgcattctttcatgtttttttcaacttgttccctttgctgtttttccatttcatccaaagacttccatcgctgagaatattcgtactcaaacgtgccatgctgggcaaaacgaggaggggtttctctctccttttgatacattggattcttctgggcaagtttttcaggaagaccatcttcatcatctagttgttcaagtggttccacaatgactggacgaggagttgtcgtcagtaagaaaacaccttcactgcatcgttcaaatgcctttcttgctgctggcttagaagcaaattcaacaatgcctttccctgtagatcttccacgatcatccactattacaacagccctttcaataggaccaaattggctaaaggctttttccaacagttcattgggaaacataaggtgaaagattacgaacagaaagggcagcagcatgtgtggcaaagcgaactcgaagctgtctacctctcc

SEQ ID NO: 434023 - DNA, 1269 bp, Homo Sapiens
  misc_feature (376)..(376): n is a, c, g, or t
  misc_feature (383)..(392): n is a, c, g, or t
gggacaccacgccgtagttgttgtcccgccatcccttgtatttacctcattctttcccatctaagtcctcactgagtttaaagttagggctggaaaagctatgccttactgggacagcaaggaaccaatttttttctgagggagaagacattcaccttcactatatgcctggcagggccacagtgcacaaaacaaagatcagccttcattcaagttccaggtttttcttcctccctgaatgattactgcaaagggtatatgaagtaagagttccctgttgcacatgtaccatccataagggatactatatcgttttgcattcttccccccattctccacattgtcctatcttaagtccaagcccttttcactctcnaaaacannnnnnnnnntatttttttcagcactggtgttcaaaagcaacgtttttatggttaatggtttaccagcaactgttgagatttccagttgagtcttaaaaattgccaatcattatctagcagcaatgacagatgattaggagcagtcaaatcctctgaattctttccctaataggcagccatttgagaactgcactagctgacatcactaaaacattatcagctaaagccaaaaccaaataaaggcccagaccaacatcctggctctctaaaacctgtccaaaatcattaagtgaaaggcagtaaatgcaggactgtggatcatgtcactgcagctgacaatgattaacaataggagacatgcaacccccattaaggttaaaagtccaaaactagtcacacgcatctctttattggggaaaagtgagactattatgcattcttggtaggtttgcaaccttgcatgaagagcacccattgcatttctttcatctttcagaaagcaccggtatctgttccaagggcctaacagtacgaaaatacattctggcatcacacctctgaacccaagactgttctcattaaaaataattttggtttgtaacaaaattatgaaatacaatgcaagcacctcggtatagcattattactgaaaccacttaattcccagctttttgagttttttaaaaaaacccactgcactaagattcacaattcattgctacatacaaattaaagctagtaagaacacactaacgtcacaagtttctcattctaaagtgcaaaagccttaatcatctgaaagtgaacagggtaaggcaaattaaccccccaccccaataaagttcccttgaagtccatatattatataccaaggacatcctccgct

SEQ ID NO: 434024 - DNA, 382 bp, Homo Sapiens
  misc_feature (208)..(223): n is a, c, g, or t
taatgttttagtgatgtcagctagtgcagttctcaaatggctgcctattagggaaagaattcagaggatttgactgctcctaatcatctgtcattgctgctagataatgattggcaatttttaagactcaactggaaatctcaacagttgctggtaaaccattaaccataaaaacgttgcttttgaacaccagtgctgaaaaaaatannnnnnnnnnnnnnnngagagtgaaaagggcttggacttaagataggacaatgtggagaatggggggaagaatgcaaaacgatatagtatcccttatgggatgggtacatgtgccaacaggggaactgtttactttcatattaccctttggcagtaattcatttcaggggaggga

SEQ ID NO: 434025 - DNA, 1696 bp, Homo Sapiens
  misc_feature (405)..(413): n is a, c, g, or t
cagttattaacacactcaaactggtggagcttgttcaccctaggaaggggattgtatatatggcaggcttccctggtgccgatgtaaagggctacatttgggaacatttgacttccttgggactcttaagtgcatactgatggcatgaagtaaaaggggcctcaatgatgataggaaaatcagttcttttaaaatttcttcaagaaaatccaggctatcacatagtctttctgtgtgacttattaggagataggaagagcattgggaaacttgcacagctagctatgcatctacattttggtttggggttagttatgaaatgttcttaatatgacgtgttcgataacttcacataaacttcctgttctccaaaacctcaaagagatagagttaatgagttgttgnnnnnnnnnaaatgggggtagttttctatctgtcatgggctctagcatctactccgctacccaattctgtcatctccaagctgagtttcctcttctgaggcagaggctggagcagttctttttcagttctcatcctctccatcccaatccagtatatcaatcaactctaactcggagacgtctagctggcaatgtttctaaaactttcactggatttctttagacattgaagcaaacatttttttctaagaattgcttctcagatgatgatatcaaatgtatatgcttttgcaagtttgaaaagttcaaattaaccacttttgactaggtaagtctttctaaaaaccatttaaagctaactgggtcttagcatcctcctgtgtatggaagagacaggtgaccgctccaggttgggtgctcacagaacccttttcctgactctcgtggaagatggtggaaggaaaatagactgtctcatcaaccctcctgtgtcctctgaagcaatctcagtttttattaaccacctcttctgtgtttctggtagctatttaacctgtatttaatctgtacttcctatgccagcctcaattttatttgatttttaaaattattctcttctaaccaatgaagtgtttgtcagtatgccccaaagcttgctcttttgtgctcccttttgaataactttctatccagaaaaagagattatttgggacttgagatttgcagtgataccaacttatagcaatgatgtactttaagggaactacccaactatgttgtgatagaagaaagagaaaccttcactttggcattttttttaatcactgtttatttttctgtttgcggcccaggaagcagtgggaggtggtggcagatatgctttgcatatggattgttatgtttttatttgggcaagtttaatcatggaaaactcaaaaagaaggggggaaatggtcagtttaagccaaaagaaactttctaaacaatgtataggtacacagcaaaattaaacaaatccaacaatttctgaagcttagtgtaattgagtggtggttgttattcaataaaattattcccaaaagtgtttctcctaagagtgcagttcccatgagtcacttcctgaacccattgaccaaaggtggacagagacaatcctgtagaccttgacattcagaaagatgtgagctgcttactgatcatatatgcatacgtttttttacagcagaggataccattgtccacaaaactgatgttcttttgtggttttatgtacagacttgtccggggttgtt

SEQ ID NO: 434026 - DNA, 417 bp, Homo Sapiens
  misc_feature (369)..(377): n is a, c, g, or t
ccagttagcctttaaaagggttttttagcaaagaccttaccctagtccaaaagtggttaatttgaacttttccaaacttgcaaaagccatatacatttgatatcatcatcctgagaagcaattccttagaaaaaaatgtttgccttcaatgtcctaaagaaatcccagtgaaagttttagaaacattgccagctagacgtctccgagttagagttgattgatatactggattgggatggagaggatgagaactgaaaaagaactgctccagcctctgcctcagaagaggaaactcagcttggagatgacagaattgggtagcggagtagatgctagagcccatgacagatagaaaactacccccatttnnnnnnnnncaacaactcattaactctatctctttgaggttttggagaa

SEQ ID NO: 434027 - DNA, 1336 bp, Homo Sapiens
  misc_feature (1061)..(1098): n is a, c, g, or t
ttttttgccacaaaagacctttaatggcctcctatttattgttcttttgttcatttgttagagttgaatgaactataataacttgtctgacataataagaatgccacaggtataacagataaacctggcaggtggtccaggaatgagagtgtcacaaaataatcactcaacacaagggccacagacctggagattcttcccagccatccctcactcctgccccaggacacaacccatgcaggcccccattccataggaagaggcaggtcccacagtgtctgtggctagaccttaacactgagcagagatgcccgggaagatggcacttcctatgctcgttcccaagtgctctgctcatctgccatgcaggtcaggaccataccccgagtttgtgaggcacccacctctcatactcaccacctcatatgaccacctatcatacccacctctcctatgacccttgcaattgtcccagtgaggtgggaagagcctggactagccccattttgcacacagggaaactaaggacacactcggaccgaatgtaatacacccgtgtcatgcgcttgctgtgccctgagcttcacattttcacctagaattccctggggggtgggagtgggggacagggcaggcagggttttgtgccaagggctggtccagttctcactaaagtgtccaggattcctgggggaatcctgccctcaaaggagggacttttgtcataaaatcctccctgagtctgtcttttatgtgagccaagatttccatccatccggcgctgtgtaaagatgaatttaaccctagcctctctcctatcacactgcttctcctgctgtgtcccttgggcctaggccaggaaagtggggtgccagataggggtgcagacacaagtcctcagtgggggattgagcctgtttccttgctccagagctccccatgcttcatgggccaatatcagggtcacgacccatccccactgagcaccaggtccctgtccaaatcaaaccttggccagagcttcagggtgggttggctagaaaaaccatcaactatgtacnnnnnnnnnnnnnnnnnnnnnnnnnnnnnnnnnnnnnnataaatgcttgtgcctgggtctgtgacccaagttccaacacaaagacactttgtactggaacgctggagccattccaacatgaacagcaagaatagaacctgtgctggctggtctaagatcaaacctcgagatggtggtttgaagttcttcttcaaagaaagcttgaaaatgaaatctcagtaggcaagacagataaaagcagagttattctggtggcggcggaaatgggaggagtgc

SEQ ID NO: 434028 - DNA, 563 bp, Homo Sapiens
  misc_feature (45)..(45): n is a, c, g, or t
  misc_feature (64)..(64): n is a, c, g, or t
  misc_feature (91)..(91): n is a, c, g, or t
cctctggttttgaaagaaaccccgggctccccctaaaaaataaantctaaaactttgaaccccngctttccccctcaacacataccccccnggaaacaggctgaacctccatgaaaagctgccaggaagtcattttggccttcaggggctgggagagccagacacaacctctgaaacagagtcagggacgtgggaacataaaacatccacttagccatcctaacagtgctggtcctgtgaaggggtgttggttggtgtttgggagcaaagaaaaggtgctgcgcccctagagtttggaatctgatgggcagaaagtgcctctaaaccggaggtcaagatgtacatcttcaaactgcacacgtaacctctgagcagaagcccctggaggtggggaccccagcttcagagactccccggcactgatcacagtccatcccccccattcacataaggtcctgccactctcaggctgtctacaaagtacaagcagtgacagcaagttactcaatcttacctcctcaccccttccgcccaacccccagcatcctttagaagtgaccctt

SEQ ID NO: 434029 - DNA, 546 bp, Homo Sapiens
  misc_feature (343)..(357): n is a, c, g, or t
agagaaaggtttcaaatcagccacttaagcagtctattactagtgtaaaataaattccatttaacatcacagcataggaataatgatattgctcaaaaatacagaaccctgatatatagcataattattttagaactatcatcacacatttatcgagtgtctatgtatccagcacagtgaaagatttagcttaaagggtggaggcgggcagattgctacaattggtttttaaagacagtatgtggaaagtcagaataattttagattaccaagcaattagggggcacagagaaagaacagcaggagatggcagactgctctacttccatcttcagtggggttnnnnnnnnnnnnnnngccacaataacaacagaaatttaactgaaagtgatgtccaaactcaaagtagagtataataccacctggtaattaatgtcatacctgacagagatatataaaaagaatgaatgactacagtcaaattcaacttaaagtttaagcagaatcccaaatttaagtaagtctcttttcattacatagatatcc

SEQ ID NO: 434030 - DNA, 714 bp, Homo Sapiens
  misc_feature (571)..(571): n is a, c, g, or t
  misc_feature (588)..(588): n is a, c, g, or t
  misc_feature (675)..(676): n is a, c, g, or t
ggagcagcagctgtttattgaatgaagcgaaaggaaagcttccacatgctggaaggggacccaaaagggttgccattgctagcttgggcggctagagctcatatccctgttactccctcccctttctttctttttgtccattaagagtggttcttccttcaatccccccttggagtggttaattttgaatccttcattcgatcagttaagaactcaaaaccctgagtcatgggggtcttttgtaaaagtccccaaactggcccaggaagtcccgccaactccacccctcattctgaaaggtaagaaggaggcaaaaactataggagaaaaaagcaagatacttagaaacttttgaaggtttctgaaatggaggctctgtttcttgcccctccccatcagattcacaccaaggagggataacagagccatcaataggtgtgagagtctgagaacagtagggaggtttttcttcctctttcctaaaaccatgacattgcagttcctgttaccaccttggtgtgggggcaagaaagtagaaataatcactgtacgtagtagacagagagcttcngtatcaggaactaaggnggccctagcccattatgtcaggttttctgcctgtccaggctgagaaagtggccaacttagagtggttagactgtgatgaatgatganntttgtggaaataaagcagagtttatccagagtcttgcg

SEQ ID NO: 434031 - DNA, 1275 bp, Homo Sapiens
  misc_feature (71)..(80): n is a, c, g, or t
  misc_feature (477)..(530): n is a, c, g, or t
  misc_feature (1193)..(1229): n is a, c, g, or t
atgctgcacggcgtcgcctgcccctctgtcgttggcccgccggcccggctgtgtgatcgccgccttgtcgnnnnnnnnnnggctgggctgtgtcgcgcccccgccgccacaccggtggaccgcgcatcgccgacgtcgccaccgcccgcgtcgtcgttgcccctcggccaccttgtgtgcgccccccgatggttgcgctccggcgcccctcctctgctgtggttgtggtctggccggcccctgccctgggcgctcgcactcgcaccactcgccgtgggcttgtgcccgtgtgcgtggtcgccccgcgtgctggctggtcgcctcgtcgtgtgtcggtgccgctgtcgcgggtgctccttggttcctcgcggtgctcgtcggggttggtggtgccgcggaccctcgctcgctgtgccgatggcccggctgccccgtgttgcgccttggtggccgctcgctccttggcgtgcatggggnnnnnnnnnnnnnnnnnnnnnnnnnnnnnnnnnnnnnnnnnnnnnnnnnnnnnnaggtgctggagggggatgtcgggggtcagcgccctcaccggaagttgtgccgacacttcgggcagtggaactcagccaggccccacatcttgtcagctggcactggctcgtagcgcttccggcatttccggcaccgggatacctccttccgctggggcacgcggcgccaccagacgtggtcgcaggaggagcaggcaaactgccggtccacagcagggataaggtcgtcctgggcacgttgaaacatgcgtaggttggcttctgtcagtggcaggagggaggtcgccactgcctgaatgtcccggtcctgcttcatatcttctggtggatcctgggcatccagatcgttacttagttcttggccatctttttgctttaccccgtacacgatggagcgccccactcccgtgtggtcgctgccgaatttcctcatcagagcccccgccttcttggaggataccttcccatgaaacttctcccggaggcgccggacgctcttctccagctccacaccttcctgagacatggtggcggcggcgcagttccccgcgagggtccgcactgcgcggctcagccgcccccctacctgggtgcgcccgtcggtccagcagccgcgcagagcccgctctcgacgaattcgagctcggccgatttggcctgatnnnnnnnnnnnnnnnnnnnnnnnnnnnnnnnnnnnnncgccgccaccgcggtgagctccgttcgccctatagtgattatcatc

SEQ ID NO: 434032 - DNA, 797 bp, Homo Sapiens
tggtgttctccaagtccccggtggtgcgtaacaccatgacaggcatggccaggagggcggccagcacccaaagaacatgccgtggccacggccccgctgacccgcagcctcagccgagcattggccactggcctcacgatggccaggtagcggtcgaagctgaggccggtgaggcagaagacgctggcgtacatgttgacgaagatgaggtagctgctgagcttgcagaagaaggtcccaaagggccagtcatagtcccggtacgtgtaggtagcccacaggggcagcgtcaccacgaaggtcaggtcagccaccgccaggctagcaatgaagatatcagctgagcgcctcttctcccggctgctccgaaacacggtccagagcaccagaccgtttcccgtggtgcccaggaggaagaccaacatgtagatggcagggatgagggcccccgaggatttccagtctgtgtactcacactcagactggttgtctgccccatagtagttgtcaaaatcaccaccttcctccatgctggggagtggagagaagacgggcagagggtcccagggacaccagctccgtggctctgtcacccactctgcaagcagcctgaatttctggcttgagcctcagagagtaagaagggctgaagatgcccagagtccttcccagcactcaggaggagctgcctctgggttctccagaccctggaggaagcctgtctcctgcagaatttcctccaccctctcttgccttacccccgtctcagatcctaagattcggggccagtaccagcc

SEQ ID NO: 434033 - DNA, 766 bp, Homo Sapiens
caactgggtgtggcaagggaacttgtcccgttaagctgggaaaaccccacaacatcctcgggtttcccaccgtccttccccaaggctgtggtccagggaaactatgaatgcgctatgtgggctcagttgccacttgcagggcaagcaatgttggcactggctgattttccagacctgtggtcacctctcccgacttcagggcttgccaggggcaggggcaatggggtggaccagatgtctccaacctctcagagcacaaaggagggtgctggtttggctttcctgttagcttaaattcaaccatctcctcaaaagcaagggcaggaaaagatgagtcccattcaccatcacccaggcaaggtgggaggcagctgtcccctgaccgatggcagtgtacttcccgaaccctggcctcgacaatccttcaggggagcccgtgcctctctgtagaaagaggtattcaaggaggaactgaatgggagacagaggcataaaaatacagacaggttaaggagcttgccccaagaggcagagcaaagaggctcaggaagcaggactgtttctcaagccacaccgtggttcttgactgctctgtcccgcccagccttggtgaccagatggaccaagctctccctcagaatccctctcttcaagctcgcagccatcagtggcttaagcggtagagggaagaatgctcccagctcaatggccactgtgtcctagcacttgattttaggactgtcagccccatgagggcagatcaact

SEQ ID NO: 434034 - DNA, 1017 bp, Homo Sapiens
  misc_feature (21)..(21): n is a, c, g, or t
  misc_feature (24)..(24): n is a, c, g, or t
taaaagccagagttattctgntgncggcgaaaatgggaggagggctggaaacctatcctttgcctccactcccatcttccccactttagcatcccctgacaaagctctgtggaatatcaggggttccgcagcacctggtttgaaaaccactgtgtcagtgtctacaaaccataggccccacggacctgtgctttgacttcccttttggggtgacgagttggagtgtgatggggggaggatgtttccccttcaacagggcgtgtctttgaagccgctgtgcagtgaccctgtggggaagtggtagaggtggggtcctgccactttcgtccaggaggaatggcagaagagatggagctgcctgggccaggaggaaacaccaagcccagtgcaggccgtatagatgagggttcaggagtgttttggtccttttgagtttaaaaaattatagatatcagaacaggcataggcctatgtccatgagaccctataagagtgtaagactgggacctaaccccttcctcctggatgggtggagagcaaccagtccccagtgacaggcaggagagaagctgccgctctgggatgctgacgccactgcatccgctgtggctcggctctcaggacaaaaggcttgggtttttcctgggcccgaagccctcccaatgtcactgagaagctgtggtggctccagttgctcctggaagaggccttacactttgaagggaaggaacagacaatttctatttctccttgcccttagatttctgcggatgggtggtttcagctccctgagcctgggggctggtggctctctttaacctgggtcagagccaaggccccttggcctctgtggggtctgagagatgggagatgtgacaccaggcctaggagggtccaagatgtccccctccaccaatcactgacaatatccaggtcttccctctgtgtcctggttgctgggaccactatttttgggcatgatattcctgaattgtatctaaatttccctctcagctg

SEQ ID NO: 434035 - DNA, 2580 bp, Homo Sapiens
  misc_feature (473)..(550): n is a, c, g, or t
cccccttgtttgttctttccgcctgctgtagatatgtttgcgctcgttcgtttctctcctctcggttgcctgcagtctttcttctgctcggccgcgctgatggtggcgcgttggtttttgtctcccttcctagctcgttcgctgcctattgattttgtgtgttcccttcggccggcggtcggcttcattcctctgcttgctgtattgtgggtgtcgttctcctcctcgattgttgtctgtccccccccatacctgagggggggttgttcttctcgcagatgtgtttctcttgctgtgttgtgttgtcctgccccatgctgggttttgttaaacgcgcgtccctgcttctgctgttttttattattaccctctctgtttgctgggtcccctcttctgtaatatagtatctaggtgcggtattttgctcgttctgccccctctgcgtgtgtattttttgtggcgccgcccccccnnnnnnnnnnnnnnnnnnnnnnnnnnnnnnnnnnnnnnnnnnnnnnnnnnnnnnnnnnnnnnnnnnnnnnnnnnnnnncctgcaataagtagtcatttaattaaagaacaaaattaacaggaatcaaaatgttgcagctgtattttttgttagacattatataaaaaaggaaaagtataatacagtaaatcatcttgtataacatgaacttaaagagttttcaaattaattatgatcaggataaaaatgtcttttgaacataatactgaatgacactgtcacatgtccctcatgtcagaggcctgggagtggtgagcctgcacatgcacgttgcccgtcctccattacactgcagaactgtaaaacaaggttgaaaggcaaacaacagttttcttctgatagagttatgttgggtcttaactgaccccaacagttcacactcctcagacaccaaagaaggaaggaagtgtgtcctctggttactcctcttgcaggtaagtgtggtcaagattgcacctgtgtgtgtgatcctactcttctcacaaacacagcaggtagggtagtcttgagctgaacttcaggaaagttccctgatgaatgttcagtgttggtatcaaaaaattaaacacaaattcttctcagaagaaaatctctatggcctgtggaatcttgtcaagtgcttgcttgatgcatgtacctccatttcattacttttgtactcatttaattctttacgaattgctgccttatctgctgctgacagtctcgtccagggtttgtctgccctcctgtcatagtcctgcgcttttgctacttccacgtaatcactgaatcgtatcagaatttttctgtctcttaattcatcaacagtgggtctctgattaagctttcttgtcaatctttgcttgatttctcttctttcttcctgctctgtctgatcattcctttgtttcaagatatttcttctctccagctcttccacggcaggtctttggctcagccgtttggaaagcttcatctcgatctgctgccggatctcctgtctttcttcatcagtccttctggggaaaatgttccggtcttctagttcctgtttgcttggccggttccttagcttcacggccaggagctccttcttgcatttccgtggcagtgttccagaaataatggagtcgttcagcgcctcctcgtcctgatacaaaagcaagtcgtctttgagttcagaatttatgatcaggttctccttgttctcctcagattccttagcggcagttcgcttgttctccaatgccccgtcaaagctccaagcctcctccctctccttgccccgctccacgctggacgttctcgacagacggacatccagccgcttctttggagaccctttactttctcttccttgaaaactgtcctggcggtgcttcgtggccagcgccctgtgcagctcctcaatgacgcggcttgggggaagaggccggtggaccgtggtgagatgcggagaccccgtgggtgtggagagctggccccggagggaagggtcggcactcttcatgctggaggcttggaagagtgtggcttggcctgtgacattttttgtggttttggagcttgccttgggtggcggagtgggcagcagtggggggctggggagctggcccacggatctctccagaggtctgggaggactgtccagggagtcagccccagctaaggcttgggagagctcattggtggtgggcaggaggctgccagcgtctgcttcttcaccactggatgcagaaggcatcttggctgcatcgtccaagtgggcagctgaggacagtggcttgtccagggagacctggtccgtcccagtggccaaggggcttccgggctgggcatcttctgaagtcagcgtctccgacttgggagtgggtggttcactctgtacagatcggggtcctccatcggggttgcaagttttgctttcagcatcctgctccatcatctccagcagccccttcttgatgagctcctctcggccttgcctgccggccatcttcttctccagcgctgacgttgtctgcttcagtttttcgtttttctttttcctccatttccctcgtgcc

SEQ ID NO: 434036 - DNA, 822 bp, Homo Sapiens
gtttcgtgctctaagtcatcaacagtgggtctctgattaagctttctgtcaatctttgcttgatttctcttctttcttcctgctctgtctgatcagtcctttgtttcaagatatttcttctctccagctcttccacggcaggtctttggcttcagccgtctgcggaaaaacactaaaattacattttgcaccatagtggctgcctgcaaaattccacctggggtctgcaaggatgagaggtggctggcaaaacccctaataagatcgcctcccaaaattgggaggaagagaaagtgaaacctttggttgttgcctcttgctggcaaaatcaagtcagacttccaggtgacagtcaaagctctcccgtcacagagctaatactagactagtccttgctccagctccacatgtgcaggtcttcatttttctgatctgtcgcccaaactttgcctggtctggactgttcaccggagcagtgtgtttaagcagcgaggagatctgttcaggaaattctttttcctgcccattggcttagggaggggtgggtagcaccacctgttttcaggcttctggatccagagatgctgggagattcatgcttcccagcactgcctccgttgtcagcacgggagacaccagccttgggagcactgatctctccttccggctttctgcctgctgaactgctgagtagagccgcctgtgcccagcccagcacagggggagtgtctaaagacgtctaagggcctcccgcctcttgtcagcaagcatgcagcccagctcgagcgctgaataaaaactgggaatctcttccaggccagc

SEQ ID NO: 434037 - DNA, 2055 bp, Homo Sapiens
gagaaaacagggaactttagtataaaataagaggtctgcgggacagggaggaacctgaggggcttccataatttaacactcttcaaaagcacagacaatagcaagggcagctggggtgggggccgggcgagggctggaccacccccggccctgcccactcaactgaggggcacactgcagacctggggctcttgtggcaggggcggggagtgtctccccaggagtgaccagtcacatgctggggacagggatgagggtaacactgatgtttcagaggaagaggtcattgtacttggcagtgggtgggggacaaggctgaggccacaagggctattacatcgcccgtgtccgggccagtctggggggcccccaaattttgtgcaggtggggggactggagcagtccatccatcatggttagtcttgttaatacgttgatctgtgaggtcagcagggagggttatggctaggaggctgggggcatggggttgggggggcccgatatccatggcttcacaccactgtgccactcggggagttgcctggttgggaggagatgccctctaccactgacttgctgggtgacctgggccaacttccttcccctgtctgggcctcggtctcctcgtctgtgaacgccttgcccggccgggcccaggtgcagatgaggccctcctggcaggcagtgatgatgcagtcctccaggaacaggaggactgtgagccgctcctgggcgatcttcttgcacacaaggggctccagcaggggcacctcgtggatgcgcgggcacagcgcagtgcccagcaccttggcggggtccaggcggctgcggggaacagggccgctgggcttctccccaccactgccactgccgccactgccaccccggctgatgttgcccaggctgtggtagcgcttgtgctccttctctgccccccggtcccgccgctcctgcagtgtgagcgtggcgaagcggccaatgctgaatggtgtgccaggctctgccgccacacccgggccgcccgccttgcccccgccagctgggtgcgggagactgttggagcgggacagcgagcgaggcagggggcctgggccaggctcgccacccctcgagctgctggcggccggtggcgtggtgccaggtgtgccagggagggtgcgggtgcgggccaggggcgggtgcgggtagagcacgtcttcagtgaggtcccacaggcagaactgcgtgtcctggcccgccgagccaaagcggtaagtaatggagccagccttgggcagtggagagagcggggcgcccccggccgagcctgtgcccgcagcctcgggctcctcctcctcctcttcgccgctccgctccccatcagcaccggctgctgtcgccgcctcctctgcccttgtggtgtaggggtcaaaggccacagcgttgacccaggacttgtggccatggcctcgagccaccacgcggccctcggtgaaggaccacacggtgaccaggtcatcttcgccacccgtcaccacgtagcggccgtcagggctccagcacacacacagcaggcccccaaagtagctcttcatgagcccacgcaggagcatggagtcgaagtggaagacgcgcaggcagccatcctggctcacacaggccaggtgccggccatcgggcgagaaggcgaactcgttgaggggcccctcacccaccgcccacttggccagcgggttgcggggtgccttgctcttggcagcatagacagagaagccctcgccctgcttcagcaggctgtactggggcggggccgaggcgcaggggtggctgacgttgtacaggtacaggtggcactggcgtgtgatgccaggaacaggctctccgactcaggcagccacttcagatatgtcaccttggtcttgtcgatcaaccgctcctcattgaacagcttgctggtgtcctttttgatgagatccaggtactgcacttgacccgctgagaagcccaccagcagcgagatggtctcggtggcagcagtgaactggttgaaatcgtggcaggtgggctgggtgccct

SEQ ID NO: 434038 - DNA, 1336 bp, Homo Sapiens
gatcctcccacttcaagcctcctaaagtgctgggattaacaggagtgcaccacttgagcccagctggcatttacctgaacactgaccagatgccccaggtgtccaagcgcttcacaacgtctgtctccctctcacccaccccaagaggccagggatgcctgagccctgcctcccagacagactgtcaaagctcacggaagttaaggcgtttgcccacggccacaccactaagggacaggaaaccagggatttggacctgagtccgtcctgttccacgccccttggagcagacaggaagccaggctcacaccagggatccacccccgccacccgggctgttcccaccagccccgcatacacattccagtgctaaatatagcgaagtcccatgtttacattttcttgatgaggaggctgacctggggcgggacacagagggatgtcaggagtcatgggaaaggccacaggaaaaggagatgtgactcggggcactgcctgggacctgtgcggctggccagctgggaccacaactgaacccactcgggagccagaacatagtggggctggtctcaggaacccagcaatagcacagcccatggaggagggagaggaggaaactgactttagggagcgcttcctgtgtgccaaaggctgactgtgtgatcttacccagccctcagaaccacgcatgatcggcatacccacgttctgggtcaaggttcaaggtcacatggctggtgagacgggccacactgggacccaggtctttgcatcaagggccttgtttcacatccaccgcacaacccccttctagtcccaggaagccacaagctgctgaggaatgtttaggatgaaggtgccgggaacgggagacagcaatgccagcctcacagggacgagggctggtggccccaagccctccaagcccccaagccaatgcacacccagcctcctgctgcagaggcgccttgcgttctgaggtcttaggggaggctgcaccccaggccaggtgtgagcaaggggactcagtggcacgcacatctcagcttctccttccgggacagctccacctgttcctcgtccatggtggtgtcgatgggccggaagtaggacatgatggtcaggaagtcctcgaaattgatctcatcagccaggccactgggtcccttgcgcaggttcctgttgtcgaagaaggcacgaacaattttggatcggatggggttgagctccaggtccgggacattgttgaagttctccttgcgaatggtaggctgatctccactcagctgcttaaatctccgatggagctgctcgatctgatccgatgagaagccgg

SEQ ID NO: 434039 - DNA, 2365 bp, Homo Sapiens
  misc_feature (31)..(31): n is a, c, g, or t
  misc_feature (73)..(73): n is a, c, g, or t
cctgcaaacaacgctctacaatccgattatncagctcggtgcttattttagagtcctcggataaaaactggcnatatttcctgtatgactttctgacacggatgagtctgtccattttccacaatgggattggtatgcctaaatatcactgcaaggcgatctaagaacactgtgggatctgaggatatgccattgctgggctcttgagacaacagctttttcaatgccataacctgaacagaacatagttcactaagacattcggtaatcttatccaaaggtaatcgggctaggacaagtgctgtcccttttagcaagcccacagcagcttctggagacaacaggaaggaatcgagggagcgggcaatctccaggagtccattaaagtgctgagccatgtgatctcggcagacagagcaaatgttatgaatggctttggctgcagcagaagccaggggcttttcacacaggcctttcatcaaatagcccaacacagggtcaaggaactgaggatttcgatcaacgacttcactcatctctccaaccaattcaatgctggtgtatcgcacagccgtatgtacggtctccgggaggcggacaactccttctaggacttccacaagtgttggattgttttccggatcaacactctttgctatagcagccatgataaagagaaccgcttctgtcacctcccagggtgggttgccttctttcagagtagaatataactgagcaaaacactccatagaccctatcaagaaaatcaagtcctttaccaggtctgataccctcatgcgaaactccccaaagtcatcagtctcctcaggaaccccctcatggtctggttccagctggcagtgtcgagccaaggcgtgaagcagcctctgaatgtaagctttgaagatgccatgaataacttcatcgttagttttgtacaaatgttcccccagtcggtaccaaaagttaaatgaaatttctactacctcatattgaggatggcctgcacagataagcagcagctccagagttcgaaggtccccaagactttggcctggagtacaaacaattttttcaagaaaagtttcacatagttcagtgaaaatacggcagtaattcagaactttgtctaaatcttcacgtgccacggccatatgataggcagtctccaatgtcagcactccctgaaaaagttgcatggctaatggcaagttagtctccacattctcaatggcatagagagctgagcatacacagtccgaagcagcttcatgtaggttagacgagggtcttatcctgttgcaaaaacctcaaaaagggagtgctagtaatttattgttagccatgaagttactgtccaaaactcccaagttaaaccaacttcccaaacagcgaaaaaccttcataagcattttctcatctgttcctgctttttctacacaggtcatcaatagagatacctactgtactagagtagaaggccaaatcttctataatttctgtgcgcccgattagctccaattcgtaaaggaacgactatgtacttctttcaggtaacactgtaaggatctccagcaaaaaaggcaaagaagtcacatcattgctgtatttttccaccagtgttttgcacacatcccttccaggaaggcatctgtagggcaagatctgctattgctaaagccagctgcgttacaataacaggtgacaagtctttcaagttctggatatgggttagcaatgagtcccgtaaagaggcatgagagtctgtggggagctcataaaatgaggtctgaatcttcattttcatggtctgtgcagcaaaatagcatgactccacatcctgccggatctgtaacaactggtctgagatctcccatgcatgaaccgaacgctgcagctccccaagccaaaaagaggcgcgctcctttccgctgggatctgggtcgtggtaaagcgcctgcactgcctggtacacgagctgcaatgtcggctttgctccttccatggtggtggcggtagtggcggtagcgacggctctgattcttctccggaggattcctcggttgctccgccttcgcgcttcctcactgtctgggccacggccgctccctgactggcgccatctcctcctctttggccgttaccagggcagaaggttctccgtggaagttgccccctcggaaacagctattaggtcgtattcaggttcctggccttttttccggtttttccacttgattctagactcttgagtccacagattctggcgctcccgtcttcagtcgctgacttgccctcagaagcctatcttgggaggccacacaccagcctcgggccgattaccacccggcctctacctagccta

SEQ ID NO: 434040 - DNA, 1691 bp, Homo Sapiens
  misc_feature (520)..(530): n is a, c, g, or t
  misc_feature (1577)..(1577): n is a, c, g, or t
  misc_feature (1583)..(1583): n is a, c, g, or t
  misc_feature (1660)..(1660): n is a, c, g, or t
actccaatccccttgaaactctacttttatctaggatccagacacctgtccttacccacttttccaaacggggaagactcaggtatcaggaattacccattgcacattttgcggggggggctaatgtagacatgacaccaagtgcttttcattttaattctctaagcagtagatgagatctttcccttgggagaaatccacagagatggagttttcccatttctgcttatacgaaatatgactgaaaatgaacaaagccacctttttaaccaaatacactagaacatatgcactcaagagttagcataattggagttattttcttgatgttgcatgtgccaagaacacttagggttcccctttgggattacctttgaagccatgcaaggcaagaggcctcacaactttatagtcagaccttgtgttttatccaacccctcctcctgcccaccaagatcatcctgagctgcttcacccattttatttagcagacttattttctaatgctctttagctgttnnnnnnnnnnntcattcctcaaaaaatagatctacccttaaaggacaaagatttaccaacactgaagacccttacaagttgacagtttctaaagagggttctaggaatgttctgtgtaaggtcagcttcactggaataaacatacatcttcccaaggtgactacttcaaaggcaacactacccattcgggtgcagaaattaccgtacttactctgccataaatgtaaaatgtgtataaagttaagctattgcattttttcataacacatttaaatagaaattggcttttaaagtattgtagttaaaaccagatctcaccaagtaatagttgtgcaattgacaaatgtttggtgccatgtaatggagatgtcacactacacagttgtagtttaaatgcagtccaacataaggtgcatgccactgaactgtaaccctagtaatgtgtcttgtacagttgaaaaataatacttcacctttatataggttaagatatgtaccttatctttaccactcagggtggctttaaaagacggacagctttaggtttgttctcactggaactggttacactttctgtgcaaacttaaccaagtgatgatcgtctggaagctgcattccctcatttccactgtttggtgtgaatctagtctccccactttatctaaaaggaggctagcagggccccagcctgagcagagcagctagagagtgcttccagattcctttgccaaaggaggcccattttccagctgtgagtgacatctgtagtcattggcttcattgcctggcactagccctgtctagaagtggagaaagctggatcacagctggaccacaaccagccccaatccaggatttcccataccatgctggctgtgggctctgtgagcctcagccaggtggccaggctatacttgtcacagctggccacaggcctgctgaaggaacatggggtgtagagccagagcctggttctggttctccgcttgaacagctgacctcgtgcaatcacaggaactctgcgtctccatgtttcactcagatagagaaaatgcctnctttgnttacctctttgaagctgaagtaagtgagactggtgcatgtaaattaatggtagtagagcaccttccacatctgattntatcagtttcccatcacttcttagggccggc

SEQ ID NO: 434041 - DNA, 1544 bp, Homo Sapiens
  misc_feature (219)..(284): n is a, c, g, or t
  misc_feature (1451)..(1487): n is a, c, g, or t
cccgcctctctctcctgctcgttgttatataaactggcggcccgccgtccgctcccttgttataattatcacgcctcctcctctatattggggcggcgccctcttttatcttcataaacaactcggcgtggcgtcgcgctcgctagtcttgctgcccgctccctcgtcgggaggagtccttcttgttcgcgcgctcggccgcccccgcctctcttttcnnnnnnnnnnnnnnnnnnnnnnnnnnnnnnnnnnnnnnnnnnnnnnnnnnnnnnnnnnnnnnnnnnactggtggcaagtgagatttatttaaacaacgacatgtcaacaggaacaggaagaggaacatgtgcgaccactgtagtgaccaaggcttctcaagagtgtgggatgagacctgcggacgaggcccgcccaccgctcagggagcttgcaggtctcctccaggagggcaagtggcttcggcttctggctcggcataagccttcgacagattaataagttatctccttcagcccaagctcatttcctcctttggttgcccagcaaaggcagtaatgccgcatgagctgctccagcagctccatttcatccaggaattcaagtgattctatcctgctcacttcagctcgaggtaacctgttgtacaactccatcatgtcgacggccgatgctgtttcccacccattcgacaggagccgttctttctgtgactctaatgacttgcaggtctccactcccgccaggtcacactggcgtctccgcaggttttcaatcatgatctgcccaaaccgatcacccatgttcacctgttcgtagtttatgaacatggctctctcaaaactgttggctgcccacttcaggaggtttgcggactgctctggagtcatgtaaaccagcacacattcagctatcaggagtgttggcaattgtgtattcatgttacatttctttagcttctcttccagttcagacaggtctcggagatctgctccaataacggcatatctctttgaatccagtatgtgtccatccatctgaagtgtgtcctctgaatgcagttctagaatggggctggataggggaggcttgcatttgatactgtgcagctttctcgtgacaatcattggaaagtcaacctcaaaatatttacttgggagaagatcttcatcctttaatctccagaaggtggtatccatgcctgccccaaggttgacaatttgacaatgacattctgtcttccgtagaaatgcctttataagctgactgacaccatggactcgagcaaaatatcctctgttgatttcaggggctttcctctctttagacagtctcacaaagtgctgtatgtaagggtcatgccagtagccaatgcttactgcaaacctggctcagctggcgcggctcagcgacccgctctcgacgaattcgagctcggccgatttggcctgatnnnnnnnnnnnnnnnnnnnnnnnnnnnnnnnnnnnnncgccgccccgcgattaagctccgagttcgccctatagtgagtcgtatacatttttcg

SEQ ID NO: 434042 - DNA, 1094 bp, Homo Sapiens
  misc_feature (310)..(310): n is a, c, g, or t
tttcttttccccgggctccaccttccaggctttggagggtaaaccccgggttgtaccaaacctcccctccatttccggacggcccgattcctgttttccccaccccatttggccaggagcccgttccttttcttgggactcctaatgccttggcaggtcttcccattccccgccaggtccacactggcgtctccggccggtttttccatccatgatcgccccaaacccgatcaccccatgttcaacctgttcgtagtttatggacatggctctcctccaaactgttggctgcccacttcagggggtttgncggactgctctggagtcatgtaaaccagcacacattcagctatcaggagtgttggcaattgtgtattcatgttacatttctttagcttctcttccagttcagacaggtctcggagatctgctccaataacggcatatctctttgaatccagtatgtgtccatccatctgaagtgtgtcctctgaatgcagttctagaatggggctggataggggaggcttgcatttgatactgtgcagctttctcgtgacaatcattggaaagtcaacctcaaaatatttacttgggagaagatcttcatcctttaatctccagaaggtggtatccatgcctgccccaaggttgacaatttgacaatgacattctgtcttccgtagaaatgcctttataagctgactgacaccatggactcgagcaaaatatcctctgttgatttcaggggctttcctctctttagacagtctcacaaagtgctgtatgtaagggtcatgccagtagccaatgcttactgcaaacctcttgcacagggaagcatcttcgcaggtgccgcgcacgccctcgtcgtctgcgtcgcagctcgaggtggaacagcaggaggtgatagaggattccctctgcctagtggccatgggcgtggaggttcctgggagctgtgtccgccagggacatggaagcggggtcgacgggcggcgggggacggcgcgagccacagggagaaagcaacagaagagggtagggccctacctggctcagctggcgcggctcagtgacgccgcccccccgct

SEQ ID NO: 434043 - DNA, 1174 bp, Homo Sapiens
  misc_feature (198)..(237): n is a, c, g, or t
cgatgaggagagagggagtatgagcgcaaagaggagcaaagtccagaggtgacgtcgagagagcgagacatgcgtgaggggttagccgtgagttaggttcttgagttctagcacaataataaaatggtttgggtggtgagtatgatataagagcgagagcgtcgtgggctgttatgggcgaaagcgcgaacgggaaannnnnnnnnnnnnnnnnnnnnnnnnnnnnnnnnnnnnnnnaaagacgggtcataggaggaaggtgcctcagaatggccgtagaggaaagtcgaggtgaattggcggggcgcaacatttggtgcgcctttccagggaagagcggggcattgtttttgggctggaaggggtggcaaaagttaccagttggggatgctgggcagactcaaattccaagcttgttattgatttctattttgtggaagacaaatcgcttttccatcttcttctttgggtaatttttgggatctacactctccagctgtagagtgggcttatcatctttcaacacgcaggacaggtacagattcttttccttgaggcccaaggccacaggtattttgtcattactttcttctccttgtacaaaggacatggagaacaccacttgttgctccatatcctgtccctggaggtggagagctttcagttcatatggaccagacatcaccaagcttttttgctgtgagtcccggagcgtgcagttcagtgatcgtacaggtgcatcgtgcacataagcctcgttatcccatgtgtcgaagaagataggttcttcttcaaagatgaagggaaagaaggtgctcaggtcattctcctggaaggtctgtgggcagggaaccagcatcttcctcagcttgtccatggccacaacaactgacgcggcctgcctgaagcccttgctgtagtggtggtcggagattcgtagctggatgccgccatccagagggcagaggtccaggtcctggaaggagcacttcatctgtttagggccatcagcttcaaagaacaagtcatcctcattgccactgtaataagccatcatttcactggcgagctcaggtacttctgccatggctgcttcagacacttgagcaatgaagattggctgaagagaatcccagagcagcctgttgtgccttgtgcctcgaagaggtttggt

SEQ ID NO: 434044 - DNA, 1987 bp, Homo Sapiens
  misc_feature (140)..(140): n is a, c, g, or t
  misc_feature (149)..(150): n is a, c, g, or t
  misc_feature (196)..(209): n is a, c, g, or t
acgttttaaaacaccaactttattcaaatactaaccccatctggacattaagaaacaagcaaaatagaagtaaatgttttattcttccaactaaattccagtactacaagggcagtaaaacaatgatacactggaaaaanaaaaaatgnngcaataaacatttgttaaaaagactgatagaataaataaaactacnnnnnnnnnnnnnntcatacaaacccattctgaaaccccaagaagtcctggaatacggaaatgccctcctccttcactatttcacaggaagcactgcaggctatttgcttaatattgtcctgggattacattctaaaattagtaactggttacagctcggttgtagtgcccaattaaaatcacactaacttcatctgaagtgtcattctacagttttatttacacaaccagtgaagggcatgttctagaataccagctttaatccttttcaaacattaatataagaagccaaattgtaatgatacagcaaaatgaggccactggtattaatacaggtagcaaaggtccacatccaggtggtactgacatcagggaaatttccaaaaccagttgctgctgcctaagagtggttgccactgacgaaagcttgaaataacctgtattcacagaaggggtattggcattgctgcatgtcataattgggacctcttgcaacaactcaacaaggaacaaggcagcccacaaatgcaggatacgtgattcatgaaacatagctagcaggctgttctccatatcgtcgcattatttgatcatgcgtaaacttcacaaacgcatcatattgttctgcaagttttgtgttcaatatttcttcatattcttctcgaactttctcttcacgttctttcaacaaacgttcacagatcatcccaacctgccgtagagtaaataagggctgttctttttttaatggtgaggatgctgcagatgaagtccctggtgaagctggtccactgaggagaaatgcatgtggctgtgcatcagaagtacaacacggatctgtctgttggaaactcgtttctaaatgtcttctcttctgcattcgtttatactcttgttttatgttgtacagaatttgttctgtggtgaggcgggaggagacgtcgccgaagggggatggcttccattcggagatacttttgtgttatgtcgtacagaatttgttctgtggtgaggcgggaggagacgtcgccgaaagggggatggctccattcggagatacttctgcggcgaggcggccgcagcggagaaggaggcggcggtggccgcggccgccgacaacggggaggcagcggccgaggtgggcgccgacaatggcgcacatcgcctgcgcttcggggacgccgggctcaacagcgggtcgaaatccagagtccttttcagagtggctccgcacgccatggccgggggcagctgaggcgccgggctcgggtggggtcggggacgggtgacgaaagaagagggtgagggaaggggtgaagagcgggaactcgaggagagcctacccgacgggctcaggagccaagcgggtcgcggagcgccggctgtggaaaggagagccgctgccgccgctgcctccgcggcaggggcagtggccagggacggcccgggtgagagcgggaggggcggtggcgggcagaagcacacgccagtcgcgtcaggggggttcttccgcctcctcaggcgcggctcccccgagagaggctccggccgcccccgccgtccgctcgagctttgcgccgcgcctgaggcgcttctgtgctgagactagatcctttctgaagtcgaaaacagcaccgtggggtgtgaggctggaacgcggctcctaatacgcccgagtacggtcagtagcttgcgagcggcgatcgatgcagagagattgcgaggtggctgccgcagcaggaacccaagcgaacacgtccaaccgcttcccctccctcgtagaactcccgct

SEQ ID NO: 434045 - DNA, 2479 bp, Homo Sapiens
  misc_feature (123)..(123): n is a, c, g, or t
  misc_feature (293)..(515): n is a, c, g, or t
  misc_feature (1058)..(1058): n is a, c, g, or t
  misc_feature (1114)..(1114): n is a, c, g, or t
cggaggagaacggggagcagagggggcatgtagcggagatcagggcgtgcgcgggagctgcgcaatatcgcagggtgcgggagctggcagcgcaatctcgtggggcgggaggggcgcgaggtnaggcgagtatacggcggacccgacggggcgggaggacgttacgcgggtcgagggaggcatagctgacggccgagggcgcgaacatgggaacgggccaggaagaggcgggcacgcgaacggcgggcgggcgcggcggaagcaaggacgttcgcgtagcgctaggggaggannnnnnnnnnnnnnnnnnnnnnnnnnnnnnnnnnnnnnnnnnnnnnnnnnnnnnnnnnnnnnnnnnnnnnnnnnnnnnnnnnnnnnnnnnnnnnnnnnnnnnnnnnnnnnnnnnnnnnnnnnnnnnnnnnnnnnnnnnnnnnnnnnnnnnnnnnnnnnnnnnnnnnnnnnnnnnnnnnnnnnnnnnnnnnnnnnnnnnnnnnnnnnnnnnnnnnnnnnnnnnngcgaacgggcgcgagtgagggatgtataaggtcgcgttgtttgggcttggggggtttattaagtgatgctttagtctcagtctctgccagcaactgggagtggggtgactccactcaccccaggatttcccagacttgctattttagaggagagaggcaggaagccaactatcctctaagccacagcttgggaagctaggctagtactggggtgggggcagcagagctgagaccctccaccccgagcccctagcctgtgctatcctcccagcctgagggggaggagctgaggcaatcctggctgcagcctcccacacacagccctgctcttggtgcgccattcactgccctgagctattcatgatctctgctcccagatattcacctcaacactccaaaagccagccccttcaggtcttcagtcctgcggaaggcaaaaggagggacgggggcctctgactgagcagcttcaaggagcctctcctttctgctgcccactgaatgccggccccttgtcttcagccctcccttagataggaaggngggtggtggcctcagactgcacccccttcttctcttcctggcatcccattctgtcncagcacagcagccaagagcacaaagcacagcacctgtggggctggtgggcacaggagaccgtgctggcacaggccagactgcctgcagccctaggtggggcctgctccctgccctggaagctagacagagggagacacaaagcagaagtggggcaatgggatgtgcagcccctgcagcaggaggaggagcacacgaaccctgaccctgctactcggtgcaggccactccaggccttgcttctctaacagcccctgtggctggctccagagctgcctggtccccataaagggggctgaaaggaggatgggtgatccttgaggaggggaagggtctgcagagaatcactcagacaccaggtattacccagctcttcccccaagacctagagggtccaaactcctggccccaaccaccctgcatcttgggtgaggaagaagggcctcttttgctgttccttcccctcagagatccaagaacccactccagtgaaatgcaggtacccatgcctaccacctgcccctggagacagcaggggagctgaggcaggaaggctggccaggggcccacaagactctcctaatccaagcactttcctcgctttcctaacgtcttggcaacaaagggaccccaccctcccagccggctcctgggccctccctgcagcctctgagcagctaggcctccctcctgtgtgcgtgcatgagtctgcgtgtggtggggtgactacaggtgctggtcctggctgccagggagggcaggagagatctggagtcagccccactgcagggcctgggggtcagtatcaaccaatttccttccactgcttgtagaagtccagaacattcttgatgtccacactggcgtgggcagcggcctgcagggctgcctgcatggggcctgaaagcacgctggggttgtccagtggaaggcctgtgatgatggtcaccatgccactcggatcctcctcacctgccccctgggccagagtcagctgtttgcagctgtctaggatcttatagagagtccaggcatctgcatcctgcctcttcagcttatgccgctcaaagctctttcccacctctttctggcagcgaatgtacctgtttccttttttaaactctgcctccaggtaccgaatcccatcccgggcccctgggtgttccttcttcagcaaatccaggccatcgatcactgtccttgggatgatgacaatgaagcggccactggtggccagttggcggatgacagggagatggtggcagagggcctgggtgtcagggacgaggtagggagaccctcgtgccgaattcggcacgaggcctcgtgccgaattcaccacccagcctcgtacctagcgtaagttt

SEQ ID NO: 434046 - DNA, 1459 bp, Homo Sapiens
  misc_feature (29)..(30): n is a, c, g, or t
  misc_feature (97)..(159): n is a, c, g, or t
cactgtcacatccacatagtatgccagtnnctgcaaaccaaaccgcgtgtgttcgctgggtctctgggcatgcagtttgctcccactgcgggaatgnnnnnnnnnnnnnnnnnnnnnnnnnnnnnnnnnnnnnnnnnnnnnnnnnnnnnnnnnnnnnnntaccacttgtgagggagtcggggggacagctggaatagcgttgctcagtgcgtcctttgggcgctgttggggacacccggctctatgttggaccctgtagcactacagagcggagggtccccttccccccaatgggccccccgccagtctgctctctccaaactctaaccctgtagaggttgagttctacaggggctggaggatgccatgcagggagagggggtcggctgggcctggctgggtccagccaagagcagcagcagcctcccttggggggaaaacagggaaggccttgtggccctaggcggaattgtagtagttgtgtgcgtggtggttgtgggcgggctcacccagctctgggtactcgggagtcagacagtacttggggtcgtagacctggcgtggcagcccatacaccgtcatgccccgctgcgaggcgcccttgttgctgcccatctgcaggctgacattgagcgtgtcgcagtgctccatgcccagccccggctcgaagatctgccgcttggtccctggcgcagtcatgccagcctggctggctcctttgttggtgcccatctgcaggctgatggtcgcctggtccagaggctggtctgtgcccagcttggggtcgtagaggtggcgccgggtgccataggccgtcatgccctgctggctggcaaacttgttggtgcccatctgcagcccaatgatgttccgcccttctcttagcttccccggctcgaatttccgctcctgcttctctgcgtacttcactcccacgttcaccttgtttcctttcgtcttcgccatgctggccaaagccaggagggtggactgcacctgtgtatggttggtgttctcaaacaggtcgttggcctcaaaaatgtcgtggggcttcaccccatacttggtgatggccttgatgaagttgccgatgttctccagctggtgccaattttgggttgactcattgatcttcttcacggagcctggctgcagcttattgatgaattcgcaaagaatgatgccatctttgaggccgtccatgaagttgttgccgatgcgacggcctgtcaccccctcgatccactctctcagctcctgctcccgctggtggtcatacttctgggccagcttgttcttaacctcggctgacagcccgtaggcagggcctcggttgaagtgagcagaggacatgctggccggtgggctctggcgggggcagtggcggcactgacgctgagaacagaggcagcggctgaagttccgtctgcacactcttcccatcccgggaattccggac

SEQ ID NO: 434047 - DNA, 725 bp, Homo Sapiens
  misc_feature (682)..(682): n is a, c, g, or t
actcccacgcgcctttattaagtacggaaggacggtacaacaggggtggaggtggcggggaaggcccagcccccacccaccatcactggcacacaataaataaataagtaaatagccaagtgggcacgggagagaggtggtactgaaaacactgaccgcacagggggacacgaaagccccccttcgagctgtggccatcaacgctgtacgggtaccatgaccaggaaagggtggggcttggccacagaagccccagagcatcacaagtctttgtaaaggagaggtgtctttaggacgtggaccactcttatttactgactgaaacctggacccctagctggtcccgtgagacccagattatcaaggggccactgtctctcaggcttctggactgttctactgaggatctaaaagaccactgggtcactatcacttggggtcctgatgggtccacccagggacctaggacatgcgagggtcatcgtcacttaggcttccgattggtccactcgggctccaggacgtgaaagggtcactattacttaggaacctaaactggtaccccacaggacccaacattgatgagtcactatcacttagcctttggattggtccacccaggacaataagggttgtggttccctagagctctctctgcccctcaggtcctggcccttgggtnccttgtcaaccagaggtgcagagagagctactagaagccccac

SEQ ID NO: 434048 - DNA, 1597 bp, Homo Sapiens
  misc_feature (31)..(31): n is a, c, g, or t
  misc_feature (64)..(64): n is a, c, g, or t
  misc_feature (135)..(136): n is a, c, g, or t
  misc_feature (145)..(145): n is a, c, g, or t
cttggcaatgcgaggtcatctcactaggctncgaatggccaacgcggctccagacggtaaaggngcccttttcttaagaacctaacctggtacccccgggaccaaccattaaaggtcactatcctctagccttgnnatggtccancccagccaataagggtgtggtcccctaaactctggttacaaggacccaaggccaggacctgagggcagagagagctctagcagccccagggaagggggagaagactaagtactcagggatagagggaatcttcagcaggcaccagggcccagatttcaaggaggggaggtgacagggaagaaataaggccacctggctgggtcaggccaagatgaatccataggggaccagcttctggggcagcaaagagtgcccagccactgctgggagggggttgcaagggccctcaaaccttccccgggtcccagccccaccccggtgcagaactggaccaaggagccggttgtgcttaacatggctcgtgacccatcgcctccacctacgggatcagggagtggggaggggtgggcctgtggctgcaggtgcagtgggctcagtcctccaacccctctgtcaagtctgcgatgctctccacatagtaatggggcacgaggtcgtgctggccggccgctaggtaggcctgggcctcttctaggcgggagactcctgtgagcgtgagcacagtggtcatgccgcagcggtggccaaagaggatgtcggtctccaggcggtcacccaccataagcgtgcgtgcggggtcgatgctgaagttctccgtgatgcactcgaacatgtaggggctgggcttgcccaccaccagggcctggcgtcccgaggctgtctccactgcagcggccaggctcccggtgccaggggtccggctgccgtcgctcagcgggtgccatgggtcacggtcggtggccacgagtaggcactcggggtcgcgcaggtgcgcgcacgcctccctcagcttggcgaaggagaagtgctcgtcgtagcccacaagcacggcgcgcacgcgcggggccgcgccgtcccccgcgctcgggtccccggccaggcgcagccccgcggcgcgcagctcggcgcgcagcccctcgccgcccagcacgaacacggcgcccggcgcgtccggaggcccgggcaggcgctggcgcagcaggcgcgcggcgcacagcgcggagctgaagagctgctcggcgcgcagccccccgaagccgaggcgcgcgaagcgcagggccagctcgggccgcgcgcgccggctgttgttgctcacaaacagagccgccttgccggcccgcgccagccgctccagcagctccggggcgcccggcacggcgcgctcgccgttccacagcaccccgtcacagtcgaacaggaccccctgcgcccggcccagcacgtcgcgcagggccctccgcgcagcctctcgcagcgcgccatgcagccggccgccgccggcctcccgcgccgcgctctctccgcgggcacggccctcgtgccgaattcgccacccaggcctcgctacataggaaagttaggggcgcgtaggaaggagaatggagagggagg

SEQ ID NO: 434049 - DNA, 994 bp, Homo Sapiens
  misc_feature (53)..(53): n is a, c, g, or t
  misc_feature (58)..(58): n is a, c, g, or t
  misc_feature (85)..(85): n is a, c, g, or t
  misc_feature (90)..(90): n is a, c, g, or t
  misc_feature (102)..(102): n is a, c, g, or t
  misc_feature (125)..(125): n is a, c, g, or t
  misc_feature (133)..(133): n is a, c, g, or t
  misc_feature (187)..(187): n is a, c, g, or t
  misc_feature (272)..(272): n is a, c, g, or t
agcctcatatcgtcttatagagaggtgtctaagtccgtgcgctctatatatanccctnaacgtggaccctcagggtgtgtcggtnagccncaaatatccagngggcccgtgcttctcggcttctngagtattncaataaggattaaaaaaccattggggtagatacatttgggtcctgtaggggtcnatccaggagctaagaacaagcgaggttcaatatccgcttaggtctccgaatgggccactcggcctccagcacgtgaaaaggctcnctattacttaggagctcaacatgttactccacaggacccaacatcgatgagtcactaacactaagctttggattggtcctctcagcacaataagggttgtggttccctagactcttggtgacagggacccaagtgccaggacctgaggggcagagagagctctagaagccccagggaagggggagaagactaagtactcagggatagagggaatcttcagcaggcaccagggcccagatttcaaggaggggaggtgacagggaagaaataaggccacctggctgggtcaggccaagatgaatccataggggaccagcttctggggcagcaaagagtgcccagccactgctgggagggggttgcaagggccctcaaaccttccccgggtcccagccccaccccggtgcagaactggaccaaggagccggttgtgcttaacatggctcgtgacccatcgcctccacctacgggatcagggagtggggaggggtgggcctgtggctgcaggtgcagtgggctcagtcctccaacccctctgtcaagtctgcgatgctctccacatagtaatggggcacgaggtcgtgctggccggccgctaggtaggcctgggcctcttctaggcgggagactcctgtgagcgtgagcacagtggtcatgccgcagcggtggccaaagaggatgtcggtcgccaggcggtcacccaccataagcgtgcgtgcggg

SEQ ID NO: 434050 - DNA, 1353 bp, Homo Sapiens
  misc_feature (205)..(213): n is a, c, g, or t
  misc_feature (233)..(233): n is a, c, g, or t
  misc_feature (238)..(239): n is a, c, g, or t
  misc_feature (247)..(247): n is a, c, g, or t
  misc_feature (250)..(250): n is a, c, g, or t
  misc_feature (252)..(253): n is a, c, g, or t
  misc_feature (256)..(257): n is a, c, g, or t
  misc_feature (1238)..(1238): n is a, c, g, or t
  misc_feature (1243)..(1243): n is a, c, g, or t
  misc_feature (1259)..(1259): n is a, c, g, or t
  misc_feature (1267)..(1267): n is a, c, g, or t
  misc_feature (1275)..(1275): n is a, c, g, or t
  misc_feature (1287)..(1287): n is a, c, g, or t
  misc_feature (1291)..(1291): n is a, c, g, or t
  misc_feature (1296)..(1296): n is a, c, g, or t
  misc_feature (1309)..(1309): n is a, c, g, or t
  misc_feature (1317)..(1317): n is a, c, g, or t
  misc_feature (1325)..(1325): n is a, c, g, or t
  misc_feature (1331)..(1331): n is a, c, g, or t
  misc_feature (1333)..(1333): n is a, c, g, or t
  misc_feature (1337)..(1337): n is a, c, g, or t
  misc_feature (1340)..(1340): n is a, c, g, or t
  misc_feature (1348)..(1348): n is a, c, g, or t
gggggggagattcacagcccttgggtcctaggccgagggtttccccatgggaaaacaagtttgggcccaagtttccctttcccttggtggggccccggccggcaaaagggaaaggtttaagaaaacttttcgggggggccaaggcggccggcaaagaggttatttgtttgcaggggtgggacggtgaaaaaatagtcatgactannnnnnnnnatgttggatagggtgcaatnagggnnggggggtnggngnnggnngaacactcccacgcgcactttattaagtacggaaggacaggtcacaacaggggtggaggtggcggggaaggcccagcccccacccaccatcactggcacacaataaataaataagtaaatagccaagtgggcacgggagagaggtggtactgaaaacactgaccgcacagggggacacgaaagccccccttcgagctgtggccatcaacgctgtacgggtaccatgaccaggaaagggtggggcttggccacagaagccccagagcatcacaagtctttgtaaaggagaggtgtctttaggacgtggaccactcttatttactgactgaaacctggacccctagctggtcccgtgagacccagattatcaaggggccactgtctctcaggcttctggactgttctactgaggatctaaaagaccactgggtcactatcacttggggtcctgatgggtccacccagggacctaggacatgcgagggtcatcgtcacttaggcttccgattggtccactcgggctccaggacgtgaaagggtcactattacttaggaacctaaactggtaccccacaggacccaacattgatgagtcactatcacttagcctttggattggtccacccaggacaataagggttgtggttccctagacctctggttgacaaggacccaagggccaggacctgaggggcagagagagctctagaagccccagggaagggggagaagactaagtactcagggatagagggaatcttcagcaggcaccagggcccagatttcaaggaggggaggtgacagggaagaaataaggccacctggctgggtcaggccaagatgaatccataggggaccagcttctggggcagcaaagagtgcccagccactgctgggagggggttgcaagggccctcaaaccttccccgggtcccaggcccaccccggtgcagaactggaccaaggagcggttgtgcttanattgntcgtgaccatggctcnactacggntcagggantggggagggtgngctnttgtnccagttcagtggncattctcnaccctctntcaatntngatnttncacatatnatggg

SEQ ID NO: 434051 - DNA, 650 bp, Homo Sapiens
gagggagcccagcaccagaacaaagcacaaggctgccaccatgaggcaggtcccagtctgggtggcggccatcttgtaaggtctggagatcttgttggtgaccagagtctggagtttctgcagctgctggagcagggtcctgttggcattctccagggtctccaccttcttccacagttcattgttctcagatgtaaatgtctccaccttcttttctagacactccacatactccttcttcttacgacggctctcctgggctgagatcttgttcttgattttcctccggactctcttcaaggccttctcctcggctttggtgagggggagttttgtggggatggggtagccctcagcaatcagggtccgcttctcctcctctgtcaggagcagtggccctgatgtcccctgtaatttgtgaggggcagtgaggagtggggaggtggagatggccgtggaggagcgcgccatgggcctgacagggctggaggggggcagagagcggggactctgggagccgtcgctgtcactgccatggctgctggggggcgtcggaggcatctgcaccaggtcctccggtgtcactttgaggaactggttcacctccagaggctctgctttgatcactggcagctgagtcatctctcccg

SEQ ID NO: 434052 - DNA, 754 bp, Homo Sapiens
  misc_feature (601)..(614): n is a, c, g, or t
gttggccgatctagacctagtggatcctccgggctgcatgaattcggctcgtttaatcttttaattttttagtatcagtggttttatttaaggagacagtttggcctattgttacttccaatttataatcaagaaggggctctggatccccttttaaattacacacactctcacacacatacatgtatgtttatagatgctgctgctcttttccctgaagcatagtcaagtaagaactgctctacagaaggacatatttccttggatgtgagaccctattttgaaatagagtcctgactcagaacaccaacttaagaatttgggggattaaagatgtgaagaccacagtcttgggttttcatatctggagaagactatttgccatgacgttttgttgccctggtatttggacactcctcagctttaatgggtgtggcccctttagggttagtcctcagactaatgatagtgtctgctttctgcatgaacggcaatatgggactccctccaagctagggtttggcaagtctgccctagagtcatttactctcctctgccttcatttgttaatacagaatcaacatttagtcttcattatctnnnnnnnnnnnnnngagacagagtttcgatctattttaagtatgtgaagaaaatctacttgtaaaaggctcagatcttaattagtaattgtagcacattacccaattttaggtgaagtgtttttttcccgtgtgatgcattgttcttcagtgtt

SEQ ID NO: 434053 - DNA, 922 bp, Homo Sapiens
  misc_feature (108)..(122): n is a, c, g, or t
agcgggggtctccctccaagctagcgtttggcaagtctgccctagagtcatttactctcctctgcctccatttgttaatacagaatcaacatttagtcttcattatcnnnnnnnnnnnnnnnggagacagagttcgatctatttaagtttgtgaagaaaatctactgtgtaaaaggctcagatcttaattaaaaggtaatggtagcacattaccaattataaggtgaagaaatgttttttccccaagtgtgatgcattgttcttcagatgttgaaaagaaagcaaaaaataccttctaacttaagacagaatttttaacaaaatgagcagtaaaagtcacatgaaccactccaaaaatcagtgcattttgcatatttttaaacaaagacagcttgttgaatactgagaagaggagtgcaaggagaaggtctgtactaacaaagccaaattcctcaagctcttactggactcagttcagagtggtgggccattaaccccaacatggaatttttccatataaatctcaatgaattccctttcatttgaataggcaaacccaaatccatgcaagtgttttaaagcactgtcctgtcttaatcttacatgctgaaagtcttcatggtgatatgcactatattcagtatacgtatgttttcctacttctcttgtaaaactgttgcatgatccaacttcagcaatgaattgtgcctagtggagaacctctatagatcttaaaaaatgaattattctttagcagtgtattactcacatgggtgcaatctttagccccagggaggtcaataatgtcttttaaagccagaagtcacattttaccaatatgcatttatcataattggtgcttagggtgtatattcaagcctgttgctttacattttgtgtaaaaaggccacaggaatttctg

SEQ ID NO: 434054 - DNA, 524 bp, Homo Sapiens
cttgatcccttcgaacagcagggcctccccgtggccctcattctgctgctcctggaacagtttgtagcaggacctggggctggccaggagcagccggaagcccttcctgtcgggtgctggcacaaagctcaggaactcgtccacgtggcccacggacagccagtcagaatagagcttcacaggggcctgcacctgctgggcactgaggaagtcctgcagggcctggtgcatctgccggctgtcattgctgggataacagctgtccccgaagagaatcctgcccagcgggtattccttgcccctgactgtgactggggggctcacttccaggttcccaaaggagtccagtccactgataccccctgtttggggccctcgagttacatagccaaaatctggacccatcactcgtttgatgggaaactccttcaggcctctgttccttggagagtcgaagaccacgggcagcgttttgtgtggggcttggatgtagccgatctccatttcatcctgtgggagtgagt

SEQ ID NO: 434055 - DNA, 1496 bp, Homo Sapiens
taacacattctcacctctttgccctcctgttaaaggcttgaatacaaatgaggcagcatgggagtcttggcttggaaatcaggtctgcgttcttggtcccttcagtcactgacctaatatatgaacttagacaattcacttgcctctctggacctttaaatgaaagagttaaactgtaatggataatgtccctgggctctttcacataatccatacttgagaaatcaatgaatcaatttgaagaaactctaattctaagacataggtatcctggcacctgtttgaaacagctgaaaggaggtaaaggtcaggttcctgtttattatacatttagctataggaaaagaagcacatatatctatggagacacagaacctggcagcccctatacttgactaataaaagcaaattcctggaagaagcagagaaataggccacaagtgagactggcagtgtcaaaaaaggtctataagttaagtgatcaaagtagtaaaaaacaatggccataaccagacaagatctctaagcatagactatagtctagagaggtctgaatgggaaggagcccctggagcttctattagatggaaggacttggtccacagcaagtcactacggcatttggttcaaacccagttttctcaatctgtcaacccggtgtgtatgcatgcacacgtgcagacatgctgcaggctgtagttatgcttctgaagtgttgtcttcattcaaagagactgtctccacaaaagggatttcttccttgtctgtcttccgcatgatcagccggtgcttatccaagtttatgatgcacttcagagatcggagagtctgtagaccaagggacaagtttttctcattgtcatcaaccacagctgctgggcagtccaggcggagggagcccagtgtgatcactaggtgctcaatctggcccactactttgagatgccggggtagagaaagcttttctccttcatgcttgtgggatttgacatgctccttgagtcccaatctgtccacacaggccaaagagatgagattatataggcagcctgtgtcaaccaaggctttcacatcctttccagcacactggcaagaaaccaaaatcatgtcatcctcctcagacttctttagcccctcagacttagcctgattgagtttgttcgtcttagaggcccaagggacacggggaccgcttcggagcttagacaggttggtttccatgaggcgcctctgcagaatattatgaggttgcatgtccttggacgagcccagcttcttgaggccgtccaggggcagcaggtcggcggagtccttgtggatgaactgcaccgcctgcttcatccggcgctgctgtcgcagtgacgccgcctcccgcatgtcggtctccttgcggccgccctcagtgaggagccctgagtaaaacatcgctgaggcgccggcggcccggtagcccacagccccccggcagcctcagcctcgagctcctccagcccgct

SEQ ID NO: 434056 - DNA, 1073 bp, Homo Sapiens
  misc_feature (954)..(954): n is a, c, g, or t
ctgttctcaagcttttgtgtaatgcttcacaagccattatctccgtccccgatggactccttggatctgcccagtgttcagcttggcctttttttcgggttgagatgtgtaccaagcgttccggtatggacacctggggggactttcgtgcacggccggggtccggcatggcctctcatccaacctcaggctgggatttgagcagctccccaactaggatccgctccaggcttccatcatccatgcccttccctaaccaccggccacacgggaacttgtaggtatgtcctgtgatctcattcctgaccatcacatactccaccagccatttggcatacagcccagagttatcatggccaatctggacagtagtaagcttccccaagttctggcactcgaaggtcatctctagcacattcctgggaatctgcatgatctgtgtctcacccaattctcctgatatacagatccatgggttggcagtgaacatggagccccccagcttcttgcttggtacgatcagaatgtggtacgggatcaggatagttgtgaagacattggtgaagcaaaagtaatcgacggcattgaaagacaggaggtgatagaggaactgctccttctcgtcatcacagcgcaggaaggcatagcgcttatataactttttggtgagctcatggtctgagaggagctgcttcaggtgtctggaaagtaactttttttccatggacagtcgcacccatgctctggcctttcccacatcagtcttgatttccccgatgttctggatgtgcctcatatcctgaatcagggagatcctcaggggaggcatgagtgagctggcatcagacttcctacgttctgaatcaagaagtattcctgaggtactgaggcttcctgatgtgagttttctctgccggttgtcctgataatgtaacaggtgggaccataaggctnatttcccctgtttcacttgtagtccatgactccagatcctttccaggagatcacaaaggctggcaatcagggtgttctcttccactccctgtgatgttcacctccccatgccctagctc

SEQ ID NO: 434057 - DNA, 1778 bp, Homo Sapiens
  misc_feature (1096)..(1197): n is a, c, g, or t
cagagcttccaagcccaccccagggcaccaccctctaggaacctccataaaaaagtctaccaatggtacaactatttaactgggataaagattattctgttcaacaatcttggacaactctttttattatctttctacagtaaacaaagtataatcccaaagttctgcagatatttaattgggaaaagacacaaccctacagtcagttgggaaagactacctttagaaggagaaaaatgaattgtttgggaaagaaatacattaacagaactgtatttctaacgcatttactttttaagccatcaaatgttctcatttgagccacgtgttctgtgcacattcagagaaccttttgaaaatgaattaagtctttgccttctttagtctgttgataaactcttagagaatgctgagaaatctccagaaaacccagtatgttttctcttgggaacagaattgcagagcctcttgccaattaccattgtttttcagacataacaaaatacgtatcatttgatctaaggtgagatttttgttaccaatttcccattgtaaatatttatctaatggaagggatttagttgccaggttcagccgttttggcttggctagggatgtgcgctggctgcatactcgttatcaacaaaagacccaattacataaactttgtcatgcctgaaagtagtcataacattgggagatttttttgttaattatataatactgtcctttggaaataaatctacatgagacttttctgttgatgttaaaagcaatttgtcccatttttcttgataccgtttaactaactctctgtgcaaagcaccatctatttttagattgcagaaataaatatggaaaggatcaacatttcttctgttccatccttcactttctaaaagctgggaaacagtattctgcaattcttttcgtttcatataattttcgtaagccatgtcaaaaaccaaaggttgtccaaactgcatggcctgggcacccttccagcccattgctatgtccatattcctatcccaaagtcgtaaaaatagaaagtttttctgtttatcttcctcagtggtttctagcagcttgatannnnnnnnnnnnnnnnnnnnnnnnnnnnnnnnnnnnnnnnnnnnnnnnnnnnnnnnnnnnnnnnnnnnnnnnnnnnnnnnnnnnnnnnnnnnnnnnnnnnnngctgtgttagaaacacattccataagggttttgagctcttcttcagtgatgtgttctggtacttctctgccaagcaatctccacatctcaatgaactctctggtggcagctagaggatcttcatccttactgcttgagattgttgaaacacattcttcttgcacactagatttcatggtagttttccacttatccaactctagctcttcagaagggggtgtactctcatttttaggataagtaacagctggtattttggaagacatgtatctctgcaaaattgttaagttatttctcttcctatgaagggtaaatggcaccaaaaacctggtgaaaggtctgaagaaattgacactaacactcattttgaggaaagcagccatgtaacaaaaccccaggagtgcagagatagtggttcccgctggcgcaaagaacagggaccctggaggacgaaggactccgacgtacggacgcccagggatccgcgccgaagctagcacgcagcctacccaacagtctacacagccgaccaaagcggtcgctgggacatcccgggaattccggaccggggccgggttgat

SEQ ID NO: 434058 - DNA, 2491 bp, Homo Sapiens
tttttttggggtatgaaagcctttgtcattttattttacaataaaaaattctaacagcatatgaacactctgttcccggcagaggctaaggacgtacaaagttcattagaaagcgaagctttaaaataacaacagctacattcaaagcttctgctcagtactttgcccaatgtgtctaatatggttttaaagactcaccggttggggtttttcacccagagttaaagcacatgtacaagtacttacatatcctccaaatcatagacaacaaggacaataacagcaactccagatgaggctagatcttgtgggcaatttcaaatttaggaatttctttatttttccttggcaaaacatggtgtcatggaacatgtgactgtataaattaattcagcagataggaggagctaaaatattttcctggataaaaccgaattacaaaactaataatttagtaagaatggcttcaagtgcttgtcaagccattttcagatacattatgcatgtgctcctcaaaatcaccatgggaagtacagagggtcttatactcatttgacagatgaggaatcagagaccagtttaaagtgagttgatcaaggtctaggatatttatacctttttcacaatttccagtccattcatatgcctctgattctgtttgatacaaatcttttctcagtttgtgtgtgagatgggggcgtgtttaaacataaggaagaaatgaggagaaataagatggggccacagtaatttatgtaaaatatgttgatggcctctctccataatttgcaaaagtctgaccaaagtcagagaatgaaaacgatcaatttttagatttcacttataatggctctcactgaagtatggtttgaccaatggagacagattctgccatatcacaaactttcccaattttttttaaacctgcagaatcagagcaactgcatatcttctaaagtaatgtgtgtgtggcacaattatatttcctaaatattccttctcagaaacaccttacattttagcatttaccacaggctaggattctgtaacagttcacctaagaaatcaagaggcctttcaattctcaggacactaagttattatattcagaaggtcacagccaaaaaataatgtaagtttcacttgaaaccaattttgtttcaaaagactctgttgaggggctcattggttttcttatccatgcaagtgtgtggccgtgagccacattagtagcacctgagctaagatcatgcaattcaatttacaagtatttattgtctgctgagcaagacattgtgctaactgggccttgttcagaaatcgcttcctagacccagcggctgtatcaataactggtggtggggtgagaagtggctggggcagctctggccagtctagcagagtttcaagtgtgtgcaccctcacctgatgtgcaagtgaagatgccccttttctctgtgtggtagtatccaggggactgctctccgagtgctggctgctgcgtggcatggcatcccaggagtactagtcagttccagtgtgtagtaggttctttttgaaggtcttgcccactcatgctccttcttctgggtaccagcccccaataaaagtccctgctgaaagggtcagtccatggggccatgcttaaatgacacggccctgcctccttggtaacaggtgattggacaggcacctgaccccagggtggctcacccataggcagatgaactaaaccaatcagatcctcaaaaatttgccttaggcatcacagagatgctagtcagagcgtggtgggtactgaaaaggaaaggttgtgtggagtgggttcttgaggggtggatttttcagctacatatgcactaatgagaaagctggttggccaggagaagcaagagaaccaggcagatagataggcagagggaaacagagaagaaagtccatgaggacagagaatgtgagagcaagagcaaaggtagctgtctccaatccctttcctgtaggggagcccgtgttctgtgtttgtgaaatgtccctctattctttcagccaacacctgcactttcaagtgtgaaagggtttcgtagtccttgcaaaactccttgcctggaacacctttgaggttggactgaatggcagaatttaatttccaacacttagaccccagtcagtccctactccaagctaaatgacactctttccttaagagtatttggatgtagtttgtaaataaaatccaaattattttctggtgtgtgataagaggaatttaggattaagtacaaatcctgtttttaaacttttaagacagtatctgttatattattcattaaatgttgagcacctgtgtgctatgtagaaaaaaaggaaactcgtttatatgtaatcaatgtttaaatcttttgatccatttctctaatttctgcctgttagaaaaagcatctctattagttaaattcctcacctcctccattctacattctctctccgaagt

SEQ ID NO: 434059 - DNA, 2298 bp, Homo Sapiens
  misc_feature (187)..(203): n is a, c, g, or t
  misc_feature (256)..(330): n is a, c, g, or t
  misc_feature (679)..(684): n is a, c, g, or t
  misc_feature (689)..(722): n is a, c, g, or t
gttacattcccgaggggttggggagtttcccatggggggcccccatttttgggggtttcaattggcaaaggttttccgcccttccccggggttttgggccaccttttttcccttgcttttaaggccttcccggaggtaggttggggaattaaagggcaccccaaccaaccaaggcccggggtaaccnnnnnnnnnnnnnnnnnagtagaggacgggggttttcacccgtgttagccaggggtggttcttgatctcnnnnnnnnnnnnnnnnnnnnnnnnnnnnnnnnnnnnnnnnnnnnnnnnnnnnnnnnnnnnnnnnnnnnnnnnnnnttgactcaacttcttctaccgctgcagggccttttcctcagtgaaagtttcacagatgggtttcgataaaataaggtgatatttataaagcactctgcaatcactcagtattagtcctgccccccatccagccccctgccagccagcagggactaggatggccttataaagggcgcaagaactgcagagacaaagcacaaagggagggcccgggcccagaacctgtcagggctgcttggaggtcaaatttcctttcagctctagtgcagggtgcatcccagcaaccgacttaaccagatacagagctgatcatctgaaatgcccatgtgacgcatgtgtttatatttcnnnnnntctcnnnnnnnnnnnnnnnnnnnnnnnnnnnnnnnnnnacatgcacacttctctctgtgagtgtgcccatctatgtgtacaacctttagttatggatttttaaccctttatgaccttctttctagctctctggcacaggtagggctgtctgggggaggaaactgagaacccccaatggacagcagatgtgccaatatgagaggaatgggcagtgggcagccaggcccacctgggagtcaacacggaacaccccaagcatcaaagtcctgcacgaagcctcttcaaaggtagggggtcaagggggtggtaaccgagtggggcttatgtcagtggctggactgtacagatgggtgaatggctggggtcaggggtgacagagagggaggggctttgtggcagtggctgaactgtacagatggatggatgatccaggccaacagccccacgcaaatgaacccctcctggtcagtggtgcacaccaccctgctggaaactccaagtcagcagtcagttaacactgagatggggtggggagggggagtgctcacacggtgtaagttttgacagacttatagaggggcgggagcagcccgtggttctcacgaacaatttccaggtactcagatggagtctccagcaagaaaggcccacagcacatctggcagcagcacctgaccccagagggtggctccgggttctccaccatgtccttttgctgagtggcattccgcagggtcatgtacatgatgaaggccaacatcacagtgataagtgtagcacatgggaaagcaaagacagccggctggattctggagggccacacctggatcttgtggtactgatgtgtcttgctgatgatattctcggcccggatgctgaagcagtagtccccagggtccctgaaggtgtgggtcaggttgtacgctgtgctggccacggacacagggtggcactccccttcctccagcgggaggcactcaggcttgagacgccagcacacagtcagaggagggctccccaggaagttcaaggtcacggtcatcttttggaaggtctgaattagggtgggccccaacacttggatgcctcgaagggtttcctgcagcttcagcgaggcggagaagtccccggtcttctgcttcacagccctcgtggcatccggctccacctcttcccactccgccaccactttgagcttcacggtgaaggtcccgatgatggaatagttataatagaccacggagtcttcagtcaccatctgggtcccgtccccgaagtcccagctgtagagaaacaaggcggtcttgaggaagttgctcgggtcgtggaggaggaaggagactttcaggacggtcttagtgagataggagctgggccagggtagggaagtgttctgggtgacaacaaggtcccccacgaggaactctgcggccacaccctgcacggggcccagggcaggaggcaggcaagccagaggatgcggccgaggcgcgaccacactgcactgggccattgcggggcccggagcgggagaagcgttgggcggacgcggagggaatgcagctggagctcgagaactgcggcggtcgctcctccgggcgcgcagcgcccgct

SEQ ID NO: 434060 - DNA, 785 bp, Homo Sapiens
agcggagagggtcccccggcgaggacgagcgagcacggcgcccgcacctccccgcaccgcccgcgctgcgcgcccggaggagcgaccgccgcagttctcgagctccagctgcattccctccgcgtccgccccacgcttctcccgctccgggccccgcaatggcccaggcagtgtggtcgcgcctcggccgcatcctctggcttgcctgcctcctgccctgggccccggcaggggtggccgcaggcctgtatgaactcaatctcaccaccgatagccctgccaccacgggagcggtggtgaccatctcggccagcctggtggccaaggacaacggcagcctggccctgcccgctgacgcccacctctaccgcttccactggatccacaccccgctggtgcttactggcaagatggagaagggtctcagctccaccatccgtgtggtcggccacgtgcccggggaattcccggtctctgtctgggtcactgccgctgactgctggatgtgccagcctgtggccaggggctttgtggtcctccccatcacagagttcctcgtgggggaccttgttgtcacccagaacacttccctaccctggcccagctcctatctcactaagaccgtcctgaaagtctccttcctcctccacgacccgagcaacttcctcaagaccgccttgtttctctacagctgggacttcggggacgggacccagatggtgactgaagactccgtggtctattataactattccatcattggggaccttcaccgtgaaagctca

SEQ ID NO: 434061 - DNA, 2286 bp, Homo Sapiens
  misc_feature (609)..(623): n is a, c, g, or t
tttcatttttttatgtaagacggtggaatagagcgccttatatgtattattgttatggggcggtagagaaaaaattttagcaggcgggtgtattggtgtaactacgccggtggaattgttgggtggagatcccggcaatcgggggagatcttattaacaaagcgttccccgcgggggttggggcgacggggatactaagtatcccgagggttgtttgggtaaggttttttcgccacccttttttgtgtgtgtcgcccagagaagaaaaggatttggcgcttgtctttgttgtgtgttgaatgtccgaagatggtggcccgcttataagaatatttttggggttgggtctttttaaaaggaaggggcaacagcgaagtagaggtttagaaggtctgtccgcaaggcggaaatgctggttgcgtctgccacacgggagaaaggtgttctttgttattgtcccaattcaaggaatagaagcccgttgggggtacttgccagaggactatgccccggttaggccatttcagtgatttcgtggacaccagttctgtgaaaaagaaaaatttcctgcgagaaaagcttcatgtcttcatattgaagatcagtacnnnnnnnnnnnnnnncctttaaaacagtagcatcttaacttgtggcacaaaaggcaccaacattccctttccaaaccatccatcaccatgggtggaaggcagcgccacctgctggccatcatattatggctcacatacccataatttccttgcggtgctgaattccaagtggggattattagagacccctcagagccaaaaggggaccttagaggtcttctagatgagtcccctcatttgtaggtggtggtttctggataactcagagtggcagggacacagacgagcctgtggaaaggtatactgctttaagattgagaagaaaaccatttggcgctctaattttgcctggatggtgctctgtcagtcaaagaaagggaacaggtctggggagggggtaagggcaccctgagttcctgttccatcacttcccaggcagtagaaggctgtccaggaacagctcccatccgcagctgggcatgtgttggctcttacacaagagactttaattttacttgaagaactaagagctaaatcttgttaagtaaatacggggtttcaggggtgaaggactatcaagaaatcccaagttatcagcataaaagtagtcccaaagtaaaggcagtaattctcccaatggccttttctccctcatgcccccacagagactttcgagaggtcctagttagccagccacaccaacctgctgtgttcgcgtaagtagctgtgcctgtcccatggggtgaccactgcctggtcatgggaggggagccccagccccagctccctagccttttccaggagcagagcagaaagctctactttggggtgctacatcccacctggagaaagagctgcacattctagcctatgagggacccacccttttcacttgcttctccggggctggattgagggtaagtgcagtacacctggagatcccagggagcccccttcttgagaaagagtatcgtatgaaagaatccagcttcagggagcagcaaacccaaaatcttgcccagctccaccttatggagctggacaaccctgggggccaggcccttaatcattctgaacctcagttccttttttttaaaaaaggtcacaatacaagaacaagctctactaactttacagggttactgtgaggctcaagttagattaagttggaaggctacctagaagctgtgcagtgaggtacccagtttagaggatggccatttcacttaggtgggtttatctggacacctttttcactatctggagaagaagacacatactggttgttcagggctgctgtggtcacagagaaaagcggacagcaaatgaccaggctgggcagggctgcttctgtgtgatcagagaccttcacagccgggagtgaggccttacgccacacctgcctctccgtgtcccagccaggagctcctggccaactctgaaaaaggcacattccctaccttggcatattaacactgcctgaatttaaatgtaaaactgagttgtaaatagtcaacaaaagtccctgatatttcttttgttttaggtaagactccttcacaaggccttgcgagtgatcctaccataaattcagtcttctgggagcgtgacacacccaccagaacaatgccctatatatatttggtgctcaaaaagtgtttaatttcttaaacttccc

SEQ ID NO: 434062 - DNA, 1774 bp, Homo Sapiens
  misc_feature (45)..(45): n is a, c, g, or t
  misc_feature (113)..(113): n is a, c, g, or t
  misc_feature (377)..(377): n is a, c, g, or t
  misc_feature (523)..(533): n is a, c, g, or t
  misc_feature (595)..(631): n is a, c, g, or t
  misc_feature (816)..(896): n is a, c, g, or t
  misc_feature (898)..(898): n is a, c, g, or t
  misc_feature (1267)..(1282): n is a, c, g, or t
tatccacataccgtggtgttgcgtggttggattaacgcccccccnttggggttgggggagatttataacacggagtaggtgttcttgtctatcacaatccccgccctgttttntgttagagaaagtgagagtgttgtttttacccagaggaggtgtggggggcggaagaagaaatatagccttttaataaaataggggagggtttttttccccccgcccccacgctgttgctccttgccgcaaagaacagataagatgtggtcaaccgcaggttgggcgcaggcagacgtgccggggataaaaaattgtgcggcagatatatgagtgggaggagcgcgccgcgcgccacctgtgggggcgctctccctccccgcctngtttagagatagaaataaaaaatcccgccccgcgctatgaaagataacccccctctccgaagggagagaaacgccccccccaccttattgatgggagagtatttatttgttcacaacaaaataacaccctcctcgcgtggttgttnnnnnnnnnnngcgcggggggggtttattttatcaattgtgggggcgaggggatattccccacgagcgcctcnnnnnnnnnnnnnnnnnnnnnnnnnnnnnnnnnnnnngtgagaagacccaacacatttttgggcccaatgtttgcccgctttcgcccacagggggggcccccgcggcgccccaaaagcaaagagggtttctaaaaaaaatttttttcaggggggcggaaggcggggccccccacaagctatttttttcataatcgcgggggcgctatggttccccgtagttnnnnnnnnnnnnnnnnnnnnnnnnnnnnnnnnnnnnnnnnnnnnnnnnnnnnnnnnnnnnnnnnnnnnnnnnnnnnnnnnntngtaatgtaagacatttattttggctaaagttctggtgttttaacactgatttgtgatacaacggacattaaacttccttttaaaatgaaaaaaacaatttggtagctctcccttttctgtccagaaaaattcactctttcataatcaaattaccctaaaatttggtggcgttaagaggcaacaaaagttaagcttccaacgaatctgttctctcaaccggaaatgtcttctatttccaatcaggataaaaccttgacttacttgcaaggactatcacggttagcccttcagtgattcctgacaccagttctgtgaaaaagaaaatttcctgcgagaaaagctcatgtcttcatattgaagatcagtacnnnnnnnnnnnnnnnncctttaaaacagtagcatcttaacttgtggcacaaaaggcaccaacattccctttccaaaccatccatcaccatgggtggaaggcagcgccacctgctggccatcatattatggctcacatacccataatttccttgcggtgctgaattccaagtggggattattagagacccctcagagccaaaaggggaccttagaggtcttctagatgagtcccctcatttgtaggtggtggtttctggataactcagagtggcagggacacagacgagcctctcgagcagaggcggtgggggtgccctagggtttcaacttcccctccttggctagtctgtcattgagctggcagagctgggccaggaagccatcgttggggccgatctcacggttctgcctcacgatgctcagggcagacttgacgtccatcttctgccgcatcatgaggtaggcgataactaaccgttgggaacggctataacctttcccggagtg

SEQ ID NO: 434063 - DNA, 418 bp, Homo Sapiens
  misc_feature (182)..(182): n is a, c, g, or t
ggaagtgatggaacaggaactcagggtgcccttaccccctccccagacctgttccctttctttgactgacagagcaccatccaggcaaaattagagcgccaaatggttttcttctcaatcttaaagcagtatacctttccacaggctcgtctgtgtccctgccactctgagttatccagaanaccaccacctacaaatgaggggactcatctagaagacctctaaggtccccttttggctctgaggggtctctaataatccccacttggaattcagcaccgcaaggaaattatgggtatgtgagccataatatgatgggcagcaggtggcgctgccttccacccatggtgatggatggtttggaaagggaatgttggtgccttttgtgccacaagttaagatgctactgttttaaagg

SEQ ID NO: 434064 - DNA, 1195 bp, Homo Sapiens
tctccatccacttataactgtcggacacccccaccccagcttcggacctcaagacgtgagagggctgcctatgcacagggtgtggaaggctgtggtgacagtgcggggcacagacgtggtggggagagtggcctgcatttgcatagttcctttactagggctcaaggtgttgaggtccacactcaagagaggattcgggagttggggaagggaggtcatgagggacctctgtgagcatcttaggccttacacttccacacacctcctgccgtgggccatcgggaagcatgcaggccacaggccttccccctctgagcccccatctcagggaaaagacatcataagttccagaaacaggacaactggggagcaagggacgcccccccttggcaagcttctttatgtgctccccagggtggggaaagtggcccaggactgtgttgggacacacttgtagacaagtgccttgtgatgctgggagcagggtacagtgtgtttcctaaacatggcagctcgggacacctttgcccacggcctcccccacggacctctcgagcagaggcggtgggggtgccctagggtttcaacttcccctccttggctagtctgtcattgagctggcagagctgggccaggaagccatcgttggggccgatctcacggttctgcctcacgatgctcagggcagacttgacgtccatcttctgccgcatcatgaggtaggcgataactagcgttggggagcggctataaccttcccggcagtggacgagcacccggccattcttttgagccaaagcctggtcaatgaagtcggcagccctttcaaagtaagcgctgaggttgaactcctgtgtgtcgttggccttgatgcccaggtatgtgatgccggagtccttgtagaagttggcattggtgttgacgtgcatgaaggacctgccctcagccgcgttcagcacatgggtgatgcctagtttctgcagcttggggatgtcctgagccacagacgcgttgcccacgtagatccgcggggtgacctcgttgcagggctggctcgggaggctgtagcagccgctgccgtccgagagcaggtcgttgagatcctgcaccgagagctcgaacgagcccgacatggcggcggcggggccctgcacgcccggcaggagcaagcgaggcggagagcggcggatcagct

SEQ ID NO: 434065 - DNA, 442 bp, Homo Sapiens
ttttacgttattgttattatggaaagtgattgtgatgctatttatcttcagggtcactctgggcaaagagaaggtcctcagccatgcccccagcaccttgcacataggtgtctgataaaagtttaagaaattaaacactttttgagcaccaaatatatatagggcattgttctggtgggtgtgtcacgctcccagaagactgaatttatggtaggatcactcgcaaggccttgtgaaggagtcttacctaaaacaaaagaaatatcagggacttttgttgactatttacaactcagttttacatttaaattcagggcagtgttaatatgccaaggtaggggaatgtgccttttttcagagttggccagggagctcctgggttggggacacggaggagggcaggtgtgggcgtaaggcttcacttcccggctgttgaaggtct

SEQ ID NO: 434066 - DNA, 1184 bp, Homo Sapiens
ctccagtgtggattaacagatgggtggtgaggcttgaatgcccactaaattctttgccacatttattacatttgtaaagtttctctcctgtatgaattctccaatgttgtgctaggtatgaactgctactataaaccttgccacatttgttacatttatgaggtttctctctagtatgaattttctgatgtcgtacaaggtatgtaattcgactgaagaccttgccacactcattacatttgtaaggactctctccagtatgcactttctcgtgtcgtgcaaggtatgcaattcgattgaagagcttgccacactctttacatttgtaaggtttctctcctgtacgaattctccaatgttctgcgaggcctgacttgtccctgacggttttaccacattcatgacatctgttaggtttatctgcagtgtggattgcttgatgattaggaaggctagaagacactctgaagactttgccctgctcattacattcgtaaggttttctccttaatgtgtgctttctgttcttgtgacagcaaatggaaaatcaacaaaatcattccctatgtttattaaatatgtgggttttgaccccagagtaaattctttgaagtggcgaaactgaagaactgtggctgatgaacttttgaacttgattacattcataaatcttcccttcaccttgaaatatctccagttctggcagatgtaagtgaaaggttactccaagttgttttttaattggtttgtcttctgcattgcttcccaatgcatagctgctccctgtgttcacacctttgatgcactccctcccatctgaattttttgctattttcacttcactctcaccagaccagggctccctcctttgctccaacatggagttaatattcaggtcaggaagagagattcccagggagaccaggttcctgtagttctccaacatcacatccttgtataaagccctctgtgcagggtccaggcatttccactccgcctgagagaattctatggccacgtccctgaatgttaagtgtccctgaggaagagccatccctgactcctttgctttcctcttccttctcttctgggctttttcatcacacagcatgactctttagaagtcaatcgcgccgcggcgtgaccttcactccacgcgatccgcttccgggtttgtgggaccc

SEQ ID NO: 434067 - DNA, 1823 bp, Homo Sapiens
  misc_feature (164)..(164): n is a, c, g, or t
  misc_feature (348)..(461): n is a, c, g, or t
  misc_feature (1655)..(1655): n is a, c, g, or t
tctgacctcatctcctgcctgtgtcctcctcgctccctctgctccagccaagcatgcgtccttcctgttcctgggccgagcttgctcctgcctcaaggccttcacgtgggctgtgcctctgctggaactcgctggcccctcagctgcagcattgacttccaaanactcctggcacatgaggaagaaacccagaagaggagagcaaaggagtcaggaatggcttttactcagttgacattcagggacgtggccatcgaattctctcaagatgagtggaaatgcctgaactctacacagaggactttatacagggatgtgatgttggagaactacaggaacctggtctcnnnnnnnnnnnnnnnnnnnnnnnnnnnnnnnnnnnnnnnnnnnnnnnnnnnnnnnnnnnnnnnnnnnnnnnnnnnnnnnnnnnnnnnnnnnnnnnnnnnnnnnnnnnnnnnnnnaactgtgtaatcaaggaactagcaccacaacaggaaggtaacccaggagaagtattccacacagtgacattggaacaacatgaaaaacatgacattgaagagttttgcttcagggaaatcaagaaaaaaatacacgactttgactgtcagtggagagatgatgaaagaaattgcaacaaagtgactacggccccaaaagaaaatcttacttgtaggagagaccaacgcgatagaagaggtataggaaacaagtctattaaacatcagcttggattaagctttctaccacatccccatgaactgcagcagtttcaagctgaagggaaaatttatgaatgtaaccatgttgagaagtctgtcaaccatggttcctcagtttcaccaccccaaataatttcttctaccatcaaaacccatgtttctaataaatatgggactgatttcatctgttcttcattactcacacaagaacagaaatcatgcattagggaaaaaccttacagatatattgagtgcgacaaagccttgaatcatggctcacacatgactgtacgtcaggtaagtcattctggagagaaaggatataaatgtgatctgtgtggcaaggtctttagtcaaaaatcaaaccttgcgcgtcattggagagttcatactggagagaaaccatacaaatgtaatgaatgtgacagaagtttcagtcgcaactcatgccttgcactacatcggagagttcacactggagagaaaccttacaaatgttatgagtgtgacaaggtcttcagtcgaaattcatgccttgcactacatcagaaaactcatattggagagaaaccttacacatgtaaagagtgtggcaaagcctttagtgtgaggtcaacacttaccaaccatcaggtaattaatagtggcaagaaaccttacaaatgcaatgaatgtggcaaggtgttaagtcagactttaagccttgcaattcatcagagaatcacactggggagaaacataaaggggaatgaagggggaaagtcttcagtcagacttaaagccttgcaggcgatggaagaattattctggggaggaaccttccaagcaatggatgtgggaagggttttaagtacaatcaacacttgcgaatcatcgggagattcattctggaaggaacctctcaagtgtaaaggaggtggaaagccctttagnggcttttaaacttacttcccttaggggatccttctggaaagaaactttaaaatgataaaatggtggaaggcttaagtggctttagccctactaccctcgggcgttctacttggagaaaccttaatgtagagggggcgaattttttggggccccaaccactaaacaaaa

SEQ ID NO: 434068 - DNA, 1769 bp, Homo Sapiens
  misc_feature (1633)..(1643): n is a, c, g, or t
tgacttcaaacatcctgcaacctttaatatatatcatgttgtgtgagttttaacacatttgggcttgcatttgttctacaatgtgtaatatgaaaagtttatcagcacaactagactgaattattcctcacataaatccttggatgtgttacagttttgatccttggttaatagcttcaacatgcacaaaatatacaaagatgtttacacattttgatgtctagtgagttgtgagacctaaatgaagcctctgccacacagttaggtgtatatgatttctctttagcatggactctgatgtcaatgaatgcttgaacttgtgatgaagggtttgctgtacttgtaaggattctctcaagaatgaaattctctgatgctgtgtaggagtgaattgtgactgaaaaccttgccacatttattatacttgtatggtttctctctgatataaattctttgatgactcacaggatttaaactttgactgaagaccttgccatattaatttcttttataaggtttctccttagtatggataatttgatgtctgaagaggtttgggcgcacactaaaggacttcccacaatcactacatttgtaaggtttctttccagtatggattatctgatgtctagtgaggtttgggcgcacactaaaggatttgccacactcattacatttgtaaggtttttctccagtatggatgacctgatgggtagttaggcttgaatgcacactgaaagcctttggccacattgattacatttgtaaggcttctctccagtatggatgacctgatgggtagttaagttcgaatgcacactaaaggctttcccacactcattacacttgtaaggtttctctccagtatgaactctccgatgactcgcaaggtgtgaattgtaactgaaaaccttaccacattcattgcatttgtaaggtttctctccagtatgaattctccaatgccttgcaaggcttgaagtctgactgaagactttaccacattcattacacttgtatggtttctccccagtgtgaattctctgatgagttgcaaggcttgaagtctgactgaacaccttgccacattcattgcatttgtaaggtttcttgccactatgaattacctgatggttggtaagtgttgacctcacactaaaggctttgccacactctttacatgtgtaaggtttctctccaatatgagttttctgatgtagtgcaaggcatgaatttcgactgaagaccttgtcacactcataacatttgtaaggtttctctccagtgtgaactctccgatgtagtgcaaggcatgagttgcgactgaaacttctgtcacattcattacatttgtatggtttctctccagtatgaactctccaatgacgcgcaaggtttgatttttgactaaagaccttgccacacagatcacatttatatcctttctctccagaatgacttacctgacgtacagtcatgtgtgagccatgattcaaggctttgtcgcactcaatatatctgtaaggtttttccctaatgcatgatttctgttcttgtgtgagtaatgaagaacagatgaaatcagtcccatatttatttagaaacatgggttttgatggtagaagaaatattnnnnnnnnnnnaaactggggaaccctggttgacaggacttgtacctggggtccatgataaattttgccttgcacttgaaactggtgcgttcatggtctatgttgcgtgaacctgaacgcaggggttgtgaatggact

SEQ ID NO: 434069 - DNA, 1139 bp, Homo Sapiens
  misc_feature (135)..(135): n is a, c, g, or t
  misc_feature (157)..(157): n is a, c, g, or t
  misc_feature (648)..(815): n is a, c, g, or t
atgacttcaaggtttgattttttattgaagatcttgccacatatatcacatttaattgcgtctctatagtatggattatttgatgtatagtaaaatgtaagccttgatgaaaggccttgcaacgctcattacatntgtagtgttctgtcccaatatntgctttctctttttgtgtgaataatgaatccacaaaattacattcatatgtatgagaaatgtgggttttgacagtagaagaaatacgttggggtggggaaactaaggaactactgttgacagatttttccatgtgatcatatttatatattttcccttcagcttgaaatagctgcagttctggtagatgtgactgcgggtttaatccaagctgatttttaacaggctgcttttgtgcatcatcctttctaccatgcatgtctcttctaccaatgagactttccttataggtcacacgcactcgcttataatgtcttcaatcatgtttccacagacactgagagtcatgtacatttttctgggtttctctgaagcaaaaatcttgtatgtcgtggctttcatgtctttccaacattactgtctggaatatttctcctgtattactctccttttttggtggtaattccttgatctcacatttagaaaaaatannnnnnnnnnnnnnnnnnnnnnnnnnnnnnnnnnnnnnnnnnnnnnnnnnnnnnnnnnnnnnnnnnnnnnnnnnnnnnnnnnnnnnnnnnnnnnnnnnnnnnnnnnnnnnnnnnnnnnnnnnnnnnnnnnnnnnnnnnnnnnnnnnnnnnnnnnnnnnnnnnnnnnnngccataaggttttaagccttctttacttctggaacccccactgagctatcatgaagaatgcagaacatccagggagaccaggttcctataattctccaacatcacatctctgtatagagtcctctgagcagggtccaggcatttccactcctcctgagagaattctatggccacatccctgaatgtcaatagaccctgaggaagaaccattcctgacgcctttgctttcctcttccccttccgggtttcttcctcatgtaccaagagtccttagaagtcaatccgccacggtgtaactttcactccacataatccgcttccgct

SEQ ID NO: 434070 - DNA, 722 bp, Homo Sapiens
  misc_feature (402)..(402): n is a, c, g, or t
tttcgccatgttccttcctttttgaatgatttgatttttgttcttaatggaagtatgtctctgttttctcacaactctcttttgaaggatttcagctcactaatgacacttctcaagcacttatccatgcagaaagcctttactgaacaccaaatgtgtgtcacgcactgcaggaaatgctgaacacaataggatgaagaaagattctggtcctcaagcactcaaagtatactgggagaaatgggtagttaggtttgaatgtgctctaaaggctttgccacactcattacacttataaggtttctctccagtatgaattagctgatgccttgcaaggtgtgaattacgcctaaagaccttgccgcattcatgacatttgtaaggcttttctccggtgtgaantaccagatgaatagctaggcttgaacgaacaccaaaggctttgccgcactcattacacttgtaaggtttctctccagtgtgaattctccagtgatttgtaaggtgtgaattttgagtgaagaccttgccacattcattacatttgtaaggtttttctccactgtgggttgcctgatggatagctaagcttgaacgagctctaaaggctttcccacactcattacacttgtaaggtttctctccagtatgaattcctcgatgtcttacaaggtgtgaattctgagtgaagaccttgccacattcgttacatttataaggtt

SEQ ID NO: 434071 - DNA, 416 bp, Homo Sapiens
taatccaagttgatttttaataggcttgttttctgcattgcttcccaatacacagctcctccctgtgttcacgcttctgacacattcccttccatctgtattttttactattttaacttgactttgcagaatcaagggctctctcctttgcttcaacatggaaataatacttaggtcaggaagacagattcccagaaagaccaggttcctgtagttctccaacatcacgtccctgtataaagccctctgtccagggtccagggatttccactcctcctgagagaattcgatggccacgtccatgaatgtcaagcgtccctgaggaagagccatccctgactcctttgctttcctcttctgggcttcttcatcacatagcatgactgtttataagtcaatccatgaatggcgcttgc

SEQ ID NO: 434072 - DNA, 559 bp, Homo Sapiens
gctccaagctcatttttaataggtttgtttccagcatgcctttgatcatgtcgctctgtactactcatcaactttttggtttttgtcatgagtgcttcatggccatttgtttcattttcttgccactgaaacacaaagtcatgaatatctttctcaatttcctggaagcaagtatctccaatgtgatgacttgcatgtatttgcaatgtccctgtgtggaccacttctgtattgccttgtcctgttgatgagaacatcttcatcatgcatttggaagaggtatccagggagaccaggttcctataattctccagcatcacgtctctgtatagagtcctctgagcagggtccaggcatttccactcctcctgagagaattctatggccacatccctgaatgtcagtagaccctgaggaagagccatccctgactcctttgctttcctcttcctcttccgtgttttttcctcacgtaccaagtctttagaagtcaatccgccgcggtgcgaccttcactccacgggatccgcttcctgcggacgcgtgggcggacgcgtgg

SEQ ID NO: 434073 - DNA, 882 bp, Homo Sapiens
  misc_feature (183)..(183): n is a, c, g, or t
tgggaagtcggtgaccgtcaggatgagataaaaattaaagtcggcgaccggttcgttcgtaggcatcaagtcgcatgagcgtgaaggtgagggcggtatgtccaaacgagaccacgtatactatatgaggatgcgccggatagcataggtgcaggatattaatgttgaaagtgcgattacgtngactggggcacctggcaatctaaaagataagaaaaaggtggggaaagtggtcttacttttagggtttaaagaggggaaagggagtgctgtatttgggcccgaagggaattttttatgcgggtgcgcgggaggaggctaccgaaatgaaggaaagtgtaaaaaggggtgggtaataaaaggtatacatgtggatcccttgcttataatatccgcccgccctttttggaaggcatacggcaaaggtgtaaccccaaaaagaccagggagtttgaggtaaaagagatagggcacggattgacaaaggggagagccactatggagcaggcctaggtacggaagcaaggcctgttgaaagagagaagaaattatggggcctccagtatggccatacaagtacttacctgagttcacacctttgatgcactccctgccacctggattgtttgctattttcacttcactctgcagattccggggatctctcctttgctccaacatggagataacactcaggtcaggaagacagattcccagaaagaccaggttcctgtagttctccaccatcacttccctgtataaagtcctctgagcagggtccagacatttccactcctcctgagggaattctatggccacgtccctgaatgccaagtgtccacgccgcagcatgaccgtcactccacgtaatctgcttccccc

SEQ ID NO: 434074 - DNA, 568 bp, Homo Sapiens
acaggcccggaaacggacgcgttgggtgaaggtgacggcgtcgagcgacctctctgacctcatctcctgcctgtgtcctcctcgctccctctgctccagccaagcatgcgtccttcctgttcctgggccgagcttgctcctgcctcaaggccttcacgtgggctgtgcctctgctggaactcgctggcccctcagctgcagcattgacttccaaagactcctggcacatgaggaagaaacccagaagaggagagcaaaggagtcaggaatggcttttactcagttgacattcagggacgtggccatcgaattctctcaagatgagtggaaatgcctgaactctacacagaggactttatacagggatgtgatgttggagaactacaggaacctggtctccctggagtattatcctatgtgggagcacaggaaagagccctggaccatagaaagccaagtacgagtagcaagaaaaccaaaagggtgggaatggatcaaaggtgtgaaaacagatctgtctcgtaactgtgtaatcaaggaactagcaccacaacaggaagataaccca

SEQ ID NO: 434075 - DNA, 1644 bp, Homo Sapiens
  misc_feature (1310)..(1567): n is a, c, g, or t
  misc_feature (1586)..(1597): n is a, c, g, or t
ttaggtttcaagtaagtgacttttatttttctctgacatttcacagtcaatttctgcaaaacttcatactttctcaaaagaattcacatttgctaaataaatttctaccctaaagaattcatagctgaaaaaccacttcaatatatgcacaaaagttacttttctgctaaaggaaccatagtagaaaataaaaagtcagacaatactataatcaataaaaaccaatgagtgtaataaattacaaatgtcattaaattccattcccataaccattgcaatcagcaacttttctatatatatttcaataatgccaacaaaatctgccaaaagttctcttaagggttgctctgagctaaaaatggcttctcaccttcagaaaacagcagctctgccacagtacttcatagccaattacgttattcatcgctaaaaccatcactacttacagccttgggcaaccgatggagatctttctggtcacctccgaggttcctccatttgctgatctggcttctggactcaatggatctctccttccaagatctatcttctctacttgggttcatctgcttacagctccaacagagaacaaatgcccatggtaatagcctggagagacttctagcactaagttacaagattagaaaagagctgagagtggtgctgcttctccctgccactcagcagtgaggattgatagtggctttcatcatcttttactgaaacagggagggaaatgcaagccttaatctaggaagaagagtccaagaggcttatagctccacagagggtttttccaatggaataaatttggttctcagcaagtgttttcagatttttgacacagtaagactcatgactggtgcccaggatgttctgaatgcacctgtctctatagctttgctgccaaacatattctgccaaaaaggaagcttcctagcatggtgcacagagtagagctgctatagtaccacacagattcaggggaggcaaagagagtgggccaagagaaaaatattaaaaggagctgaatctgcctaaagacacatttgctctgatttctgaaattctttcagaaagcaaacagcaggtaataattctgcgttcatgagtggagtctagggatgttaccaagttgttcacttctaaatcagtcatatctaaatcacacgtttgtgaacaaagtataggcaatctgaagccacatactttttaaactatgttagagttacaactacctaggaaatgtcatatttaacttctggtcttggtaaaacttttctttgcagacaggttgaagctgagctgannnnnnnnnnnnnnnnnnnnnnnnnnnnnnnnnnnnnnnnnnnnnnnnnnnnnnnnnnnnnnnnnnnnnnnnnnnnnnnnnnnnnnnnnnnnnnnnnnnnnnnnnnnnnnnnnnnnnnnnnnnnnnnnnnnnnnnnnnnnnnnnnnnnnnnnnnnnnnnnnnnnnnnnnnnnnnnnnnnnnnnnnnnnnnnnnnnnnnnnnnnnnnnnnnnnnnnnnnnnnnnnnnnnnnnnnnnnnnnnnnnnnnnnnnnnnnnnnnagagcgaaactccatctcnnnnnnnnnnnnggaagatgaagctgaccatatagaacttattaagataattttgtaaa

SEQ ID NO: 434076 - DNA, 1039 bp, Homo Sapiens
  misc_feature (20)..(20): n is a, c, g, or t
  misc_feature (26)..(27): n is a, c, g, or t
  misc_feature (36)..(38): n is a, c, g, or t
  misc_feature (41)..(41): n is a, c, g, or t
  misc_feature (53)..(53): n is a, c, g, or t
  misc_feature (68)..(68): n is a, c, g, or t
  misc_feature (79)..(79): n is a, c, g, or t
  misc_feature (117)..(117): n is a, c, g, or t
  misc_feature (123)..(123): n is a, c, g, or t
accccagaccgctgccctgntggcanncatgctgtnnncantcatagtctctntttacgtcacagaancatacaccaantgcctgtcggtcatttcataaccagagaagtgattctncccctngcagctcttagcaggaggctcaccccaatctcataaatttctcttgtgggcttttgagttccaggagggcataatcataatccatgccgatgtcattggcattgcccttgatccaacccttgggcacatgggtgctttcacccggatccactgaaatttcatctgctcgggcatggctgaagtggagtcgttggcccctcgaccaccatctttaaacttgggctttaggaagcccactcgaagcttctgggttcctttcacataggtttttccatcgtgtatgcagtgggcagctgtgaggacatgcttctctgccaccagggtgccggtgcagcccgtggataacttcactgatgttgagaaagggtagttgagcaggaagtccttcccaaaaatgctgaacctgctgtcatagccataaatctgccgcttccttcgagactttcctgaagaccctgagtctcggttttgggccccatctccactactgctgaggatgtagatgcccacctgcgtctctgtgcggctgccattggcatagagcgtttcataagacagatattgcttggcctcttcgtaagtgggcagtggagttcccttatgacactggggtccacatgaagaagatacttctaatttggcttcggctccaaagtctggcttggctaaattgagggtagactggggcaagacgacagggaggcggtatgcaggccaagtgggtttccagggggcactgtaagggctcacttgcccaacagcacagagcagaaagaagagaaggaagaggagccctggaatccctgccatgccgagcacttttccgcgccgagcagcccgcccgggtccgcggctcctgcgccgctcagacaggtgtgggcgccgggagagagcgcgcggctcccattcctgcccc

SEQ ID NO: 434077 - DNA, 1688 bp, Homo Sapiens
  misc_feature (267)..(292): n is a, c, g, or t
catatctcttgtatgccaaatatttaatataaatctttgaaacaagttcagatgaaataaaaatcaaagtttgcaaaaacgtgaagattaacttaattgtcaaatattcctcattgccccaaatcagtattttttttatttctatgcaaaagtatgccttcaaactgcttaaatgatatatgatatgatacacaaaccagttttcaaatagtaaagccagtcatcttgcaattgtaagaaataggtaaaagattataagacaccttnnnnnnnnnnnnnnnnnnnnnnnnnngtgtgcacgccaatgacaaaaaacaatttggcctctcctaaaataagaacatgaagacccttaattgctgccaggagggaacactgtgtcacccctccctacaatccaggtagtttcctttaatccaatagcaaatctgggcatatttgagaggagtgattctgacagccacgttgaaatcctgtggggaaccattcatgtccacccactggtgccctgaaaaaatgccaataatttttcgctcccacttctgctgctgtctcttccacatcctcacatagaccccagacccgctggcccctggctgggcatcgcattgctggtagagcaagtcataggtctcgtctttgacgtcacagaagcgatacaccaaattgcctggtcggtcattgtcataaccagagaagtgaattctgccccctggcagctgcttagcaggagggctcaccccaatcttcataaattttctcttgtggggctttttgagttccaggagggcataatcataatccatgccgatgtcattggcattgcccttgatccaacccttgggcacatgggtgcgtttcacccggatccactgaaatttcatctgctcgggcatggctgaagtggagtcgttggcccctcgaccaccatctttaaacttgggctttaggaagcccactcgaagcttctgggttcctttcacataggtttttccatcgtgtatgcagtgggcagctgtgaggacatgcttctctgccaccagggtgccggtgcagcccgtggataacttcactgatgttgagaaagggtagttgagcaggaagtccttcccaaaaatgctgaacctgctgtcatagccataaatctgccgcttccttcgagactttcctgaagaccctgagtctcggtgttgggccccatctccactactgctgaggatgtagatgcccacctgcgtctctgtgcggctgccattggcatagagcgtttcataagacagatattgcttggcctcttcgtaagtgggcagtggagttcccttatgacactggggtccacatgaagaagatacttctaatttggcttcggctccaaagtctggcttggctaaattgagggtagactggggcaagacgacagggaggcggtatgcaggccaagtgggtttccagggggcactgtaagggctcacttgcccaacagcacagagcagaaagaagagaaggaagaggagccctggaatccctgccatgccgagcactgttccgcgccgagcagcccgcccgggccgcggctcgctgcgccgctcagacaggtgtgggcgccgggagagagcgcgcggctcccatgcctgccccgccgcacagccgagtgcgacaagctggcgagcagcgcaggcaactccgct

SEQ ID NO: 434078 - DNA, 845 bp, Homo Sapiens
cggcggggcaggcatgggagccgcgcgctctctcccggcgcccacacctgtctgagcggcgcagcgagccgcggcccgggcgggctgctcggcgcggatggctccctaatgagtagaatgagacctgtgtgccaaccctggcctagtcctcatgcccccacaactgtgaagcgagagggctcaacagtttcgaattcaattcaaccaccacctcctgaataccaactaggttccaggacctggctagaagcagagacaccaggacagaaaagacagtgttctgctttcatggagttcacagaagagtcgaggagagcttcacatttttcatccattcttaaaattgagccagtttagccctaggaggtgggcaggctctgaggaatcatcaatcaagagaagagaacatcgccagaaacaccatgctgcagtacaaaaattctataaaaataccttttttgagtcattaacataaaatgaagaaaacagcagcagccaagaagagagatgttgaaatttaagagaggaagacagagaagaaaaatccactggataccttatgtgtaattcaccaatctgttggaacacttctgccacgtgtgaagagttttggcagaccaaatccactatgcctgaagtgatgcccaccaacaaagacataaaaattttcaacatttcaacagccatgttggaatcatctgcagaattaccgaaaaagtgcccagttggacgatttcataaacaattaacaggcaatcacacacgttgcagggacttgtgtacagtactgagaacaccccaatcttgaccatcagtctttctaacttgtctgtctttgtccatct

SEQ ID NO: 434079 - DNA, 1646 bp, Homo Sapiens
  misc_feature (47)..(83): n is a, c, g, or t
  misc_feature (212)..(225): n is a, c, g, or t
  misc_feature (1624)..(1624): n is a, c, g, or t
ggatgatagatcatataggggaatcgcgctgtacgcggtggcggcgnnnnnnnnnnnnnnnnnnnnnnnnnnnnnnnnnnnnnatcaggccaaatcggccgagctcgaattcgtcgagagcgggtcaccacctcccgcaagtgccagagccgagcggactgcgcggaggctgcggagccggcggccgcgggagctgaccctgcggggtcccnnnnnnnnnnnnnnagccgcgaagcccccactgaggccgccgctgccgggcctcccctcccccccgggcgggcgccatgcgggggagcccgggcgacgcggagcggcggcagcgctggggtcgcctgttcgaggagctggacagtaacaaggatggccgcgtggacgtgcacgagttgcgccaggggctggccaggctgggcgggggcaacccagaccccggcgcccaacagggtatctcctctgagggtgatgctgacccagatggcgggctcgacctggaggaattttcccgctatctgcaggagcgggaacagcgtctgctgctcatgtttcacagtcttgaccggaaccaggatggtcacattgatgtctctgagatccaacagagtttccgagctctgggcatttccatctcgctggagcaggctgagaaaattttgcacagcatggaccgagacggcacaatgaccattgactggcaagaatggcgcgaccacttcctgttgcattcgctggaaaatgtggaggacgtgctgtatttctggaagcattccacggtcctggacattggcgagtgcctgacagtgccggacgagttctcaaagcaagagaagctgacgggcatgtggtggaaacagctggtggccggcgcagtggcaggtgccgtgtcacggacaggcacggcccctctggaccgcctcaaggtcttcatgcaggtccatgcctcaaagaccaaccggctgaacatccttggggggcttcgaagcatggtccttgagggaggcatccgctccctgtggcgcggcaatggtattaatgtactcaagattgcccccgagtcagctatcaagttcatggcctatgaacagatcaagagggccatcctggggcagcaggagacactgcatgtgcaggagcgcttcgtggctggctccctggctggtgccacagcccaaaccatcatttaccctatggaggtgctgaagacgcggctgaccttgcgccggacgggccagtataaggggctgctggactgcgccaggcgtatcctggagagggaggggccccgtgccttctaccgcggctacctccccaacgtgctgggcatcatcccctatgcgggcatcgacctggccgtctacgagactctgaagaactggtggcttcagcagtacagccacgactcggcagacccaggcatcctcgtgctcctggcctgcggtaccatatccagcacctgcggccagatagccagttacccgctggccctggtccggacccgcatgcaggcacaagcctccatcgagggtggcccccagctgtccatgctgggtctgctacgtcacatcctgtcccaggagggcatgcggggcctctaccgggggatcgcccccaacttcatgaaggttanccaatcccggaaattccggacc

SEQ ID NO: 434080 - DNA, 575 bp, Homo Sapiens
tggttgaactggtggcttcagcagtacagccacgactcggcagacccaggcatcctcgtgctcctgtgctgcggtaccatatcctgcacctgcggccagatatgccagttacccgctggccctggtccggacccgcatgcaggcacaagcctccatcgagggtggcccccagctgtccatgctgggtctgctacgtcacatcctgtcccaggagggcatgcggggcctctaccgggggatcgcccccaacttcatgaaggttattccagctgtgagcatctcctatgtggtctacgagaacatgaagcaggccttgggggtcacgtccaggtgagggacccggagcccgtccccccaatccctcaccccccacacctcagccactggagactgatgatccaaccacaggatccctactctttggccaagagatcccagtacccagatcctggctcctagactcctatttcccaaacatagggtcatgggatcccagcatccagatcctgaatcctaagactcctatgccccaaccaatgagacatagcgatacccagcctagggacaggctgggt

SEQ ID NO: 434081 - DNA, 608 bp, Homo Sapiens
  misc_feature (377)..(377): n is a, c, g, or t
gtgaagttccagtccatagacacagtcaattccatcatatttcaccagataaagagagggatttataggcacctgatccagaacggttcctttttcactgcgtgatgggctcatctccttccttccatccatgagaaattctgcagcccacgatgtttctgcggggctgggatgaaggtcggcctctctgcttcttttgggagacttttttctttgtcatgtttgcagacccagtggcccgtcctgcagctgccctggtttgttgtccttcggcttcctgtgcgttgggggtcttcattcccatgcctggcgtccaccgccggggatcgcgggcctcacgtgcccaaatcggacacctcgctgctgcctccgctacngagcctgtggcgaaggagggtcagcaggcgaccggccgagtgaatgcttgcaagagcggggagggtaggatccgtagatgaggagcgtgtctaggagggcggcgagacaggcaaagaggaaggcagcggcgtccccaccgcttggctcgctagctctccgcctccctgctggcggtggcggcccctcagccacatcgggattccaccagtccctgctgtcgccgcggcagt

SEQ ID NO: 434082 - DNA, 574 bp, Homo Sapiens
ttttttttcatgtacacacaagtttgtattttttagagcaaaacaacagttaatgctggcaaagatgtttagttatcagggattccataagctttcaatacactgaaaggcaacattttttgcatgtctacaaattatacatttgtttccacacatgtgccaaattttaccctaacagttaggactttttcaccaaatcgtagacatagatatggaaatcatcatcaaacttgatgaaatacacagagggtttggcttccacttggtgaatgaccatgccgatccttttggagccatcttctttggtatattccacatgcttacctattaggccatctacaactcctcctggctccctctctgttggaggagactcactggattctggcatgatgcggaggtcaccttccttataatcatctagaagctgatccagaacggttcctttccactgcgtgatgggctcatctccttccttccatccatgagaaattctgcagcccacgatgttcctgcggggctgggatgaaggtcggcctctctgcttcttttgggagactttgttctttgtcat

SEQ ID NO: 434083 - DNA, 716 bp, Homo Sapiens
ccgatgtggctgaggggccgccaccgccagcagggaggcggagggctagcgagccaagcggtggggacgccgctgccttcctctttgcctgtctcgccgccctcctagacacgctcctcatctacggatcctaccctccccgctcttgcaagcattcactcggccggtcgcctgctgaccctccttcgccacaggctcgtagcggaggcagcagcgaggtgtccgatttgggcacgtgaggcccgcgatccccggcggtggacgccaggcagggcaaggccattagtgggcgccagaatggagagggggatgggaaggaatccagcaggagacatggggtggagttgggcgccaggcaagggtggggtgggggagtgcggtgagcaacatgaaaagggggtaggaacgggagccagacaaggatttgaaggtgagcgccgggaagcaagggcggtgggtaccagagaagtggttagggtaggcagggggtgtcgtggacagcagctgggacgctcagggaaggagggcagtgggtgccggtcaaggcctctttgcaaggggattggaagtggacgccagtggtagcaaggggttccgggagggcagtgggctctgagctaggaggaggtggcccagccacttctgcagagttcctaaccccagacagctctactgaaccacccagccttccccacagccaaaggaacttaagaggg

SEQ ID NO: 434084 - DNA, 696 bp, Homo Sapiens
cagggtctttctcataggtaatgtaaaaccatgtgttcatgacaggtgcacgtgctaagaccattcccctccactcatctttagaaccatcctctgtctcaaacatatgttccactgctttgccaatcattgtgtctgccaagtgtgcatcgctgattcgagatgtcgctgcacagttttcctcagggtctccacagaggaggccattagtttcaggacttctggtggaattcccatctgccaccacacagtgaaggatcactagacccagggcaagggccaggagcacgtggcagggagtctggcgccgccatgcaccgggcggcccggtccatcaaccccgctctgccgggccgggcagcccctagacaagtctccctccttcttcgcccccttcccgggcctcgggcgcctgagagggtgcctggaaactaatcccggaggcagaaggaaacgaaactatttcccaggctggcaccctggctacaaggcagggaaacacccagggcgggaggccggccggctccgtgaatgtcgccgggaggagggagcctcctattcatcccccctcctcctgcacacaccccgccaaagaggcgcaggacttggtcctgggagcctccacgctgctcccacccaaattgccccacacccatacccacacccagggacatattcgggctgccctcggaccag

SEQ ID NO: 434085 - DNA, 1167 bp, Homo Sapiens
tacttttccacaggacatttaagctttcattaaactggaaagcaatcaagtctttatgtctacaaataatacatttcatagttccacaaatttggcagagtttgtgatgacatctaggatgttttcaccaaatcgtagacataaatatggaaatcatcatcaaacttgatgaaatagacggagggcttggcttctacttgatgaatgaccatgccagtccttttcgagccatcttctttggcatattccacttgtttgcctaccaggctgtccacaacttctcctggttccctttctgctggaggtgaatcattggaatcaggcataatgcgaaggtcgccttctttgtgatcatctaagagttggtacatgtacaagacagggtctttctcataggtaatgtaaaaccatgtgttcatgacaggtgcacgtgctaagaccattccccgtccagtcctctttcgagccatcttctgtctgaagcatatgttccacttgtttgcctatcattgtgtctgctacttctcgtggttcgctttctgctggaggtgtctcatttgtatcaggtagtacttcgaaggtcggcttctttgttcatctttattaagttttggtccatgtacacagtcagggtctttcttattttgtaatgtacaacgatgtgttcattacaggtgcacgtggtccagaccggttcctttccactggttaacagggccattcccctctttccacccatgctgaatcctgcagcctacgatgttccgccggggctgggaaacaggtttgctcggacccacactgctccgatgttttttgtgggatgtcctcttcttcatcatgttggcagatactccagcatggcctgcatcagctctggaccgctggccaggtgtctttccgaatggggtcttcattcatctgtatttaagtgagcagcggagctgctggactagggtgaaaattcaatattctccaatttgaaacttttcacagaatgttagtgttctggttaatccaccatccaagtgtctcttttacgagttcagcaaaaatacgtgaaatcacaagcactctgctgaccgccgaggctgcagtccacaggcccacgggttccgccgtcgctcgttcgcgctcccgccggccccagcctgagccagacccgct

SEQ ID NO: 434086 - DNA, 730 bp, Homo Sapiens
  misc_feature (49)..(49): n is a, c, g, or t
ggtgtgtattgcttattttggcaactcaactgcccagctttcctcgatngtcctacacacatatgctgcacccattgcttctcagttcagtccagacctgcatagactgctgcagttagcctgtacagatccatctcttttgccttctttctaatcttttgccctagtgacatacccttttctttaattattattctaacaaagctttctggaaatacctcataagtgtctcttactttgtcatggtctcccccaggtggttgagacctggcagctccctcccacctttcccactctgccctttgccacactgcattttctgtaccctggcccaactcacatgtccctctcctgtcttagctgccatcatctatcttttctctaattcgcgtgggttcttttcatacagggtctccttagtggttgactctcattttcagatgaatcctcacaagacaagcttaatttcagagaacagttttaatgcatatcttcagggcattctttcctgattctctttggtatttgccttgctttgtctgtgtaactctcatatttacattatggcagtgcattcagtattttcttgctatggaaaggcccccgcatcttgcctcctcgccccatttcgtcatcctctccagcagcttcgacagattactgcctagacttccttagatccctgtaacctctcattgtatcaatcaaaccatttaagtagaaaaattcc

SEQ ID NO: 434087 - DNA, 1870 bp, Homo Sapiens
aaatatccctttcttctccctttaatgaggagggggctggtggagaggcggaggaccagggaatgcagccatcgggagggttgggtttggtgtggggcatctctcacagaggctgttggagcccggctcacgtcccacatgtcccttctcggaccagtgtccagggctgagtcacgggtatcgtcattctcagacctccactgagccctgctgcctcaggtgttgctgaaggagctggatgtggtgcagcagcttcttctggtggccagccagggtgatgcccagggcaggcaggtcttctaggctgagctgagccacatcactgaaggtacagaggccaaacttggagaagttgtcctggtagcactccagtccaatggctgaaagccaggcctggggtgagtccagacaaggaaagtccagggccacaggggtcagaagggcctgggaaggcctttcccctgggtccccgccagcctgcagggtatctggcttgcggatcatcttgtcaaatgcagccaccagctggtcaaaatgaggccgccgggcacggtccttctgccaagtgtccaacataagtagatgtaatccaggaggacagcctggaggcgggggcagccggaactcctgctctattgcatttagtacctcctgctcactcatgtcccagtaaggccgttctccataactcatcacttcccacatgagtatcccaaagctccagacatcactggatgttgtatgctttccatgtgcaatgacctctggggctgcccagcgaagcaaacaacttgggccctgaggactgtggccaagacgggccaccttgcacaccaagtggctattcaccagcacgctgtgggcagacagcgagcgatggacgaaggcaaagctggacaggtactgcatggcagcagccactccccgctgcatggccaccagctgcaggctgctgaactggccctcccgctgcctgaggaagctgtccagggggccaagctccatgaactccgtcagcaccatgaggggtcggctcttggtgaccacgccctccagccgcaggatgttggggtgctggaactgacccagcactgcggcccggcccaggaaggtcatctgcaggctttcggcgccccccggcccacagggcctggatggccacagtctgctccctccgtccccgtggctgcaggcggccctggcgcacttctccaaaagagcctgtcccaatgacctcctcaatcttgatataagcaggatcgacttcccgggcaagttctcggatggcctgacaggggtcctcgtaggtggaggggtcgatgtaatacttcaccccgagtcctgggctgctgtattgctgcagctgctccgtgtagccagtcccacgccgcttccgctggaagacgaccgccagcacggtgatggctgccagcaggaggaaggccaaagcccccaggatggagccgatcaccaaggagagtctttccggaagctgggaagacagctccccttgaggaagtgtctggaaatagacttttcccccgtaggggccgtggccggcagcagtccgggcccgcacctggaaaccatagatgtggccagggctcagctgtgtcacggtggcagtgttggtctcgctggtcagggtgaaggagtgggattcgtcttctgcctggtcatagtagcggagctgatagtccaggatgttcccattggtctggtcgggctgcggccaggacaccgtgatgctgttggatgcccggctcacctggtgcaccacagggacagcagagggcacttcatggctggtgctgacattgatggctgcagcctgaggagggtcagggctgagctcagacaccccattaac

SEQ ID NO: 434088 - DNA, 1258 bp, Homo Sapiens
  misc_feature (1252)..(1252): n is a, c, g, or t
gctgtacggtccccaagtccgttatgatctggacacccccactgccagttcatggtctacagccacagtgaccccagcttttcacacaggtcctgaatgttatctggaatgcagacacaagtgctctgagctacactgcttgggggaataattccacatggaaaggttacaacgtggccaagatctccgcagggacacggcccttcagatgacagactccaggaagaaagagcatgagacactggtctctgtttagtttgcccagagctcacggccgtctgcactgcaggcaacgcatcctcctgcggctcacggggggccaggaaccccagggcttctgatggagagttatgcaccgtcccctcggctgggttgtacattcactgattgtcagaagtttctgatactgctgtgggggccggggaaggagtcaccaacagtctggtcctgtcctttggactctacacatcatagcggttcaaactgtacgagtttgggtagctctgccggctgtattggaagtggtctgttaagatgttgttgcggccgtactgatagtccccgtgctgggggaagaggaggccgttgtggggcttctccagtgggctccggtgacgctccttgctgctcaggtctgctgtggtgacggggaggaggtgcttcctggcttgctggtttgcatcgtacttggtcttgttatagaggaagacccccaggatggcggtcatcatgcccaggacgttggtgctggtgactgggttgcgcagcatgatcagggacaccgtgatgaccatgattcttttggtggcattggcgaccgagtagctcagggggctaacgaggttgaggatgctgaaggcgataacattctgggcaaagttacagaagccgctgacagccaggagcaggagcgtccagggccactggtagacgtaggtcaagtcgctgctgaccaggaaagccgagaggtccaccagaacccaggtggggatcataaagaagacggcgtggcagcccaggatgttgagcagccggagatggtggatccgtgaatctcgcaagaccttggtgctctgcttctccttcataatgatccgggacaggaggaccacccagatgggcatggtggccttgacggtgtgtgcataggacacgggcaccttccagatgctgacgtgcgctgacacggacgcgaagtacttgccgaaggggagcggtagcacgtagcgcgggtagaagcgcggcggcagcngcgggc

SEQ ID NO: 434089 - DNA, 2047 bp, Homo Sapiens
  misc_feature (37)..(38): n is a, c, g, or t
  misc_feature (67)..(68): n is a, c, g, or t
  misc_feature (71)..(76): n is a, c, g, or t
  misc_feature (171)..(371): n is a, c, g, or t
  misc_feature (666)..(687): n is a, c, g, or t
  misc_feature (689)..(939): n is a, c, g, or t
cgggaagagggcggggccccggaaaccatgttttttnntgttcgttgtgcttcttttctggcgcccnnctnnnnnngggaggaccaggagttttccattttcgggccacccaagggcttgggagtgccagtgggcgcgaatcttcagcttcggctgaaaccctcccccctnnnnnnnnnnnnnnnnnnnnnnnnnnnnnnnnnnnnnnnnnnnnnnnnnnnnnnnnnnnnnnnnnnnnnnnnnnnnnnnnnnnnnnnnnnnnnnnnnnnnnnnnnnnnnnnnnnnnnnnnnnnnnnnnnnnnnnnnnnnnnnnnnnnnnnnnnnnnnnnnnnnnnnnnnnnnnnnnnnnnnnnnnnnnnnnnnnnnnnnnnccaaactgactcttgaccaaagaatctgatttggcaaaccaaatcttagtgcagtgttcgctcctcgtccccttacccagaacatgattcagatcctaacataaagacaagaacaggtcagggaaccgaaacactgtggtcttgtctattatacaaaatattgagataatgttcacgattcattctgttttcagcaattgtgacaattttgaagcttctctcgaagcttcgaaacacttcatttcctactaaataccaaaacgtgtcagacaggcatcaccagtgggaacttggnnnnnnnnnnnnnnnnnnnnnngnnnnnnnnnnnnnnnnnnnnnnnnnnnnnnnnnnnnnnnnnnnnnnnnnnnnnnnnnnnnnnnnnnnnnnnnnnnnnnnnnnnnnnnnnnnnnnnnnnnnnnnnnnnnnnnnnnnnnnnnnnnnnnnnnnnnnnnnnnnnnnnnnnnnnnnnnnnnnnnnnnnnnnnnnnnnnnnnnnnnnnnnnnnnnnnnnnnnnnnnnnnnnnnnnnnnnnnnnnnnnnnnnnnnnnnnnnnnnnnnnnnnnnnnnnngtgtgagccactgtgcctggccggggaactttgtttttaaacgtttacaaacaaaaagattttcgatgcataggccagtcctaatgcatcccataatggggaccaaggcaaaaacacacacacacaactacaaaatattccctagaaaaatgcaagatcctccgaaaatcaagatctctctaccaaacaacataccaagtcatcacagaagaggtgaagatgcctctcaaaagacatgtgccacagaaatagagcttgaaatactgaacacgatttctcgaagatccttctcaccaccccaagagaagcgccctgctctggtgagggaagaggaggcaaaggagaagagagaagtttcccttccatctggatctgggtggatgccaaccctgacgtgcagggcagagcaccaggctgcaggaactggatgctaattgcaatcgctttttgctttggaacatttgccaggaacttgtgaactgctaaggggatgaccaggaaactggatccatctctgtggctggggatgttttgaatgattctcgcgggctccctgtctgcttggtgaccctgttggtcctatgcgtatctgcgccagggaattaaactagccagtctgacgttctcaagcaccgccctggacacccccactgccagttcatggtctacagccacagtgaccccagcttttcacacaggtcctgaatgttatctggaatgcagacacaagtgctctgagctacactgcttggggaataattccacatggaaaggtacaacgtggccaagatctccgcaggacacggccctcagatgacagactccaggaagaaagagcatgagacactggtctctgtttaggtttgcccagagctcacggccgtctgcactgcaggcaacgcatcctcctgcggctcacggggggccaggaaccccagggcttctgatggagagttatgcaccgtcccctcggctgggttgtacattcactgattgtcagaagtttctgatactgctgtgggggccggggaaggagtcaccaacagtctggtcctgtcctttggactctacacatcatagcggttcaaactgtacgagtttgggtagc

SEQ ID NO: 434090 - DNA, 812 bp, Homo Sapiens
  misc_feature (50)..(50): n is a, c, g, or t
  misc_feature (66)..(66): n is a, c, g, or t
  misc_feature (462)..(462): n is a, c, g, or t
gggaggggagagggtgcagtgaccatgatagttccaatccatctgaagtnattaagtccttctccnagtctgttttgtaaatgcatctccatccagtcaaagtgtgaacagcatccggttccctcattgaaagttaggccacaggagactccagtcttagctctgctggtgtgtgcaagcaaactgcatgtctttgcttgcatggacttccttcccctccagggcaggctatacccaaaaccctttgggaaaagttccagcttcagctttgtaaggtattcatgttcctaacaggtagcccacttggtgccaggctgcaccagccacacacaggtcaggtggccatgtcccagagaggcccagtgaggcttgaaaggcatcttccttgtttcttcagtgtgtgagtgcataggcccacacacactttcccacacacaccccaagttttctggtctgggtttngcagttaagggggtttgaatattgtgccgtatttgacacgatacttgttaatgctcacaaaatgcagggtctctgtatcacaggtggtggtacagggcaccaggccctccagcccctcacccatgagccacttgctggtctctgctgccatttcacggggcacatgctccttggtccatttatctacccaggcctggaatctctgatgtagacgcttgcttacacgctcatgggactgatgagcccggagcagggcggtcctccgatacatatagtcctctgatttgatcacatacaccatcttgtaggaattcagcttgaatctacactccagcttatccagactatcc

SEQ ID NO: 434091 - DNA, 1647 bp, Homo Sapiens
  misc_feature (9)..(9): n is a, c, g, or t
  misc_feature (1622)..(1623): n is a, c, g, or t
cgcgggagncgcggcgctgcgggtaggagccgggttgcgggagaccccaggttcggttgggattcccagccagaacggagcttaagccgggcaggcgagcgaatgacggagtagcgagctgcacggcggcgtgctgcgctgttgaggacgctgtcccgcgcgctcccaggccgccccgaggcttggggtcttcgaaggataatcggcgcccggggccgaacagcgggggcacacggggcgctgccgaagtgcaaggccacggccagagctcgagcccgacgcgctgtctggagtcgtaggttggcgccgtttggggtcggggtctgaggcttgggcgctgcctgggccgagcggagatcggggtttgcctcccgtccccgctcaggaccctgacgtggctgaagcggccccgggagcatgagcgggcagcgcgtggacgtcaaggtggtgatgctgggcaaggagtacgtgggcaagactagcctggtggagcgctacgtgcacgaccgctttctggtggggccttatcagaacgtgagtgcatccggaggggccaggcacggtgggcgggggagtggggggccggtaatctgcacctatggccccgatctcttccctctcgttgcagaccatcggggccgccttcgtggccaaggtgatgtcggtcggagaccggactgtgacattaggtatttggacctcacagacagcagcagctttgagcgagcaaatttctggggtgaaggaactgcgcagcttagaggagggctgccaaatctacttatgtggcaccaagagtgacctgctggaagaagaccggaggcgtcgacgtgtggacttccacgacgtccaggactatgcagacagtagctgctcctcagccctttgggggggtgggggtgtgtggctgtctgggtggatcaaagaaaatagggactgccttggctgccagggcaaggtgctctaggaggtcttcctggcctccttgaactgtggggtccaggagactccctgaactgctagccctcccttttgtctgatttatctaattctcaggtatgaggctttacgtcacttctctttacagatatcaaagctcagctctttgaaacatccagcaagacaggccagagtgtgggtgagtgtctgtgctggagcctcacagcaggaacatgcaggggcaccagaggaagctgaatagggcacagagggctgggtcactgggagatcccagggctactggcattgggccctcgctgatcatcatttttcctgccagacgagctcttccagaaagtggcagaggattacgtcagtgtggctgccttccaggtgatgacagaggacaagggcgtggatctgggccagaagccaaacccctacttctacagctgttgtcatcactgagtcagcactcacctggcctgggggaattaaaggaattccccgtaagggctggacccagctcctttctgggcttgggtagtcaaatgtctgagctaccccaggtcctcatgtcagcagagtggcgcctgcctgtgctggcccatggaacggagacagcattgggctgactgtgggcatgaggagggataaggctgatttggactccaggcttctgnnctggacagcacttgtgtctgcaga

SEQ ID NO: 434092 - DNA, 1379 bp, Homo Sapiens
ttttttttgtgattcacagtgcactgattttatttacagatcaaaagccacttaaataatctgcagacacaagtgctgtccagggcagaagcctggggtccaaatcagccttatccctcctcatgcccacagtcagcccaatgctgtctccgttccatgggccagcacaggcaggcgccactctgctgacatgaggacctggggtagctcagacatttgactacccaagcccagaaaggagctgggtccagcccttacggggaattcctttaattcccccaggccaggtgagtgctgactcagtgatgacaacagctgtagaagtaggggtttggcttctggcccagatccacgcccttgtcctctgtcatcacctggaaggcagccacactgacgtaatcctctgccactttctggaagagctcgtccacactctggcctgtcttgctggatgtttcaaagagctgagctttgatattgtctgcatagtcctggacgtcgtggaagtccacacgtcgacgcctccggtcttcttccagcaggtcactcttggtgccacataagtagatttggcagccctcctctaggctgcgcagttccttcacccagaactttgctcgctcaaagctgctgctgtctgtgaggtcatagcagacgatggcagccttggcaccccgatagtagattctactcatggcctcatagcgctcagagcctgctgtgtcccaaatacctaatgtcacagtccggtctccgaccgacatcaccttggccacgaaggcggccccgatggtgttctgataaggccccaccagaaagcggtcgtgcacgtagcgctccaccaggctagtcttgcccacgtactccttgcccagcatcaccaccttgacgtccacgcgctgcccgctcatgctcccggggccgcttcagccacgtcagggtcctgagcggggacgggaggcaaaccccgatctccgctcggcccaggcagcgcccaagcctcagaccccgaccccaaacggcgccaacctacgactccagacagcgcgtcgggctcgagctctggccgtggccttgcacttcggcagcgccccgtgtgcccccgctgttcggccccgggcgccgattatccttcgaagaccccaagcctcggggcggcctgggagcgcgcgggacagcgtcctcaacagcgcagcacgccgccgtgcagctcgctactccgtcattcgctcgcctgcccggcttaagctccgttctggctgggaatcccaaccgaacctggggtctcccgcaacccggctcctacccgcagcgccgcgactcccgcgggagggggctagagggcgaggggcgatcctaacttccagaccgtaccagcc

SEQ ID NO: 434093 - DNA, 1293 bp, Homo Sapiens
  misc_feature (1000)..(1192): n is a, c, g, or t
tcttttctctgtgtacctgacacacgtatactgaggggattgtacaatcaagcctattgtctccttttctttcactcatggtagaggccagtgggttttaggtatgatcctagccattatatttgaggagaaattgttctattactcctactaatttcagtactaaggtggtgatgccattttgttctgccaaaaactgatcaccctctcccatggtattagcagagcattttctgcctgtttggaaggtttgatgtcctgtttctcattgaagactatttacatgatcattaggacattgcaggagaagtctgagaggtaaaaatacagatattctgggagagtcgtggtccttcagttctgctgaaatcagcatagtgcccttgtcatgaggaagagtttctgttcagccaagagtggtggcacgcttgggtggtagttttggaagcagtcagttgtgctaggacttatttaatatgttgtgaagagaagagtgtcttcttgaaagccttatgtgtccatcagctactaaatgtagaactttaataagttgctcacatctgttcttttagtgttttgtggtatttgaggttttggcaaaaattgggatttttttatcaggcagccagagcctgggaggtggtagggtgtctgaaatgctggccatgttcagagaggcaggagaagggggttgctttcatttgaatattaaaagtgaatttttgtaaactctggtttttacctttttttcatccccacgttgagttggaggaatagtctcttctcttcacctcaatatagctttagaaaatctttatccttcctaataagtttggatggttgtgggtaacattgttcaaacaatctttcagggatcacgtcaatggcctacaaccaagctatttgtcccctactttgagtcttaactgtggtttttcttcaatccccatgggaaagggcttcaaggcaccaccagtggtatttaatattcatacttggnnnnnnnnnnnnnnnnnnnnnnnnnnnnnnnnnnnnnnnnnnnnnnnnnnnnnnnnnnnnnnnnnnnnnnnnnnnnnnnnnnnnnnnnnnnnnnnnnnnnnnnnnnnnnnnnnnnnnnnnnnnnnnnnnnnnnnnnnnnnnnnnnnnnnnnnnnnnnnnnnnnnnnnnnnnnnnnnnnnnnnnnnnnnnnnnngaaaatcacttgaaacctgggaaagcggaaggttgcattggagccgcggattggaaccaccaaattccaaccctgccgcgaaaagatcggagactctgttt

SEQ ID NO: 434094 - DNA, 3314 bp, Homo Sapiens
gattcacaagacttttaaattttattagtaaaatacaaaatggcacagacgttggtgatgagggttggaaaagtctttccaaagtcttcctactctttccaaagtcttcctagatcatccttgtccatgtcctgcttggagaaactaacaaagtccatggaagggggaccaactggccccagcggcttcctcacaaaggaggcagggccccatcacagggtgtcccacccctgaaaggctctcccagcctggaagagccagaacaaagtgcattggacccactcccaccctctctgagctgccagagtgaccccacctgagccaggccctgagcttcctgaatatgctgcgccacacccagcaggggagtgcagaggccaggtgggcagggcagcacagcgtcttgctctctatggaccagagctgggtttccttcctccaagcacccatctgtgaaggagtgttcctagcacctgggtagaacccagcccataagaggcccctcaggtagacggcaagggtcggggacaatccaagggagaggtgagctgccaccagggaccctgaggggccaggccagccggtgcagccccatccaggcatgctcgagccttcagcagccaaaaaagggaacccctgactttatgcctacaacttcccctttcccatgtcccagcccccttcccgggtagcgtccctttcagaaacaaacaggggactcatggaaaacatcatggaaatccctggtcctgtctgcggtggggacaaaggtgaaggagaaggtcttggagggcagagaacagtgttttcaaggagtgagagaggtgggaagggagcccagcctcaggaaagaatctggcgtgtgtggggtgggaccacaagggtcttgtggcctggctgcctgcaggagtctctgaagaagcatcaggaatgtggctgctcctggagcctttcctgggcttcttggacatgtgtctggagccctccctccctcttagcgggtgatgggaggcagagcccgggctgtctcagtgactaagcctgggcggggccttcagggatggtctctgctctgcccatttccatttgggggcccacagggcagggtctgtgctatcaactcactcccttgcaggccctctgggcctcagggtccaaagacaagttagtccattggcagggactgtctaaggtgctctgctggtaaggactgtgaggctgcatccaggggctggagagaagggcctcaggtcaatgagtgttgtcagggggacaggtattccttacctccctctttcctttcacagatgggagtatgttggtggcttgatggtggaactaggatcagaacccagccttcagactcagcacagtgtagaccaaagaggaaagtcaccagatacccttatctccccttcccacaatgcctaaccaagggcagagcctcactggaagcagtgccaggaaacaccacactagcctcatgcaagaaaagacatgtcaccagtgggggcgtgggctctgtacagaggatggggctgggggagatagcaccgcaggtggccggggtgactggcaactgcagcaggaccaagagacacaatcaggttgcagggagtgggcagagggcctggcctgatgctcatgtgtgagatgggaggactgtagtactcacagggcagcatgggtcagaaggggctgggcatttaataaataattgttcattggggctgggatggcgtcaaagggaacctctaaccagccagcagcagaggagagttttggggctggggtgagttgggaggccaccccctctgtccctggaaggtggagaatggtcaaggctggcctcctggggaatgcctgggagcttggagcttgtgcacctggaggatcccacctcccccctccaatcatcccagctcaggccaggcccttgggtgggggtgggtatgaggatgagggatcccaggcagctgtctgaatcaaacaactagacacaggccagaggagttcacacgggcaccaggacatatgaattactaccacagctccgggggatgtagcgaaggccctccgccatctctcctgccatctttcgagggcagccctggaggctctggtaggtgaacatggccacccccaggcagaagaggaggccaaggaaggccagcagccccaccgcctgcctccgggtggcagcctgggcgtcagggacaggagtgataaggacgcccagcctctgggggtccatggtggcatggatgggttcctcagccttaggggtccagctgcctgaagccactggctccctgctgggggtcccttctgaggagacagggaccacagagacgtgggccatgctgccaggcccccagtcctggaaggcatccgtgtgcgctggcacgggacccatctcctcccgctccagagagttctctggcctggggctctgtccctgaccccacacacgctggccttcagacggagcattctcctctggggctggggaggacgcagtggaggcctgggtggaggggtcctgggtggacggggcctcagaggtctttgcctcagcccagaggctgggcccaggttggtggggagcagaactctgccacgtggcggcagtggagacgggaggcactcggaaaagctccgtgcccacaggccctccatcctgagcctttggcgtcggggggagcctggtccctgaggaaccagtcacgcccgtcggcagctctggggaggtccccagggccctctgtgcttcctgggaagaaggagtcggctccaggctactgctttcgcctgtggcttcgggctccaggaccacagactcgtccattcccccggcggcaggggtggtcctgggcttcacctcgccgatctgcttctcgaaggtgccgccatttcgagttagggcagcagcctggcggtccagatgctgcatcgcgtccttgacccattgctccttcgggtcggcacagaacagcctgtgctgtctcgtctccaagatgattgcgcgtttgccgcatgatgcctggttctgttgatagtggatgagcaaagctacaggtatctttgatgtcatcttgctgcacgtgatgttgcatttcgtcacaccgtggtgctgtccagccagcaggacagtcagatggcagaaggtggccaagcggagcagccacgacagagatatcggagccatggctgagggtgggcaagagtcccggcgggggccaggcaggcggctagagccaggcggcagagctcagtgctgtccccttgccgccgccagagatctgggttttttt

SEQ ID NO: 434095 - DNA, 977 bp, Homo Sapiens
  misc_feature (759)..(759): n is a, c, g, or t
agaaacatacggctaggtagcgaggcctgggtggtgaattcggcacgaggctgagctctgccgcctggctctagccgcctgcctggcccccgcccgggactcttgcccaccctcagcccatggtctcctgatatctctgtcgtggctgctccgcttgggcaccttctgccatctgactgtcctgctggctggacagcaccacggtgtgacgaaatgccacatcaccgtgcagcaaggatgacatcaaagatacctgtagctttgctcatccacgtatcaacatgaagccaggcatcatgcgggcaaacgcgcaatcatcttggagacgatgacagcacatggctgttctgtgccgacccgaaggagcaatgggtcaaggacgcgatgcacgcatctggaccgccaggctgctgccctaactcgaaatggcggcagccttcgagaagcagatcggcgaggtgaagcccaggaccacccctggccgccgggggcatggacgagtctgtgtgtcctggagcccgaagcctcgtggcgaaagcattacgcctggatgccgactccttcttcccaggaagcagcatgagggccctgcgggacctccccagagctgccgacgggcgtgactggttcctcagggaccaggctccccccgatgccgaggctcaggatggagggcctgtggtccggagcttttcccgagtgcctcccgtctcccacttgccggcccgtggccagagttctggtccccaaccaacctgnggcccagcctctggggctgaggcaaggactcctggggggcgcccggtccaccccagggagccctctcacccagagggctcccaaggggtcctcccccagcccgagggagaatagtgtcccttgtggcccccctttttggctcgggcacaccccaggaccaagaaccttggacggggagaatgagcccccgcgcgcccagggggttcacgcgggggccg

SEQ ID NO: 434096 - DNA, 491 bp, Homo Sapiens
  misc_feature (464)..(464): n is a, c, g, or t
ttttttttcacaagacttttaaattttattagtaaaatacaaaatggcacagacgttggtgatgagggttggaaaagtctttccaaagtcttcctactctttccaaagtcttcctagatcatccttgtccatgtcctgcttggagaaactaacaaagtccatggaagggggaccaactggccccagcggcttcctcacaaaggaggcagggccccatcacagggtgtcccacccctgaaaggctctcccagcctgggaagagccagaacaaagtgcattgggacccactcccaccctctctgaggctgccagagtgaccccacctgaggccagggccctgagctttcctgaatatggctgcggcacacccagcagggggagttgcagggggccagggtggggcaaggggcaggcacagggtttttgcttttttattggggaccagagtttgggttttcctttcnttccaaggcaccctttttttgaaggga

SEQ ID NO: 434097 - DNA, 1866 bp, Homo Sapiens
ggcctgtttccagatgcctgtgatttatttccaaaggagagctacagcacataggaaaatacacatggcttttcagtctacatttttacagagaaaagagattcggtcattggctttctcagtgccatcatcctgttccatgaggctccaggatggatggcctgtctccaagatcccgctttcaaagcagcagcttggccaaggcctctgggggtaggagtgaagggcagcgacccccatgtgcgggtggaggggaggacatgagcagcactcactgcaaagctaaggcaaagaatagagctggtgggagatgcctcccctcaccccaggggcatggcttgctgaggcccaggatacagaccaggaggggtggggatgggggtctggtccagcctggagcggcagcaggactctgagtgtacacatgggtgtggggtgaagaggggggcatgctgaagaggaagcctaccagggtatagaggggctttagcttgcatattccccctgccgcagaacagctcccagaccatggtccccaatcctacacttggcccctctcttaagttctacttcaggtgggggtcctgctcaggtttcttctgccaccttatcccctcccactgtcagtgcaaaacattcttagggccaagcccctgagtcccctgcacactgactggagctgcagggaagggaggacagcaaggtgctagctgggagcctcccccagcaccaggaattccttgcacatctctcggacaatcatgcggtccatctggcactggggtgaggtctcctcctcattcaggatgcgtcgcagtatggcctgcaggtcgggtagccggtggcggtgctgcaggtagggtgtggtgcggactatagcatgcatcagggagaggtactccatgcgcagcttgtctcctggtgacaggtctgcgatgtgccgcacagtgatgtcaatgagagccatcatgtctgtgtggtagaagatggcagctgtggccgggctgccaaacacgtcctgcaggaacttgaggacagagtgtggtggctgtggctcatgtttgaagatgcgcacagggtcatcccctctgttcaggagcaacaacagcttctcggagaagatcttgacattggcgtgtttgctcagggcagccatgatgacattctggtcagcagctggcaggtgcaggttgagagccagaagcaggttcacgcagaggtccggcagctgctctgtggtgtccaagggcagcccatcctcgacgatgttcagtaggaactgggcgaaaggcgtgcccaggtgctcatagtgtgcatagggcactgcctctcccatggagaagaccatggccaggatgagggcagagtaacagagtttctggtggtcctgcgtgtctgtctgcatgtccctcgccagctctacaggcagcacggatgacacaagcgtggagatgatggctgcatccaggctgcacatggcgccaaagcacttgaggagcagcagccgcagtgatgctcggtgttccatttggtaataggccaccaaggccaggacagactcgaactcgtttctcttgcacattttcttgcaaacttcagggtctgcatcagtcagaatatgcagcagctcctctaggtagcagcggatgacaccctcatcctcatatagtgcccaactgcgctgctgggcgctcgtccttccggcgagccaggtctgcaaagatcacctccagcctctgctggtcgtggcagacctgccctgagggcagggccatgctgaggtccttgccctctacgagtgagaggaggacctgctccatgactggtgagctggccggcaccctcgtgccgcttcgcccacccagc

SEQ ID NO: 434098 - DNA, 848 bp, Homo Sapiens
tctagccaccaagcatactctcctgggtctagccaggcctcggtgccggccagctcaccaatcatggagcaggtcctcctctcactcgtagagggcaaggacctcagcatggctctgccctcagggcaggtctgccacgaccagcagaggctggaggtgatctttgcagacctggctcgccggaaggacgacgcccagcagcgcagttgggcactatatgaggatgagggtgtcatccgctgctacctagaggagctgctgcatattctgactgatgcagaccctgaagtttgcaagaaaatgtgcaagagaaacgagttcgagtctgtcctggccttggtggcctattaccaaatggaacaccgagcatcactgcggctgctgctcctcaagtgctttggcgccatgtgcagcctggatgcagccatcatctccacgcttgtgtcatccgtgctgcctgtagagctggcgagggacatgcagacagacacgcaggagcacctgggcacgcctttcgcccagttcctactgaacatcgtcgaggatgggctgccttggacaccacagagcagctgccggacctctgcgtgaacctgcttctggctctcaacctgcacctgccaggtggggtggggcctggctgggcggtggctgagcacatggtggctctcaggctcagcaccctgtctatacccatgtccttccttagctgctgaccagaatgtcatcatggctgccctgagcaaacacgccaatgtcaagatcttctccgagaagctgttgttgctcctgaacagaggggatgaccctgtgcgcatcttcaaacatgagccacagcacacgcgact

SEQ ID NO: 434099 - DNA, 1459 bp, Homo Sapiens
cgacgctaacgggctggcactcgcggtcccacgtggctcaggacaccctttcgggggcgtgtctcccagttctagaggttcccagagaagaggaggtgctcactaaccaggcagctcgcccagactccgggcagtgagagggagggagcgccggccgcgggagcgggatggaaaccagcagcccgcggcccccgcggcccagctccaacccggggctgagcctggacgcccggctgggcgtggacactcgcctctgggccaaggtgctgttcaccgcgctctacgcactcatctgggcgctgggcgcggcgggcaatgcgctgtccgtgcacgtggtgctgaaggcgcgggccgggcgcgcggggcgcctgcgccaccacgtgctcagcctggcgctcgcgggcctgctgctgctgctggtcggcgtgccggtggagctctacagcttcgtgtggttccactacccctgggtcttcggcgacctgggctgccgcggctactacttcgtgcacgagctgtgcgcctacgccacggtgctgagcgtggcaggcctgagcgccgagcgctgcctagccgtgtgccagcccctgcgtgcccgcagcctgctgacgccacgccggacccggtggctggtggcgctctcgtgggccgcctcgctcggcctcgccctgcccatggccgtcatcatggggcagaagcacgaactcgagacggcggacggggagccggagcccgcctcgcgagtgtgcacggtgctggtgagccgcaccgcgctccaagtctttatccaggtgaatgtgctggtgtccttcgtgctccccttggcactaactgctttcctgaatggggtcacagtgagccacctgctggccctctgctcccaagtgccgtccacttctaccccgggcagctccacccccagccgcctggagctgctgagtgaggagggtctcctcagcttcatcgtatgggaagaagaccttttatccagggaggccaggtcagcctggtgagacataaagacgtgcgccggatccgcagcctccagcgcagcgtccaggttctcagagccatcgtggtcatgtatgtcatctgctggctgccgtaccatgcccgcaggctcatgtactgctacgtacctgatgacgcgtggactgacccactgtacaatttctaccactacttctacatggtgaccaacacacttttctacgtcagctcagctgtgactcctcttctctacaacgccgtgtcctcctccttcagaaaactcttcctggaagccgtcagctccctgtgtggagagcaccaccccatgaagcggttacccccgaagccccagagtcccaccctaatggatacagcttcaggctttggggatcccccagaaacccggacctgaatgtaatgcaagaatgaacagaacaagcatcattcaagcttcgcagccagggcgact

SEQ ID NO: 434100 - DNA, 900 bp, Homo Sapiens
  misc_feature (812)..(848): n is a, c, g, or t
cttcgtcactcacagctcagcgcttggggtggagctgcccgggttagaagtggacggcacttgggagcagagggccagcaggtggctcactgtgaccccattcaggaaagcagttagtgccaaggggagcacgaaaggacaccaggcacattcacctggataaagacttggagcgcggtgcggctcaccagcacccgtgcacactcgcgaggcgggctccggctccccgtccgccgtctcgagttcgtgcttctgcccccatgatgacggccatgggcagggcgaggccgagcgaggcggcccacgaagagcgccaccagcccaccgggtccggcgtggcgtcagcaggctgcgggcacacaggggctggcacacggctaggcagcccaggtcgccgaagacccaggggtagtggaaccacacgaagctgtagagctccaccggcacgccgaccagcagcagcagcaggcccgcgagcgccaggctgagcacgtggtggcgcaggcgccccgctcgcccggcccgcgccttcagcaccacgtgcacggacagcgcattgcccgccgcgcccagcgcccagatgagtgcgtagagcgcggtgaacagcaccttggcccagaggcgagtgtccacgcccagccgggcgtccaggctcagccccgggtttgagctgggccgcggtggccgcgggctgctggtttccatcccgctcccgcggccggcgctccctccctctcactgcccggagtctgggcgagctgcctggtaagtccgctctcgacgaattcgagctcggccgatttggcctgatnnnnnnnnnnnnnnnnnnnnnnnnnnnnnnnnnnnnncggccgccaccgcggtggaaatccggttcccctatagtgatcgtatcactcc

SEQ ID NO: 434101 - DNA, 2014 bp, Homo Sapiens
  misc_feature (35)..(35): n is a, c, g, or t
acgtacacgtactctatcgaacaaacaaggcttgntgtggggaaaaagtgtttgcataaagaagaagagattggaatggctggaatgagccctttgggagcctggctgggagtgaggtcaggtcacgtgatcccagtaggtaaggaggtgtctttgcagaagttcacagcgtcttggagcacctcactttgagttcagagacattagaaacaattactcagcaaacaagaagttagactatagcagtggctgagagattgcctcagtttctctcaatttaggaagcagtctgatgacccatggcaggccgatcaaggcagttgccccctgtgttaacgcgacccataggtatcatcttcaactctttgtagctggtgttggaaatcaggtataatttatcttgtttaattacctgctgccctgctcctaattccctcccctgtgatgagcttatgaagtcttcacctgcctcagctggaaggaaaatgctggctggatagggaggccctgcacgtgctgattttcaggcatcttggatgcaaggccaccatccccttccaaagatgtggccagtgaggtgccagcaggttccagcaccagcgtcagctcactcatcaggactaatggttgtcctggactggggagctgggaaccaccctgatttttttctgaaataaaggctaagcacgttgatgtcttttacactagagattctaaaatgttctctccccagtcagggctctttctgggctgctctgcaggcgagcattcagcactcagggatcccactgcctctggactgccaggcactgcgtctggggtcaggccaggaaggggcagcgcgtggggtctgacattgaggccagcacccaaggggaaagcaagccttgcattttatccatttagactctaccaaatgcgtgattaaaaacaaaaactcttacaacccttgaaatagctgcatgtacgaaacctcactcattctcaattaccgccaggattggccctgcacacctggcagcccccaggcccgttacccccgcaggtagggggggcgcacgggcccccgggcgttgatgtgcggcagcgcgcccgccgccagcttctcactgagtttctggttcgccagcaccaggtggcggcccttctaacgcgcctgccgcaaggacctcttgaccttcttcactcgctcccggagctgccggttgcgcttctcccagggtggccactttctgctgcagtttcttgacgtggtcctcctcctcaaacaaggccttctgcaccgaggagcacatgagcctactgtcttcctggatttcccagtcactggagaaagtcgccagctgctgcccttgcgaacagtttgaaaactggaaaaggctagaaaacatccttctgttcttgagtgtctgggaagatggcatcttggaaattgactccgtgaggcaagaggttataattttcatccatcctgaggaagaagaaataggagtagtcctggaccacggtgtgggagtggcacgagaagtagcccaggccggtgaggttgagcctggagccggcgggcacctccagcatgctgccccacgcctggtcgcacagcatctcgacctcggccgagtagaagaggcccccctggccggcgtggtactgccagggcaggtggttgtagaggccgggcgcctcggggtgcagcgccagcaccctggcgtacacgatggtctcggccagctcggcgcggcagccctcgctcaggggcctccactcggagggcagctggcaggcgcgcgcgggcgctgggggacccgccaggcagagcgcggcgagcagcagctggcgcagcatgccgggccctcccgtgggcgcacggggcggcggcggggagcccggggagcccgccggcccgggaagggcagccctgggcgctcggctgctcgggccgctcccgggagctgagcgcaccgctgtctccgccacggatcccgggaattccggaccggtaccagcctgcttt

SEQ ID NO: 434102 - DNA, 1235 bp, Homo Sapiens
  misc_feature (1013)..(1013): n is a, c, g, or t
  misc_feature (1019)..(1019): n is a, c, g, or t
  misc_feature (1043)..(1043): n is a, c, g, or t
  misc_feature (1046)..(1046): n is a, c, g, or t
  misc_feature (1057)..(1057): n is a, c, g, or t
  misc_feature (1061)..(1061): n is a, c, g, or t
  misc_feature (1072)..(1072): n is a, c, g, or t
  misc_feature (1074)..(1074): n is a, c, g, or t
  misc_feature (1076)..(1076): n is a, c, g, or t
  misc_feature (1078)..(1078): n is a, c, g, or t
  misc_feature (1095)..(1095): n is a, c, g, or t
  misc_feature (1100)..(1100): n is a, c, g, or t
  misc_feature (1102)..(1102): n is a, c, g, or t
  misc_feature (1104)..(1105): n is a, c, g, or t
  misc_feature (1108)..(1109): n is a, c, g, or t
  misc_feature (1113)..(1114): n is a, c, g, or t
  misc_feature (1116)..(1116): n is a, c, g, or t
  misc_feature (1120)..(1120): n is a, c, g, or t
  misc_feature (1126)..(1127): n is a, c, g, or t
  misc_feature (1131)..(1132): n is a, c, g, or t
  misc_feature (1140)..(1140): n is a, c, g, or t
  misc_feature (1143)..(1143): n is a, c, g, or t
  misc_feature (1145)..(1145): n is a, c, g, or t
  misc_feature (1148)..(1148): n is a, c, g, or t
  misc_feature (1150)..(1151): n is a, c, g, or t
  misc_feature (1154)..(1156): n is a, c, g, or t
  misc_feature (1168)..(1168): n is a, c, g, or t
  misc_feature (1172)..(1173): n is a, c, g, or t
  misc_feature (1178)..(1179): n is a, c, g, or t
  misc_feature (1182)..(1182): n is a, c, g, or t
  misc_feature (1193)..(1193): n is a, c, g, or t
  misc_feature (1195)..(1195): n is a, c, g, or t
  misc_feature (1198)..(1198): n is a, c, g, or t
  misc_feature (1204)..(1204): n is a, c, g, or t
  misc_feature (1206)..(1206): n is a, c, g, or t
  misc_feature (1220)..(1220): n is a, c, g, or t
  misc_feature (1229)..(1230): n is a, c, g, or t
  misc_feature (1234)..(1234): n is a, c, g, or t
gtggttgaaatcgccgctcgtatttattggaaaagcagaacagtatgcacctgtaggggtgtagcttccatggttctccaagcacgggctgtacattacccttaggctgaccattcccttgcgggggcgcaaaactgctttgaggaaatgtccccaggaggaataaactagaagacgcacctgctatttcaccatactatggagaatacagctaatgaagtggtggcagaagcttggccgtgtgagtgccccagggtaaaagtctctcttctgtccagtccagagcagagacttctcccccgtggacagcagcctgccaccaagactcaagcaacgtaagagtcatctccccagactggctgtcagagcaagaagcacccagccttcctaaaggcagaagagtggaaatctgacagtgcctgccatttccggtacagaggacagcatcaccaggccctgcagtgtctgggggggtctctggggggcagatcctgatgagaggccaggagcctttactggtggaagagcagggaagggcccttgttgggttgaaaggccatgatcagaagataacccagaaaaggccacccagttgacttcttaatcacacagctgggacccactcaaatgtgcctgagcaataagtctagtgaatactctcatttttacttatagtagtgtcttaaaagttttatttccagaaaggtgaagtgctttggtggtgtaaggaactgacgtaaggacaagtgcactgacgtacacgtattcctatcggaacaaacaaggcttgttgtgggggaaaagtgtttgcataaagaagaagagattggaatggctggaatgagccctttgggagcctggctgggagtgaggtcaggtcacgtgatcccagtaggtaaggaggtgtctttgcagaagttcacagcgtcttggagcacctcactttgagttcagagacattagaaacaattactcagcaaacaagaagttagactatagcagtgggctgaganattgcncagtttctctcaatttaggaagcngtntgatgacccanggcnggccgatcaangnantngccccctgtgttaagcnaaccnangnnatnncttnnantctnttttgnntggnntggaaatnagnanaantnnctnnntttattcctgcngccnnccccnnatncccccccgtgntnggnttatangntttcctcctcgcgngggggaatnngggng

SEQ ID NO: 434103 - DNA, 648 bp, Homo Sapiens
gatatgaaggagaatggaaagcagggaggaagcacggtcacgggaagttgttatttaaagatggcagttattacgaaggggcgtttgtggacggagagatcacgggagaaggccgccggcactgggcctggtcaggagacaccttctctggacagtttgttctgggagagcctcaaggctacggcgtcatggagtacaaagccggcggatgttatgaaggggaggtctcccacggcatgcgggaaggacatgggtttctggtggaccgggatggacaagtgtaccagggctccttccatgacaacaagaggcacggccctgggcagatgctctttcagaacggtgacaagtacgacggcgactgggtccgggaccggcgtcagggacacggggtgctgcgctgcgccgacggctccacctacaagggacagtggcacagcgacgtcttcagtggactgggcagcatggcccactgctcaggggtcacctattatgggttgtggatcaatggccacccagcagaacaagctacgaggatcgtgatcttgggtccggaggtgatggaagtggcccaagggtctcccttctcggtgaacgttcagctgctgcaggaccacggggaaattgccaagaatggagtttcactct

SEQ ID NO: 434104 - DNA, 2081 bp, Homo Sapiens
ggcggtaacatatattctttatttgtggcgtttaaaggcggggttgggcgggacagcgcccttgcgtgtattaggcacaggttcggaacgcagcatctttccaggggcttccctactagctcagccccataaagtcactggtttcctccatctggaccagcagccgcaccagccaaggcgcccactgggtgtcggaggtgggcgatgtcaatccccgtggccttcgtcgggagggtggagctggccaaaaagagagcggtacagttctgtcctggcatcatcattcattgtagtatggtcaataggtgccatgaaactcagtagcttgctaaggacatgaaaccgaagtttcctgcctttgctggctttcctatctacttttttgtggattttgcttcgtaacttctggattgcaagccactgccttcccatggccacctgatcgttgggatccaaggagctggtcttccgttctatgagttctcgaaggagctggtggtaaaagtcatcatcatcaaagatttcttcatccaagtccttcagatgagcattagcaggggcttgaggaaggatctccggttcccctggcaaactctctgggacaggctgagctgctggctcaggtttgccaagaactcgatagacggagcgcttggtctgtgtccttcgaagtaatctctctttgtccatcagaatatggtcgatctgagtcaagattgagcgttcaaaggcaccaaacccttccccagttttccagaagccagtttggtcttatcgtgccatttctgaagtgtgcggttcctgtagactgtaaagtcggcaaagcgctttgccatgaagctgggatagtcctccatctccagcttcctctttgcagggacccttcttcgttgctgcttcttctcttctaccagctcatcatcttcactagaaatctcctcacttcccgcattgggctttgtcccatctactagatatctagtgtctgggtactggaaaagcaactcttcctgaagacctaccaatgacctcaacaatgctttaagtgccttgtgactatttttcagggcactggaaaattctgggccacctttgtccttgaacaatgggaaaacatctggttgaggaagctggttggtggtcaacagagctttttgtagtttgatccttccttccaagagctggtcccacagtgctatctggttcttcacggctcttcctttctccacttcctcagaaactttgacactagagaaggtcatcaccacaccatcatcctcactgtttctatctccagccctgtcttcctcactctcgccttgggagtcttccgcgtcatccccttcttccatgccactctcttcgtcttcctcctcctcactgctcccaaggtcatccattcccttggtaaatttctcaaagtcactgatactctggacactgaagcccggtgtttttgcagagtggcttctgctcttcttgctctccctgtgatcaccacactcctgttcctcagcagcacccaggtcgtcctcatcatattcctccagacccagtccctctgaatcttcatctccagacccttcctcatcagatatttcctcatcagacgatcctggcagagtctgctcccaatggtcttcattccatgcttttctagaggtggttttgccgcaataccttttgtccgtgtccaagagggaggctgatgccagttttctaatgctacccactactaggaaatcaccttccccatcttccccttcatcaaacctgtcaatcaccctggcagcagtggcttcctcggggtccgcttcagggtccgcctcgcttggtcgcgggttcaacaactgttccagttgcagcgccaggggctgcggccccgccatcgtcaccagctcccggtccactccgcttcgcgcacgtaaatgtgcggcccaacccccggccccgaagctccttccctgccggatcctctcgccttgatccgattccccgactccgccagagaccgcgcggaggccaccccacagctctggaccggccacttccggcctcgtgccgaattcgccacccaggcc

SEQ ID NO: 434105 - DNA, 1754 bp, Homo Sapiens
  misc_feature (275)..(347): n is a, c, g, or t
  misc_feature (395)..(433): n is a, c, g, or t
  misc_feature (442)..(460): n is a, c, g, or t
agggttccttaaagggggggcgccgaaattgcgggttccccttagaaaggaccccgtttttggtattttggccttttggcggaagcacggttcccttcgggaaaaaggagttgggggctttggtccccggcaaaccaaacccccccttggtaagcgggggttttttggtttgcaaccagcagattgttgccggaaaaaaaggatttcaaggaagttccttggttccccaaaaaaaagccccctcattaggcgggttaaattcccgggttcggcannnnnnnnnnnnnnnnnnnnnnnnnnnnnnnnnnnnnnnnnnnnnnnnnnnnnnnnnnnnnnnnnnnnnnnnnacccactttgtacaagaaagctgggtcaggaaccagctatgaccatgnnnnnnnnnnnnnnnnnnnnnnnnnnnnnnnnnnnnnnngcctcgagnnnnnnnnnnnnnnnnnnncaaatgagcaagcagtcaagattttgttttattttattatggctagaaagacactgttatagccaaaatcggcaatgacactaaagaaatcctctgtgcttttcaatatgcaaatatatttcttccaagagttgccctggtgtgacttcaagagttcatgttaacttcttttctggaaacttccttttcttagttgttgtattcttgaagagcctgggccatgaagagcttgcctaagttttgggcagtgaactccttgatgttctggcagtaagtgtttatctggcctgcaatgagcagcgagtccatcctggcaggcggctgtggtggtttgaagagtttggacaggtcctcctcagggagcgggggttctcctcggctctggcgctgcatattctcctgctggcgacgctgctgatactgatgtttctgctgctgttgtttactagtattcctcatgtatgtgttgtatttaactatatcttggctcatttcatccactctgtccatcagcaactgtagattcttccccaaatgattgctgctggcaaggctgagcaattcatgtttatctgcaacagctgacttcttttcaagttcccacattaggacattgatcagatgtgaatttttaattacaatcggcacttcttcaaacatgtactcaaaggtgatatttgcttttttcaatgcttcaggggaaaaatccttttctttacaaacttccatcagtttaggagtcagtctgtatgcctttagtgagagagatccttgggcagtttttatgggatcataaatgagaacgacagattcttcaatggcatgctggtaactaaactgagagtccaggagtgcccgggtaacgaatgagccatagtatgtggactgataccagcccacgtgaagatgatcaatgtttacatggcgaaggctccgcatcatttccatctgatattggacttcatcaaagtcagcatcatcctctgtgtgctgagggaaaggaaagcagttggtaatttcaagccgatcttctacaaccagacccaaaagcactccttgaacaacttcagttccttgtccttcttcttgataatgtttgattatctttaataccacaaggccatctatctgcacttgcttcacggctgaatctcccgagccgcctttgcctttgcctttccctgctgcgccggcggtggagctggaagaggtggcagtagagccggtaccttccttgcgggacgccatctttccaagccctcgtgccgaattcgccacccaggcctcgctacct

SEQ ID NO: 434106 - DNA, 472 bp, Homo Sapiens
  misc_feature (415)..(415): n is a, c, g, or t
  misc_feature (454)..(454): n is a, c, g, or t
agcaagcagtcaagattttgttttattttattatggctagaaagacactgttatagccaaaatcggcaatgacactaaagaaatcctctgtgcttttcaatatgcaaatatatttcttccaagagttgccctggtgtgacttcaagagttcatgttaacttcttttctggaaacttccttttcttagttgttgtattcttgaagagcctgggccatgaagagcttgcctaagttttggggcagtgaactccttgatgttctgggcagtaagtgtttatctgggcctggcaatgaggcagcgagtccatcctgggcagggcggctgtgggtgggtttgaaggagtttgggacagggtcctcctcaggggagcggggggttctcctcgggctctgggcgctggcatatttctcctgnctgggcaacgctgcctgaaaccggatgtttctgctgccngtggtttactagtattcc

SEQ ID NO: 434107 - DNA, 888 bp, Homo Sapiens
  misc_feature (794)..(847): n is a, c, g, or t
gagggagttggagtgtgagctctcgactgatgacgtatagtgttcttggccaggtccggtcctgcgcgtcgcaagttcagttcgtaatatatgtatgttccgagcatgtcacgtgaggccgtgcgatgaccttccgttgaccttctatgtacctgaagattagtataaggatacgcgacatgtacatgtataatttcatgctttgtacatttttactcgtcgaatatgtttcctattaatttcgaaattagttcatgcacaaatttgctatgaagaaaatagaaatgtaattcattgaatgcctaacctcttgattttctactgccagttggctggaagagctgccaaaatagtacctccactgtcaaccactgctgatgtcattgttattccctgaggaagcttcaaacgctattaatcaatgaaattaaaggttcactgatggttgccagtgttataggtttgcattatcatgttttaaaagtcaatagagatggagtggagtagatatccagaaatccagtcttgctaaagatgattaaccagaaagcagtttgtatgttaagtagtctaagcatctttcactattttcacaacttgggaagagttaaaatgtgaaccagtagttctttggaactgctctccgcgacgcctgggaagaccgcggcgtccttttccctatcagcagggccgcggactagccgccgccgttggccgagcgtccggagggagccggggcctccccagcagcccgagccgctccacagggagagaaggagacaaaacagaggctnnnnnnnnnnnnnnnnnnnnnnnnnnnnnnnnnnnnnnnnnnnnnnnnnnnnnntaggcgacggcggcgacacagagcttggcgctgggagcaat

SEQ ID NO: 434108 - DNA, 213 bp, Homo Sapiens
caactcagctgaatatctacagactccagactgctgagtctcagaggccatcctagatctagttccgggccaagggtcctggctgtctgctgctttctgttcttgtgtattatgtctttctgtctcccttccgccccgcatgtatcctgacgaccagaaacgccctctacttgagataactggagctggactctgcctcctgcaatgcaaagc

SEQ ID NO: 434109 - DNA, 1521 bp, Homo Sapiens
  misc_feature (241)..(255): n is a, c, g, or t
  misc_feature (571)..(648): n is a, c, g, or t
ctttcaggatcttttattaacgtatagaaaatgtgtttaaaaaaggaactatacagaggctaaaagcaaccaggactaaaaatactagttaacaatggttaacaagcagagattccagtctttgagctacagtgccatgaaaggatcagagaagttggtttttcctctcccttcctctgtacatttttatttttattttagctaattaaagtgtgcatcgtctgaggagtatgtactccannnnnnnnnnnnnnncttccttccagtctttcttttaagtaagcgctttttcaagctcattgtagctacaaagtcaataaattggtctttgttatttttacctgaaaaggctgttaaaggttaaaatgacaaactcaaattcaaagggattggaggatttggtgtttatgatttctcagaacaacaatctagagaccaccagggtgggtttcagctgctcggagccccagttaatgaccccctcagtgtcacagtgatttgcttagggtacttgggcatccccatgggcctggggagtattcgaggttggaatcattagatgtgtgtgttnnnnnnnnnnnnnnnnnnnnnnnnnnnnnnnnnnnnnnnnnnnnnnnnnnnnnnnnnnnnnnnnnnnnnnnnnnnnnnaatgattggaaggaggagcctgtgtgttaaccaaaatagactcacatagattctaaaccttgagtctgtgggaccatggtgtgagtctgggcctccgcagttggtaaaggagcacttagttggccgacatttttgcaggaattgaagtgtctattgcatctaatgcacaggtgtcactgctgcccaagcagcccccacactggaatggaaccagtgttctggggttctttcttggggagatctattcctttatatataaacatcattcaattaaagggaaggggtttatgtctggagttttggcctggcagctaaaaataccaggttgccaagtactgatttccttctaaattccccaaagtagcagagaaagctgatattgtagccaactgtcttctgatgccttcccacccactagggatgtggggcaggtaaggagtggggaaaagaaaccagggggataagtaaactgaatgtatctcctgccttctagcctcattccccaaatatttccactgatgtactcccgcaggggactgtgaaggtgtttgtacccctgggagtctggaaggaggtagcctaaatcagtctacaacctgctggagttagcctcaaaatttataggatatctgcatttgtgctatccatactggtttgaatacactaataatataatcctttcttcccaaattctggagtaaaattgatgctctgagaacatgtgccatgtttattctgtggcttctccttcctcaatcctggctacactgcctgctccagcttggaaaaaatgactggatatcccactcttctaatgttgggatgttcccaaaagagtggggtggggggtattgggtttatgttctggttctt

SEQ ID NO: 434110 - DNA, 445 bp, Homo Sapiens
  misc_feature (233)..(233): n is a, c, g, or t
  misc_feature (237)..(237): n is a, c, g, or t
  misc_feature (239)..(248): n is a, c, g, or t
  misc_feature (400)..(400): n is a, c, g, or t
  misc_feature (432)..(432): n is a, c, g, or t
tcttttttttaacgtatagaaaatgtgtttaaaaaaggaactatacagaggctaaaagcaaccaggactaaaaatactagttaacaatggttaacaagcagagattccagtctttgagctacagtgccatgaaaggatcagagaagttggtttttcctctcccttcctctgtacatttttatttttattttagctaattaaagtgtgcatcgtctgaggagtatgtactccantttncnnnnnnnnnncttccttccagtctttcttttaaggtaaggcgctttttcaaggctcattgtaggctacaaaggtcaataaattgggtctttggttatttttacccgaaaagggctgttaaagggttaaaatggacaaactcaaatttcaaagggggttgggnggggtttgggggttttatggatttctcagggncaacatttaggag

SEQ ID NO: 434111 - DNA, 2094 bp, Homo Sapiens
  misc_feature (402)..(497): n is a, c, g, or t
gtggacgataggtgtatgtttttttctggtatattaatgttgtgctttgctgcttatttgtgtattagtattgatgcgcggaggagttggtaatggagtttagtttttgttttgtatgttctaatggagtatcagctatattttatttttactttcaagccattttgatgttagtaagtttatctgttgtttctctttatgggttgattgttgttggcttagtttcttttacctgtttgtcgagcaacacattcagtcagcgtcagtgtgtgctctagcgttcccgcgcttgctagtatcaatgtatgtctcgtctgatcgccctggtcatgatagggttggctcgtgtattccgattgctctgggtgccgttctgttgctggtggcctctccttcgtttannnnnnnnnnnnnnnnnnnnnnnnnnnnnnnnnnnnnnnnnnnnnnnnnnnnnnnnnnnnnnnnnnnnnnnnnnnnnnnnnnnnnnnnnnnnnnnngaagaggcagaccagctttatttttgaacccaatcactgggtgcccaactatgactctgctatcttcgaaatgatgagatggggcacactcccctaacagtatttagctagaccaacaaggatcctggctcctcccagggctgtagcagagggacgaggcccttcgaagcttctagtgggcacagtgtatttgaaatccatcctttttaaagcccagtttcacttggcctacttgatttattgctggtagcaagatcattagaattttagttaattaatatgtgccaactctgcaccggtgaggactctggagtctcttgttactgcaagcataaaaagtgcagcccacagggcttcctggccatggaaaggaccaaatgcacctgcaggtggaagcaagcatgacctcgggccactgtgcagcccctcccatgtcccccctggaaccgacacgcctcacatcaagagtggccacaccagcttgaaggctggccaggacagctttatgacacagaactatagagagaacacacagcagcgcactcagaggcacaaagcgacctgcctacgtggaaactaaacaaccttctggggcaggagcggtggcagtgcgggcttcagaagcagtaggacgtgtgggtgacccagtgggcagactcctccttggagcgcttggcggagctgtgagtggtaaagagggacttgtaggcctccgattcttcactgtcagcgatggacctctttgtggctccacacggaggcttcccagcttttccagaagagctctcattcattgctgtgcttttgggagccaagttggttttcttctctctagaatcaaggctggcttcttcaggcttccctgtcttaacttttgatggccctggggcttcttcactgacatctggttttgaaacagactctgctgccttgggtttctttgttttcttttccagcttcgctctcagccttctctcctccatccttgtcttcagcacgtccacatcctccttggtgccattgagcacgatgacatcatcctcctggaaggcagccccacacgtgtggcaaacttccgcttttatctctttcaaggctcgctcagaaaacacacagccgcagcaccgaaggaagcagaacctgtgtcggccgttcatctccaggcccacaacggggcagatgaaacgcgcccgctggaggtcatcgtgcttgtcacctttagtgtttcctttatccccttcccaggcaggattatcagaaagcttcagctctgtcacattcttaatgcttttaatgtgagatgctgccttcccaagagccttttctgcagatttgtccaagagaaattcaatgacggcatctttgttataaagtctgccaagttcacaggcaactattggtcgtcttaatatttcctgacttagagtacaatagttccattgggccactaattcagcatctttgtcgaccttctcaaccttcttcggccccttcaccagttcatgcctcttggggattgttcccccgtcgcaacccatcgcaggacgggagtcagagccagcctcgtgccgaattcgccacccaggcctcgctacct

SEQ ID NO: 434112 - DNA, 776 bp, Homo Sapiens
tctttctgttgaaatcaagggcgtgggtttcttcaggctttccccgtccttaaccttttgatggccctggggctttttccctggacatctgggtttgaaaccagactctgctgacttgggtttcttggtttctttcccagtttcgctttcagccttctttctcccatccttgtcttcagccgttccacatcctccttggtgccattgagcacgatgacatcatcctcctggaaggcagccccacacgtgtggcaaacttccgcttttatctctttcaaggctcgctcagaaaacacacagccgcagcaccgaaggaagcagaacctgtgtcggccgttcatctccaggcccacaacggggcagatgaaacgcgcccgctggaggtcatcgtgcttgtcacctttagtgtttcctttatccccttcccagaaggattatcagaaagcttcagctctgtcacattcttaatgcttttaatgtgagatgctgccttcccaagagccttttctgcagatttgtccaagagaaattcaatgacggcatctttgttataaagtctgccaagttcacaggcaactattggtcgtcttaatatttcctgacttagagtacaatagttccattgggccactaattcagcatctttgtcgaccttctcaaccttcttcggccccttcaccagttcatgcctcttggggattgttcccccgtcgcaacccatcgcaggacgggagtcagagccagcagcaaacccccaaagctgtcacttccggccc

SEQ ID NO: 434113 - DNA, 1196 bp, Homo Sapiens
  misc_feature (51)..(61): n is a, c, g, or t
cggacatggggtgccccccgatatagggggggaagtggggtgcgacattcnnnnnnnnnnncccccacacgctttgaaggtgtgggcccgggtccaagtttttgtggcgcccgcggtttttgtggggggggaccgcccagcgggggcccattccgaggccacaaaaggggcccttgccctacgtggaaaattaaaacaaacctttcttggggccagggaacgtggccagtgccgggtttcagaaaccagtaggacggtgtgggtgaccccagtgggcagactcctcttgggagcccttggcggagctgtgagtggtaaagagggactggtaggcctccgattcttcactgtcagcgatggacctctttgtggctccacacggaggccttcccagcttttccaagaagagctctcaattccattgcctgtggcttttggggagccaagttggttcttcttcttctctaaggaatcaaaggctggcttccttcaggcttccctgtcttaaacttttgatggccctggggcttcttttccagcttcgctctcagccttctctcctccatccttgtcttcagcacgtccacatcctccttggtgccattgagcacgatgacatcatcctcctggaaggcagccccacacgtgtggcaaacttccgcttttatctctttcaaggctcgctcagaaaacacacagccgcagcaccgaaggaagcagaacctgtgtcggccgttcatctccaggcccacaacggggcagatgaaacgcgcccgctggaggtcatcgtgcttgtcacctttagtgtttcctttatccccttcccaggcaggattatcagaaagcttcagctctgtcacattcttaatgcttttaatgtgagatgctgccttcccaagagccttttctgcagatttgtccaagagaaattcaatgacggcatctttgttataaagtctgccaagttcacaggcaactattggtcgtcttaatatttcctgacttagagtacaatagttccattgggccactaattcagcatctttgtcgaccttctcaaccttcttcggccccttcaccagttcatgcctcttggggattgttcccccgtcgcaacccatcgcaggacgggagtcagagccagcagcaaacccccaaagctgtcacttccgggatttccggcgaaatcccccgct

SEQ ID NO: 434114 - DNA, 231 bp, Homo Sapiens
aacgacagcctatgcctcacaaatttgcttgggataatccacgcttgatgaatggaaaactgcatttacacatcaaaattctcctcaaaatcacttaacaaactcatcttgattaagtgtaaaaaccatacctgccaagttcacaggcaactattggtcgtcttaatatttcctgacttagagtacaattgttccattgggccactaattcagcatctttgtcgacctaat

SEQ ID NO: 434115 - DNA, 463 bp, Homo Sapiens
  misc_feature (337)..(337): n is a, c, g, or t
gagaagaggcagaccagctttatttttgaacccaatcactgggtgcccaactatgactctgctatcttcgaaatgatgagatggggcacactcccctaacagtatttagctagaccaacaaggatcctggctcctcccagggctgtagcagagggacgaggcccttcgaagcttctagtgggcacagtgtatttgaaatccatcctttttaaagcccagtttcacttgggcctacttgatttattgctggtagcaaggatcattaggaattttagttaattaatatgtgccaactctggcaccggtgagggactctgggagtctcttgttactgcangcataaaaagtgcagcccacaggtttcctgggccatggggaaagggaccaaatggcacctggcagggtgggaaggcaaggcatggaccttcggggccattgttgcagcccctccccttgttccccc

SEQ ID NO: 434116 - DNA, 560 bp, Homo Sapiens
  misc_feature (97)..(150): n is a, c, g, or t
ccaggcggccgtcgccgttccagcagcggcagcggcagcggcagcggcggacatgttgtgaggcggcggcgcgggtgtctgaaggatggtttggccnnnnnnnnnnnnnnnnnnnnnnnnnnnnnnnnnnnnnnnnnnnnnnnnnnnnnntctttagagccgagcccgctgggtacccgcccggtaccgcggcgaggccagtgcccctggatcttgcctctgctccgacgccgttggggaccagttaggcgacagcgcccgcccctctgaggagacacgaaggtggttccccagccgctcaaatttccggaccaccgcgctttcccctcctcagcttgggctgtgctctctctagaatcctcgggcccccactttcttcccaaactcatcctaaatctctcacacacgcgagtgttcccagccctcaagccagctgctcctccgttcattttctgcaccctcttcgcaaagcaccccccgggatcactctccgagggcgactttttgagaaatctcggtggagtagtgaccagagctggggagtttttaaaagccggaca

SEQ ID NO: 434117 - DNA, 1237 bp, Homo Sapiens
  misc_feature (237)..(410): n is a, c, g, or t
ggtccgcccgcccacgcgagtgcgggggaggggtgtgggggccccgaaggtagaggaggcagcgcgcacgggctggacctcctcctaccctgggaagttggggcagtttccccctgcacctgcctcttccttaggcctggcagtggcccgcgatgagagagggtccttccccttcaggctaggtgtccctggtcaggcgaccccttggggcacccagcaatttagggcttcagcttnnnnnnnnnnnnnnnnnnnnnnnnnnnnnnnnnnnnnnnnnnnnnnnnnnnnnnnnnnnnnnnnnnnnnnnnnnnnnnnnnnnnnnnnnnnnnnnnnnnnnnnnnnnnnnnnnnnnnnnnnnnnnnnnnnnnnnnnnnnnnnnnnnnnnnnnnnnnnnnnnnnnnnnnnnnnnnagaaggtccctcctgtctcacttcacctcccccaggatggaccctccagtccatctgcgtctctccatttgtggctgccgtttctgtccagtgcccctgaggccctcggctgctggggtccgcaggaagccgcgccatgaatgaccggagcagtcggaggcggacaatgaaggacgatgagaccttcgagatctccattcccttcgatgaggcaccccacctagacccacagatcttttacagtctgagcccctctcggagaaacttcgaggagcctccggaggctgcgtcctccgccctggctctgatgaacagcgtcaagacccagctgcacatggctctggagaggaactcctggctgcagaagcgcatcgaggacctggaggaagagagggacttcctgcggtgccagctggacaaattcatctcttctgctcggatggaggcagaggaccactgccggatgaagcctgggcccaggcggatggagggggacagccgtggtggggctgggggcgaggcctcggaccctgagtcagcagcctcctccctcagcggagcgtccgaagaaggcagcgccagtgagaggaggcggcagaagcagaagggaggtgctagtcggaggcgctttgggaagcccaaggcccgggagaggcagcgagtgaaggacgccgacggggtcctctgccggtacaagaagatcctgggcaccttccagaagctcaagagcatgtcgcgggcctttgagcaccaccgcgtggacaggaacaccgtggcgcgaccacgcccatcgccgagctgctcattgggccccccgagaagcggcc

SEQ ID NO: 434118 - DNA, 988 bp, Homo Sapiens
  misc_feature (16)..(16): n is a, c, g, or t
  misc_feature (565)..(757): n is a, c, g, or t
ctctcactgcactgcnttcttcggaactccgctgaggaggaggctgctgactcagggtccgagcctcgcccccagccccaccacggctgtccccctccatccgcctgggcccaggcttcatccggcagtggtcctctgcctccatccgagcagaagagatgaatttgtccagctggcaccgcaggaagtccctctcttcctccaggtcctcgatgcgcttctgcagccaggagttcctctccagagccatgtgcagctgggtcttgacgctgttcatcagagccagggcggaggacgcagcctccggaggctcctcgaagtttctccgagaggggctcagactgtaaaagatctgtgggtctaggtggggtgcctcatcgaagggaatggagatctcgaaggtctcattgtccttcattgtccgcctccgactgctccggtcattcatggcgcggcttcctgcggaccccagcagccgagggcctcaggggcattggacagaaacggcagccacaaatggagagacgcagatggactggagggtccatcctgggggaggtgaagnnnnnnnnnnnnnnnnnnnnnnnnnnnnnnnnnnnnnnnnnnnnnnnnnnnnnnnnnnnnnnnnnnnnnnnnnnnnnnnnnnnnnnnnnnnnnnnnnnnnnnnnnnnnnnnnnnnnnnnnnnnnnnnnnnnnnnnnnnnnnnnnnnnnnnnnnnnnnnnnnnnnnnnnnnnnnnnnnnnnnnnnnnnnnnnnnaagctgaagccctaaattgctgggtgccccaaggggtcgcctgaccagggacacctagcctgaaggggaaggaccctctctcatcgcgggccactgccaggcctaaggaagaggcaggtgcagggggaaactgccccaacttcccagggtaggaggaggtccagcccgtgcgcgctgcctcctctacttcggggcccccacacccctcccccgcactcgcgtgggcgggcg

SEQ ID NO: 434119 - DNA, 1106 bp, Homo Sapiens
  misc_feature (135)..(153): n is a, c, g, or t
  misc_feature (454)..(646): n is a, c, g, or t
cgcggggggcctcggcccctcggaccccgggcacccgcgggcgggggatggtggccgcgtttgcacccccgccctagtgcatgttcccgctggaatcgttccacgaccgctccccctcccacccgcgggacaaannnnnnnnnnnnnnnnnnncgcacccccacgcgtgacctttccccgtactgcgcacgcgcccagcccccaccaccggggggacgggtccgccgcccacgcgagtgcgggggaggggtgtgggggccccgaaggtagaggaggcagcgcgcacgggctggacctcctcctaccctgggaagttggggcagtttccccctgcacctgcctctttcttaggcctggcagtggcccgcgatgagagagggtccttccccttcatgctaggtgtccctggtcaggcgaccccttgtggcacccagcaatttagggcttcagcttnnnnnnnnnnnnnnnnnnnnnnnnnnnnnnnnnnnnnnnnnnnnnnnnnnnnnnnnnnnnnnnnnnnnnnnnnnnnnnnnnnnnnnnnnnnnnnnnnnnnnnnnnnnnnnnnnnnnnnnnnnnnnnnnnnnnnnnnnnnnnnnnnnnnnnnnnnnnnnnnnnnnnnnnnnnnnnnnnnnnnnnnnnnnnnnnncttcacctcccccaggatggaccctccagtccatctgcgtctctccatttgtggctgccgtttctgtccagtgcccctgaggccctcggctgctggggtccgcaggaagccgcgccatgaatgaccggagcagtcggaggcggacaatgaaggacgatgagaccttcgagatctccattcccttcgatgaggcaccccacctagacccacagatcttttacagtctgagcccctctcggagaaacttcgaggagcctccggaggctgcgtcctccgccctggctctgatgaccagcgtcaagacccagctgcacatggctctggagagggaaactcctggctgcagaagcgcatcgaggacctggaggcacacagggacttcctgcggtgccagctggaccaattcatctcttctgctcggactggaggccaacgaccactgccggatgaagccgggccc

SEQ ID NO: 434120 - DNA, 1658 bp, Homo Sapiens
  misc_feature (153)..(153): n is a, c, g, or t
tttttttccaaattttcacgtcgttttttaatttaaattatctgaataattctctgtctcacgcggagttggggaggtctgtccgggaatcaggtgggcagctcctccgcggggccagggcggagacggggtctgtacagtcccccactcganggggggggcacccgcctgcctggttttccaggaggaaggggcccggcgaggacagggctgggcagcccaagcggaagggggtgccggcgttcgggaaggggccgcggccggtccggggccgtcgcgcttgggggcccggctaagggagcccccaacccagggagcgaggaggaggggcaggggcgcggcggggagaggggcaggtcatccaccggggtccacgggggaggaaggcccgggtggaggcgcggaggcgtggtgcgatcaccgcttgaagcggtaggtgatgggcagcagcagcttgctcttcttgagcgcctgcacctttttgagcgtctcgtcgtccagggccagaaagcagcggcgggagtactcgagcaggcgctccttggaggggtcgaactcgcccacctcggccagcttctcgggggccacaatgagcagctcggcgatgggcgtggtcagcgccacggtgttcctgtccacgcggtggtgctcgaaggcccgcgacatgctcttgagcttctggaaggtgcccaggatcttcttgtaccggcagaggaccccgtcggcgtccttcactcgctgcctctcccgggccttgggcttcccaaagcgcctccgactagcacctcccttctgcttctgccgcctcctctcactggcgctgccttcttcggacgctccgctgagggaggaggctgctgactcagggtccgaggcctcgcccccagccccaccacggctgtccccctccatccgcctgggcccaggcttcatccggcagtggtcctctgcctccatccgagcagaagagatgaatttgtccagctggcaccgcaggaagtccctctcttcctccaggtcctcgatgcgcttctgcagccaggagttcctctccagagccatgtgcagctgggtcttgacgctgttcatcagagccagggcggaggacgcagcctccggaggctcctcgaagtttctccgagaggggctcagactgtaaaagatctgtgggtctaggtggggtgcctcatcgaagggaatggagatctcgaaggtctcatcgtccttcattgtccgcctccgactgctccggtcattcatggcgcggcttcctgcggaccccagcagccgagggcctcaggggcaccgctcgcggaatccggctcggggaccgacggcggcggcgcccatgcccggcgccggggagcgtctgcaaagtgtcacggggagccgagggaagcgcccacccacccgcgaacaggcggggcggcaggggagcgtgtcgtggaactgagcgacggaacgggcagggacgcggggactcgcccagtcgggccaggctagcgcccctcgttgaagagtccccgggtccaggtgaggcccgccgatcccgggaatgccggaccgggaacgaaatggggagggtaagttggtggattgggggggaggtgggttgttatgcactttagctccccgcccacgctaggggcgagcgcgcg

SEQ ID NO: 434121 - DNA, 939 bp, Homo Sapiens
  misc_feature (157)..(157): n is a, c, g, or t
  misc_feature (159)..(159): n is a, c, g, or t
  misc_feature (211)..(211): n is a, c, g, or t
  misc_feature (249)..(249): n is a, c, g, or t
  misc_feature (272)..(328): n is a, c, g, or t
  misc_feature (447)..(464): n is a, c, g, or t
  misc_feature (469)..(469): n is a, c, g, or t
  misc_feature (471)..(471): n is a, c, g, or t
  misc_feature (479)..(479): n is a, c, g, or t
  misc_feature (578)..(578): n is a, c, g, or t
  misc_feature (850)..(850): n is a, c, g, or t
  misc_feature (860)..(860): n is a, c, g, or t
  misc_feature (865)..(865): n is a, c, g, or t
  misc_feature (913)..(913): n is a, c, g, or t
agaaggagtgaacaaagtaatgaacaaaacagaccccagatcagaggaagagatggctttcttgttaattctggagcagattcaagcagcaaatatttactgaacacttgctatgtgctggaaattgttctaggaactggagttacagcagttaaancnataacatttgttttttcataaatttatattctagagggagaagaagataatnagacaatcagttataccgtgtcctaactattaaggggnaaatttagcagagtcagggggtnnnnnnnnnnnnnnnnnnnnnnnnnnnnnnnnnnnnnnnnnnnnnnnnnnnnnnnnntgacacctgggccggggcttggataacgtgggtcgggggacccgacatatacttgggagagagtgttctcggccgagggaacagcacatgcgagggccctggggccgggtttgtcgctnnnnnnnnnnnnnnnnnnccgtngnccctccgngaggtccactctgtggcttcccccgccccggcatttggggctttggcgctctcttatgttccgacaggccaatcatctcccggtccaccgttgattaanattctttatttcacagtatttttgatcagaagtcttagaaatcatgattcatctggttacaaatcccatgagtttctctttgaatgaacctcttgcttccagtcccatacaacgcatctcccaccagccccagtgggttgtaactgtgattcaacactgagtgctcgcttggaaaggaggtggagctcaacttccaactcagagggcctctcccactgctctcagggaaatgcccatgattcacttatgctgtatcaacaacaagtgcagcngggcgctgcnttccnagctggccaagcgctcctagggggatctccaccctcagaggcttaggnaaggggagtgtgacgagtcagggccc

SEQ ID NO: 434122 - DNA, 2698 bp, Homo Sapiens
  misc_feature (1010)..(1010): n is a, c, g, or t
acatttgtattttcataaatttatattctagagggagaagaagattataagaaaataagttatacagtgtcctaactattaaggagaaaatatagcagagtaagggggtggagagtaatgagggtgacattttagacaggaggtcagggaagctctctcaggggaaggtgacacctgagcagggacttgaataaagtgagtcggggaaccagacatatacttgggagagagtgttctaggcagagggaacagcacatgcgaaggcccctgaggcagagtatgtagctggagaggggagggaagagcagtagaaaatcagagaggtcaactctgtggaatccccagcccaggaatttggggctttgaagctctcttatgttcagaaaggcaaatcatctccaggtccaaagttgattaacattctttatttcacagtatttttgatcagaagtcttagaaatcatgattcatctggttacaaatcccatgagtttctctttgaatgaacctcttgcttccagtcccatacaacgcatctcccaccagccccagtgggttgtaactgtgattcaacactgagtgctcgcttggaaaggaggtggagctcaacttccaactcagagggcctctcccactgctctcagggaaatgcccatgattcacttatgctgtatcaacaacaagtgcagctgggcgctgccttcccagctggccaagcgctcctaggggaatctccaccctcagaggcttaggaaagggaagtgtgacgagtcagggcccctgggctggtgtcttttccaatactgggctaatgctgggccattccattcagcagacacttcctgagggactgagctcttcactgggatgccagaatgcttctgcttggaacaaagagggattaacccttgaaggcagacaccacttccacctcggggctcacggggacgtctcagttttacccatatgcagaaggggacaatcttttgcttgcctgagacattttaccncttgcttttacaaggccccaatttatcttttgacttttctctcacccctgacaaatggggcctttgataattaaacatgcttaccacttaaggtggggcatggagagatcaaggccacctgctgggacaagcagcaactgaccgccttgcagccacagaggcctatgggggccacatgtaggagagtcctggctggaggggtcatgagtcaccccatgggagggcaggacccaggcctggcctgaccccagaattatggccaaactgacccagatgaaacaggagaatcctaaatctcttgggtcgagatgtcagctgcggtttctagaacttcccctggtatgctcaggagcccagagaaacagcaaagaggctttgcacagtctcatgtccttggaaagctatctgtccctttccctgtctccaaggattaaaaaagaatctctgactgctggttatcggcaggggtaaaacaactggtgcagaatgggcaccaactaagcaaaatcacacactggttgtgaacagctggaacaactgggttggaacattgcagcccaggaaagtgatctttaaagacaaggtggtctcttcagtgtaatcgaaagtaatcactgggggataatgttagctgtgcccatgggaatgaatggcctcctatcccaactgtacgagacaaacaccatgccagatttgctcactgttgatgacactgggctgtcttgtatcctaatgataaaacagctaactgataaaggagcttatttctcaggcagcagatctgagagatacctgggctttgaactgcatgaaagagagagaaagtatcctagataatggctcatggacttgagtgggccactggaggtcacccttgcttgctgcatattggattacagaaaagaattatttgattgttttgtagtgtcctagcagcaggtgatggtgacagccctttgagagggttcagcctcaagggagtcctccagggggactcagagggtccgaaatgtgtcattggccaaggtgggtggcaatgctgtgacattgaccgagtacatatcagcccagtccgggaaggtgcccagctggaagatggtctgtgcccaggtattcatagccaaactgagcagcaggacacccatcaggttcatcaggaggcctgtccgcaccatgtctttgaccagcaagtgtccagaggcgaaggcgatggagttggggggcgttgagaccgggagcatgaaggcaaaggagcagccgactgtgcccggaatcatcagatacagggggtgcactctcaggcggatggccagctctgccaggaccggcaggaagatgatgatggtcgccgtgttgctggcaaactcagtgaagaaggcgatgaccacagtgatgagcagcacagccagggcggggggcacattctccagggggtgcagctgcccaccaatccatacagacagccccgattcctccataagatgtgtgattccgcaaagctccccgcaaatcagcatcttcctctggacccaccagtctgtcaccttgtctgtaaattaagagcaatgcccagtgctgactccagtcctccagggcagagacgggtagagaagttcaccgagactccactcgcctgtcagtgctgcagaattatttgggtgctctctctgctgacttctccagaagct

SEQ ID NO: 434123 - DNA, 466 bp, Homo Sapiens
  misc_feature (180)..(180): n is a, c, g, or t
  misc_feature (448)..(448): n is a, c, g, or t
gattaacattctttatttcacagtatttttgatcagaagtcttagaaatcatgattcatctggttacaaatcccatgagtttctctttgaatgaacctcttgcttccagtcccatacaacgcatctcccaccagccccagtgggttgtaactgtgattcaacactgagtgctcgcttggnaaaggaggtgggagctcaacttccaactcagagggcctctcccactgctctcaggggaaatgcccatggattcacttatggctgtatcaacaacaaggtgcaggctggggcgctgcctttcccagctgggccaaggcggttcctaggggggaatctccacccttcaggagggcttaggggaaaggggaaggtgtggacggagttcaggggccctggggttggggtgttttttttcccattattgggggctaattgttgggggccattnccttttcaggcaggacat

SEQ ID NO: 434124 - DNA, 1311 bp, Homo Sapiens
tttatccattttttcattcattccttccttggacaaataatatttattgagagcccactttgtggcaagcactgtgctaggtgcagggaatcagcagtgggtccagtccaagctcacgccctcacggatctacattctagaagccggctacctaagcaaacctatgccaacaaaacttctctctccctgctcaggggctgggatcggagcaagggatgggaggaggatgtgtggcttggggaaggtgaggacgctatggactaagttaaggcctatctaccctcgacctttgcccctccaggcagctgggggagagcggaggcagggtcgctcagggttctacccacacgctgctgttggtcacccgggccccgaaccagcccttccagtagacggagtcctgccccccgtgctcgaagcggacgaagcggacgcccggcccgtagtcggtgaaggtgtgggagatctccatccagcccccgccgtcactgtcttggggcactgccacctgcccgctgctgaactcagccagcacgttctcgtgctcggacagtagcttaacggtgagctcgtagaggcaaccagcgtcgctgcggcccgagtaccagtccttcaccacgatggccggctgagtcgtgtccagcagctcctcccagtagccctcagcctgcaggtcaatgacctgtgctttgcgacaccactcaaaggaggaggcgaagtacttcttgacgctctcatcgtgggtgaactccaccccactgtctccaggcagctcctccaccctccagccgtccccaccatgctccacgtcacaccagccttccaagtcctcttccccacacgggttacgcagaaggttgcggcgccgcttgctcaggaagtagaactgctgccagtggtcgcgctcctcctccacgccgccctcgggcaccagcccctcctgctggcacttgagcagccacagcggggcgccgtccaccagctccttccagcgcaggcacaccaggcggcaggcctgcaccagctcggcggccggcagtgcggccagcacgcgcagcagcagcggctcgggcagctcgtccaggtacgcggcggcggccgccgcctcctcctcctgctggtcctccggccgctcctcctcagcactcgcctcctctggctgctcctccgggcttgcctcctcgggctggcccacgctctctgggtcaccgtctccgtccatcgctgcggagggcggtcgcgagaggaggagccggagcgctgcgggctgcgcgagtcccggggcggcgagtcccggcgctgtccgcgtct

SEQ ID NO: 434125 - DNA, 1825 bp, Homo Sapiens
tttttttagactgggcacaccttttatttggctgcatgcagtagggcgaagtcaggagaacactgctatctttccagcaggacaagaggcaagttccaagggtggttggctgggagacagaggtcttgggaatggcagttctaggggtggggtgggggcttggaatgctctccaagccagagggggccgggcctggatttgggaggtggacaggggattcttcaaaccccctaccatactcatccagggctcatgtgtccagctgtcagagcaggtcccaatcctgctccccatctaccctgggacatcctgtacaggattccctcagtcctctgggaacctaaccccacctggtacccatctagcttctggggctccactgacagtgaggacagtccacacccgacctgggaccccaccccacctgggtctgtccatctcagtcccggcctgagcctctgggccaaagccacctcttctgagcaggcaggcagagcgagagactgggagcagcagacaggggcagagcacggcccatgagcccaccctccacttcccagattggtcagagttacatggtcacctccctgcacctgcaccatcagggcagctgcaaagcttgccagttgtcttgccctgtccttgctccgagggtcaaagaacacaggtagaatggtcccaggaggggaagggagagacagatccaggctggcctccaagctcgactttctgaggggcccaggggaacatgctgcacctcccacatctcaggtgctccgtctctgaaaggggcacacgcaggcttccccggccatcattcaggtcaagacctttcggggagagctggcccgaccccagcatgcgagggctgcccacactgagaggctccacaaagaagaggctgctaggggcaagggttagaggtctggggacacctggcctccacctccccttcccaagcccagcccttttctgacagcagttgtttaccagtcagggttcagcagatgggggctcagggggtgtcagggcagcgggggcccgatggtgatgctgctgttggtgaccctcgggccgtaccagccggcccagtaatgagtgtccacgccgccgtgctgaaaccagatgtagcggacgccgggcgggtagttggagaatgtgtgggagacctccctccacttggcatcgctcttctgctggatggtcgccgggtctggctggaaggtccccagaggcgcgtgcgcggacgacaggagctgaacgcacagctggtacttggacccgcaatctggcctggctgcgaacctggtcattggggaattccttcctctggtctcgagagagatcctccaccttccactcatcgcctccattcacatccaggctccagaactcgaacccctcttcagcgcacgggttgtgcaggaggttcctgtgcaggctccgtaagaagtagaagatcttccagtcggccacgggctggtcccagtcctcagtgatgaagccctctcgcaggcacttgcgtttccagagggtcacgaggtcgatgaggtcccgccagaggctgcagaccaggcggcagttcagcagcagctggcgggcgggcacgtgcgtgaacagctccagcaggatgttctcgggcagctcgttgatgttccccacagccatggcttgtggcttctggacaccctcctgtagctgcgctcggccgccgcggcacgatccgctgggccgcccaagctgcaccgcctggacctgcgcttgcctgggaagcgcgagcgcgtgggtcgacgatatcccaacattccggaccggtaccagcccg

SEQ ID NO: 434126 - DNA, 1067 bp, Homo Sapiens
ctagcattttgaggggcttccccccatgtaagagggcttcccccaagaaaggaggcctttttggggccaggggttaagggttttggggggacccctggggctttcccccttcctttttccccaagccccggccttttttggacagccatttgtttcccagtcagggtttcagcagatgggggctcagggggtgtcagggcagcgggggccccgatgggtgatgctgctgttggtgacccttggggccggtaccagccggcccagtaatgagtgtccacgccgccgtgctgaaaccagatgtagcggacgccgggcgggtagttggagaatgtgtgggagacctccctccacttggcatcgctcttctgctggatggtcgccgggtctggctggaaggtccccagaggcgcgtgcgcggacgacaggagctgaacgcacagctggtacttggacccgcaatctggcctggctgcgaaccagtccttgacctcgatgtccggccgtgtggtatccatcagctcctcccaatacccttcggccttgaggtccaccacctgggacttgaggcaggtgctggtcattggggaattccttcctctggtctcgagagagatcctccaccttccactcatcgcctccattcacatccaggctccagaactcgaacccctcttcagcgcacgggttgtgcaggaggttcctgtgcaggctccgtaagaagtagaagatcttccagtcggccacgggctggtcccagtcctcagtgatgaagccctctcgcaggcacttgcgtttccagagggtcacgaggtcgatgaggtcccgccagaggctgcagaccaggcggcagttcagcagcagctggcgggcgggcacgtgcgtgaacagctccagcaggatgttctcgggcagctcgttgatgttccccacagccatggcttgtggcttctggacaccctcctgtagctgcgctcggccgccgcggcacgatccgctgggccgcccaagctgcaccgcctggacctgcgcttgcctgggaagcgaggccatcccgggaattccggacc

SEQ ID NO: 434127 - DNA, 829 bp, Homo Sapiens
ggcaagcgcaggtccaggcggtgcagcttgggcggcccagcggatcgtgccgcggcggccgagcgcaggcaggagatcatgtcctctgagatcttgagaaggtggctggagccctttggacctccgcgggaggcagtgataattagcctcctcctcccatcatgttctgaggatgggagagaggatggtgacggcaccggaggcctggggtgctctgcccggctgcgcattatatccccattaaagactggcctactgaaaaaggctggccctggaatcaaagaagatccgggcttcttccccctctgcccttatttttgaccttgggcagtgccttccacctctattgtgagaggccagagaaaaaaatcagagctcaccttttattaaagtacctgatgtgtcccaagctccttggaccgccccagtgacccctggagctacaggagggtgtccagaagccacaagccatggctgtggggaacatcaacgagctgcccgagaacatcctgctggcagctgttcacgcacgtgcccgcccgccagctgctgctgaactgccgcctggtctgcagcctcttggcgggacctcatcgacctcgtgaccctctggaaacgcaagtgcctgccgagagggcttcatcactgaggactgggaccaggccgtggccgactggaagatcttctacttcttacggagccctgcacaggaacctcctgcacaaaccgtgcgctgaagaggggttcgaagttctggagcctggctgtgaatggaggcgatgagtggaaggtggaggatctctctcgcagaccagaggaacgaatccca

SEQ ID NO: 434128 - DNA, 840 bp, Homo Sapiens
cccgtcccaaccccagcccttttctgacagcagttggtttaccagttcagggttccagctgattgggggctcagggggtgtcagggcaagcgggggccccgatggtgatgcttgctgttggtgaccctcggcgccgtaccagccgggcccagtaatgagtggtcccacggccgccgtgctgaaaccaagatgtagcggacgccgggcgggtagttggagaatgtcgtgggagacctccctccacttggcaatcgctcttctgctggatggtcgccgggtctggctggaaggtccccagaggcgcgtgcgcggacgacaggagctgaacgcacagctggtacttggacccgcaatctggcctggctgcgaacctggtcaattggggaattccttgcctctggtctcgagagagatcctccaccttccactcatcgcctccattcacatccaggctccagaactcgaacccctcttcagcgcacgggttgtgcaggaggttcctgtgcaggctccgtaagaagtagaagatcgttccagtcggccacgggctggtcccagtcctcagtgatgaagccctctcgcaggcacttgcgtttccagagggtcacgaggtcgatgaggtccccgccagaggctgcagaccaggcggcagttcagcagcagctggcgggcgggcacgtgcgtgaacagctccagcaggatgttctcgggcagctcgttgatgttccccacagccatggcttgtggcttctggacaccctcctgtagctccaggggtcactggggcggtccaaggagctgcgctcggccgccgcggcacgatccgctggccgcccaagc

SEQ ID NO: 434129 - DNA, 1243 bp, Homo Sapiens
  misc_feature (77)..(77): n is a, c, g, or t
  misc_feature (82)..(82): n is a, c, g, or t
  misc_feature (86)..(86): n is a, c, g, or t
  misc_feature (101)..(101): n is a, c, g, or t
  misc_feature (108)..(108): n is a, c, g, or t
  misc_feature (110)..(110): n is a, c, g, or t
  misc_feature (112)..(112): n is a, c, g, or t
  misc_feature (114)..(117): n is a, c, g, or t
  misc_feature (235)..(244): n is a, c, g, or t
gggcccctttttttcaaagaaagtgggtacgggtaagttgggcccctgggggaatactttagagcgggccgcccttngggangttnatatggtgtggtttngggtggngntntnnnnggcccggcctgaaaaccatttattacaccaaaacgtccggagctatgtgacagtaagttacccacagctgggtagggttgaaccggggcaggagtcgctggtacagggacttcactgnnnnnnnnnnatggttagctcctgcctggaggaacctctggctgacccagacacaggatggacagctgtcagaaaatctggacaacagctcggtagggcgattgggcagcctcctcctgtccatgcttctgcccaggctgagcctcggaggaggcctggttcctggtcatcttggggctgacgacaatgctgctgttggtgactcggggcccataccagcctgcccagtactgggtgtccctgcccccatgctggaagaggatgtagcggacaccccgggggtagtctgagaaggtgtaggagacctctgtccatgtggcattgttccactgttggatggtcacaggtgggggctcgaaggaggccaacacgaagtagtcagccgaggccagctgcactttgagttggtaggtgcagccacagtcggctctggcagcaaactcgtaggatgtgacaaaatacttcttgactttggggtcaggaaaatctgtcccgtgggctccagggaggctctccaccttccagcggtccccaccattgaaatcaatttgccatgcaaacatatcctcttcagcacacgggttgcgcaggaggttcctatgcaggctccgtaggaagtagaagattttccagtcggccacgggctggtcccagtccttggtgatgaagccctctcgcaggcacttgcgtttccagagggtcatgaggtcgatgaggtcccgccagaggctgcagaccaggcggcagttcagcagcagctggcgggcgggcacgtgcgtgaacagctccagcaggatgttctcgggcagctcgttaatgctgtccagggctgctttggagtggggagcatccatggcctgggcgcagcggcggagctccaggtcggcccgagcctacggcctcggcttcgttgtcgctgggccccgccgccgcgtcacgcgctgcgaaacggtccccacccccgccccggatggaaagaattccggtccgttctcttttcttagtttac

SEQ ID NO: 434130 - DNA, 1166 bp, Homo Sapiens
gggtgacatgctgcacctcccacatctcaggtgctccgtctctgaaaggtgcacacgcaggcttcctcggccatcattcaggtcaagacctttcggggagcagctggcccgaccccatgcatctcgagggcctgcccaccctgagaggcctccacaagcaagaggctgctatgggtcaatgcggttagaggtctgggcacacctggcctccacctccccttcaccaagcccagccctggtactgcacagtcacgttgatttacacagtcatgggtctcagcagatgggggctcagggggtgtcagggcacgcgggggcccgatggtgatgctgctgttggtgaccctcgggccgtaccagccggcccagtaatgagtgtccacgccgccgtgctgaaaccagatgtagcggacgccgggcgggtagttggagaatgtgtgggagacctccctccacttggcatcgctcttctgctggatggtcgccgggtctggctggaaggtccccagaggcgcgtgcgcggacgacaggagctgaacgcacagctggtacttggacccgcaatctggcctggctgcgaaccagtccttgacctcgatgtccggccgtgtggtatccatcagctcctcccaatacccttcggccttgaggtccaccacctgggacttgaggcaggtgtaatatgaagtaacgaagtatttcttgacctggtcattggggaattccgttcctctggtctcgagagagatcctccaccttccactcatcgcctccattcacatccaggctccagaactcgaacccctcttcagcgcacgggttgtgcaggaggttcctgtgcaggctccgtaagaagtagaagatcttccagtcggccacgggctggtcccagtcctcagtgatgaagccctctcgcaggcacttgcgtttccagagggtcacgaggtcgatgaggtcccgccagaggctgcagaccaggcggcagttcagcagcagctggcgggcgggcacgtgcgtgaacagctccagcaggatgttctcgggcagctcgttgatgttccccacagccatggcttgtggcttctggacaccctcctgtagctgcgctcggccgccgcggcacgatccgctgggccgcccaagctgcaccgcctggacctctcgct

SEQ ID NO: 434131 - DNA, 1034 bp, Homo Sapiens
  misc_feature (206)..(206): n is a, c, g, or t
  misc_feature (877)..(898): n is a, c, g, or t
ggggaagggttccaaattaccaatccccccaagctttttggggtgaccatgaaggtttcttggaaggcttttgggccatatttcttagttaagatttcccaaagaaggaactttccatgggtgtcaccgattgggccggaaggaagtttttgttacaagagaattttaccagccttcaattctgggggtggtggtcttgctttttngatcgcttccaccaaactgctcaaaggaaactgtaagggaagagcggttcaggcagctcccggaaaaaacatcttcagtgctccggtgacaacgtggatgtcctcccactggctgtcgtccaaattcagcttctcttcttggttgacaataaatcttaacttctgtattgttgccagattgccactaactcgatatattccatcaacatctagacctcttttctcaacagcttcaatgcattgctttacaaaccacggaactgtggaattttcacgttcacacactttgtgcagatgagagccaaaaatttgatctttaataagtcctttttcttgcagagttttcagggaaggtcttcgggtaataaacttctttaatctgcttttaactcgatttttgtcgcttgtatcggaagcactgtgatgcagtctgaacattaaagattttctgtgctctggtttctgttcttttatatcactgtcgtagtgacttagcaattcagtgctagaggatctttggattttgaataattccaggtttcttgatggacaacttgaatcctttggcaatctgtcaattgcatttttgatagcgtggaaccaatccaatatgatgaagtcaatatctgactgtagaaggaactcatttcctgatactgttgtgatctgcnnnnnnnnnnnnnnnnnnnnnngaaatagacaggtaaagaaactatgtaagatagatctcttacatgtaaaaatccttttttaaaaaacacagtttaataaaatgaaatattttctgtattccagtaatgatcgcaggaatccggaccggtccagccg

SEQ ID NO: 434132 - DNA, 1050 bp, Homo Sapiens
  misc_feature (318)..(380): n is a, c, g, or t
  misc_feature (553)..(605): n is a, c, g, or t
  misc_feature (965)..(1001): n is a, c, g, or t
gggctgcgggggcgcagcggggcgcgtccccgaggggttccttcgggcacccttccggggcgccaggtccgagaggcagcgaccgccgaggctccaccgggaaccaagtcggcccctcgcgaatgacccgcccggtggctcccctcaccccctgggggacaccctccgcgcactggcaccacacgggcccgtcccagctcttccagcgcaggcacaccagcggcagccctgcaccagctcggcggccggcagtgcgcccagcacgcgcaagcacacggctcgcgcagctcgtccaggtacgctgcgccggccccgccnnnnnnnnnnnnnnnnnnnnnnnnnnnnnnnnnnnnnnnnnnnnnnnnnnnnnnnnnnnnnnnggcttgcctcctcgggctggcccacgctctctgggtcaccgtctccgtccatcgctgcggaggcggtcgcgagaggaggagccggagcgctgcgggctgcgcgagtcccggggcggcgagtcccggcgctgtccgcgtctgtgtcggtcccggcgaccgcgcctcttaaaggnnnnnnnnnnnnnnnnnnnnnnnnnnnnnnnnnnnnnnnnnnnnnnnnnnnnncagtcccagcagtctgctcgaggccccgggctgcgggttcctcagcggaccgaggaggctgggaaaggtcaggagtcgttttttttccaactggggaggggtccgatttggggcatctcgcagctcgctcctgggggactgctgggaggaggcggctaggggaggcacggagaggctgggtcaggccgagggtgaggggcgggtggcccaggcggagtcggggtataggaggtgccttccgccccaccccccacaccaggtaattttcctacgacgcggtgggggtgcgtcactggcccagcgctgcgcggggcgcggcccgctctcgacgaattcgagctcggccgatttggcctgatnnnnnnnnnnnnnnnnnnnnnnnnnnnnnnnnnnnnncgccgccaccgcgtaactccaggttcgccctatagtagtcgatacaccc

SEQ ID NO: 434133 - DNA, 815 bp, Homo Sapiens
cggtttcgtttgaaggtttccagggcgcgtgctccgacgtacaggtatctgaacgcacgtcttgttacttgtacccgcaatctggcctggcctgcggatccagttctttgacctccgatgtccggccgtgtggtatccatcagctcctccccaatacccttcggcctttgaggtccaccacctgggacttgagcagtcctgggccagcagagggtggagggctgggctcaccactaggcagtgatgggctaggactgcgccttctagggtgggagagagccgccagggtaaattgatttgggctttcccctacccgcgagtgccccggatcttactaatatgaagtaacgaagtatttcttgacctggtcattggggaattccttcctctggtctcgagagagatcctccaccttccagctcatcgcctccattcacatccaggctccagaactcgaacccctcttcagcgcacgggttgtgcaggaggttcctgtgcaggctccgtaagaagtagaagatcttccagttggccacgggctggtcccagtcctcagtgatgaagccctctcgcaggcacttgcgtttccagagggtcacgaggtcgatgaggtcccgccagaggctgcagaccaggcggcagttcagcagcagctggcgggcgggcacgtgcgtgaacagctccagcaggatgttctcgggcagctcgttgatgttccccacagccatggcttgtggcttctggaacaccctcctgtagctgcgctcggccgccgcggcacgatccgctgggccgcccaagctgcacctcccgct

SEQ ID NO: 434134 - DNA, 740 bp, Homo Sapiens
  misc_feature (170)..(228): n is a, c, g, or t
  misc_feature (414)..(467): n is a, c, g, or t
ccagcccctcctgctggcacttgagcagccacagcggggcgccgtccaccagctccttccagcgcaggcacaccaggcggcaggcctgcaccagctcggcggccggcagtgcggccagcacgcgcagcagcagcggctcgggcagctcgtccaggtacgctgcggcggcnnnnnnnnnnnnnnnnnnnnnnnnnnnnnnnnnnnnnnnnnnnnnnnnnnnnnnnnnnngctgctcctccgggcttgcctcctcgggctggcccacgctctctgggtcaccgtctccgtccatcgctgcggagggcggtcgcgagaggaggagccggagcgctgcgggctgcgcgagtcccggggcggcgagtcccggcgctgtccgcgtctgtgtcggtcccggcgaccgcgcctcttaaaggnnnnnnnnnnnnnnnnnnnnnnnnnnnnnnnnnnnnnnnnnnnnnnnnnnnnnnagtcccagcagtctgctcgaggccccgggctgcgggttcctcagcggaccgaggaggctgggaaaggtcaggagtcgttttttttccaactggggaggggtccgatttggggcatctcgcagctcgctcctgggggactgctgggaggaggcggctaggggaggcacggagaggctgggtcaggccgagggtgaggggcgggtggcccaggcggagtcggagtataggaggtgccttccgccccaccccccacaccaggtaatttcccccgct

SEQ ID NO: 434135 - DNA, 1404 bp, Homo Sapiens
ggtccagtccaagctcacgccctcacggatctacattctagaagccggctacctaagcaaacctatgccaacaaaacttctctctccctgctcaggggctgggatcggagcaagggatgggagtttttgtacaagagattttacagcttcaattcttgtgttgtgttcttgctttttgatcgcttccacaaactgctcaaagaaactgtaagggaagagcggctcaggcagctcccggaaaaacatcttcagtgctccggtgacaacgtggatgtcctcccactggctgtcgtccaaattcagcttctcttcttggttgacaataaatcttaacttctgtattgttgccagattgccactaactcgatatattccatcaacatctagacctcttttctcaacagcttcaatgcattgctttacaaaccacggaactgtggaattttcacgttcacacactttgtgcagatgagagccaaaaatttgatctttaataagtcctttttcttgcagagttttcagggaaggtcttcgggtaataaacttctttaatctgcttttaactcgatttttgtcgcttgtatcgggaagcaactgtgatgcagtctgaacattaaagattttctgtgctcctggtttctgttctttttatatcactgtcgtagtgacttagcattcagtgctagaggatctttggattttgaataattccaggtttcttgatggacaacttgaatcctttggccatctgtcaattgcatttttgatagcgtggaaccaatccgatatgatgaagtcaatatctgactgtagaaggaactcatttcctgatactgttgtgatctgaaagacattctttctgctcgatttttccttggcccattcaatgtgtgctccacacaaatccacactttctggtttgtgcccagttttcatattggacagagcctgttgcttggattctttgtaaaattcaattcttcgactagaaagaacaatccaggaagtagaccagtttttccttagtttctttcctccatctgcaattttagctttttgcagataaccttctttttcaaccatcagttgttccaatggaggaatgacatctttcaagatatgctgtgaatgattccttctgtgtctggatataggttcagtgaccttcccgacatcggtgaggatcatggatttactttggctgagcctgtcatggtggctgttggcatttttgattctcatttgcacagctcctgtgccttggcgggtagaattcagtgtttccacggaagtatcagaatttgtagatttctgcatattatagtgctatccttttctcggcaatgacctgttattgaaactgccatcaactcctaactgttaatgactctttcaacaaaaacg

SEQ ID NO: 434136 - DNA, 410 bp, Homo Sapiens
gcctagaggaacctttggaatttgaaataattcccaggtttccttgaatggacaacttggaatcctttggcaatctgtcaattggcatttttggatagcgtggaaccaatcccaatatgatgaagtcaatatctgactgtagaaggaactcatttcctgatactgttgtgatctgaaagacattctttctgctcgatttttccttggcccattcaatgtgtgctccacacaaatccacactttctggtttgtgcccagttttcatattggacagagcctgttgcttggattctttgtaaaattcaattcttcgactagaaagaacaatccaggaagtagaccagtttttccagcctcatgtgtcattgcttaattcaaaatattttcataatgttgaatcttactagaaa

SEQ ID NO: 434137 - DNA, 2233 bp, Homo Sapiens
  misc_feature (2213)..(2213): n is a, c, g, or t
cagtcgccctctgagccctgaaacgccccccttccagaccctgtgcatagcaggtctaccccagacctccgctgcttggtgcatgcagggcgctgggggccaggtgtcccctcagcaggacgtccctgccctatgtaccaggagcctctgcccatcacaggagggcaggcccatgtagaacagactctaacaaacctgcagctggaaactggatcccttttaaaccagccgccaccacagctcggctcacccaccagcgccgtccgtgaaggctctctctggccctcacggtcagccaggctgccggtcacaccgaaggggtctttggcgggtgaacctgctgcatgagctgcgggcgcttcaccctgggcttcctccgcttcggcctgctcttggccttgttgatttgtaccacaaagaaggccaggaccaccatggctcccaggaaggcaaagacaggaatggtctggcccacctcctggttgtagcggccaggcatgatccctccaggaatgtcccaggcgccgctctctccaggggacaagggcctcacttgagggcgattcgatcgaaagttgggtaacaccaccttgtccaggtcaatggagagtagcttctgatgtttccaaaggttactgggcgccgtctcgtttaaaggctgtggcttggcccaagacaagcgtggacaggctggtagaggccgaggttttgggtctcccaaatgggcctccagaaccttggagtaccgatgaagatggtttccttccatcctctctggagtgactgagcctgctccactgggagggcgctggcggttcccagagtgactgaggctaggcggtgtcaccccatacgatgtgtactggaggagggcatccagaagccaaaagcagtccttctgtcggtgactgtcatccaagcaattggagtccccatacagtacaatccggcctccaccctcagctggaatctgataaagtcccaaaatggggacgttttcaacaactgctgtttcctgctttaaaacctccaatccttggtccttgaaagtctgtgttatcacgacgccatcttctggaaacttcgcgatgctgcaccctgacgcataatacatgtcatggttggccagggtgaactccccttcatacaggccatcgctgaaccccatgttccacacagacagcagctcattcagagctgggatgttagctcctccggtatccggcatccaccactgccttgtgttttcatcataaaacttcacttttctcataacagaagtgttgtaccagtcactgaagatgacgagcgagaggccgttgtccacgtccctccggagcttggcgatctcttcagggaagtactcctcctcactgtccaccatcagcaaagtgccatactgactggcatcaaaacacgtgaagggggccccgaggacctctacaaagtagcccatgcttctcagatgctggtacatatccctgaaattggtgtggatgtgatcaccattccagtctaaagggtcattcttcatccttaaattatccctggggaaatagccaggtggatagcggaggttgtggtactgatcccagagaactctcttgcttcgcgggggagtaggaattatcttcaccttaatggggagctttactgttgaagtctgttctgcaccattttttgactctgtctctgctggggaagccacagtgatcatgacatggccctgagcaatgccttcccaggaagccgctttcttggtcacagaaatggagatggccaggtagcccgaccaaggccataagaccgaggagtaggagaaggcaacttcaatgttgtctccgttctgtggcaaatagggctgccagtcaggcttatctacaattcttcctgtgactcccatgccgttgaggatggtgacattaacaactgtcggcattcctccatagtagatgggctgggagcagtagggccacatgtagggacactcagtcagatctatgtagctggggctcaaactgaaataaagaatacagtgttagagtagatcatatgagaaaactacaatgaagcaacacaactgtacaagacagagttaacaaagcagacctagcttcagaagggcttgttacagcgctgccctaggctggcatctgggaacttggctctggaatgctcctgcacagataaggcctttgtgccagcctgctgtntatcccgggaattccggacc

SEQ ID NO: 434138 - DNA, 610 bp, Homo Sapiens
agcgggggagtgcgcaggcagtgctcgcggcggcggcgacggcggcgggaggttcggttgtcgcccgttggccgcgcggcgccgcgctcggcggccgccattgcagcttgttttcacttgctttttaaagacagaaagctcatggtgcaaattgttatttccaggggatccctgtgctgatcgtggggcatcatatcctgtatgggaaaatcatccacctggagaaaccttttgcagtccttgtcaaacacactcctggggatcaggactgtgatgagcttggccgcgagactggcacccggtacctggtgacagcactcatcaaagacaagatccttttcaaaacccggcccaagcccattatcaccagcgtccccaagaaagtatgaaagaacctcggattttccctagagagcggccaactccttggactcgtgctccgctgccacctcgaggacggctcgacggttccctgggaccacaggggggtcctgttctgaacacaggccagccactgggtgtgaactcggatcccttccttatggcggtcggttctcttggtggaatctgaccccatttccaaggaacccatctccttttccagcttcat

SEQ ID NO: 434139 - DNA, 2855 bp, Homo Sapiens
gccctctcatcccatttattaaagaaacagtaagaaaagatacaatgcaggaaaaccaccaaccatccttgcacaccaggccgaacaaagcacagtgatttcttcccttcatcccccacccccaccctaattcccatattcccatccacatcagtttaaattttgaggttctttgattgattgggagtaccagtgaagagggagttggatgagtagaggggccttaaatctggccacctctaagtcccaggagaagggagctgcaggcccagtcagtcaagcagaaactgcattcggtgggtctttctttgaagtggttgtccatctccctgttctgtgttcaagcccccagggaaaggtatggcagtagaggatgaccaggtccaagctgcccaggtcagagctacggaagcatggtccgttcaccaacgccacgtttctagagagcagtgagctgattctccaatggtgagcaggggactacatgtgaactgggacctgcaggccaatgtatccctgaggaaaagtccacaagaacaattcaagaaactagtaagatacaatgtgcagaaagctgtgggacgaaagcacagcaggcttctgggaggctggagatcctttctctcaagggcagagattattcccacctgccacagttcacatgccacaaataacatctcaccttcagtcaagaaaaacgcaaaggaaaaagatggctcatttgaacttgagcccaagctatgttcttcagactgtagctccacaactacccttttacctaagacagcccctgccaagaaccacagtgcctagaaaccaaggtggtcctggagggaaaatggtgtttaagggggcaacattccatttgggtacattgcagccattggaccccctggtctggggaaagcagctgggtttgtgccagggaggctccccactctaggaaatgggacgaaactcttgcctgcagggccattcatccttggaaaggaagctgggttgagacccagggtcccagttggccttgtgaaaggagctgggttgatacccacagggccagctggagaagggcccagatgcccggcagctggcctggggaaagtaacttgaccagggcctaatgggccagtagaccttgggaaggtagttggacttggaccctgcaggccagtggcccttgggaagttagctgggttggggccaagtggcccagaggctcttgggaaaatggttggatttgagccctggaggccagcggacctttggaaggtagctgggtttgatgccaatgtgccagaagactgagaaaaggcagatgaacctgctcccctgggaaagggattggcatttacccccatggggccaactggccttgagaaatgagctgaattagggcctatggggccaggagcccttgacatgggagatggatttggccctggaaggccaattccccgagagctaggacccgagtttgggcccatggggccaggtactcttgccatggaggatgggcttgtgcccatgtttccagaagcctgtgagaaagaagctgaatttgctcctaaaagacctgctgctcttagaatgggggcaagatcgaggccttgaggtccagccattcttaagttaagaccagatcctgtgcccaagaggccacctgctctggcatctagattagggcctgggcccaggccacttggtcttgggttgggcccaaggcctgggcctggaaacacacctgacctgggggcagggtttgtccctaaaaagcctgatctcagattggggtttggtcctgggcccaggccaactggcctaggattgggaggaccattcccagaggttaacagaacaccggctctcaggttaggtccagatccagggcccatgggaccaccacctctggggtcaggacctgctcccaggagaccacctgcccttgggttggacataggacctggtcctgggagaccccctaacctggggttagacagaggccctgggcctggcagagcccctgtcctagggtttagggtggggcctgggcctgggcctggccccaagaggccaccaggccttgggaaagaaactgcacctgtgccagtgggattcatccctcttggaaaagaagccatacttgggtcacgagcaccagccgggaaaggtgctggatttgaagccaatgagcctgatgaagctggaaaaggagatgggttccttggaaatggggtcagatttccaccaagagaaccggccgccataaggaagggatccgagttcacacccagtgggtggcctgtgttcagaacaggacccccctgtggtcccagggaaccgtcgagccgtcctcgaggtggcagcggagcacgagtccaaggagttggccgctctccagggaaaatccgaggttctttcatactttcttggggacgctggtgataatgggcttggggcgggttttgaaaaggatcttgtctttgatgagtgctgtcaccaggtaccgggtgccagtctcgcggccaagctcatcacagtcctgatccccaggagtgtgtttgacaaggactgcaaaaggtttctccaggtggatgattttcccatacaggatatgatgccccacgatcagcacagggattccctcagtggtgtaatgtaggtctcccaggaggtttccagctaatccagtgctgtagcgagcctcgatctccccctgtagctccatcagcacccattctgccaggcctccagccctcgcactgcaacggcggccgccgagcgcggcgccgcgcggccaacgggcgacaaccgaacctcccgccgccgtcgccgccgccgcgagcacagcccccgct

SEQ ID NO: 434140 - DNA, 1013 bp, Homo Sapiens
ctgtgtgtcgggacctgctctccagaggccaccttggcttgggtttggaaataggacctggttcctgggtgaccccgtttatcttggggttatggcagtaggtccttgtgcgtggcaagagcccctgtccttagggtttagggtgggggccttgggccttgggcctggccccaagaggccaccaggcctttgggaaagaaactgcacctgtgccagtgggatcatgccctctgtggaaaagaagccatacttgggtcacgagcaccagccgggaaggtgctggatttgaagccaatgagcctgatgaagctggaaaaggagatgggttccttggaaatggggtcagatttccaccaagagaaccggccgccataaggaagggatccgagttcacacccagtgggtggcctgtgttcagaacaggacccccctgtggtcccagggaaccgtcgagccgtcctcgaggtggcagcggagcacgagtccaaggagttggccgctctctagggaaaatccgaggttctttcatactttcttggggacgctggtgataatgggcttggggcgggttttgaaaaggatcttgtctttgatgagtgctgtcaccaggtaccgggtgccagtctcgcggccaagctcatcacagtcctgatccccaggagtgtgtttgacaaggactgcaaaaggtttctccaggtggatgattttcccatacaggatatgatgccccacgatcagcacagggattccctcagtggtgtaatgtaggtctcccaggaggtttccagctaatccagtgctgtagcgagcctcgatctccccctgtagctccatcagcacccattctgccaggcctccagccctcgcactggaaataacaatttgcaccatgagctttctgtctttaaaaagcaagtgaaaacaagctgcaatggcggccgccgagcgcggcgccgcgcggccaacgggcgacaaccgaacctcccgccgccgtcgccgccgccgcgagcact

SEQ ID NO: 434141 - DNA, 1951 bp, Homo Sapiens
  misc_feature (1939)..(1939): n is a, c, g, or t
cttttttcttagcttcatttctcttaaaaaacaaggaacaagaaaacattgcaccagcgttctaagcctcaaacaaaacacaaaacaaatccccctgcgaagaacaataaactttacatctctttggcaacaataacttaaaatcacccaacttccattcgctccaaccacagcagttagttagttacaaaaatattccctgtgctgccctgcccccagctccaccccttccccaccatccctctccctgtaggcaggagccccccaacactgactgcggggcatggcccccactctccttttgcagctggggcacaggaccagatactgccccacagaggggagctgcctgcacggtcctgccaagggcacctctagaacggggcccacggggcaggagtacagcctggaagcccctccacccctgatcttttgggctgcccaccgtggccacagcgggacccaggtgggagcagcctgttccctgtgggaagggtgggcttacgggtctagctgagtcagtgaaggggaaacagccacggactttgagataagggcagcggaaacaggaccgacacgggcgcccagggccactccttgccctgagccaccaggaacccaggcaagggtgggggcacagggggtgggaagaggctcacaaacctgccagtgtctcggggccatgcctcgtcctggtttaagtgtcctgtgagcacaccggaggagctgccggatggggcatgcgggtcctccgaggccaggcaggcagggcagagggtgggggccgccgtgcccaggggcactggccccttttgagtgtgtatgtgtgtacagacacccactgtggctccaggcgcccccaggggctagcagcaagcctaaaagcccagacgaattctgcctctggggcggagcatggccgatctaccatccagggcctctcatcccacgggcttctccaggacaccgcgtggggcagaggcacctgaatctgctgccaacagccaccaggacgtggtccccaccttctcggtcaccatcctcgctgctgcctggcaggggctccggtgacgccagccttgaggggcaggagctgcccaggtctcaagcctctttactctcacccccggcaccagcttcaggtcctctcttggactcggcgtccgagtcagacacgtgcgtgatggagaagcgggacgtgggcgcgggcgacaccgtgaagcgcgagaagggagcgggcgtgggcgtgggcgcagccggggcgggtgcggccgggtctagggccatggcgaaggctgccttggccgtcatcagcgggaagtcgtcgtcccacgcgaacccaccaccctcttccgctgtggagccatttggggagccatcagcctgctgcggccggttgggggcgttgggagagccggggctccccctaagggacgtagggggcgattccttggcgcccgggaagggctccccgagctcccgggtggggctttcctggtcaaagaggtagacggtggcgtcgtcgaagaagggcacggccttcttcttgcgttccaggtcctcgcagaaggtctcggacagcaggctgggcatcttgagcaggctgcgcaggttgcgcgcgctctggctctcagccaccaccacgggcgccgccggcgcctcctcttcgctgtcctcgctaggctcctggacgctgtagcagcggagctcctcgtcagactcgtcgctgtcctcactgtcctcctcctcctcctccggccggccctccaaggccgcagggaggccgggcagagccaggcggagtggggctctgggggtgcctgggccccccatccgcttttgtggggcgcggccctgacaacagtcgtgatcccgggaattccggaccggtaccagcggtgttcttgtttttactgggtgggtggggttgttgggggcncggggacgagag

SEQ ID NO: 434142 - DNA, 996 bp, Homo Sapiens
  misc_feature (21)..(21): n is a, c, g, or t
  misc_feature (30)..(30): n is a, c, g, or t
  misc_feature (52)..(52): n is a, c, g, or t
  misc_feature (71)..(71): n is a, c, g, or t
  misc_feature (77)..(77): n is a, c, g, or t
  misc_feature (82)..(82): n is a, c, g, or t
  misc_feature (91)..(91): n is a, c, g, or t
  misc_feature (96)..(96): n is a, c, g, or t
  misc_feature (115)..(115): n is a, c, g, or t
  misc_feature (124)..(124): n is a, c, g, or t
  misc_feature (155)..(155): n is a, c, g, or t
  misc_feature (164)..(285): n is a, c, g, or t
gaatctccctttgtttccccngctgaaatnaatgccgcaatccttggtaacngaaacttcaacctcttggntttcanacgantctcctccntcaanttcccctaataactgaaanttgacaagntgcgcccaacaagatggcctaaattgtgtanttttaatannnnnnnnnnnnnnnnnnnnnnnnnnnnnnnnnnnnnnnnnnnnnnnnnnnnnnnnnnnnnnnnnnnnnnnnnnnnnnnnnnnnnnnnnnnnnnnnnnnnnnnnnnnnnnnnnnnnnnnnnngggaaacatttacccgggacaataaaggcttagaagaaccttttggggaaactttgtgaggagcaccaattccagaggggcccacagcagccacagcctcctggcgtgacaccaggcacactgccggctgcacaggttgctgggcacaggcaggcacagccagtctggaagagcagcccgtcttaaatctttggtttctttccaaccaggagcaaacattggtagaaagagccagggcatatttactctttacacccagaattttcattcattattgaaccatttggcttgcacagtgctctctgataatgtggtccataaaaaccaccattaaagctgccctttcacctgatctgggtggggctaaacgaggaaacgagaagtttcctgtatgcttcaaaatataaatcaatgccaggaaattctgaaaatggatgctgcctgttaaacatgaaatcactaagggagcttctgcaaaacccacccggcagcatgaggaacggtgtctacagcgtgctccaaacggccacggccccgctccttacagatcaaagtttaagccgcatattctcatatttcaaacaaaactacgttacagacatcatctacgtgggcacggatacacactaaacaaggacgtagtacacaattgaggggtgccccggggagcgcggcaggaatgccttccgggaagaatcctctggtcgcccc

SEQ ID NO: 434143 - DNA, 640 bp, Homo Sapiens
  misc_feature (349)..(419): n is a, c, g, or t
  misc_feature (436)..(447): n is a, c, g, or t
acacatattagacatctctgctgggtcttcagctccaacgtctttgactttgaattagttgcatttgtagatttagtctgagtaatatgtttctgttcaaaagaattttttattcctgcataaatacaatattaatattttaggtaaaatcaacttttgctaagacattggatatgtccaccgtgcccagcaggctcattttttaactttgcaatattttaacttgacagaccatcgtttgatgtccattttaccactgtctacattagttgaggtcctcaatatatcttctttatgaacctaagtctctttgatgtcaaagtattaaatatcattggtgcatgcctgnnnnnnnnnnnnnnnnnnnnnnnnnnnnnnnnnnnnnnnnnnnnnnnnnnnnnnnnnnnnnnnnnnnnnnncaagtccccatgtcttnnnnnnnnnnnngtattaaatattttctgtaacataaacattttctataatctaaaagtgaaatatatttgttgaaaaaacttcaaataatctgaaacataaagcaagaaattgaagccctcccttctctagcacctccaactccctagagttggtatacactctagacctgttgccacacacaaataaagtttctacatttaca

SEQ ID NO: 434144 - DNA, 911 bp, Homo Sapiens
ggaaattgcttcccggaatccctgggttttattctgaccagatcccgtggatgagcaaaggatggaagaaaacagtgtcgcccttctccatcaaccaggtgcacccgggccttgttttcctcgtagtcctggatccccgtggaacattttgttaactcccccctccccacttggggtaatcgtggggcttcagggagcccttgtgtgtgcctgggagcacaaccagacagccgttgttccggctgatgtgctccatcgccgtccaggcgcaaacgatgagatcgctgggcctgaaggggaaatagtgcaggtcctggtgcagggggtgacgggacgtcttcttgccagaatctggaggtttgtttatcaacattgtgtgcatggccataatattaggtccagtgaagcactccacatatttcagaatctcggggagagtgcagtatctgaagagctccttatcttcctggaaatcctggaccttcgtgatcatcttctcacttggagcatattcggatttcgaaatggtcacatctctcattactgttaatcctaatggtttcacctcctttctgcagattttttcaaactcattccgaaagcgttgaatatcggcatcaggtacaagatttttgattactagaaacccattttcttcataaaattttctctgttccagggttagaacattattatccagagtatactggaattgttgaggatggaaactggcagaggaaatagtccctgaagtgggatgagctacgacagccccggccgaggggcggccgaggtggcccagaacaatctgcagacgggcggcggcgcgaagctgctccatggctgcggcgcggggaaccccccctcgtgccgaaatcgccacccaggcctcgcttcgtatgtgcttgttg

SEQ ID NO: 434145 - DNA, 913 bp, Homo Sapiens
  misc_feature (184)..(221): n is a, c, g, or t
acagatatttacatattttccatacagcatctcacttttttccatagctctggatgttttccatccctttgtgaatggggagttaaactctcatcaaatcagcaatgaagccagggtagttctgtaggggttgatgtcccaggtgggagagcaacttggttagttgccctaaacacgggtcacnnnnnnnnnnnnnnnnnnnnnnnnnnnnnnnnnnnnnnctgccaggtcccttttcccagttctatcctactggccaaagccagtacttattatctcagtcccatcccacatccaaccatgaaagccagtgaaagaaaattcaaaacagaatgaggcaggggaagggggagatggagagatggagagacagacagatggatttcaatagatgttacctccgcagcccttggcttgtaagaaacgtggaggtgcttaccgcatctgtagcttgctctgcagctcctgcagaatctctgtggactgtctgtgatagtctaatgctgcctctatgaacacagccacttggctgacttgttctacttgcagcagaagtgcaaaattattccatggaggccggagcctgtgtaatgtccagagagagaggagaccagcagcaaagacctagctttgcaagggaagaccagtgtctgccttggtccatttcatttaatttcatgtaggagctctgtataataatcatacaggtcatggtatggagctataaatgctggaaaaacatgtccaattagatgatgatttttctcagcagattttctatgctataaagctcatggatctgaaaacagagagataaagctcttccagttacaaacgaagccaacatttagcaaaagaactgcctactttgtcaagtgtctcaacacgcactttctagctaagccaaatcaag

SEQ ID NO: 434146 - DNA, 1195 bp, Homo Sapiens
  misc_feature (275)..(283): n is a, c, g, or t
  misc_feature (307)..(317): n is a, c, g, or t
  misc_feature (531)..(543): n is a, c, g, or t
tgcgatgttgatcggcaaaaccactcgtgtgggggaaagtaggggcgcgaaagaaaggaacgcccggggggtttgggaaatgtaaaaaaccccccccgcccaatgggatcgccgaggcgtcccggataaagaatagttttacaaagagcgcgcgtcgaagaaggaagaaattttttcgaggcacacaagggttatgggacattgtggtgttaaccccctttatacccctataaaaagtatttgtttgttcgccctataaacggttgagaaatttnnnnnnnnntagcgtggtttccacgttgggttnnnnnnnnnnngaaaattaaggttttccttcgcaaagaattccccaggtgacgggttttccccaatcaggaggggggagaaaggacgggcgatggccgggggtataaaaagcgggctcctaaaagggacccctttttttccaaaaaaagagggggaccgcgaaaaagttgggccccctagggggaattttttgggaaccgccgccccatttggggtaagacggcnnnnnnnnnnnnncggatagggggtttaatggaagggggtggggcgtggtaagtgccaacacagtgtgtcatgtttattgggctattcacaggtaagcttaaaatacaatgaaaagaaaagaccagacgtcatcaggaatgtcgagaaacaaaatatttagcatttcttagtttcaaatgttaccatttcattgcagctgaggaatataggccattcgttgacataactgcaatgggtgagacttatttttagccacaggaagcaaatacatttaaccaatgacttttaggacaggaagcaaaaaagaaaacaatattttcatgtagcaaggacaagaaaatcatttatacaaattaaagtgatataaaatacattataaagagagcacacatacaaaagtcattaagttggtcagagagcaaaggatgtcacagaacaccgcactgagagcacactggtgtgaattcatttcagttacgaaagtatgtccagagtttgtgttacacatttactgaggtaaaggcacgatcacttccacgtaattaatggggaagaatcccgattctccgtgtatcattccttcataccagttttcatctagttatgattggttaaatgtaatgatgtccaccattcatttaaatcctaattctccttggttttc

SEQ ID NO: 434147 - DNA, 1458 bp, Homo Sapiens
  misc_feature (631)..(631): n is a, c, g, or t
catattttcatgtagcacggacaagaaattcattaaaccaaattaaagtggtataaaatacattataaagagagcacacatacgaaagtcattaagttggtcagagacccaaaggatgtcacaagaaacactcgcatctgagagccacactggttgtgaattcaatttcaagttacagaaagttatgtccaagagttctgtggtaacacattttactgaaggtaaagtgcacgaatcacgttccaccgtaaattaattggggaagaatccccgattgctccgtgtatcattccgttcatagccagttttcatcgtatttgatgtggttaatcgtaagtgatgtccccttcgtttaaatccgtaattcctccttggttttcctggcctcaaagttcatagagaccaccgacaacaaggcctgttctaatgggaaatgttagaacctgtcgtcttcactacagagtggtggaaactccattgagctcactagaactccttttcacaggccttggcttgtattctcgtctggggacactggatgcagctgatattcgcatctgtagcttgctctgcagctcctgcagaatctctgtggactgtctgtgatagtctaatgctgcctctatgaacnacagccaactggctgacttgttctacatcattttctaaaaagttaaacatgcttctttcagccaactcctttgactcttcaaatttttctaccgcttgtctgacttcttcgtctggtatcttacctactcgtttctttttataatcgtaatccaggcggcggccttccagctttttcaggtgatgcccgatctcttttaaatctttatcttgtagtaactgaagtggatcaataaaagtttgctttacattaatatcaagagagtctttcacctcagccattagcttcatggattcaccaacttctatcaatgcattgccaaaggtggagtcttccccgagctccttcccgtatttcagcatacagtcccccagcaagccttccgtctgcgggtatcctgtggtcttcacctgccctcggatcttcgacacagtgttcagcattcctagcttagctctgtatgctggatttggctgaagatattcagtggtttttgaaagaatttctgcaacaactttattggtaacatctattttcctttccatgtcaagaaattcatcgtctagtttagttccttcagcaccacttattttttcactaaatagctggctggctttgtggaactgcttcttcagcccggccaccgacatcgcgactgcgaccggcaggggcggggtggtctcaaggctcggctgggccacgcggccgcgacgcgctcggggagcgggagcccgggccggtccccccgcggctgggctccgccgggcccgcctcccacggccacggccacagccacagccgctgtcacactcgtacacgcacccgct

SEQ ID NO: 434148 - DNA, 408 bp, Homo Sapiens
  misc_feature (20)..(20): n is a, c, g, or t
  misc_feature (397)..(397): n is a, c, g, or t
aagcccaataagccttcaanggaatcacccaaactccctatcaaatgcaatgccccaaaaggtggaagtcttcccccggagctcccttcccccgtatttcaagcatacagtcccccccagcaaagccttcccgtctgcggggtatccctgtggtcttcacctgcccctcggatcttcgacacagtgttcagcattccctagcttagctctggatttggctgaagatattcagtggtttttgaaagaatttctgcaacaactttattggtaacatctattttcctttccatgtcaagaaattcatcgtctagtttagttccttcagcaccacttattttttcactaaatagctggctggctttgtggaactgcttcttcagcccggccaccgacaatncgactgcgacc

SEQ ID NO: 434149 - DNA, 954 bp, Homo Sapiens
gcctttgtgtgcggtatttatttcaaatgttttttaaaacagcactgttatttctcaggacaagagcaaaaatcaccccctgcagaagcttgggaactatgtacagaactttacagaatagaggcaatactttagcttaagcctgtctgctgaccagagaatggaattctgcgtggactcaaggaacaaaaggaaactaggcagggaaggggaagaaaagtgcccatctgaatcaaacttcagctgccatcagggcacatcttgtggtggtcacagattgtaggctgttttttggaagattcgggttcagcacaggattccatttgtctacttggctacacccctggctgaggtgccatgaggtcaatgtcactcaagttcctggccagccaaactcccgcagcaaagagtcccaaatttagtatcaagttcctccggaagtcattcctatcagtggcaaagcggtagacgccccgaagccaatctcccacgttgtccggtatttcgggagtttcattagccgagccagcagcgctcaccgggacagtgctggaagccatagtggaaagcttcgcatgggcctcggtggaggaaccgtatcggcgtcgccggtgaatgacgcacctccggtctggcacttccggctgctatccggccggcagtgggggcgctgttcgcttagtccgacatccggaagagggacggccctctgctgcgcctccacgaactctaggaggggaggagcgcggcccggttctacggtcacctgctcccggtcccacctccggctctccagccggtaactgtcacgcgtgcctcgtgccgaattcgccacccaggcctcgcgaccttagaccgttatagttacgtggttcccgtgttccgtgtttttaacaaaaaaaccccctgcggggttcttttgatcccaattctttgttatggtcctctgcgttc

SEQ ID NO: 434150 - DNA, 501 bp, Homo Sapiens
gggctcggtaccaacatccggacagagcaaaatcaccccgcagaactgggaactatgtacagaactttacagaatagaggcaatactttagcttaagcctgtctgctgaccagagaatggaattctgcgtggactcaaggaacaaaaggaaactaggcagggaaggggaagaaaagtgcccatctgaatcaaacttcagctgccatcagggcacatcttgtggtggtcacagattgtaggctgtttttttggaagattcgggttcagcacaggattccatttgtctgcaatcagatgataagacgacaggtggcattagaactacttggctacacccctggctgaggtgccatgaggtcaatgtcactcaagttcctggccagccaaactcccgcagcaaagagtcccaaatttagtatcaagttcctccggaagtcattcctatcagtggcaaagcggtagacgccccgaagccaatctcccacgttgtccggggttgtt

SEQ ID NO: 434151 - DNA, 894 bp, Homo Sapiens
  misc_feature (811)..(847): n is a, c, g, or t
cacctccataaaatccatgttttggggcttgtttttgtctctcaagtgtgaaatataaatcatgtttttatgatttttgtaaatctttttacaccttgtttttgtaagcaaaagtttcttattaaaagaataaaatgactgcctttgtgtgcggtatttatttcaaatgttttttaaaacagcactgttatttctcaggacaagagcaaaaatcaccccctgcagaagcttgggaactatgtacagaactttacagaatagaggcaatactttagcttaagcctgtctgctgaccagagaatggaattctgcgtggactcaaggaacaaaaggaaactaggcagggaaggggaagaaaagtgcccatctgaatcaaacttcagctgccatcagggcacatcttgtggtggtcacagattgtaggctgttttttggaagattcgggttcagcacaggattccatttgtctgcaatcagatgataagacgacaggtggcattagaactacttggctacacccctggctgaggtgccatgaggtcaatgtcactcaagttcctggccagccaaactcccgcagcaaagagtcccaaatttagtatcaagttcctccggaagtcattcctatcagtggcaaagcggtagacgccccgaagccaatctcccacgttgtccggtatttcgggagtttcattagccgagccagcagcgctcaccgggacagtgctggaagccatagtggaaagcttcgcatgggcctcggtggaggaccgctctcgacgaattcgagctcggccgatttggcctgatnnnnnnnnnnnnnnnnnnnnnnnnnnnnnnnnnnnnncgccgccaccgcgtgagctccaggttcgccctatatgagtgtataca

SEQ ID NO: 434152 - DNA, 983 bp, Homo Sapiens
cggtcttggcacttcccgggttgctaccgggccgggcagtggggggcgctgtccgtttagtcccgacatccggaagagggacggcccctctgctgcgcctccacgaactctaggaggggaggagcgcggcccgtttctacggtcccctgctcccggtcccacctccggctctccagccggtaactgtcacgcgtgctgtgatcatttaattggcttgggaggaggatggtggggacggggctgtcccagcctgtggaggtgggggtaggggctatctcagcaggggaaggcgtagctttggggaatgggttttgccaagaaagtctccgccaaaagtcttagaacgcgcagtactgaagggggcgcactccaaacttgtcacctcgccgcctcttgcgggcgtgcgcctgactgcgtctcagtctaggattgttagggggaggctagccttgttctcccgctttacagacccctttcctcccactcacatcccctctctgagctgcgccactagcacatggtgcagtgcgtcttagaggcgttgctgtcctctgcttggaggcttccgggggtcttccaggactggggaaggcgctcgcctaagaaaaatccttcaggttccgagtcagaggaggaggagcaggtggagaaaggggtgtccttgggatcacgaatagtctccaggcggcattgctcctgccctttgggtgcctccgctttgtccccaggtcggttctcctgctggggactggatccaggcagccccctctgagtttgcaggctggaaccgccggcagcagcgaaggagtgttcgggagagggttgcagagttcaccgaggtttggtcccttccttcagttcggtcgagtccagtctcccctgttccgggccgggtcggaaacgctggtctcagagccgcggagctggacctacaccgcagctagtggggggtgaggcccagctcccggcccgtccagcccctg

SEQ ID NO: 434153 - DNA, 1676 bp, Homo Sapiens
ggtccggaattctcgggattgtatgtccaattcttagaacagtgatgcttaggatatagtaaatgataacatagatgaggaaattgagaggcagggaagctgactggtccaaggtcctgcagctaaacaatggcagggcagagagcacagcgcggattcaccccactggtttaatactctgtttcaaaccatcgatgaatgcaggctcttgttgacgtgggcattactctgcccctcaccgggatgttactgccattctgttgctaaatcaccaggatgaggttaggaaccttctccaggcctcaggctcctgctctgcaaactgaaggaactagaggtgtggttaaggtgcctgaacccccttttaggagaaatcccagcagaagatgcctaagcaagccttgcaggaagtcatctaggccaccttcaagtcagtgccaaccgcagaatctttagatcccccaaaagagcacctgtccctttgtggtgcttctgacagagaaccccaagcagccctagacctccctcaacctgactcaggggtgcccaccactccccatcctccctgacacacataatcctggctgaggcagcccaaatagcagcttccccggattactcaccgtggctctgtgagaagaatgcctctcccaggcagcgtccgcagttgtgaccacagatgggagactagcctaattggacttaccagcagctcaccttggcttcctcaaggcccagcagcaggacagggcctttctctgagcagaacttgaatgataaaagaagcaggtgaagctgatccagcctcagacagacctccagtgggcccttgagggtgtgagaggcagctctgcgggcccaccctagaactgcgtgtggacagctagaaagcctagcctttctgacattgctggcctaagaggtttcatctttagggtttttttccttctcaggctgctagcttccatctcacttaatacagaaggatggtctcaatttaagcatctgaaacaaattacttagcaaaaaccattttcgttgtatccaaacccagtgtcttcagtttgagctctctgaaattccaaacacatgttcaaaccaccaggaaagagggaaagagagactgagaagagggggactgaagcagggaagtcactatgagattctccccaaaatcccgatgttcagcctctgggtgaaggacattccatcctgagacggagggattgctctcttcaccagcacctttctgaagtgtctgtgttagaggcagttcagtgctcacacagcagcctgaaattcttagtcctcccacacatctccagtcaaggagcactgtccatgccccttcattgtccataaacacccaagctcttatttagaagcaattgatttctcaaatcttttcctatgtatttattcactaaacctgtcaagcaacacatttaagcatgacagagaaagaatatgggcatgtgttaggattccctagagaaacagaaccaatagggtgagtatatggagaggagaggtttagtttaaggaagtacctcatgcagttacggaggctggcaagtccaaaatctgcagggtaggccaggcaggctgaagactcagagaagagcctatactgcagttccagtccaaaagctgtctgctgcacagttccctcttac

SEQ ID NO: 434154 - DNA, 1946 bp, Homo Sapiens
  misc_feature (88)..(104): n is a, c, g, or t
  misc_feature (964)..(964): n is a, c, g, or t
aaacataagttgcatttattcacgtccacgccatctaaagctactgtgtacagtaatcaggactggagaagggacgatttagtatctnnnnnnnnnnnnnnnnncactgggacatgccccctgaattgcaagttggagttcgtaagaatctacttgctggcaagccggtttcctccctgagaagcacacttcccgcttccttctctccttccagcgtcttctgtcccttctagttaaggcctggacagtgtgggatggtgttgcaatctctcctgcagagctgtcagtcgcccgtgggctcgggctgcgtgcactcaggctcccggtcgctgggctctgcgctccgccgccgcagctcctccaccgtgtgcagcagggccgaccgctccagttctaaggtaagcatggcctgcttcagcttgctctcactgctcaggagcttctcaatggtggcctcaaggctttggatcctaccatttgccacctgcaactgttcaaggaggtcaaggttctgtttgcgtaagctgctgttggttttctctaatttatccattctttggttgtcactgaaaggagaggaatcgataagttcttcttgaaggacgtggtactcaacttcataagcttgtaactgtttagcgatgtccatttcaaatacctgattgatggtcttttccatctgtaccacgccaaggttgggtagcgtgctttttataaagtcaactctggctttctaggttttcatgctgcagaatcacgggcttatggcttcccaacagacttaccgccactttaaatatgacctctgttccctgaagaaaaatcatatcaaagactctggctacgaatcccagcgggaactgtgaggcaaacatggtgaggaaccaggggggcagcgtagaggctggggccgatctcgtgctcctccaggtgattgttgaggtctctgtggtaatcatgaagncacctcgagaggtggtacatctggatctgtaaaataatcatgtctggccgatactgtttccgcagccccatgtcaacatcagaaacttgagcattttaaacgcctcttcctcactcatatgaagaagcaaaatgcctgctacaaagctgagaccttggcaatatcccacttcctggtctagaagtgagtaggccttcaaaatgttgtaaagcgatagctgtcctgctccaagctgggcagagaagtatgggtgtgtaggaaaggttcgcccaaggtcaataagaatcgcatgctgctgggaagtcagctgctttaagagttctttgtatggcacatcctttggctgctgtttgctgggaaactggtgtttaaggtggaattgctcagctagaaatttccagatttcacctcggtgatgacgtggcacaccttgcccaacagccgagtgcattttttccatgtcaaacttaatttttgatcttcctggagtgctaagcatcttttcccacactgtagttacttctttaagacagggagtaatttcttcataatcgagcttcaggcgcttgttcagcaaatcattttcagaggcttggagcttctgattttccttctccattctaagcagcagtatctgttgaagaatagccttttgccacagctctcggagctcacgagatgtccttttcttttcctctggtggggggccaaagggcccatcttcacaaactggttctaaaggagatcgtgggggaagctctcccagctctgaataatcttcatatctgctggaagaatcgcacgccttctgcggggtggctactcggaggaatatctgctgcctccaggaatgcctccgggtcttcacaggagtcccaccagaatcaccaagatggtttgctttggattcaaagtccctttttgtgttcataaaatcagaggtgttattttcatctacaggagccagaaattttagaaaatt

SEQ ID NO: 434155 - DNA, 628 bp, Homo Sapiens
tcagaggcgagcaacatcctgagcacttccccatcgatgccagaacctccacaacctgcccgtggttccccggggttttcgcaaaggaaacttatgaggtatcacttagtgagcacagagacgcctcatgaacgaaatgtggatccttcacctgtgggtgagtctaagcaccgcccaggtcagtcttcagctcctgctcctccacctcgtcttaacccctccgcctcctcgccaaacttttttaagtacctaaaacataattccagtggagaacaaagtgggaatgctgtgccaaagagcatctcctaccgtaatgccctgcggaaaaaacttcattcttcttcctctgtgccaaattttctaaaatttctggctcctgtagatgaaaataacacctctgattttatgaacacaaaaagggactttgaatccaaagcaaaccatcttggtgattctggtgggactcctgtgaagacccggaggcattcctggaggcagcagatattcctccgagtagccaccccgcagaaggcgtgcgattcttccagcagctatgaagtctagcattcctagaggaacgtcatgcaccaggtaaattccgccatgttgcctcttaatgagctttgcg

SEQ ID NO: 434156 - DNA, 1929 bp, Homo Sapiens
  misc_feature (26)..(26): n is a, c, g, or t
tgcccatggaggaagtttggcctttnctttcggttctggccaggtaaaggatggcattgtccgctgtcccagctttgacttcggagtgcatcagggctggtacttagcaaaaagggcttttcctgtttgatgcctgctgcgggaggttggcttcagctccaggcttttcttgatccgtggcatccaggatcttgtacttgctttgcctcttgggttttccctttttgccacagttgctgtctccatccctcagctgcaccttgatgaaattctccatccaaaaagggtcacagatacagcgtttggtgaacgagtcacagtggccatggtcggaacagttcagctgacatgtgacagtgttgacttccaaggctctgaatatcaaaaagtctgccttttgcttccgcagctcactcttgagcatcgctgccacctcatggcctttgaagatctggtggggaggctcgttttgaacaaaaaataccattttggtgctctgctccgtgtacggctgaatcttttgcacaatgatgtcggaatccagcacccccaggaggaccccaatctggcggatgaacatccccttcagcctctcagttagctgactgacgttgatatccaagatgatctccaccaggttgtttttcctgggatcaggtttcacctccacagtggtccggtctgtgtcactctcaccctttgcatcggtcactttcaggtgaaaagtgtaggttccctcaaccaggtttgaaagaaaaaggatagggtgatggtcagagtgatttaacacctcccctgctgctgggctcccctcatctcgagtccagaggtagctgactattcccttgtcatctgaggacttagagccatccagctctgctgtgctcgtgggtagggtaatcaccacattcccagttatcttggctataggtggtttgtttatttcttctttgacaatgacattcacagagctctggctttgcaggttcctctcatctttgacagtcaaggtgaacacataggtccccacttgcagcccagtcacagtagcaacactgctgttagcattctcgagctgcaccccatcaggtccctgtgttttttcccagagatatgagataattttctgatcatctgagctcttgctgccatccagggttgtgctatccacaggaagggtcagctctttatctgggcctgcatctgcctgaggaggcttattgttttcaggttgcacaataacagtcacttgagcagtggcctgctgtcctattgtgtcagtcactgtgagctggtaagtgtagtctccttcttgcatcgcagagagctgtaaggttggtgttctaacaccctgcatctccaccactttccctttgctgcttgggctgagtgaccactcatagctggtgatgccatgatcatcagtgctctggttcccaaagagggtgatggagttttggggcagggtgatcacttggttggggcctgcgttggccacaggggggtaatccacagctttgttcactgtcaggtttgcagtagtagagttggtagctccatcagagtctactacagtcaagctgaaagtgtagttcccagggacgagtttacttagttttaatatggctgtatcttcagaaatcttctcttctcttagaggccccttaagttcttcccaatggtactgaacgattttatcatcatcagtgctttgactgccatcaatgactgtagaagtggttggcaaagagatctcctggaactgaggtgacacaatagcaatggggggccgattcttacggggctctggcttgactgtcacgttcacatagccttccccatgggcattttgaccctctacaatcactttgaattcatacaggcctggagtgagcttcgatagtttgaggatctgggaatgtttccctt

SEQ ID NO: 434157 - DNA, 653 bp, Homo Sapiens
  misc_feature (101)..(229): n is a, c, g, or t
agacaaagcttcactctgtctcccgggctggagtcagtggcaccatcatagctcactgtactcttgaccttttgggctcaagtgatccagtgatcctcctnnnnnnnnnnnnnnnnnnnnnnnnnnnnnnnnnnnnnnnnnnnnnnnnnnnnnnnnnnnnnnnnnnnnnnnnnnnnnnnnnnnnnnnnnnnnnnnnnnnnnnnnnnnnnnnnnnnnnnnnnnnnnnnnnaacaaaatcaatttaccatgtgggatccgggatccccatgtatgttttcaacccacattagaaatgaccccctaaagcacctctgtcaaaacaaccaaacctgaactcatccctctctgccctctgcccactcttgctgttcttccttgttttctacctctttattgtctcaaatagaaaatatgaaaatcattacattgtcctcccttcaaaaccagtttttaagcaagtctacttgatatcccccatatctgcccaattgtctcattactttaggctttcagggtggattaaagttactctgtttcacttggatgcttaaaacagtgtcaaagtggtcttcctgcctctactttgacctctccatctctggtttccacaccaaggacagagtggtctttttaaaatctaaatttagcccttg

SEQ ID NO: 434158 - DNA, 1290 bp, Homo Sapiens
tttatacgtgtttaatgagcacccatttgtgtaccaggcctcagtgctgactaaggccagagcccctgtgcctgaggttcacagtctgccaggagggagatccaaggtcatgttacacacctagggcttaaggtgctgaatccgcaatgcatgcgagtccggagtgagcaggggatggcagcacagcagcagggaagaggagcctgcttcagaacaccagggcacgattagagctacagtgttaacacacaaagggcgaatgcttgcagcctgagcctgggcaaggggcttgcatcccaccttcctgcatccgaaccttccagctgcccagaactgctggtaatcccacaggaaacatcattctttgccaagatgctatcccactcatcccccagaatcaaagtggccacttcctccaggcagccttcctcacattccagctgggacagaagtcacagggagcagagaggctggggctaggggtacagacacagttaccccatacaggaacgaggtcccaacagggcagacgtggcagacccagttcagtcccagccagtgtggaagacaccaaggggggtgttttatgggggtggacggtgacaaagatgatgcaactatctgctgagagttgatctacacaacgaccccctcgtgggagcaggcctgggtgagacggcactcccagaagacgggcagggatgcagcagagagccagcagcagggaaagggcacagggcggaggtcaagctctgctggagttgggggagctggttctgctcagcgcagagtcctatacaagcgcatcttgcccagctatggggtctgaagtcatctggggacaccactctgctctgactggggactatggggcgctcaagccacacaggccacttcatcatgaggggcagcattgttcccacctgggctgtgttcagaacccaggagaaagtggtggctctcctggggtctccggggcctccaccacctcctgtggggtacctaaggacacctcctggtctccctctgtctccaaaacctcctcctctgttttctggggttttggacctcctggatgagctgggtctggtctctgggcaggaggattagctgactccgacagtctagggacaggtgtgggggctgcctcctctggctgggaagaggctggttccacaggaccaggcttggagctacatgtagaactgggcaggactgggggctccttgggcccaggggtgctctccttggtcagctgctgctcgaacagagcacttctagatacagatt

SEQ ID NO: 434159 - DNA, 2034 bp, Homo Sapiens
ccaatttaaaatggtagaatttattttaatataatgatatatatgtgtccacatatactattttaaaaataagcatgtaaattataatcattataaaacataagttagtcctaatttaatattatcagagtaaaagagcacatatagaagtcagtctaactttgttgcacttgtcttttaaagttagaatacataaaagatttagcacgttgtattttatcttatttcagttttcatgttatcatcaactataaatacccttaggaatgtaccaccttataacttacattgaaatagccaatatttcttagtagttattaaagtaccattaaatcacctaaaacaaataatctaaaaaaatactagtttaaattaaaaccctgaggaattaaaatttgttttacacaatagttttggttaagtgcaatttcatgtacatactactttgtttaaggatgtacttggtaaggcatagtaaaaataaaatctacgtaagtaacaatctaatactatatttaatttgttgctacaaagttgttttgtttctctaaaaagtagtttttgcatatcattctggacctcttcacccatctgctggcttatttgctttatatacaacagttaaaatttgtgcactaagctgagctgccttcacaattgtggttcagacaaaatgcacccaaagaactacatgttaagagagttcatgtccatgctcaaccatggcttgcacaaattgcttgaagacacgatccatgtaagtggactgtcttggccagattccctccagaaaaccaatatggcctccataagaagtaaggaccaaagcaacattaggattttgcttagcagtttctattggaatagcatgactgggtgagaaaacatcatccacagaatttagacacaatactggaattcctactgacttcagtctaggactcggactggcatcagtataataatcatcaattgtttggtatccaaacatgactgaagtgaatcgcttatcaaactctctgatggatttagccttcatgacatgatccatatcaacttgttttacaaacatatgtcggtgcttattaactgaagactgaaggcaggttgtcaaatagtaattaaaaagtagccagttcagtggtttttccaatgactctgagcaagcgaaggtgttccaaccaacggaaaaagttgcagctgccatcaaaggcgttttggacccaattttgcccaagtaatttagaagcagcattcctcccattgaaacccctgctgccaggaaaggagcagaagggtacaggctgtgtacatggtgaataactgtctccaagtcttcagtgttagcacaacagtaagtccttggcgtcaagagattctcccccgccactcctctgttgttaaaaaccacacatctgtatcctaattcttcactaagatggatcatatgaaggatatatgactccttgcttgttcccgtgaggccaggcaacaataagatagtaggtctggtgctggcatccatataacacgtactgttatcattatcaaaccagtccagtgaaatctgtcctccatctgcagttttaataagttcattcctgtactgcaccgggggcttcgaagtgatgaaaggtctaagcagggtctgtcctcgaccctcccagcaccagaccgtcgggtagtacgtttctgtaaccacgggacagtggtcttgaaggaagcggctgaaactctcacccccggtcactaactggggtttcttggcaatgctgctcaggtagtagaaggcataagcgacgctgaagcccaggataagggataagcccacccccgagccgaagaaccccacccggacttggtgttccaggtagagggagagctcccgggacaacatccgcaggtccatggccaggcgctgcatggcccccgagcgcggcgcgcgggtcctgcggcgggaggagagccggctggcgagcgggcgagagcgggcgagagcggacgcggcgccgctgcctactcccgaccacagtg

SEQ ID NO: 434160 - DNA, 1144 bp, Homo Sapiens
tgggaccaaagagaggcggagcgcttaacccgcgggcctcaccgacgctgtcggcacatattcgtgtatgcagcacccgtaggaatgatcactgtctcccccaccggggttcacgggcgccctcacacccagggggagtggcgcgacagcaaaggctccgggggcaagtaaaaactgtggtggatgaacatcgcgagccggctgaatgaatggctggcattccacgcggaaagaagcctcctggtggtgttcttgctgggcctccccgaagccccccaagccccaaaccgttgccaacgttcctcccatctaagggcttgaccccattcagaggactgggactgcattgcttttctttaagattacggcatttgggtttcgtggtttgtttctttccttaatttcttattggtatttaccgggcacttgctttggtgcctgctataggttggtggtggggacaagagaacagggcacaagagacctgccctaaggcacctcacagcctagcaaatggtacttgaggaatcctcgactgactcccaacctgggcctccagggcttcttcactaatattttttctctaaaggataccaagttctgcacttccagacacactgcacttcttaagcaataaccaacaagttttcccacaagaaaaaaatatcctaaaggccttcacaaatatcactggcgtttgccatgcctaagagtcagcaggctaacccagaaggaacagaactcccccaaaagtcaaagcaagccggaaacagagttataagtgtagcggctaaggatgcaatcttgggccagatccttctcccctagcctcagctatctcatctataaaatgcggtaccactggcatcttcctcatagagttgttctggagagttcaagagatgaggcaggcaatgaagccagcgccgtgcctagagcctatatagtagttgctctggcggtgccagggctcggggaaggtgagcagcggacggggagaatgacataccaagagaatcacccaggcggtgtagtaggtgaagatgatcaggctaacggcgacgaggccgagtcccaccacctggtctgtccccgtggccatttccccgcgcgctcagccacccgagccgcaagccctgtgccg

SEQ ID NO: 434161 - DNA, 1355 bp, Homo Sapiens
  misc_feature (92)..(102): n is a, c, g, or t
  misc_feature (187)..(198): n is a, c, g, or t
agtattccattggtgggtgaagtgcccagggtgtggccttgttgcgagtggaaattggtttgtgcccattggagggggaaaggaagccctcnnnnnnnnnnnttctttgggttgccccttttaccggaagaccccgctcaggggcgccgagaaggtttccacccacctttccttccccatttttaannnnnnnnnnnncccccccttttcgggagggactctggggggccggcccattttgccttttttctataagaggaatgaccggcccatttgggggtgtcggtgggtttggtttcttttccctttaattttcttaatggttattttcccgggcccctttgctttgggtgcctgctaatagggttggtggtgggggccaagagaacagggcacaagagacctgccctaaggcacttcacagcttagcaaattggtacttgaggaatcctcgactgactcccaacctgggcctccagggcttcttcactaatattttttctctaaaggataccaagttctgcacttccagacacactgcacttcttaagcaataaccaacaagttttcccacaagaaaaaaatatcctaaaggccttcacaaatatcactggcgtttgccatgcctaagagtcagcaggctaacccagaaggaacagaactcccccaaaagtcaaagcaagccggaaacagagttataagtgtagcggctaaggatgcaatcttgggccagatccttctcccctagcctcagctatctcatctataaaatgcggtaccactggcatcttcctcatagagttgttctggagagttcaagagatgaggcaggcaatgaagccagcgccgtgcctagagcctatatagtagttgctctggcggtgccagggctcggggaaggtgagcagcggacggggagaatgacataccaagagaatcacccaggcggtgtagtaggtgaagatgatcaggctaacggcgacgaggccgagtcccaccacctggtctgtccccgtggcctggagaaaagggaggtctcagctgacgaagtgaccctctatttcggcgcactaatggaagcggggcgtcgcggcccgatcacggtctaagcttcccattcaacagatggtagagggctgactagggatcagtttctaggctgggagagaatgctaggcctccgcgttgtcgtccgtacaatagtgggggcgggagagcaatccccgttccaagtgcccatgccccagctcctgagcagacccgggaccccacccccagacgcccctatctccggcacacggtgccaatctcaccatttccccgcgtgatcgcaggaattccggaccggtaccagc

SEQ ID NO: 434162 - DNA, 1214 bp, Homo Sapiens
tttttgacaaacacaccatcagtgtttattggtcagctgtcccaaacgggccagccctggggttttggggctgggcctccgtgaggagaggtcagtcggtcagcggcccggggtggctgccctgagccccagggctggtcctggggtctgtcagtccttccccaggctttccaggtccagaaggctttgtggggtctggggctgtgtcagggtaaggaaagctgccttggtggaggaagagaagtcagagaggtcacacatgtggccttagaacctgctaagtccaacgtcagcatgtgacaggaggggaagtgaggcaagacggcagaacccaggggaaaaggtggcagggagtctgagagtgaggttgggaggaccagcatcttttaggccctgagcaagaaggaggtgaccggagtcttccaggtatccctccctcctagcttctggaagtgggagtcggggagggggctccagtcagtcaggtgtaagctccatgccatggggactctgcaggacaggcaggcttgaggagccactgtgcctggacaggttctgcaggctcccccacttggtccctgtgctggaggggaagcagagaaggggctggcagcctcatccctgcgggaccttcactgagccttcttggtcactctcttgctcttcagcatcacgtaggagatgaacagtcccacaaacaggagcagcaggaggcctgcagccagtgggatggcgacagcataggctcggggcaggaaatacttgtggatgacatgctgactgtcgatgaatggcaagagaatcacccaggcggtgtagtaggtgaagatgatcaggctaacggcgacgaggccgagtcccaccacctggtctgtccccgtggcctggagaaaagggaggtctcagctgacgaagtgaccctctatttcggcgcactaatggaagcggggcgtcgcggcccgatcacggtctaagcttcccattcaacagatggtagaaggctgactagggatcagtttctaggctgggagagaatgctaggcctccgcgttgtcgtccgtacaatagtgggggcgggagagcaatccccgttccaagtgcccatgccccagctcctgagcagacccgggaccccacccccagacgcccctatctccggcacacggtgccaatctcaccctcgtgccgaattcgccacccaggcctcgctacct

SEQ ID NO: 434163 - DNA, 719 bp, Homo Sapiens
  misc_feature (589)..(650): n is a, c, g, or t
cacccactccactctgacctcgtccatcgcctcaaggcaactctccaaggggacacactacacccgatttacaaaaaggagcctgaggctcaggggagaaattgtgtgcaaagatccaagctgggcacatggaccagtctggccctctcccaagctttcacccaggtgggaggctgatcccctccccacaagacctggcaggtgagaaaggggggacaaaacacccacattccgaccacattaaggtctggagtgggacccccaatcccatgtcttcagcatcccatctcacagacgcttctgcagatgcacatgtgcacagcagtgtacttacccccagagaatccaactgacttcccaccccaaacctgctccccacttaagtcttcccccaacagggtacaagctttgtgaggacaggatttgcatccgctgtgggcctcgcatcttctggctctagcagtgtctggcacacagtaggtgctcaatgaatgcttgcgaatgaatgagttaatatattattaaataaaaaccagcaatgtagaacaccgtgcatagtcactctctctctcgtggggagagtatgtcnnnnnnnnnnnnnnnnnnnnnnnnnnnnnnnnnnnnnnnnnnnnnnnnnnnnnnnnnnnnnntacatgtatgtatatgttgagcacgtgttcatgtgtgtatgcatgcatgtgggtgtgcacgtgcatgtt

SEQ ID NO: 434164 - DNA, 467 bp, Homo Sapiens
tctctcctgctgtctcacccctaagctcacccctgaccatacaccctctgcaggcgctatcttctctggcctcccactctcctcaggcacctctctcttccctgatcatgccccctctggagacccaatcttccctagccccaccctctctgcaggcacctcctgcttccctgaccacaccccctctggagaacctaccttctctagccccgcctcctctgcagacagcttctgctcccctgaccacaccccatctggagactccaccttgtccagccccatgccctctgcaagcaccaccttcgccattggccacgccccctccggagacgccctcttccatagccacgcctcctccacaggccccacctgctctggcctcaccccctttgcaaggcctgccctctccccctttgtctgctttggccacgcccccttcacaggccccaactgccctggccttgcct

SEQ ID NO: 434165 - DNA, 624 bp, Homo Sapiens
agtcaggttcataggatttactcagtaggttaagagatggtgctgagaatgaagtccagagtctgagtctacaagtggcatttgcttctcctttgggacttctgtggcagggtgtggaaccaaatcagattggttgcatatctgtttctcttcctgaaaatacaattcaaataccttcatagtctgtgacagcaacttataaccaacaggcaatggtattgtttttatttattgatggcactcccccatagccagaacttctattgagtcattcatcgtgtattccaggaatactttccaaatggagtagtgaggcacttccaataacagttatgtaatctgttaacagtggctcaaaatgacatgtgaaggaatgatgtacttcttttttcagactcacagatctcatatgttaattcagtcaacaagtacttagggcttatcacatgccaggcacaggtaatatgacaataatgaaaacaaaaacccttgctgtcatagaattcggtttctagtgggaagagacatacattaacaaatcatatataagtaaaacattaattatggtgataacagaaaaagaaagcaggggagagggatagtgtcttagttcaggttgctgta

SEQ ID NO: 434166 - DNA, 1599 bp, Homo Sapiens
gcaagaaagaaattgtttttattgcattgaggacttttccagaagcctggtggacccacgtctccctccagccccaaaggcagtgcaagcctctactgatcccccacttcaaggtgggtctcccctcctgcagggcccatggaggaggggtagggtgggctgtagggggcccagaagggaggccctggggacagagggagttcactcctgtttaagctggagaccagggagggcccagcctcacctctggacaacacagcaagtcagaggctggggtgtggcaggggctcagctgtcacctctggggtgtggcttcttcccggaaccgcaccagaggcccctggagcccagggagggaccacggagggcaggtgtaacccctggcctggagcacagctctcagagccctgaggctcccggggacagaaacaagtaacaaagtgagaccacgagagaaaaagaatccacagtttctacaaaaagccccaccctccccaagcaccctggtcagctggggaccgccttggccttcacccttttggggggtctgtggggggcagggctggtgggccgctcccgtttggggctggcgggctctgagccgttgtgctgggcgcagggctcctgcttggggccggcggggatagagccgttgatccgggtgggagattcctccttgggctccagcttgggggtgggcgggcggggcaggggtggcagcgccctctccagcacacgggggccgtcccaggcggggatctccagccccaggtgcttcatgagccgggtcatgacctcgtcaacgtagccatggatgcggaggtcagcatggcggtcgtgcttggtgggctgcaggttgacgatgaccaggcggcctccccggcgcttggtagccagcggcaggttcccgctgggccggatctgcagcgatgtacccagcgtgatggacaggtcggcgttcctgctggcctcatcggcgagtgccaggtcccggtcgggcagggagtcctcccagtctaggatggtgtccctcagctctcccctgcaggctcgcagcccccttgccttagccacggtgcagagccggcccgtggccttcaggcccatggtgcccacgactgtgtctcggacgtactgcgtcttacacttggcacattcttccacaaacatgttcccgtggagctctgccagtttgtccctggggaagcctgagcgcacatggagcccgtccacgttctggctgaccaggaagcggaggaggcccacgcgctccagctgcaccagcgccatgtgggtctgcgtgggccgcgcgctctcaaaggtggtgtcgaacttgggggccagacctcgctcctccatggtccagactccgtggggacccctgaagtcggggatgccagaggcagtgctgatgccggcacccgtgtggaacaccacattggaagactgccagaccagcctcgccagttcccacaccttccgctccagctcctccggggggtcgaagatctccgggaggccgcacttgcccttgtccgcgtacggcgacagccccgccgcgtaattcaccgacatcctcgactgccccacgggaacaat

SEQ ID NO: 434167 - DNA, 972 bp, Homo Sapiens
  misc_feature (426)..(426): n is a, c, g, or t
tgacgggtgagagtgcgactgaggcctcgggaggcgtcctggcggtgggttgggagacttaccgccccaggtctgggggaggagaggcgggaggcaaccttggcgtctgattggggccgcaacctgcaaggactacggtctgctccctggaatatggcccaaggcctccgctgtctgcagcgcgtccctgcttgcagcttctcctcctgcaaggcgcatttggtctccgccagctccagttcattctgcagcgtcaccaattgggctgcgagttgctgctccgtgctcttctggctctgcagttcccctccgtagtagaagagctgactcgacagctcctcccactgctcctgcagctgcctgctgtgctgctcctgcggacggggtcctggggcggtgccgacctctccgccggtcctacctcanccccgcccccttccgcccgccctgccccaccccacctgggtccagccccattctaggactcttcctcaccaagtcctccttgtggcgctccgcctcctccagtcttctgcgcacccgctccgcgcgctcccgcgccgcctcgcgcgcctccccttgcagaggctgcgctgcctggcttcgcctccgcagcaggctccgctcccgctcgctcaggtcctgcaggcgctggttgaggctctcgctctcggcctcgagcccgcgcatcagcttctctagctcctgcttccgctggcgaccatctcggttatccttctgcaactgcagcagcagctcctgcgtcgcggccatggctgtggagaccgagcctaaatgccgcccgcctcggggacccagcctgcggctggcaggcgtcacaatgggcggcagggagcgcctagcgggctggatcacaatgggcggcaggggaagcccgagcgtagcccgacacatgccccttctcacgccggccggaggcgggtcaggccggatcacacttagtccatcact

SEQ ID NO: 434168 - DNA, 1036 bp, Homo Sapiens
tttttatcccttgaggagtttattaggcgaccttggtctacactctcaggagaggagtgcaccagaaataaagccggtgccctggagtccacctggagccaggcgcggggcgctgcacttaggttggcagcagcccgttagcgcgcagctccagcagcggggacagcgtgtagcgcaggcggcgcagcgtcgtctccgaggtgaggctccagagccacgcggagacggcgccggggtccaacagcaccgtccagagcagcgacagccccaggaagaggagcggcagcgtcagcagcgcctgatggccagcgcgcgaggaccgccgaacagccgcgtctctcggtccgccctggccatctcctccatgagcgactcggtgctgtactgcactctgcgaagctgcccgtcacacctgcggggacaggcaatgcagttgggagcccagcccggcccggccccacagtgccccgccgcgcccgcaagcccaactcccttacagttcccggccactctgccaggcgtccagctcctccgcagcctccatcaccttgcacctgcacctcctggagcgggtgagagttcggactgaggcctcggggaggcgtcctggcggtgggttgggagaacttaccgccccaggtctgggggaggagaggcgggaggcaccttggcgtctgagtggggccgcacctgcaggactacggtctgctcctggaatatggcccaggcctccgctgtctgcagcgcgtcctgctgcagcttctcctcctgcaaggcgcatttggtctccgccagctccagttcattctgcagcgtcaccaattgggctgcgagttgctgctccgtgctcttctggctctgcagttcccctccgtagtagaagagctaggggcggggctcgtaaggacggggtttaccgggcttcaagtcctccttgtggcggtccgcctccttcagtcttctgcgcacccgctgcgcgcgctcccgcgccgcctcgcgcacctccccttgcagaagcagcgcttcctggcttcgc

SEQ ID NO: 434169 - DNA, 598 bp, Homo Sapiens
tggtgcgcaaagatgggcaggtagtgctcagccgacagctcctccaggagggccaccagctggcgctccatcccctcttcttgcagcttcaaggacaagggcttctggttcaaaagccgttgatactgaatcagccagtaattttcctgcctggtttcacttttggcttctaactccgtcaggatttcccggagctcttcctctcgctgctgcttctctttgagcagctgctgcaataactcagtttctattaacttaatctggctcctgatctgccgatgcatcaggtctttcttcacctggagtgcctcgaacgcagccttctgcatcgcgctctcctgcaggatctggctgatggctttgttctgatccatttgctgccacgacagaatctgctggaatcgttcatccatttcggccatgctggaacaggcctgctggaccaagttctgcctctgagattcgtaggccatctggatgagccggttcttacagctctcagtcagcatctgctgcatggcggaggcaacgtcacgtcgccgcaggctctcagtctcctcctgggttatggacatcaactgttccattcttttttttc

SEQ ID NO: 434170 - DNA, 1487 bp, Homo Sapiens
atggatcagaacaaagccatcagccagatcctgcaggagagcgcgatgcagaaggctgcgttcgaggcactccaggtgaagaaagacctgatgcatcggcagatcaggagccagattaagttaatagaaactgagttattgcagctgacacagctggagttaaagaggaagtccctggacacagagtcactccaggagatgatctcggagcagcgctgggccctcagctccctgctccagcagctgctcaaagagaagcagcagcgagaggaagagctccgggaaatcctgacggagttagaagccaaaagtgaaaccaggcaggaaaattactggctgattcagtatcaacggcttttgaaccagaagcccttgtccttgaagctgcaagaagaggggatggagcgccagctggtggccctcctggaggagctgtcggctgagcactacctgcccatctttgcgcaccaccgcctctcactggacctgctgagccaaatgagcccaggggacctggccaaggtgggcgtctcagaagctggcctgcagcacgagatcctccggagagtccaaggaactgctggatgcagccaggatccagccagagctgaaaccaccaatgggtgaggtcgtcacccctacggcccccccaggagcctcctgagtctgtgaggccatccgcttccccctgcagagctggaggtgcaggcctcagagtgtgtcgtgtgcctggaacgggaggcccagatgatcttcctcaactgtggccacgtctgctgctgccagcagtgctggcagccactgcgcacctgcccgctgtgccgccaggacatggcccagcgccgtccgcatctaccacagcagctgagtgcgtgcccgcccacctgggcttggtcttatgctcgtgtcttcggccactgtgagccccgggctcctgcgtcagcctttgtgccagccagactcgtatgaggctcccccgtgccctgtgccccttccccactgcccaggagcccccatgcctaagctccaagcatgtctgggccatggcagaggtgctcctgcatccatgacaccagccagtgctgaagtaggtcctgggggctggggctggagaggccgctgcaccaccacccgagcctgggagccagcgtcccagcctaatcacggatctgctgcctcccagctgtcttgactgaaggcccccgcccctgcaggagcttgggtcctcatctgggggccatgcacaggcccgtcccaccctgcatgtgggaagggagcaggagggcctggctgggtgaggggaggccttcctgggaaggcgtgtggtgcaggcctgtgctcacagtggcaccagcaaccctgggtctccctctctgctgctccccagaaccccggggccctcctgctctccacaactgtccctccttaccccatgtagctcgatccgaagcaggagtgtcaataaacctgtcttcagtgaaaaaaaa

SEQ ID NO: 434171 - DNA, 845 bp, Homo Sapiens
ggtggtccgtagggtgtccgaccttcaactcattggtgtttcagcctcttggcttgaatacttggctgcatccaccggttcctggactcttccggaggatctcgtgcttgcagcccagctttctgagacgcccaccttggccaggtccccctggggctcatttggctcagcaggtccagtgagagtcgttggtgcgcaaagatgggcaggtagtgctcagccgacagctcctccaggagggccaccagctggcgctccatcccctcttccaggatttcccggagctcttcctctcgctgctgcttctctttgagcagctgctggagcagggagctgagggcccagcgctgctccgagatcatctcctggagtgactctgtgtccagggacttcctctttaactccagctgtgtcagctgccaataactcagtttctattaacttaatctggctcctgatctgccgatgcatcaggtctttcttcacctggagtgcctcgaacgcagccttctgcatcgcgctctcctgcaggatctggctgatggctttgttctgatccatttgctgccacgacagaatctgctggaatcgttcatccatttcggccatgctggaacaggcctgctggaccaagttctgcctctgagattcgtaggccatctggatgagccggttcttacagctctcagtcagcatctgctgcatggcggaggcaacgtcacgtcgccgcaggctctcagtctcctcctgggttatggacatcaactgttccattcttattctttcattttccagcgatttcaaatctcggagcttttcttttgtctctgattgtcctgcagcag

SEQ ID NO: 434172 - DNA, 956 bp, Homo Sapiens
  misc_feature (825)..(825): n is a, c, g, or t
  misc_feature (918)..(918): n is a, c, g, or t
gaatattttgtgtaggcacagggttgccccagcactgtctatagcaaccccagtgtcctcacagtgcacgtgagccgtgacgcagccacggtggagtcggcgctgacgcggtgtggccacgtgccatgagctcgccaacgcagtgcggctatatggcgtgagcttactgtgaagtggagacaggcagggacacaggaaactacaaacgagaaatccagaaggaggagctggaactgatgggcatagccggccgcgagcccctccgagcacccctgggggtggagttctggctgtcatggcagagggtttcacatgctcaaaaagtaaatgaaccaggatgtgaggggaacacaacagaccatgccgacggagctcccgggcccaggccggggcctcttcccatcgcactctgacccgccgtcgggagtgcccaggcccgggtcgggcctgcctctccgctcgcaccgcactctgacccatcatgagtgtggggaagaccgtcgaccaaaggtgggaaagacaggaaagatactgtactctaagtagtaaatttgttttttgcgtggacgattctgaagctgtattctgagatggaaaaaactagaaatacatcgtggatgatgagagccaggtgtattgagctcctgcttttctaacgtacaaaggtaactggatagagaaacggagtgatcgccctcacctggccagggtgtgctccgagaccccagcaggtgccgaagccgcggatagtcccgaatcctgtccagggcgctgttttttcctgtacgtacctgtgatcaagtctgagatgtgacagcaaaactngacagaactttcgtgcttccctctttcaaaatgttcacagatggggcactgtgtttctttacccggagatctttaggcaacctcgggcatctnggctgttttttctttataagggtcagggatttttccac

SEQ ID NO: 434173 - DNA, 1559 bp, Homo Sapiens
  misc_feature (1413)..(1413): n is a, c, g, or t
  misc_feature (1422)..(1422): n is a, c, g, or t
  misc_feature (1425)..(1425): n is a, c, g, or t
  misc_feature (1452)..(1452): n is a, c, g, or t
  misc_feature (1471)..(1471): n is a, c, g, or t
  misc_feature (1500)..(1500): n is a, c, g, or t
gcagcggggccgacagaggtggctgatgccctgggagggggtgcggacccagaaaccaactcgaccagcaacagcagccactcagcctgggacctgggcagcgccttctttttctcagggaccatcatcaccaccatcggtgagggaggggattggcatgtggggggcggcaaggagcttcctcatgggggaaggtgcagggagacggaggggtcccaggtggcccctagacttcctgcatcgcccctctgcccaggctatggcaatgtggccctgcgcacagatgccgggcgcctcttctgcatcttttatgcgctggtggggattccgctgtttgggatcctactggcaggggtcggggaccggctgggctcctccctgcgccatggcatcggtcacattgaagccatcttcttggtgagctgctccatgccctgcctgcccttgtgctgggctccggctacccttccccatgtccctggcacatgagcgcgcccccaaagaccataagcctctcccacaggctcctgggggcgggagtggggagtatgggagtggggattgttggtgtctcctgggtcctgcctactgccccatcccgcagaagtggcacgtgccaccggagctagtaagagtgctgtcggcgatgcttttcctgctgatcggctgcctgctctttgtcctcacgcccacgttcgtgttctgctatatggaggactggagcaagctggaggccatctactttgtcatagtgacgcttaccaccgtgggctttggcgactatgtggccggcgcggacccccaggcaggactccccggcctatcagccgctggtgtggttctggatcctgctcggcctggcttacttcgcctcagtgctcaccaccatcgggaactggctgcgagtagtgtcccgccgcactcgggcagagatgggcggcctcacggctcaggctgccagttggactggcacagtgacagcgcgcgtgacccagcgagccgggcccgcctccccgccgccggagaaggagcagccactgctgcctccaccgccctttccagcgcagccgctgggcaggccccgatccccttcgccccccgagaaggctcagccgccttccccgcccacggcctcggccctggattatcccagcgagaacctggccttcatcgacgagtcctcggatacgcagagcgagcgcggctgcccgcttccccgcgctccgagaggtcgccgccgcccaaatccccccaggaagcccgtgcggccccgcggctccgggcgtccccgagacaaaggcgtgccggtgtaggggcaggatccctggccgggcctttcaagggcttcgtttctgctctccccggcattccttgcttttttgaccaaagagccttttttccacgagactgaantctggggangangctacagttgcctctccgcctccttcnttgccccggcccttccctnacttccatccatctctagacccccccaangctttctgtgtcgctgccccgggcggtgtatccctcacagcacctcccgactattcctc

SEQ ID NO: 434174 - DNA, 923 bp, Homo Sapiens
gctgaaggcaaccagtgctggtccttcgtgcggcggccgggccgggcgggccccggctcgctggtcaacgccgcgctgtcacatgtgcccagttccagcttggcagccctgaagccgtgagcgcgccccatctctggcccgagtgcggcgcgacacctactcgcagccagttcccgattggtggtgagcactgaggcgaagtaagccaggcccgagcaggatccagaaccacaccagcggctgatagcccggggagtcctgcctggggtccgcgccggccacatagtcgccaaagcccacggtggtaagcgtcacaagaagatggcttcaatgtgaccgatgccatggcgcagggaggagcccagccggtccccgacccctgccagtaggatcccagatcagcggaatccccaccagcgcataaaagatgcagaagaggcgcccggcatctgtgcgcagggccacattgccatagccgatggtggtgatgatggtccctgagaaaaagaaggcgctgcccaggtcccaggctgagtggctgctgttgctggtcgagttggtttctgggtccgcaccccctcccagggcatcagccacctccttgatgaggaggcccagctcctggtcgctcacacacggatgggccctcaggaacttctctcggacctcccccagctccctctgggcctgctgctcgtggggctgctccagggcccggaacaccagggcaccagacaccaagtaaagcaagaccagcgccagcagggccaggagcagtggtgctgcgcatggcgcgcccaggcgccgggccagctccactgcccgcctggaggggccgggcggggggctcactggggagctgtcgtcatgtcggcccacgctgcggctgcggctgaggcccgggttccagcacggcctcgccg

SEQ ID NO: 434175 - DNA, 1211 bp, Homo Sapiens
  misc_feature (244)..(323): n is a, c, g, or t
  misc_feature (377)..(386): n is a, c, g, or t
  misc_feature (496)..(506): n is a, c, g, or t
  misc_feature (530)..(539): n is a, c, g, or t
cgcccgggagcggagacgttcacgaggcgatgctacctcgttgggagtatatacgggggggtggtggtcatggcctgtgggttgagggcatcaccatgactaacgggggtactggttcggtggtagtgtactacgcgtacataatgcatgtcaacgtggtgtttatacactatagtgagagagaggatggagtgtggggggcgctttaggtgtgcggggggcgtgccggggcgaggagagatcnnnnnnnnnnnnnnnnnnnnnnnnnnnnnnnnnnnnnnnnnnnnnnnnnnnnnnnnnnnnnnnnnnnnnnnnnnnnnnnnagagtagttgggtaaggggggaagttctttggtgcagggagtgggcggggatcnnnnnnnnnntaggacgagcgcggttttgggtcgtgcggagctgggcggaggagaccgagttggaccagtgggcgtgcggagctggagcgctgtgtgcgggggcgactccattagctttnnnnnnnnnnncggagcgccggtcggtgcgtgacnnnnnnnnnncggaaggcgaggtcgggcggaggggcatgtaagaggcagaaggagcgcccggtcatctgtgcgcagggccacattgccatagccgatggtggtgatgatggtccctgagataaagaaggcgctgcgcatggtcccaggctgagtgttctgctgttgctgttcgatttggttttctggttccgcaccccctccccagggcatcagccaccttcttgatgaggaggcccagctcctggtcgctcacacacggatgggccctcaggaacttctctcggacctcccccagctccctctgggcctgctgctcgtgggtctgctccagggcccggaacaccagggcaccagacaccaagtaaagcaagaccagcggccagcagggccaggagcgtggtgctgcgcatggcgcgcccaggcgccgggccagctccactgcccgcctggaggggcacgggcggggggctcactggggagctgtcgtcacccacctgcactctccgcagacgccccggcatccccggcccccatgggcgtgccggccgcgccagggcttccagagcccacgcacacgtgtgtggacactagcagtgcacacagccagacagcagggccaccgcgcagcgcccgcagctcgctcccaccagcctccccccgcgtccgcacagcgacgcctcg

SEQ ID NO: 434176 - DNA, 977 bp, Homo Sapiens
gagggaacccagggttcccaatttcttttttcaacctaaaaatactttttagacctggcttttattccctctctgtttcgagcccttcggagaaaaactgcacagtaagctcccttgtgtctaatctctacagtgtctactccagtctcagccctttgtggcctattcaggaaggcgggaacaacctcttttacttttttatcaaatttcttctgtttcattttttctcggttttcctgtcggacttcctttgcttcttctaatgcttcttgactaccccaaacttcaagagacctcttcacaatctgtaactttaagtagagtttcatatcaccccattgtgaatgatgtggattcttcttcacaataaatttaagaggtggctctcttttttctaaatcacagtctttcagaagatattcttgttttgcctctgttttggttataagcttgtgtttatcatcagcatctctgcagttatcacaagttggcaaatcaaagtggttcataagataagaatccataaattctttcccacattcttcgcatattacataatcaaattccataacaggtcctggttgatgaacaacttttccaattttctgttcttcttcttcttcctcttctaaaatgaagcctcctcctgtgtcaattatctttggggctgcttttacattagccatgcctccagtagccgcagccgccgtcgccgagtagggccgggcagccagccgggcctggcgcagcatcagtgcccgctgccgcttccgctcgatactcgcccgcaccgaggcaggcagctccgcgggttgctctaaagccgccgcctccggcaaagccccgtcggccgccgccatctccggcccactccgaggacctagctcccagctccacgcacgcgcactgcacgccgaggcgagccagccgccctgcaccgcctctgcgctccccgcacccagcggcctttctgagtg

SEQ ID NO: 434177 - DNA, 869 bp, Homo Sapiens
taataaaaagctgttatattgcactgttggctgccaaacttatgaacaaataaagtgtttctatctttttcccaaagagtgtgaaagtaccctcactgtgaagatatgtgtacatataagtgatttaccaaagcactaaccttagatcatagttacatccttctttttatgctggtctatcttatactttgtaagctgctttctttctccacagataaataaaagaatgtcctaaatgttatctcttggattctggtgcctcatttcagcctatcaagataattttgagtatttattctaccaatcaatatactggctaaccctgcctattataaagcaacagagagcagcaacccctaagtacatcagccacaagttaaataatcattttccatatgcatggctgtttctttgaattgtttttttaatctactaggcaaaactgccaaactttatcacttttataaggataatgtactcactgattaaagtagttaatggcattatttagcatcactttgcatggaattatgcatgttactcaaaataaccaatctagatacttatttttgaaaaactcactttacctggttgatgaacaacttttccaattttctgttcttcttcttcttcctcttctaaaatgaagcctcctcctgtgtcaattatctttggggctgcttttacattagccatgcctccagtagccgcagccgccgtcgccgagtagggccgggcagccagccgggcctggcgcagcatcagtgcccgctgccgcttccgctcgatactcgcccgcaccgaggcaggcagctccgcgggttgctctaaagccgccgcctccggcaaagccccgtcggccgccgcca

SEQ ID NO: 434178 - DNA, 1309 bp, Homo Sapiens
tattaagcagcaaaggagggtggtaggggataggtaaaggatgaagccagtgccagagtgggtggtgggcatgatgggggctctccctaggctgctcccagcctggctgtgcaatgttggcaatttctgctcctcctgcctgctcccctccccatagagagaatggaaaggagaggagagaagagagctgaggtggccacgctggcgtggggctcagagggaggtgatgtcattgagtgcgttgtccagttcctcgctaatggccttgtacttcatcttctgggcatagacttcatcttctaggtcatcgatggttttctccaactttgccacagacctctcggcaaactctgctcgggtctcagcctccttcagcttctcctccaacagtttgatctcctcttcatatttatcttctttggtggaatcagttgtccgcctgggcctccagggatttcaagttgttggtaacaattttcagctcctcctctaggtccccacatttactctcggccacctcagccctctcctccgagcgctccagctctccttccaggatcaccagcttcctggccacctcttcatatttgcggtctgaatcctcagcgatgtgcttggcctccttcagctgcatctcctgcagttccatcttctcctcatccttcatggcccggttttcgatgaccttcattcctctctcgctctcatcagccgccttctcggcctcctccagcttctgcagggctgtagccaggcgctcctgggcccggtccagctcctcctcaaccagctgaatgcggcggttcagggaggccacatctgcctcagcatcagtggccttcttctcggcctgctccagtttctcctgggcctccttcacggattcagaatacttttccacctcatcctctgtccccttcagcttcttctggagggcctgctgctcctcctccagctgcttgcagcggtcctcagcttgcttcttgtcggcttcggcctgctcggcgcggtcgatggcgttctccttgtccagcttcagcatctgcatcttcttcttgatggcgtccatggctgcggtggggggtgggccggccggcaggcggtgaggaccggacggactgggctgggtgagcggactgggtgcaccggtggcaggcgaggaggacggagcgggactgggacgtcccggccacgcgggcgcctaaaaggcggggagggaccgggcggggccggcaaccaggaccctcccccacctcggcccaaaccttgtaggggcagaagcacggcccggccggggggtgcggccgcc

SEQ ID NO: 434179 - DNA, 1045 bp, Homo Sapiens
tagtatcatcagttttattgggttggggtggcaaccatagcctggctgggggtggggctggccctcacaggttgttgagttccagcagggtctggtccaaggtctggtgaatctcgacgttctcctccttggcactggccaaggtctcttctaggtcatcgatggttttctccaactttgccacagacctctcggcaaactctgctcgggtctcagcctccttcagcttctcctccaacagtttgatctcctcttcatatttatcttctttggtggaatactcctcctctgaggccatcagggacttgagggcctggtccatggttcgaagttcctcctccagctgtctggctcggctctcggccacctcagccctctcctccgagcgctccagctctccttccaggatcaccagcttcctggccacctcttcatatttgcggtctgaatcctcagcgatgtgcttggcctccttcagctgcatctcctgcagttccatcttctcctcatccttcatggcccggttttcgatgaccttcattcctctctcgctctcatcagccgccttctcggcctcctccagcttctgcagggctgtagccaggcgctcctgggcccggtccagctcctcctcaaccagctgaatgcggcggttcagggaggccacatctgcctcagcatcagtggccttcttctcggcctgctccagtttctcctgggcctccttcacggattcagaatacttttccacctcatcctctgtccccttcagcttcttctggagggcctgctgctcctcctccagctgcttgcagcggtcctcagcttgcttcttgtcggcttcggcctgctcggcgcggtcgatggcgttctccttgtccagcttcagcatctgcatcttcttcttgatggcgtccatggctgcggtggggggtgggccggccggcaggcggtgaggaccggacggactgggctgggtgagcggactgggtgcaccggtggcaggcgaggaggacgatcccaaaaattccagaccagtaccaga

SEQ ID NO: 434180 - DNA, 936 bp, Homo Sapiens
  misc_feature (50)..(85): n is a, c, g, or t
  misc_feature (135)..(280): n is a, c, g, or t
tgccgagccgaacgacgagcgcagcgagtagtgagcgaggaagcggccgnnnnnnnnnnnnnnnnnnnnnnnnnnnnnnnnnnnnagtcgacggtaccggacatatgcccgggaattcggccattacggccgggnnnnnnnnnnnnnnnnnnnnnnnnnnnnnnnnnnnnnnnnnnnnnnnnnnnnnnnnnnnnnnnnnnnnnnnnnnnnnnnnnnnnnnnnnnnnnnnnnnnnnnnnnnnnnnnnnnnnnnnnnnnnnnnnnnnnnnnnnnnnnnnnnncctaatattgggagaatgttgtgtaaggatggaaatctgtttatttttaaataagatagcactgatgtgaatcttattgggaaattacagatactgccattaagcgatgcttttatcttcattaattcattttggtaagcgcctatgcatttctgatggttaggtgccctaggtagtgttaagtatgtccgtgtcctcccttactcccctctcgctccctctaccctctatcccctagggttcttttattaatggaatttctccagttatagagaaaaaaatgaccatttgaaaactaaagctcatttatattaatactaaggtcctgtgggcctagtgcgttactcttcccagtgatacctagattttaagagtagagaacagaggaaacatgggatgagaggagagaggttttttagacaacatttgtagacacctcaaattatatcactgttctctagcgccaatattcccaggtaaattgaccattaaagcaatactcactgacctactagtttattttggtcagctgagtaccatcaggatatttaaccctttaagtgctgttttgggagtagaaaactaaagcaccaatacttcctcttgacagctttgattggaatggggttattagatcattcaccttggtcctacac

SEQ ID NO: 434181 - DNA, 558 bp, Homo Sapiens
  misc_feature (203)..(212): n is a, c, g, or t
ggaaggtaattttaaaataaaacaatttccaaaaaacatttgtcagccaaggtcatccataaaagtccccgtctggaactcattttctcagcacttctcatttttataatcatagtatttagccatattagcatatctttagaggaggcctggtggaatacccggggcctctactagtctgtttttccggtcataggaagacnnnnnnnnnnacgtatcaaagtatgtgtttacagatttacagagtgtgatccgtatgcatcaaagggatacagccccagactgtttctttaatggtcattcatgaactattaaaaatttcctgaatttctttttaaactacatctagatagcctaaacatctatgtagtcttccactagttaacatgtgtatagggctttcataataagtagtcacactgttacaaggtaaattttctattacaaaatccaaatttctattgcatacacttataatcatctattcataaagctaattcattgtacttgttaatgcatgaatgttccatgcagtaggagaataaagcactacagttc

SEQ ID NO: 434182 - DNA, 2206 bp, Homo Sapiens
  misc_feature (1301)..(1365): n is a, c, g, or t
  misc_feature (1947)..(1955): n is a, c, g, or t
ctcatccctccttggaggaagcagtatcaaatatttgagtttattcaaaagtccatccgtggattgctccatcttggtagtcatatataaatatgtaaaccatggaagtttagaaaattcacctagagtgttttagccgaaaagaacagataagtgattttgctgctatctgaatttcactgcatctaaagattcacatagaattgtataataaaaacacatccagatgcagttactcttacttacaagtagccagaacctcaatgtggcattaaaatttctttcatactctcaaaacaggttttactttatttttgattatttttgtgctttcttcaataagaccatatcaaaagtggaggcaagcataaattgcagacataaaataatcttctggtagaaacagttgtggagaacaggttgagtagagcaacaacaacaaaagcttatgcagtcaccttctttgtaaatgttaaatacaagtcctattctcctttgtccacgctgggtttagctagaggtagccaattacttctcttaaggtccatggcattgccaggattctataaaagccaagttaactgaagtaaatattctggggcccatcgcacctcccactaaggtactttgtcaccatgttgtatcttagaagtcatttttcactgtttgactcagaatttgggacttcagagtcaaacttcattgcttactccaaacccagtttaattccccacttttttaagtaggcttagctttgagtgatttttggctataaccgaaatgtaaatccaccttcaaacaacaaagtttgacaagactgaaatgttactgaaaacaatggtgccatatgctccaaagacatttccccaagataactgccaaagagtttttgaggaggacaatgatcatttattatgtaggagccttgatatctctgcaaaatagaattaatacagctcaaatggagtagtaaccaagcttttctgcccaggaagtaacaaacatcactacgaacatgagagtacaagaggaaactttcataatgcattttttcattcatacattcattcaataaacattagccaagctaatgttccaagcactgtgccaggtattaacaatataacaacaataaaagacacagtccttcctctcaaggtgttcagtctagtagggaagatgattattcattaaaatttttggtgcatcagaatcatgaggagcttgtcaaaaatgtaaattcctgcctatgttctcagatattctggttaggtcaggagtgggaacccaaaatcaattcnnnnnnnnnnnnnnnnnnnnnnnnnnnnnnnnnnnnnnnnnnnnnnnnnnnnnnnnnnnnnnnnnctatacatgtgattattgctgagagagggggatgcttggggtgtctttggatctctaaagagggatgcatcatcaagtctaaggaataaagagttagtctggttgagagagatagaggtgaggaaaggtagtccaggatagagtcaaaagtagggtggggaaattagatctttgtccccaggggcactaaaattttaaaaagaccccacaataaaatgaacagttttggagagccaagggacaaggcaaaggaaaattgttctactggaatggagggttgcattttctgtacttacagcattttcacactattcctttaatttaagaaaaatttctgttgtttactctgggcattaaaattgttaatcatgtttctgctgcaggcccagagaataacttgtgtgaatagttgtgtaaatagttaaacttggctaccttaatcaatgtgagggggaaagtggcaaaagattaagctgtgtaagcaaacagggacatgaaaacccagactctgtaaggagttgggaccttctactgggtgctaagggagccagtgaaaagtttgatgaaggggaaaaaaatcannnnnnnnngtttaagaatttggggatatgccctagggaagagacaaaggtgactgagaaatgaaggagaaatgaaggacatacattttaaagcactgttacgctgtattggagctgggagtaaggaaagagattaatatttatggcacacttaggaaatgtcaagcgctgagctaagacagtttacatatgctatcttttttaacctttgaaacagccttgtgaagtagacattattttacagaggaggaaacaggccc

SEQ ID NO: 434183 - DNA, 941 bp, Homo Sapiens
  misc_feature (594)..(613): n is a, c, g, or t
  misc_feature (911)..(911): n is a, c, g, or t
gctttattggagaaattttaaatacggcctccccctattggggggacccccgcccagaattttacccctttttttaccaagaaaagggggggtccagggaaaccaagttatgccccaggcgcccatttcattacgctttttctcccgcccccgggccatagattcccttgaggtatattttttgtgtttgggagtttttcctccatttggtatttatgggaatgtgtagtatgtgcaaggcactcacccatggcttgacagaccacattcaagtacaaagaatcattagagccattccaaatctaagtgtcagaacactttgaagcaggatgtagagtggtcagaatgacttgaggtaaagcagaaacactcaacaaccagtacattaaaaggtgattttaatttttgacattccttgggatgatattcctttaggaagaagtagactgtgttaaattcgcatccatggcactgcttcctgaggcagtaattcttcaaagcctttccttccgtgtcaatactttccacatttgtgcgtttgaatggatccatgtgtttagccattattttactaaacacaaaatcatttgcacnnnnnnnnnnnnnnnnnnnncctattaccatacttgtctggtcgtgcagaattttagcaccacagaagaggaaagatgtttggcctgagagggcctacactccagtctgtgtaacctaaaagcaacttaagcctgatttcgtcattttaagggtgctgatggtaagcaggagtcaggaagaatggtctaacaaaaaaggctggcccagctgtggttgccaagtctagttctgggagatcctgggcacggaactactgcgtggccactgctttcttcaagacacagaatttgcagggctcttttttttgcaatggacanccatctaagcccggtagggacccgccaccc

SEQ ID NO: 434184 - DNA, 1844 bp, Homo Sapiens
cttaccttcctctttcccattccttgaagctgtagaggctggaggccctttcctggccacccaacaaaaaaggacagctcctgctgccaaggaggcccatggggactgaggggaaagggctgcccctgtgaggggcagggaaggtggcggcagttctggacgcccacctccagcagacagcacttctgtgcctgcctacccctgggactgggggcatttgataagattctgcacacagacaggacatgcccagccttgcccctcagctccaagcaccggacccattcacattgctgagggcggccgaggcaggccccctccaggctcagcttccaacccacagcctcccgggtcgccacattgcccctcagcagggcttagtccagttcctggggtggggggcaggcagtgccctggcacagtgcccaggtcaggcccctggcctagctggacatccagtaactcacagaataaataggaaaaccgcctccccaccaaacttatgtccaaggcataatatgtccaggtctgagtcctgcacgccgaggagtcgtgctccattgcagaggactttgacaccccccaggggcgcataatcggatccttctgcctgcctggcccaccaagcttcccaagccccaacccccagcagccgtccatttgccaggctatgccacctgggtgggggtcaggagagagggctctgctcagccaaaggctatcccttgcacccaagtcagtttgatgtcatcatagatgctgggcgtcgggggtgccggtggctttggcttcttcttcttgttggaacctaggccggaggcagtccctaccaggctcagatgggatttctttttcttggttttccgtgactcagagctgttggtacctagaccccatccctgattttcactcgtcttggaggagcctgaatcagagggtgagaggtcagaggagccgtcccactgaagccggctgatcagggcctggctgtcagtcatgtcaaagctgtcattatccagggagctctcgacctctggaaggacagccgagggcccgagaaaataaatccgtacggttcgcctctgctcatctgtgtgctgtgggcagcgcagggaccttgtgcacatcttcttggtgtgttcagaaatcaccccacattgcgtggttagcaggctgcgaagctcctccggccccagggtctcatagctgatcccagttgaattgttatacttaaaaggatccgaattgctaagttccccatttttgtgttttaatgacttggatcttcgaggggaattggggttcttgtctgactttctcttcttggctttcttctccgagccataggaccagtcgttgtcattgatgtcatcattatcttcttggtcactctcaagacgttattcatattgttgctattggcaatccggcggttggcgattcggctgctgttccgacccattcccaggcacttctccagatggggagcaaagcgggaggcggcaatgctgcgactgcaattggggcaaacacactccttgctcttccactggttgaaaacctgtccaaagatgtccaagcccaggctggtccacgatctcaaaatccttcatgctatcagggtccgtgtcgtccaagaagaagtagcacacacttgacagcccggtgtacctcaaagcagaatcccaaacaagaatcctcgaccaggtccgcgtatatctcctgagcgatggcctctagtttgctgttatccaggccagacaaagacatttcctccattttcatttgtaaactcttgtggagacggcgctctgactgctcatagcacagcgggcggcaacacg

SEQ ID NO: 434185 - DNA, 1172 bp, Homo Sapiens
ttttggggttgttctccagtgttatttcttacccatagtttaaggagcgtttccctccctttcagtttttgcaattaaactacagtcctgcctaaggggtttctttggcctttttaggttttcaaggcgccaacttgggagttgcgctctccttggcccttcttgcaagcttccccttgaggtagtcccccagcccctggctgtagtgggtgctgatgtaggtggagttatcgaagtgcagtggggtctcccagtggagccgccggctgtgcaggctcacgtcctggtccactaccacgctgttgaggtattcggcgggctgcaggggccgcaccagctggctcttctctttgatgaggaagagggcgaattcctgcacttcctgaggctccgtgatacccatttgccggcacagctcctcctgcacttctgctgctactgtgaaagtctggatattcgtcctataatccacaccccccggcaggtgaataagaagcaggcgaatcgcttgtcctttcaggaaagccttcatttcacccggtgggggcatccgccggcgccccccatatttgactgtgcgctggaggtgctcctggctgctccgggccagctcttggctggggcctgaatcctgcagaaacttggtcaggtagggcatcagcctggtcgacggggggaagaagcctgtgagaaggctgaggaagctccagcctcgagtgcagtgttccggccgggggtgtcccgtgacctgcttgataacctggcagtaaatctcatccctcagcttctcctgctggcacagcttcagcagttcatagagcagatccatctcatccttgccccggggcttggactggtcacccataaaccgcatcagggccaggaagctggctacagccagcttgctcacatcatcactgaggctgaggagcgactcctggatgggagccttggtgtactgcaccaggctgtccgtgtcctttcctgcggcacctccatcagtctggcccagcaaggcctgggacctccggaagtaacgccgggcgaattcctgcatggtgtagctgtgggagtcgggcagaaaggcataggccacagaggacaggctggtggcctccgagtcgtcactgtgtgcctggctccaagggtgggcagggcgctgggatcacaag

SEQ ID NO: 434186 - DNA, 1691 bp, Homo Sapiens
  misc_feature (120)..(120): n is a, c, g, or t
  misc_feature (181)..(181): n is a, c, g, or t
taacagacatgagggatggcctgtctctctgggacagagcctcaaagatgatgtccatgttttgtgtgaatgaaactcaaacactcttcagtttttagagtcattttctggtatcgagcnaccacaccgaggagcacaccctgcttccaaggctgctgccttctgcacacagtgggggatnccacccaccctggctcccctcaagggctgcgtgcacagtgcccgctttccagtcacctgacccaccctgagtccctattccattttgctcggggctgacctcagacatgccctgtggctcagctctgccactactcagaacaccagcctcagcttccctatgtcccccagattcagcagcccagcagggattgggggaaatgctcccacatcaggtgggtggtggcctggtccctgcagactggactggcttttcagccatctccaggaagcaacacctagcagacaactgtcccttaaccccaagggtgatgcacacttctcccctggtctttcgtgccccccgatgcccctacatttacacagcagtgcgcagacccttgccgcaacctgcttgtcttgctgagccctgctgtaggagcgcctaaactgagtgcccgtctcccctccaaaggcagctggcttgaatcctgtgggaacgtgcccttcaccctttgccagcagttgctggggagtctttccggcccctttctcagactcaccacctacctccaacctgcgcagaacaatcagcgtcctgaccacttgctagagatggcttcaggccgaccactccatcctcactgcaggccttcattccttctggcttccatcactgcatggccccctaagaggtccccctcctggcccttgtcactgtgcctcatgacagccactacgccctaagcctttggaggccagggacaaagtctcgttcactgtcctttccgctgcatgagtgcagtgtctggccaggtgcacggggcactcagtgcctgtcagcccttggtaaacagtcctggacaacagggtcaaggacagagccctgggcggccacattcggtgcgtgctcctgtgttgtggcaaagctgccttttctgcgtttcatgtcagtgaaggaagacagggatgtggcagagccctgcgggttgctcccatcactcactcggtttgtgccatagtcctcctgttcccaggcggtcccagggcctgcccctgatgggctggaggcaccaccaaccccactcctctggcagtcacagctcagggaatgggcaagcagcaccaatgagaaaccagctgtgtggtggggtttccagagaagaggaaattccttctttcctggagagcgtgcagctgtaactcacagacgagacatccctgagctaccagcccgtggtcctgtactagtcctggcaaaggttccggtaactgcagcaacagatacctcctgcccctcctgcacagctgtggtcgatcgcaggacagccgcaggtgatgaaaaaccgtgaacccaggacgggcagggcgtgagaccgcctttcgagacgcgagcttccgcgatccggggtctctgtgcgaacgtgggcatcttggaagagtcccagccccgctcggggcgcacaggcaggcgctctcagcacggcacccgcgcctccgctagggacagacatcccgggaattccggaccg

SEQ ID NO: 434187 - DNA, 1056 bp, Homo Sapiens
  misc_feature (80)..(126): n is a, c, g, or t
  misc_feature (129)..(129): n is a, c, g, or t
  misc_feature (306)..(306): n is a, c, g, or t
ggggtcgcccaaggggttggtcaacaaggacaccccccgggttctgcggaaaaggtttccgtttttttaaaaaggcctcnnnnnnnnnnnnnnnnnnnnnnnnnnnnnnnnnnnnnnnnnnnnnnnaanggagccccccattggttggacacctgggcgcggggcagggttcagaggtttccgtttgggcctcccccctgggatgagacgcgcatgccccggtgtccccccggccgccggtcggcgtcgtgtcttcaggtccttatcgactccagactttggggatgcgtattaacgccagactcntgcaaagtcttgctttcaacactcaagcccctggggagagacgggtggagggatgactggaaacgtggcctcgacgtccctacagagcccctccagcgtggggaggcctaagtacctcaaggttcaggcccacggaaggagtcgggggagcgaggcccggtgatctacgtgtgaaggagcttggacaggacctcacaaacgccagggagacggcgagggggttcgtgcgtttgtaacgtcttgacatcgctgatcctcccgcaggcggtctcacgccctgcccgtcctgggttcacggtttttcatcacctgcggctgtcctgcgatcgaccacagctgtgcaggaggggcaggaggtatctgttgctgcagttaccggaacctttgccaggactagtacaggaccacgggctggtagctcagggatgtctcgtctgtgagttacagctgcacgctctccaggaaagaaggaatttcctcttctctggaaaccccaccacacagctggtttctcattggtgctgcttgcccattccctgagctgtgactgccagaggagtggggttggtggtgcctccagcccatcaggggcaggccctgggaccgcctgggaacaggaggactatggcacaaaccgagtgagtgatgggagcaacccgcagggctctgccacatccctgtcttccttcactgacatgaaacgcagaaaaggcagctttgccacaacacaatcccgggaattccggaccc

SEQ ID NO: 434188 - DNA, 1182 bp, Homo Sapiens
  misc_feature (168)..(168): n is a, c, g, or t
  misc_feature (264)..(264): n is a, c, g, or t
  misc_feature (355)..(355): n is a, c, g, or t
  misc_feature (395)..(395): n is a, c, g, or t
tggaccaaccggggttcaagggaaagagccccttgggcgggccaccaatccggtggggggttcccggggtgggggccaaaaactgcctttttctggggtttcatgtcacgggaaggaaggccagggaatgtggcagaacccctgcgggttggcttcccatcattcaantggggttggtgccatagtccttcctggttccccgggcggtccccaggggcctggcccctgatggggctggagggcaccaccaacccccaattcctntggcagtcacagctcagggaatggccaagcagcaccaatgagaaaccagctgtgtggtggggtttccagagaagaggaaattccttctttnctggagagcgtgcagctgtaactcacagacgagacatccntgagctaccagcccgtggtcctgtactagtcctggcaaaggttccggtaacctgcagcaaccagatacctccctgcccctcttgcacagctgtggtcgatcgcaggacagccgcaggtgatgaaaaaccgtgaactcaggacgggcagggcgtgagaccgcctgcgggaggatcagcgatgtcaagacgttacaaacgcacgaaccccctcgccgtctccctggcgtttgtgaggtcctgtccaagctccttcacacgtagatcaccgggcctcgctcccccgactccttccgtgggcctgaaccttgaggtacttaggcctccccacgctggaggggctctgtagggacgtcgaggccacgtttccagtcatccctccacccgtctctccccaggggctgagtgttgaaggcaagactttgcaggagtctggcgttaatacgcatccccaaagtctggagtcgataaggactgaagacacgacgccgacggcggccgggggacaccgggcatgcgcgtctcatccagggggaggccgagcggagcctctgaccctgccccgcgcccagggttcagcagtgggggtcgtcccgccccagatcccaccgagatggccccccttgacccacaggcctttcgagacgcgagcttccgcgatccggggtctctgtgcgaacgtgggcatcttggaagagtcccagccccgctcggggcgcacaggcaggcgctctcagcacggcacccgcgcctccgctagggacagacatgatcccgggaattccggacc

SEQ ID NO: 434189 - DNA, 1138 bp, Homo Sapiens
ccccgagttgtgggggggcccgtaagaatggaagtagcgttctctcctacgcaaaagaggccagcggggctttagatacccgggggagaaggggcccgttaaacgcctgtggacagcacattgcgtagaaaagtttttacggggccctttttttaaagagtgcaccactttacctccaaaacctggggcagaaccattcagggtccctgaccccttggtagagaatggtttcaggggggacccattccatccttcagtgcaggctttcattctttttggctcccatcactgcatggccccctaagaggtccccctcctggccccttgtcactgtgcctcatgacagccactacgcccttaagcctttggaggccagggacaaagtctcgttcactgtcctttccgctgcatgagtgcagtgtctggccaggtgcacggggcactcagtgcctgtcagcccttggtaaacagtcctggacaacagggtcaaggacagagccctgggcggccacattcggtgcgtgctcctgtgttgtggcaaagctgccttttctgcgtttcatgtcagtgaaggaagacagggatgtggcagagccctgcgggttgctcccatcactcactcggtttgtgccatagtcctcctgttcccaggcggtcccagggcctgcccctgatgggctggaggcaccaccaacctcccactcctctggcagtcacagctcagggaatgggcaagcagcaccaatgagaaaccagctgtgtggtggggtttccagagaagaggaaattccttctttcctggagagcgtgcagctgtaactcacagacgagacatccctgagctaccagcccgtggtcctgtactagtcctggcaaaggttccggtaactgcagcaacagatacctcctgcccctcctgcacagctgtggtcgatcgcaggacagccgcaggtgatgaaaaaccgtgaacccaggacgggcagggcgtgagaccgcaggcctttcgagacgcgagcttccgcgatccggggtctctgtgcgaacgtgggcatcttggaagagtcccagccccgctcggggcgcacaggcaggcgctctcagcacggcacccgcctcgtgccgaattcgccacccaggc

SEQ ID NO: 434190 - DNA, 1192 bp, Homo Sapiens
  misc_feature (16)..(16): n is a, c, g, or t
  misc_feature (42)..(42): n is a, c, g, or t
  misc_feature (146)..(146): n is a, c, g, or t
  misc_feature (1112)..(1143): n is a, c, g, or t
ccccccgacccaaccnaccccacctgatgtgggaaacaattnccccccccaatccctgctgggctgactgaaatcctgggggaaccataagggaaacctgaggctggtgtttcctgaagtagtggcagagctgaagcccacagggncatgtcctgaggtcagcccccgagcaaaatggaatagggactcagggtgggtcaggtaactggaaagcgggcactgtgcacgcagcccttgaggggagcccagggtgggtggggatcccccactgtgtgcagaaggcagcagccttggaagcagggtgtgctcctcggtgtggtcgctcgataccagaaaatgactctaaaaactgaagagtgtttgagtttcattcacacaaaacatggacatcatctgtgaggctctgtcccagagagacagggccatccctcatgtctgttattgggttgtagataaacaaaagtataaatcaaacaaactgcaaattactctgtctcttttcctaatcaatacagcaacagtcctcagtggtactgcaccactctggaaaaaatgccttcaggttccttcccatcccccaaggcagcagcaaatccttcgtgtcgcctcctactggccaaggcagccaaagatttgaaagtctttggctcgtagatggccagatccgctaggactttcctgttgagctccacctggcacttaactaaattcccaatgagcgctggatacttcagtccatgttcctggctagcagctgtaattcgattaatccagagggtcctcatgttctttttcttcaggtatcgggctttggtgcatttcacaaaggctcgaatcacggttctgaccgccaacctgtagcagcgatttttccttccccggaagtgcctggcgtgcttcagcacctcctggatccgaaagtagcggtcggtgacgcgattccgcagccagagctgcgcggtgaggaagaccatggcgcctgcaggccggcgtcccgaacactcaacaacgcacgcgcagcgccgctgccatcttgcccgggtcggaaatggtggtcacgagcgcttccgctctcgacgaattcgagctcggccgatttggcctgatccatnnnnnnnnnnnnnnnnnnnnnnnnnnnnnnnncgccgccaccgcgtgacctccggtgtccccatatagtcaaccccgttca

SEQ ID NO: 434191 - DNA, 958 bp, Homo Sapiens
  misc_feature (671)..(729): n is a, c, g, or t
aaaaagtatctccctttatttcaaatatgcttttaaaatatttattgagcagagaaaaaggaagggagctaaaaagatgaaatagatgttgagttaacagctttcttccaagttctggtggacttcagactttaaatgtgtggctcaaacttcaattctccagctggccctgatggaggaattccttgttgtaatttttttgttccatctgctgtatgacctgatgatattccagcttctgagcctccagttgatcatgctgacgttgtagctcttctttttgtttctgaagctcatctgccttcttcttaagttcattttcttgtaaagcaataatattttcatattcttttagttcttcctctgtgaagaactgttgctgatctaatgtctcattcattacatgttccctcattctaagcctttcttcttccatttctaccatatcatcctcttcatttttagggtcatatactttctccaactctttagtaaatagggcttctaattcttgttcatccaggaatccatcactattgacatcatgtaatttgaaaaatgtcttggggtcaaagtcattaggatccaatccatcagtctcttcccatacctcttttagttgatctttgcttcctgggtgattaactttagggtgattttcatgctttttnnnnnnnnnnnnnnnnnnnnnnnnnnnnnnnnnnnnnnnnnnnnnnnnnnnnnnnnnnnaatattctctcctttcatgttccttcatcatttcatattttttaaattcttcatgacgagtcttgtcatagtgttccagatcacttgttgccgctttgattagcatatctaaatctgtggattcaaacttgtcaggattcaggtggtttaggtgatcagattgttttagaagagcttggtggtccatgcctatatcttgaagggaatccaacttagctttaattaacat

SEQ ID NO: 434192 - DNA, 2251 bp, Homo Sapiens
tttttgaaaggaaagtataatttatatgtacaaccaataaacctgatacagaagaggggatcaggacagaccaggagtgggtgtgaagagagactgggaaaggggcagcaagaaagtgaaggggcagcaaagaggaagtggggggttcgccatgcaaactgccactctccccggcccctcctgggaggggggatgtgcccacatttccctagcctgccctccactattttgctctggtcccaacgacaaggtagctcccaagaccctgactaggtcccctgcctgacttatacaaatttagtctgtatccaggccttgaggagggagggtagtagaagtcttccaggaacctgagccccagagctgggcttccaccacatctggcccattgtattctctcccacccttctaggttacctgggtccctagaacaggttggggagctcctctttggcttgagggagtatcacccaaccattactctttttgtaggggtggtccttggtccctagggaggggggaacattcccaacacaagatgccggtacacaggaggtaactgagccagtgaacggcacctttattctgaggctgaacagcagttgacttcctccctcataactgctccaccctccacgtggggagaggtaggggacggtaacatgcagccacccctcctcgtcccttcctccctcccagggctcattttcatccctctctaaagtccccctcctctcttcaaagctctcttccccacaaaagttcctaaaggccaggcaaggctgattctccacttccacatgagacagagctgattctgcagggaaacggctggggaggctccacctctttcctccccacaaccatttactgggaagttgtgtatacttggcagtgtgggaggaaggtacttggaagaccctgccagccatctcccacccagacttcttctcaccagcacagtcttcaaggcttggtgggaaaggtgtgtgggagtggagaaagacaaagggcccgttcttgaagagaggagctgcagagaggggcaaaggggttcctagcccagtgatggcccaaggggtggggaaggtggagggctggcagcaggccccagcgcttgagctgggggtcggcctcggggacggggcctgggtgaagggcaggcctgggatccagtcagtcgtctatacagatcacctccccggctcggggctccttccgatccagcccgtctgacaccaatgcccccaccatttccttctccttcttcacaagcactggagggccgttggtgtcggctgtgatgtaaggaccctgcaggcatctggctgtaattggcgcctgcggcggccagggccccttacgggttgcggcgctgaaggccgccccggtaccccggaggtgtagcgtagggacccggcgggtaggccggtgtggggtgaggctccgtgcccttgctggccagccggctgaggatgctgcgctcggacatctgaaggcgggctgcgatggggggtattcgggacagcgtggctggcaggcgggtcacgtccgccttcatgtcgctcagcaactcctccagctggttcagaagcagcgttgtgggccctcccccgcgcggggccgccgcggcccttacccttgtgcaggacggcgttggccggcttgttccccgccagcgactccttggagaggtgctggtggctctcggccaggcactcggcctcggcgaagcgggcgtggagggccatggcggggtgcgccggctcctgcgacaggttcaggtaggccgcccgccgcagctgctcctcaatcaccagcgcctgctccaggagcttgaacctccgggccaggaacttatttttcatctccagaaagttccccttattggcttcagttttaaatggctcgttgataatggcaaattgagcatcattctggatgtcctgccaccgtgcatagccatggaggacaatcccagccagaagccaatagtcatgtcttctgtgccagatctcattgagtttccccgaggaaatagctgcccgttcctcattctgccacagtgtgtgaagctctgtgaagccaccatcggcgatattgaacatgaaccggggcttctctgtcttttcctctcgtcgcccattggaccgtggctcatctcgaggccctggtcgaagctcccggtcaccttttacatcttctgctctcttgcctcgtgccgaattcgccacccaggcctcgctaccta

SEQ ID NO: 434193 - DNA, 2731 bp, Homo Sapiens
  misc_feature (889)..(889): n is a, c, g, or t
  misc_feature (1259)..(1259): n is a, c, g, or t
tgttggaaaagggtgtgtgggaagtggagaaagaccaaagggccgcttcttggaaggaggaggaacctgccagaggaaggggccaaaaggggttccctaggcccacagtgaatgggcccccaaaggggttgggggaaaaggttggaagggcctgggcccagcaacgggccccacagcgctttgaacttgggggttggccctcgggggacgggggccttgggtgaaagggcacaggacctggggatccaagtccagttccgttctaataccagggtccaccttcccccggcttcggggccttcccttcccggattacagcgcccgtctttgaccaagccataggcccccccgaccagttccgttcgtccctccttccaccagccacctgggagaggccccgtttggttggccctgcttgtgggaatgggaagggagaccttgccaagccattcttggccgtgaaaatggcggcgcctccggccggcccaggcccccttaacgggttcggcgttgaggcccgcccccgtaaccccggaaggtgtaagcgtagggaacccgcggggttagcccgttgtgggtgaggctccgtgcccttgctggccagccggctgaggatgctgcgctcggacatctgaaggcgggctgcgatggggggtattcgggacagcgtggttggcaggcgggtcacgtccgcgttcatgtcgctcagcaactcttccagttggttcagaaccttgtgcaggacggcgttggccggcttgttccccgccagcgactccttggagaggtgctggtggctctcggccaggcactcggcctcggcgaaagcgggcgtggaagggccatggcggggtgcgccggctcttgcgacaggttcaggtaggccgcnccgccgcagctgctcctcaatcaccagcgcttgctccaggagcttgaacctccgggccaggaacttatttttcatctccagaacagttccccttattggcttcagttttaaatggctcgttgataatggcaaattgagcatcattctggatgtcctgccaccgtgcatagccatggaggacaattccagccagaagccaatagtcattttttctgtgccagatctcattgagtttccccgaggaaatagctgcccgttcttcatttggcccagtgttgaagctctgtgaagccaccatcgccgatatgaacatgaaccgggggttctctgtcttttcctctcgtcgcccattggccggtggctcatctcnaggccctggtcgaagctcccggtcaccttttacatcttctctcttgcccaaatcccctgtttccccctccggcctctccctgtgttcctgtccatccaacggcttctcctcccccctttctcctggcgtcgactctgtggctgacttctctctgtccccacggtacccaggttcaggctccatctctccaggcacccctggcacctcatcctctagaggaatcttccttggctccagccgctccccaagtgatggggctgggctgggggcatcagcctctgtctccatcttctccccaattctgctgttcttctctggcttttcctcctggttttcagcttcctccttctcaagaggtgtccttatgccttctcctttctcacttggagctggagtagcaggtttagaggtgcagggactgttggtagcagaagcctcaggagtggtgggagacgttttggtaggagaggaggctctggaggagcgcttagaatcggcgctggggtcaggcatcagttccggcattgaccaacgcccattgatgtgctcaaactcctgcaccttctttttgacgagagacatgactccaatgcgggtcaacacctgctggcgactcagtccctcccgagggaccccatcggcaaaggtttcagagccgtctgccccaggctcacacagatggcgcatgaacaaagacacataggccttaaactccttctcagtcttgcccctcaggtcccgcaccagccactgtgtggtgaaggcatcctgtggtggcatcccccagcgcatcacagcattgaggaaagccttccgctgacgggtgttgaagcccagcacctcaatgttgcccccgactcgggccagcagtggaggcagtggcttatctttctcattccggagctgcctctttgactgtctacgcccttcaggacgttcatcgaagtcttcatcctcctcctctgaacccaccgagtactctgactggttgtcttggtcttcctgagcagcatcattgtagttaacttgcttgcgaacccgcttgcccttgcctagattccgggctaggtcttcctgctgttgctcatagtgatgcctcagcagcttctcccagtagtcagggtccacattctcctcctgcttgatgatctctcgctcaatttcctcaatcttgtcttcttcccgcacgacgtactgtgccaccttgaaggagctgagatactcattcatgttctgcacgtcagtgtcctcagttgcatcctggttccggtccaacagccgagcgatggcctcattgtcataatgaatcacactgctgtcctcctccttgttctccccctcgttttcatccttgaatagctcttcagtgccaaatttgagaatgtcgtcaagctcctgcttggacatggagcctgccttggagcccagcccaggccgcacaaccaggtggtcagacaaaggggccgagccga

SEQ ID NO: 434194 - DNA, 649 bp, Homo Sapiens
caaaaaccaaggggctgccaggtgccgaggcgtgcagccacccgtgggacacggtcatccaggcggccatgcgcaagtacccgaacccgatgaacccgagcgtgctgggcgtggatgtgctacagcgccgcgtggacggccgcggccgcctgcacagcttgcgcctgctcagcaccgagtgggggctgcccagcctcgtgagagcgattttgggaaccagtaggacattgacatacatccgagaacattctgtggtggatccagtggaaaagaaaatggaactttgttctaccaatatcacactcacaaatttggtgtcagttaatgagaggttggtgtacacacctcatccagagaacccagaaatgaccgtgctcacacaagaagccatcatcactgtgaaggggattagccttggtagttatttggaaagtttaatggccaatacgatatcatccaatgcaaagaaggggtgggctgctatcgagtggataattgaacactctgaaagcgctgtgagctaaggaggcctgtgcctgtgcttgtcataaatggtgatgcttcccagaagataggaaagaaggaggtgaggagaggacgagcaaggacgggacggaagagcacgtctggctgcgagggtacacagggc

SEQ ID NO: 434195 - DNA, 748 bp, Homo Sapiens
gggtcacctcagggagagaaggggctgggccacccgcggcaggcaggacgatggcgccgcccctaagggcctcgagccctccatccacgcagacggcggcggtggggctggctggggctgctccctgttgcacgctcatgaggggagggacatctggtcccggggtcacctgcgacccgcgatcagtccagcctaatcctcctccccggccctgtgtgccctcgcagccagacgtgctcttccgtcccgtccttgctcgtcctctcctcacctccgttcgtttcctttcttctgggaagcatcaccatttatgacaagcacaggcacaggcctccttagctcacagcgctttcagagtgttcaattatccactcgatagcagcccaccccttctttgcattggatgatatcgtattggccattaaactttccaaataactaccaaggctaatccccttcacagtgatgatggcttcttgtgtgagcacggtcatttctgggttctctggatgaggtgtgtacaccaacctctcattaactgacaccaaatttgtgagtgtgatattggtagaacaaagttccattttcttttccactggatccaccacagaatgttctcggatgtatgtcaatgtcctactggttcccaaaatccaaacacgtgctccgagctccagatcttcattgccgccggcgcagggcgcgggctctgcgatccgggccgggtgcttcggccgcgcggctccgg

SEQ ID NO: 434196 - DNA, 2252 bp, Homo Sapiens
  misc_feature (1307)..(1321): n is a, c, g, or t
  misc_feature (1450)..(1450): n is a, c, g, or t
acagcacaagtcaccactttatttctaagagaaaacctgcattttcacacacatggactcaggggtttcgaacacacggtttgtacatctgcccgcttaggttgctctgcaaaatgaggaagaagccgcatcgtgctcacaaataatacacattccacatagcagcacagccttttgggcatctttggagttttagacggagcttctggagtcacagagccattcccaacccaggcctggcatggtccctgcccttgcatcagagtggcctgggaggtacacacatctttacaggcccagaaacgccaaaggctgggaggctcttgttctctggtgaatccggattcaagacaggcttcgcaaaagcagctcttgggccgagctccaggcctagccctgaggacccctggcctcctggcgcccctccagagtctcacgcttctccaggcactggggggtggggaagggtggcctcagggacataaggaccagggagcgtgtgatggagagatttctcactgttcttctgagggggtgcagcctctctgaaggtcactgtggagggcgcaccaaggcctggagagccttggggagagatcaggccccacagacctggaagctctgccccagtatcccccagcctgggcggccgggctgtgctccctgaggaccttactggcagcaccctgccctgctgaccctggaagcagctgattgaggggcctgggaagaccccatggcctccatgcaggtctcagaatgactcctgtagtggctaggactagggcactggccgcaccctcaggcccaggtgggaagtgtgggctgggggtaaacccagcaactcaggactagcagcagccatcaggggctgtggtgcaggagcagccaccagggcagcaccaggaggcaaaggccctgagggagatgagctggtgccgtcccctcccaattccgctcagatgggcaccctcgccttcctgggacataaacccctggggctcatgtggtggggagcaatttggcagcagacggactaatatcaacgtctccagtgacccagggcccagtccctgccctgaaggctgctcagcccctccagcccccgtcccgcctcgcaacgcctcctctgcgccagggccagggcctctccccctagtggagcgactgtccactggctttcaaaggcggcactcctcagctgtcacagccgcagtgacagccttggggaggctgagggggctctgtcaaccaggggacactagtggggacaggtgtgtagctcctggctgcagggcctcctccannnnnnnnnnnnnnngcccattcagggctataaatactcacggacgcaaatggtaaatgctcccagacatttatcataaattacaggtggatgattgtgagtcttcaggccatgaggcctcttggggactatttcagttctttnaaaaaaaagaagacacgaagctgatggggcaggagggccgttcagcctggcttctgactggaagctcgctgggtgcagcagactggcctgggagatgccagggtgctgggtgggttggaggctgggccagggagcaccgtgaccagtggtggtcacagaggacgtgaacgatgacgtgggcccaggtcggaagcagccagagccagatgaagggcacctggccccttccgcgaggttggagcattatgccaggaacaggtgttccctgtacacttttttaagtgagtaaagagaacagtgattttcaaacaatggtgtgtcgggtggggcggctcttccatgcacctgtcccctgcctctgcatgagcccagcagaaaatcctagctggaaggccgtggggcttggggccagcactgtgcaaaggatgggtgagcacgctgtccctcggtgcgtcctcagtggtgcagccaagagccaggaagggcacagcctctttcctcctccctgatggaagccagtgacctaccacaaacaaagacctgctgcctccgcccctcctccctccgcctcgcctctgcaaccggtctttcctccaagcaaaccttttccgcgcccttcaccattcactctgcaaatgaccagggcctccaaatcccgtccagccccaggtatgactggatccgtgtcagcgagagagatgggggcattccagttgtcctgcatgccatttaaaccttgcccttccctctcttctggaaactctgagcaaacaccaggcactaggacaacttctaatttaat

SEQ ID NO: 434197 - DNA, 645 bp, Homo Sapiens
tccacagtggctggaagccatcgttcacctgtgttccagcctccccaaaaaggccagcacgacaatgtcgtcttcagggtcctgggcatctatcgcgttcatcgatgtcccattctctatctcatgtatgatgtgcatctccatggcatagtgctccccatcgaggctgtgctccgagcccttatatggcaagtcggaccagtgcaggtgcatctgtttggcctggtatggggcaggcagtcctcctccagaaatgctggccttgttctccagcaacatcatcactgagtgcccgttattttggacagtccacgtttgcttcttatcgtagccagagaagaagaagcgtcccagttttttgtccacctttgccttggtggtgacgatgttgatgggggactggcggtccttctggcagtttccaccccacttgactggcaccaagcaggggtagttggaggactcggcttgaacctcgtagcaccagtgtgactctgcactggccgatggccgcgccgcggagagggccaggagcgccagcagcatccgcatcttgcgggacagcaaagagtcctctgagccgggggtcgcgcaccgaggaggccgccgcgggtgcagcgatcctgccggcctgggttttatagc

SEQ ID NO: 434198 - DNA, 1457 bp, Homo Sapiens
gtttgttcacacggacacagtgtatacttcttgtggaatctaccgtcactggggactcagcatttgtgtaccggcccgagcttctctgtctggtctaccgtcgctaaggtacatatggcggtgccctgcttatacatctttgcggtaagctacaatcactggacaaggacggtgtagccctatctatccagggagaaggaccagtgacagacaggtcactcttctccctgcagctcctggccaggatctgccaggaaggtgatgaagaggaaggatgccgcccagccagggccctgcagcagcacggacgccacgctgcccggcacggccctgggcgctctcaatgcccaggcccaggccgatgcccagggggatcatggcgcttacggtgaccgccagcttggccgcgtcccgcaggggcatggcactccgggccatgctgatgcccagggccacggccaccagtgtctcgtggacggccacccccacgaacaggctcaccactttctccccctcctcctgcaggcccagggccaggccctcaaagaccgagtgggccgacagcgcgaaggccaggctgagcaggcgcacggggctggcgcgcgagaggccctgcacgctcaggctggggccgtggccgtggggctccacgtacagcgcgtggccccgcgcgccccccatgaaggggctctcatactccgagtcgctgcccacgtccgatccggcgttgaaggtctccaggtcgatgaaggacggcttctccttgcggaaggtcaggatcagctgctccaggaagacggtcatgaagaagcccagcaggaggatggtttcggccagcgggtagtcggtgctgatgtggccgaggctcaggaccttctggagcttttccctcacagcgggcagcagagcgttgaagcacgtggccagaaacacccctcctccaaaggtgttgcagagagagaggatctttttcgagcgatgggccttctcaaaatctgtctcgatgatcttcacggggagcagggagccgagcagcatgaagaagaacacgcccaccatgcacaggattttggccactagcaatttcaccatggtggcggcttgggctgctctggtcactgcagggccaaaccatctgtgggcgcacacccaagtcccacgatgtgctaccgagcccaaccacacagttggaggctcatgtctcagtccagcaactcccgggggcccctcgtccgccgactggcgccgctgcacgcccaacggccgcgcagtctcgaccccacagacgcggcccggagaggccccgctcggcgcggctggtccacgccccgcccacgcccctgcccattggcctccccgagacccgctggcagaactttccatactattggctgcgaaacctgccactcatatgcgactccaccctcgtgccgaattcgccacccaggcctcgctac

SEQ ID NO: 434199 - DNA, 1456 bp, Homo Sapiens
atagttcctttattcccacctcctcataggatccacctactgagatgtgagtgaacaggactatgttaaaggacaagcctgacagactgcatgctgccccatcctggggggtgccagaaccatgccgtgcagtcacctgggagcaggccgcacaggagctgtcagcattcaggctgtattctaaggactctctcctggagcttccttcccctctagccctcgaaggagcacatgcacctggtcctttgggcacagcactaggcaatccaccctgagccaggcccagaccaggagggcagggcaagaaccaaagctcacctgacattggctttatccactcccatcccaaaactaatggttgcaacaattacagggaccttctcctccatccagtcgttctgcaccagcgttctttcagaggccttcagccctgcatggtaagccttggcgttcacacccctgcagctgagctctatggccagctgttcacaagcctctctagtcctgcagtacacaatgccgcagccagataaccctttatcagcctcctgtccaagagccttaaggcagaagtccttcaggttcccatagggatcagaaatcagttccttgaattgcacatcatagaagaggttggcccggaagcagggagtcttgaagatggcaactggtttcttcaggtgcagggcagcaaacacgtcctcttggacctgtggggtggctgtggcggtcagagccacacaaggggcatgtcccaggcgggagcgcagggcacccagacgcaagtagtcaggacgaaagtcatgcccccattgggaaacacaatgagcttcatccaccaccaagtaagacagcaggtggcgggacaccagggagttcagggtgggctggaaggaggatgaagctgccatctctggggtgatgtacagaatcttggtctggggcttttctcgctccaggtcagcaagcagctccttcctttcctgtgcagagagcttcgagttcagggaacttactcgtacctttagggttagcaagtggtccacttggtcctgaatcaaagcaatgagaggagagactacaatggtgatgcctttggccaacagagcagggagctgatagcatagggattttcctgcccctgtgggcatgcacacaaagacgtccttgttaccttttactacagccatggtcgcactctcctgtaaaggcgtcttaaaagagtcaaacccaaagaccttcttcagcgtactccggactcgccgctcagggtcaaaaggaaaggtggtatggtggctgctcatcttagccaagaacacagaaccggccgtggtccgcccaagaattaaaggctgctggctggttccggaactgttcgaagacccctatacacaaccccaactcagagaagccaaagcgctgggaattcagctttaggcagaacccacgcaatcgc

SEQ ID NO: 434200 - DNA, 2093 bp, Homo Sapiens
  misc_feature (468)..(468): n is a, c, g, or t
ctacctcatgcaaaatattggtgtggctgcaaatttccctctgaagctgacacaattaaggatgaattaccataacatcttcatttttcctcatttcattgcctctcatacagttttctccctctgatttatttcattttggtagtggattttgaattaagtatttatttctctttgcaagtgactatttgattaacacattaaaaattttttaaaaatttcccctttaagttatgatggctgcctatagaatttagactgtttctcaccctgatccatcctgatattatgttattagctacgatttcaaggtcactttgaagtcagacttcacagttttctacaggtgtatttcttgctatgctcagtgggaaccaggggagcagaaaagattgtgggaaagtggggaacattaattgttcacgtggctgttggagccaggaggaggccactggctggccatgcctntttaccagccaagttttaaatggttagagtggcattggcattgattttgcttttctcttgggttttcttcatttcttttcataattcatcttcaagctatagatccatccttcttccctatccaaatactttgttctcagtgggcagtcagatttttttggcttccaaacctcactgagcatgttcagagaattcctctcagttaaggaaatatttgttccccacaattgtctgatgtatgagtccgtctcagaagcacaagtgcatactaggaaggctttgtaaactggttttgtaggcaggctgtacctgcaaataggcattctgagcaaggatcctagatttgcctttggctcatgtccctcctgactcaaccgaccttctcctttttggcatgtctggtgaataagctacagaggttcacaggggccaaatattctccctttatgttctctaatacatgttgcacacataagactcaagggagtgatttgcggttcctaagtcctagggagttctattccatttattctgatgtcccttttaaggaggagttggtgttgaagtgtgacatgctttaatgataactgctttggcaattccccagactggtatacttcttcatccaaaattgcacctaaggtgttcatttagacaaaattgttcgcttagtgatccactgatctctaatcagaaatatttttaaaaaatacaatttagatctctgaaaattggaaccactcaagagtatcatcttgatagtgttacttcagcatatgactgactgattttatgaagggagtttagctgacttttccctgtagccctatcatattaaaaacaaaaagtggtccacttgaagcagcaaggacaaagggcagtttagggagaggcagggtgaaggggatagctcgattgggcatccagagtggaaaaggattattattgtacataatagcagttctggctggaattccaatccactttctggggatcattttgatgttgaatgttcccccaaagcattctgacaagtttggtccacttggctctttaccccgggtaataagacccttattgactttgaaaaactgggcataaatgagcttaaggaaatccattgtatacagtcctagtgttttgccttcttgggtaaaattacatttaagggtgtcatttcatgagtccaattgtatctgctgacactgaagtgtattgagatgttgttctttagtttaagtatgtaacaaagtaatattcaaaggggatgtttgggggtggggctgggacccggtggctttatattgataatgaaatattccagagcaaaacacattgtcctaatgaagttgttgcagctctcttcgttttcttgtgccgctggaattggcttgtgggtcacttgttgtggaaaagtgaattaatttcaaataggaaatcatattgccttttgtgaaaccaagaaaatttaccaccttgtctgatacattagattggaagggcgctcttgggtaaagaaataacccactgaacacccggatctttgattggaaaagcattggtagggccctttaggggaaaaactggatgaacgcctggacttgttggctcccagcctgtggttg

SEQ ID NO: 434201 - DNA, 1675 bp, Homo Sapiens
  misc_feature (514)..(514): n is a, c, g, or t
gtgtgtgacagaagcatttgtttgtttttatttatccaaatggggagaatgcaacatgtcagggcattacagacaaactgcagcagccagacaagagggtcagtctatggcagagtccaacatactcagtgcgaaggagccacagtgcgggtgctgcctggaggacttgtggcagcagggtccctttggatgaaggccaggtatctctgggcgaggcactgatgaccatccacatgtgcaggctgctgcttcagtcacgctgaaggtttaaagttcagagtcctacatgtaataattgcctcagaggggaagggcagtccatggtggtcacggtttccagtgtttttaaacataatacacaaagttattgccaaggattttgcactgcaaattatactatttacacttgcgtattcagaaaaacacagtaaatagatacatgatagatattttaaatagatttctaaaaaccaacttggtcttcagtagacccgagtgagctacagccaggagncccatgccatgtgtgtaaccgtgcggtagggaaaggtttctatccacgactacgctcagcctcctcctgcttcccccacccttgggcctgaacgaagggctaaggctgaagcaggcctaccttagtccttagtgtgagggcttcaggtctagactggctgcacctcccaccttcccagacagagttctgcttggagccgctgagaagcaagtcctacaggctccactcctgcaggaccactacacggcgggtaaaccaggacacacaggcatggggctgcagggctaacggtatgatgaaccctgccctaggccagccccttccccagcaccccctgccaaagtacccttgggaacaggcccatcagcctcactgttcctggaagtacgattgccctaatttatggttacctcaggaaaccttcttttgaagaagtggctgggaccaaccaaccacttagaccaaaggctcagcacaaacaggcccagacagatgggtccaggatgaaaggcctgagtccaaggatgctttggggaaaacgggataaacactgctaggagctaaaaagtatatggtgtctgcccaaggaaaggacaacagtagggagttcccacgtggaccagctttcattttgcctccataagccctggtatgctggaaaggacgtccacctggaggctggagacagctcctcagagagccagagctacccttggttcctgggagatggagagagcgaggccctctggtcggaggcctacaatttggctccccagtaacatttctaaaaatgagccctcctccctcggaaaggtagtaagtagtagcaaagcatctcccacagccatggtaggtcccatccctgagaagctgccacatgaagtgagctaagggaaaagcagtgctcagtaccccatctaagaaatgggggtgcgcagtgaacagaacctgcttgtgcaaggccggcctgaccatgaaaagtgatcgggggtaagtagagggatgcgtctaatggcagcgcctctggcccgctgtcggaatagaagaggtattttttgcaaccagggcttgcctggctacttccaaatcaaacctcatgcaccagctgccatcactaccttgggggtcagggctgcagcctgagggagccagtgaagtgaa

SEQ ID NO: 434202 - DNA, 678 bp, Homo Sapiens
cagcgggcaaggcgcacatgacccggggaatgagccacagacaatggcagacggcccagagagtcgggaatgctcagtgcctgtcggttccaacggaaaaggagcacagcagcttccaggtgtcccagggcacaagcccacatcagaggggtgcaagagaaatgatccacgttgagcgggtcaacctcctgctctaagtccaagcttccagtctccacactccgccactggctcagggtctcgatgaggcgggcatagccctgggcagcagccaggtgcagaaggctcatgccccggaaggggcttccatgggccagacgttcaggacccttccaggtggagcgtgggatcatgctttctaccaagaccactacccgtgcttcgaacccaggcccctggccttcatcctgaactggaggagcatcaggaccctggcaaggcacctgcccagctgctgcgatctctgccatccgcttctccatctgctccagtcgctctagtatggacatccggaactggttgtcgtccagtgacagccagtcaagttgagtactaggcagagacaggaatcggcgggctcgatactcaaagagcacagaagcagaaaggggcccctcccgccctgccacctgcaaagacaccagccctacctcatgggcgggacagtagcagcgtaag

SEQ ID NO: 434203 - DNA, 445 bp, Homo Sapiens
tcttggatcacatcgcagtgccagcctcacttgtccagcctggtgtcttacgctgctactgtcccgcccatgaggtagggctggtgtctttgcaggtggcagggcgggaggggcccctttctgcttctgtgctctttgagtatcgagcccgccgattcctgtctctgcctagtactcaacttgactggctgtcactggacgacaaaccagttccggatgtccatactagagcgactggagcagatggagaagcggatggcagagatcgcagcagctgggcaggtgccttgccagggtcctgatgctcctccagttcaggagtgtggagactggaagcttggacttatagcaggaggttgacccggctcaacgatggatcatttgtcttgcacccttctgatgtgggcttgtgcctgggacactatggaagctctgagcttattat

SEQ ID NO: 434204 - DNA, 1166 bp, Homo Sapiens
  misc_feature (1122)..(1122): n is a, c, g, or t
  misc_feature (1149)..(1149): n is a, c, g, or t
tttgacagtttctccactttattagcctggagctcctccctgccagccccaggggctggtcgctggtccctgggcacagtgagcagggctgaggtcagacgggttcggcccttggccatggcagcttggttgggacagccgggccaagggaaaaaaaggtgcaaaagtccaaatgctggcacttcaggtgtggccggcacccagccaggcgcagtgggtgggcagggcgccatgcttctctcctggcgacaggtcggccgtgtagcagcgccccctcccagcagccactaggaacagctggtgattctcgccaggaactgctgcgcccaccactcgtctaggtcaatgggcacaaagttctgcagccggggattgggggtcctctccacgtactgcacaggccttggcccgccctcaccggctgggccaccatccagctgctgttgcacctgctgccagccttcggacacaaagcggacattctcctcgtgggccactgtgtaggtctcctgggtcccctcgaaggatggggacgtggagggggcccgccggccattcacacgattgaacacaagccttggccctggactacagccggaggtgggagccgggagtcctgggctgcgcctgctccgccaggcactcgcggtcccggccggcctgttgccttcctgggctcaggtgccccagcgccgctctcggttcctcctcagctgagaggggcactcgacaggggccagggtcccggcggctgcgcaaagggctgcgcccgcgggggctgcgaggtcggcggcgcgggctgccggcatttcaggagctcgccgagccggccctccacctgctgctgcgtgggacctgtgcggcgctgcgcgaccagcttgctgggccccttggtgatggtgtacatgacgcgccgctcccacaccgccgccggcccccggccagatccggcccctgcgccggggctcgcacttaacggactgcgggcgccgcggggagggggcgggcccgctacacgcccccggcccttaaagggcccgcacgggctcgggctgaccccggacacgcggcggaggcggcgccctcggtggaaacgccacccagccctcgctgcgttaggangtgtgaccggacttgttaagggaaagngaaggaagtgggggggg

SEQ ID NO: 434205 - DNA, 1264 bp, Homo Sapiens
  misc_feature (139)..(155): n is a, c, g, or t
  misc_feature (232)..(232): n is a, c, g, or t
  misc_feature (1014)..(1201): n is a, c, g, or t
gggatgggctatttcaagcccgttttaagtgggctcttacacaggctcagcaacctctgtggcctgcaggatgggccttctgctgtctctttcctttcttaaaaccttaaggtctttctagagacctattcaattttcnnnnnnnnnnnnnnnnncactacaatgtcatgacaactgcagcaatttgtgttactttccaagatgacaatttgacattaattaagggaaaaantaaaaaggtgagctagatgacttaaaatgcatctcttttttgaaaaagctgtagctggcaagtcaaagtttattttatgtgtgtaaattcccagttgagcattttttcatttggattagcgtgagaggaaaaaatgtgaaatgtctcaaatcaaatgcttccttctaaagattagacattgcccaaccctgcccccgcccccaatcaatcagtgacagaagagaccgccatcagccaactagctttttttaaatggctgatatattcatctctaaaggccctcaaagcactgtaaaacttttaaaactttagcctttatgtcagattagagaaaccaaacaacgtgacggtacatgtgatgaaaagctctgggtttatttttctcccgcttatgaacatgtatttttatttgccgaatgaaaatcgtggtgtgttgctttgatgaatggaatttcaggctctccctgtgcacagccggtgggcaaaggtcaccttaaatgactttttctccctatctgtctgttaatccccagaccggttgcattttccagttgcttcctgggtgtctgtacatagtttgtctttgtataggagtgagtgtggtgaccgtcaatcccctaatctcccaggttctaatttaacagatgatggctgtatgaggaaaacgatgtaaatagagaatacaaattaaactggatctctgtggcctaggttttgtacatacagaaactgcatggtatttaaattattgtttgtctctgatgatgtatgcagtttctttnnnnnnnnnnnnnnnnnnnnnnnnnnnnnnnnnnnnnnnnnnnnnnnnnnnnnnnnnnnnnnnnnnnnnnnnnnnnnnnnnnnnnnnnnnnnnnnnnnnnnnnnnnnnnnnnnnnnnnnnnnnnnnnnnnnnnnnnnnnnnnnnnnnnnnnnnnnnnnnnnnnnnnnnnnnnnnnnnnnnnnnnnnnnaaaaaaggggccccttaaggggggcctttttaaaacagggcgcgggccccctttttaaacccc

SEQ ID NO: 434206 - DNA, 1084 bp, Homo Sapiens
gcatcaatcggaaaacagagctgatgtggtgattctccagcactgaacgatcattgtacacgatggcacattctgacttggtctggatgtggaagctgttggtagtgcccgtgtgctcataatcatggatagctgcagcaaagatgatggccaggagctcaatctccgacaggcagtgcaccatccctgtgcggagcaagaagcaatggactgtctgggtaacatcggctgcgtggatctggttgtggtaaggattcttgtacttcccatagcctgtctccaaggcatccaggaaactcatcaaaaacacagtgggaatcttgaagcggctgatgaggttatgccgagtcagcaactccggaacaatggtcctcagggcatggtcatcttgctgcctggttcaaggaaaagacatcaaagcaccagagatccaggttcttgagacagttgagaaccgcagtagagtaagtggggcccacagaggtgtatgttctccgggacatccgttccacgaagatcccagcctgcacagcgtgcacaatgcttcggaacttgggcttctcctctgctcggcggcctttggcccgggcctgctgggtgaaggtggaggccagccagtcccgcacctccgaaggcacggcatctgaccgcagctccatgcagctcgtcctccgtcgtccaagatttgccgtgtctcatctatgtagacggcttccagcagagaagctgtgtactccagatttttcttcagctcctcaatgtttatctccccattctccaactgcttcaccatgtagcgcagcagagaccgaagcttaatccacatcttcttgctgggggctgacttcagctccaggggtgacgggcaatccgactcctccagcatctccggaggactgcggggggacagctccatgctcagccacaggtctgcggctggcgtcggaccagccaggccggtgtctctaggctcggcccaagctggcagagctgcagctcctgcggctcctcctctcccgctgcccagccgagctttgggctcccagtccaagctctccgcaccgccgctgctgctgccgctacc

SEQ ID NO: 434207 - DNA, 754 bp, Homo Sapiens
gacagctccttccatctcttttatcagggttgggggtcacagttcttgtaccaaagcccaaatcccattatgcagaggtttgggtcttcttagtgaggggaggaagagccagttgtaagatgcttacttgcacagagtggttagaaactgagacagtactccattctcccctgagctggtatgtgacccctcttgctgcctcccagtctcctcttccaactctgtcctgtttgatgatggcctcagggagacaagggatggcagaagagccctctgagaggcccaggtcctagagcagcttctgcctgggctgaggtcttgggggcttggctgttttttaccaggctcctctttgttcccccactgggatatagcctctgaggcaagtcaccctgctgagtctgaaaagccatgtgtcaccttcgcagcttccggcacctgcaggtgtctgggttgagctctaagccccgcccttggcaacggaggaagctgcggcgtcggcagcggcagcggcaggtccgggggtcagggcgctggtggtgctgggtgcagcgtgggcagaggggcctggggctgtctggcttcacagcactgtccttttttttaggtctgcattcacactggctgtgttcttccagggacatctcccccagctgactgctcgggtaccggatcatgaggatctgcatccggacttggtgctgcccagtgggcacacactccaggccatcgtcagggcagcagccaccacagc

SEQ ID NO: 434208 - DNA, 475 bp, Homo Sapiens
  misc_feature (33)..(33): n is a, c, g, or t
  misc_feature (39)..(39): n is a, c, g, or t
ggctccctctttgttcccccaactgggatatancctctnaggcaagtcaccctgctgagtctgaaaacccatgtgtcaccttcgcagcttccggtcacctgcaggtgtctgggcttgagctctatagccccgcccttggcaatcggaggaagtctgcggcgtcggcatgcggcagcggcatggtccgggggtcagggctgctggtggttgctgggtgcagcgtgggcagatggggcctggggctggagtgggatgggtgatgtcagctggggagggtgctccgggggcagagtcccagcccggaacagaacggggctggggacggtggtggggagtggcagccctgtctggcttcacagcactgtccttttttttaggtctgcattcacactggctgtgttcttccagggacatctcccccagctgactgctcgggtaccggatcatgaggatctgcatccggacttggtgctgc

SEQ ID NO: 434209 - DNA, 1485 bp, Homo Sapiens
  misc_feature (73)..(119): n is a, c, g, or t
  misc_feature (138)..(198): n is a, c, g, or t
gctcctccggccgcctccgctgcgctgcgctgcgctgcctgcacccagggctcgggagggggccgcggaggannnnnnnnnnnnnnnnnnnnnnnnnnnnnnnnnnnnnnnnnnnnnnnatggggctctggctgccgnnnnnnnnnnnnnnnnnnnnnnnnnnnnnnnnnnnnnnnnnnnnnnnnnnnnnnnnnnnnncaccatgagccctctgctccgccgcctgctgctcgccgcactcctgcagctggcccccgcccaggcccctgtctcccagcctgatgcccctggccaccagaggaaagtggtgtcatggatagatgtgtatactcgcgctacctgccagccccgggaggtggtggtgcccttgactgtggagctcatgggcaccgtggccaaacagctggtgcccagctgcgtgactgtgcagcgctgtggtggctgctgccctgacgatggcctggagtgtgtgcccactgggcagcaccaagtccggatgcagatcctcatgatccggtacccgagcagtcagctgggggagatgtccctggaagaacacagccagtgtgaatgcagacctaaaaaaaaggacagtgctgtgaagccagacaggtgccggaagctgcgaaggtgacacatggcttttcagactcagcagggtgacttgcctcagaggctatatcccagtgggggaacaaagaggagcctggtaaaaaacagccaagcccccaagacctcagcccaggcagaagctgctctaggacctgggcctctcagagggctcttctgccatcccttgtctccctgaggccatcatcaaacaggacagagttggaagaggagactgggaggcagcaagaggggtcacataccagctccaggggagaatggagtactgtctcagtttcctaaccactctgtgcaagtaagcatcttacaactggctcttcctccccctccactaaagaagaccccaaaccctcctgcataatggggatttcggcctttggtacaagaaattgtgaccccccatccctgataaacagagatgggaaggcacccacatataactcacccccccctcatccttctttcgcccctacatcatcgccgcctaatatcaagggccgccccccctccagagatatcccccttgagggggccccctggtttacaccgcacacacactttttctttgtccacaaggtgggctcctctctcacgtcagatccccttcattcaaatctaaccgttcttcggtcctcgcgtgcctctaacgaccggcgcccgtacacggcggaacacctgtgcgaagacctccgcgacttcctcttcgtcacaccctcctttccgctttgtctgggtacgcgtgcataattactgccgcccaatactctgctcgagccattcgtgctcgacctcgctccagtacgaatctaccctaatatcttctctcgtctgtcacacataccgcgcacaccctcc

SEQ ID NO: 434210 - DNA, 2628 bp, Homo Sapiens
  misc_feature (35)..(35): n is a, c, g, or t
  misc_feature (952)..(968): n is a, c, g, or t
  misc_feature (1481)..(1481): n is a, c, g, or t
  misc_feature (1501)..(1501): n is a, c, g, or t
  misc_feature (1520)..(1520): n is a, c, g, or t
ccgattgcgagtatacattcgaatgactgactgtnggagggaggtggtgtgttcacgtgagcctacatccgagggtgctcttcgtaaggggtagttgttgttttatagctccaaatggtttttttattctcagtgtagcaactgtttgatttctttctggatacagctgtatgaacacttttctattttatactgaaatcacacaggtttgtgatctaagtgccagaaccatggaggagactctggccttatctgtagggacctaaattttttaagtgctatggaacactgatcaagtagttgtggagagatgagaggattatatgcagcaaaggtgctgtgagcccagttccaacggctgtgttctggtaatcgtgcagaacagcatgtgggctctgggccttggcaggtgcacagacgggcgggcgtcacgtgtgttcagagcttgtctccacctcacggctctgtgctcttctgtgtgctgcgttgtggccgtgaagtgggagctctcctttccaaaggcagagcttactgtcatggctcagatgttcactcgcatcttcaccccaaacttccctgaattgcagtgatttctgttataaggcacatagcaagcctgtaccactctacagtaaaatctctacactaacagtttaaagcccgaaagctgaagcattcagcctctgcaagtgtagactactggactgtagtagaggcatttggaatacttacaaagtcaagtgctgtggcttcagttcccccggctccccacccctgacatccatacttatgttgtctggaagagccatggacacatcattattttcagcaaccagctgcagtgaaactccatttacagcaaccccatagtataaaaccacaatgcctcattgtaatgggatattgaagttcattgaagaattactaggttgccatgtggctcacttatttnnnnnnnnnnnnnnnnnctcacccgttttcctgggatttgttgtaaggagttttcactggcctcactcagaccaatttctgcttcaaaaagcactgaatgtgacctgttgcattcagttgtagcatcaaatccacacctagtcattgcttgaggggccaaattgtgttctgtcccatgcacgctctatttggtgttaaaatggaaccttacggttgtgttttaagtattcattgaaaccagcttcagaaaacaagatgccatagtaaattgagaataacattttttccttcttcagggtggctgtaattccaggtggccgtgatttctttcttccccactgcccactccttcgccaaacccacgtattcagtgttctgatcttgtttgtgcagagtgaactctgatgcagtatcagtcttgtcctgggagccgggtcctgctgctcacaagcccagagctgccagggagctccttggcagtagcacgttggtttagaaagttgggtgggcttgcattcagggatggaacnaagctaatgggcacaggagnacatcaggggcagctgttnaaattccaaatatttggttcccaagtagctactgaactgctcacaccattggaagattttgtattttcataccaattagtaaaaataagaacattgaggagcagtcagagcccagtgttaatctccggcagagatggggtttatgtatgttcagccagatagtaaatgggatttttggagaaataagataactacaaagtttctatacttactataagtggatttagaagcgattttggttttgtattacatacggtagtcctctgcgtcagggagcacttttttgtttgcctcgagactactcattagcgcactggctaagctgcctttgccttctcgtaggcgtgggttgcctgtgtcatgggctgtgtagaccacaacactcaaacacagttgctgcacttggattttcctttaataccaagtatcatttggttatcttactgggacattttcattgatattctatacaccaaagttttgacggtttaccatcattccattttgtaccagttaaaggcattttgatgatgctttttcttgatgctaagatcactgcagaagaataacctgaccttttctttgcatttgttttgaatgtctaacaccattagcttttgtgatctggttaagaagtattagtgccacaagcctgaaaagacagttctcctgtggcagtggcgatgtggcatccagagggccattgtttctacttttgtgggacttcagtcatgctgataatagaatcttctgttcatacaattctgtaatatttatttgtacagttagtattctaatgaaaggatgaagagtctgaacttagaaggtaggtttaaggcctcaccaggcctttgcaaatggcctaaatggtgtttccctttgaaataacgcttgccacaagtatataataagctatattaattgtgttttgcataaaattgccaaaacacagtaatgtgtatatagtggtataagatcttgaaaaaaatctctataattgtgctctttatctgtgaatgggaaaagccatttttagtaggtgactaccatttgaaaaactcaattggatgtatatctgaatgttgcattgtattgtacagtatgcata

SEQ ID NO: 434211 - DNA, 2328 bp, Homo Sapiens
  misc_feature (28)..(28): n is a, c, g, or t
  misc_feature (1977)..(2008): n is a, c, g, or t
  misc_feature (2046)..(2046): n is a, c, g, or t
  misc_feature (2075)..(2120): n is a, c, g, or t
  misc_feature (2158)..(2177): n is a, c, g, or t
  misc_feature (2183)..(2183): n is a, c, g, or t
  misc_feature (2196)..(2197): n is a, c, g, or t
  misc_feature (2203)..(2203): n is a, c, g, or t
  misc_feature (2205)..(2205): n is a, c, g, or t
  misc_feature (2243)..(2243): n is a, c, g, or t
  misc_feature (2248)..(2248): n is a, c, g, or t
  misc_feature (2253)..(2253): n is a, c, g, or t
  misc_feature (2255)..(2256): n is a, c, g, or t
  misc_feature (2258)..(2259): n is a, c, g, or t
  misc_feature (2265)..(2265): n is a, c, g, or t
  misc_feature (2271)..(2280): n is a, c, g, or t
  misc_feature (2287)..(2288): n is a, c, g, or t
  misc_feature (2290)..(2290): n is a, c, g, or t
  misc_feature (2298)..(2298): n is a, c, g, or t
  misc_feature (2301)..(2301): n is a, c, g, or t
  misc_feature (2310)..(2310): n is a, c, g, or t
  misc_feature (2321)..(2321): n is a, c, g, or t
aagccccagctgtacgccccggagttanggatggttggctcttttgtcttccaggatgggcctgtggggtctgtgtggggaaggaaggagctgggagcctgggctgcctgtgtgtcggctggatgctgccagcaccggcatggaccaagcaacttctctgagccagatgctggggacgcagaggtgaacccagagacatgatcccatctgctcagatcttcatgtcagaacacgctttattacagtctcggcaagggggtggctccatctgggccgcatctccaggactcctggcctggacttctctttggacctcgggtgaccttggattctggccacagtgacttagcggtcagactccggtggttttctagcccgctgggtgactccctgaagatctcatcctcttcacacctgttgggatggagcctcccatggataggaactcttcctggttgatgctcagcagatgactgatctggctctggaggacagctccaggggtatgagggaggcctggcagcccactactccctcctcacctgctcgggccctgcctgctgggccctattgtctgggtctgggggccctttcctgccccatgtgaacttgattcctcctcgcgtttctgtcggtgaccagacagagcctggcctgggccaagtccccactgaccacactttccccaaggctgggtctcaaaggaccctacaggatggggacaggaacaaggatgggagtcggggaggggctgtcaggcagagggcagatgcagctcctcgggtgccgctggctggagtcctttgtctccatttgctcagtgcgtaattgtcattttgtgggggacttccttggtggggcttttccatgcttttcctctccctgatggttacaaagaggagacagtcaggatctgggaggagctggagccttccccctgtgctgttgaactctgggaggggcagccagaggggctgagagtgcaccatcctgaaaagagagggtctttaagagataagatttaggctagggaaattcactagaaagagacaggtggccctgggttttttttcctgccatccaaagggaaccagtcttacccaaaggcttaaggggtcaccttagcccagtctcaggacactcttctccaatcagatcgctgcttctagttgcactgctcctggattctgttcttggggaacagaaggtggcaggacaggccccacaatctgcaattccagctccctccagaggggacagtcccagcgtttgcaagagagcagcttgtggcctcccttaggcaagtttaaaagccagatgtcctttttcccagaatgcggagtggtgtgtactattcatcagcttgggctgccacagcaccatgccagactggatggcttaaacatcaggaatttattttctgccagttctggaggctggaaagtccagatcaaggtgttaagacttggtttctggtgaggcctctctccttggcttgcaggtggcaccttctcactatgtcctcacatggccttttctctgtggagagggacagagagcatgagcaggctctggtgtctcctcctcttcttataaagacactaatatcaccatattagggcttaaacctatgacctcatttaaccttaaccccttaaaggtcccatctccaaaaacagtcacatagcaggctactgcttcaacatatgcatttgggggaggggacaccattcagttcttaacagggtggtcaccgcaaacatggaaagtcagagccttctccccttcagaattcccgcccccacccagggatggggaagaggagcagagaggtatgggaagcagacacggagagtggcaggtaccatgctggggtggctcaggagtgcttcggaggacatatggaactggcagggctcagtgcagggaggcggaggccctgggagagccgtgtcctgagaagggcctgggctacannnnnnnnnnnnnnnnnnnnnnnnnnnnnnnncgatgctctgtgaaatggaaggaatgtgcttgcctgtnaggtgcagggagaattcagtgagattgtnnnnnnnnnnnnnnnnnnnnnnnnnnnnnnnnnnnnnnnnnnnnnncccatccatctgggagtatagacttagggtttatctannnnnnnnnnnnnnnnnnnnggctcnctggactttaaanncaacancntctgaaacaaaggcatttctgattagccctccccaccnatttnctagnanncnntttaanaagctnnnnnnnnnnagcattnnanggctccgnagnaataaaaancttctgggggnttaaatt

SEQ ID NO: 434212 - DNA, 1028 bp, Homo Sapiens
  misc_feature (17)..(17): n is a, c, g, or t
  misc_feature (20)..(20): n is a, c, g, or t
  misc_feature (41)..(41): n is a, c, g, or t
  misc_feature (63)..(64): n is a, c, g, or t
  misc_feature (71)..(71): n is a, c, g, or t
  misc_feature (98)..(98): n is a, c, g, or t
  misc_feature (107)..(107): n is a, c, g, or t
  misc_feature (117)..(117): n is a, c, g, or t
  misc_feature (121)..(121): n is a, c, g, or t
  misc_feature (153)..(153): n is a, c, g, or t
  misc_feature (180)..(180): n is a, c, g, or t
  misc_feature (220)..(220): n is a, c, g, or t
  misc_feature (231)..(231): n is a, c, g, or t
  misc_feature (257)..(257): n is a, c, g, or t
ctcccccaattccttgngcngggcatcagaaaggcaggganaggagggggcaaaaaataatgnngtgggcngaggtcccttccattcccatccatgcntcaaacaanggtgattacntgcnccttgagtgaatgtcaagtcaggaagggtccngggcccacccagtgtggcaggagcagngctgggatcagaattctggattcctgactctccgttcagntgctattcagntatcaccaagctgctgagtttgtccnactttctcctgggtcacattctgctgttgttgggaaacagggagtgagtgaagggaacctggtgaacccttctcccctcaccttttaaggatgttctggggtggaataaagagaggtggagggtggggtgcctgggcccagcctccctggctcctggtccttctttcttcagcagggagttctggcaaggcctgggcctggggagggggcctgggtgcagttttctctgcggtgtggttggctcttttgtcttccaggatgggcctgtggggtctgtgtggggaaggaaggagctgggagcctgggctgcctgtgtgtcggctagatgctgccaggtggctccatatgggccgcatctccaggactcctggcctggacttctcctttggacctcgggtgaccttggattctggccacagtgacttagcggtcagactccggtggttttctagcccgctgggtgactccctgaagatctcatcctcttcacacctgttgggatggagcctcccatggataggaactcttcctggttaatgctcagcagatgactgatctggctctggaggacagctccaggggtatgagggaggcctggcagcccactactccctcctcacctgctcgggccctgcctgctgggccctattgtctgggtctgggggccctttcctgccccatgtgaacttgattcctcctcgcgtttctgtcggtgaccagacagagcctggcctgggccaagtccccactgaccacactttccccaagctg

SEQ ID NO: 434213 - DNA, 965 bp, Homo Sapiens
  misc_feature (21)..(21): n is a, c, g, or t
  misc_feature (40)..(40): n is a, c, g, or t
  misc_feature (42)..(42): n is a, c, g, or t
ctgagtcagagagtcaggagnttctcacatatctcagagntnctgtcagcacccgggagtggggcacgagtccagaactgagatgagctcagacacttgcactgagaaaaatgcatctaaagtcacagtgttaactcttcacttaactctaaggccaagtagccctttccaaggtttataaatatgatcacaaattgctaaaactgagaagagaagggctggttcacatcatcagggagtccccagcctccttctaatagcagttctacaagtacacaagatgaagtcatttaactcagccttcaaaagttccagacggtaatgtttgtgaaatactagccctaatgccaaatgtgaagtgtgaaaatcacctctttctgggaccccacaaaatggggacaggctctttctttcttccatagaggtagaaaagagaatgagctacatcacccatttcccctcccactttggcattctaggatactacactttcctgcacagaccagaagagggcaggctggtaggctatgggctggtaagtttaaatacttatctgcaaagatacttctcagtgtggttgtgaacgtcctgaagaacctggaaattcccttctgtctcctctgtcccaggaacttgctgctctcttaagattcaggaggtctcaggacatacggatttcgtgatggatctgatctcaaagcattaagctggtctctaccatccccagtggacacaggaagagagggaggatcaccttggttacccctgtgatgccgacggggtcatggtggccacatgaacgtgtctggaaccacatgggtggacagatgcctccaactcgggtccgcggtcctgcggcgctagtgcagagggctctttgtgccccggctcacagcgcagaactgggggagcccctgcaagcgcctcccatctcaaactcctccccgcactcgtccgcagatccc

SEQ ID NO: 434214 - DNA, 1616 bp, Homo Sapiens
gcaagataccaccgccaccaggcagccaggttcccagtccttcttccccaaccagcccccaggccatcctgaagacaaagagcaaccccacccaggaaagaactgcacccggccccctctccaggcccaggccttgccagaactccttgctgaagaaagaaggaccagagcccaggaaggctgggcccaggcaccccaccctccacctctctttattccaccccagaacatccttaaaaggtgaggggagaagggttcccaggttcccttcactcactccctgtttcccaacaacagcagaatgtgacccaggagaaagtaggacaaactcagcagcttggtgatagctgaatagcagctgaacggagagtcaggaatccagaattctgatcccagctctgctcctgccacactgggtggccctggaacccttcctgccttgacattcactcaaggtgcacggtaatcacccattgtttgaagcaatggatgggaaatggaagggacccttctgcccagcctcagttatttttctgctccccctccttctcccctgccctttcctgatgccccatgcaccagaggaaattcggggagccagaggctggactaggactcttttaagaccaccctgtgtcaccagtctggagaagaccagagaatgaccactaatcctgacctaggaccatctgccaggttttgtttttggtaacaactgtgctgtcttcatcaactggcagacctgagtcaggagagtcagggagctctctcagcatatcttcagagcttgctgtcagcacccgggagtgggggcacgagtccagaactggagatgagctcagacacttgcactgagaaaaatgcatctaaagtcacagtgttaactcttcacttaactctaaggccaaggagccctgtccaaggtttataaatatgatcacaaagtgctaaaactgagaagagaagggctggttcacatcatcagggagtccccagcctccttctaatagcagttctacaagtacacaagatgaagtcatttaactcagccttcaaaagttccagacggtaatgtttgtgaaatactagccctaatgccaaatgtgaagtgtgaaaatcaccctttctgggaccccacaaaatggggacaggctctttctttcttccatagaggtagaaaagagaatgagctacatcacccatttcccctcccactttggcattctaggatactacactttcctgcacagaccagaagagggcaggctggtaggctatgggctggtaagtttaaatacttatctgcaaagatgcttctcagtgtggttgtgaacgtcctgaagaacctggaaattcccttctgtctcctctgtcccaggaacttgctgctctcttggttacccctgtgatgccgacggggtcatggtggccacatgaacgtgtctggaaccacatgggtggacagatgcctccaactcgggtccgcggtcctgcggcgctagtgcagagggctctttgtgtccccggctcacagcgcagaactgggggagcccctgcaagcgcctcccatctcaaactcctccccgcactcgtccgcaatcccgggaattccggac

SEQ ID NO: 434215 - DNA, 1883 bp, Homo Sapiens
  misc_feature (172)..(198): n is a, c, g, or t
taagtcaccttgtgggcccgaaatccccaaggttccccccgggggttcccaaaggaaaattccggggcccaggagttcctgggagaatgcggccccaagagggaaccccccttggccaggatccaagccgggccacccagggcagcccagggttcccaaggtccttcctttnnnnnnnnnnnnnnnnnnnnnnnnnnnttcctggaggccaaaagagcccaaccacacccgcaggaggaaaactgcaccccaggccccccttccccagggcccaggccttgccagaactccctgctgaagaaagaaggaccaggagccagggaggctgggcccaggcacccccacctctccacctttctttattccaccccagaacatccttaaaaggtgaggggagaagggttcccaggttcccttcactcactccctgtttcccaacaccagcagaatgtgacccaggagaaagtaggacaaactcagcagcttggtgatagctgaatagcagctgaacggagagtcaggaatccagaattctgatcccagctctgctcctgccacactgggtggccctggaacccttcctgccttgacattcactcaaggtgcacggtaatcacccattgtttgaagcaatggatgggaaatggaagggacccttctgcccagcctcagttatttttctgctccccctccttctcccctgccctttcctgatgccccatgcaccagaggaaattcggggagccagaggctggactaggactcttttaagaccaccctgtgtcaccagtctggagaagaccagagaatgaccactaatcctgacctaggaccatctgccaggttttgtttttggtaacaactgtgctgtcttcatcaactggcagacctgagtcaggagagtcagggagctctctcagcatatcttcagagcttgctgtcagcacccgggagtgggggcacgagtccagaactggagatgagctcagacacttgcactgagaaaaatgcatctaaagtcacagtgttaactcttcacttaactctaaggccaaggagccctgtccaaggtttataaatatgatcacaaagtgctaaaactgagaagagaagggctggttcacatcatcagggagtccccagcctccttctaatagcagttctacaagtacacaagatgaagtcatttaactcagccttcaaaagttccagacggtaatgtttgtgaaatactagccctaatgccaaatgtgaagtgtgaaaatcaccctttctgggaccccacaaaatggggacaggctctttctttcttccatagaggtagaaaagagaatgagctacatcacccatttcccctcccactttggcattctaggatactacactttcctgcacagaccagaagagggcaggctggtaggctatgggctggtaagtttaaatacttatctgcaaagatgcttctcagtgtggttgtgaacgtcctgaagaacctggaaattcccttctgtctcctctgtcccaggaacttgctgctctctgtaaatagaccctggactgctcagaggagcctggcttgatccacagtgaccctttcccctcgttctgtggaccttggttacccctgtgatgccgacggggtcatggtggccacatgaacgtgtctggaaccacatgggtggacagatgcctccaactcgggtccgcggtcctgcggcgctagtgcagagggctctttgtgccccggctcacagcgcagaactgggggagcccctgcaagcgcctcccatctcaaactcctccccgcactcgtccgcagcctccctccctctggtcccgcgagcgcagccggcgtcgtctttgtagctgctgcagcgcccatg

SEQ ID NO: 434216 - DNA, 554 bp, Homo Sapiens
gcaggaaaaccagctgctcaggacccagccctgggcagagggcacggtcggtgctcagacctttctcagcacgggtctcagacctgagctggagctaactggaggaagaggcagcacccgttcccgccgggctgctggaccctgggcctctgactgcacagcaggcagtgaccaggagtccttgggaaggagctcagggaaggggaggtgaggggccagtgggactgtgctgggggtgagcatgtgcaaagtgcaggctgcaaggcagcgggaggacatttgccggggggaggcaggggtctcgatctggagtgtgggtggggtctgaggtcatggctcccaggaagaggccgccagcaggtcccccaggacacaaggaagggacagctgaagcactaagcagtcagacagtcacaggtggcaggattccggaggcggtctggcccccccaccaccagggcaagggaacaacggagcaaggccctgctgctaagacgtgaccaaagccagtgctcctggagtgagtggggacacaggtagagaggccccctcag

SEQ ID NO: 434217 - DNA, 658 bp, Homo Sapiens
caaattctgtaagtattttatttatcactgaagaaaaaacacagcagcaagttctgtgttggcttcaatgagaccaaatagttcatctttaacatagctactgcgctccaaaattgaagtcaacacagtcattactacaaattacttgttgaaagaatctatcttcaaaagaaagaaaattaggaaagagaatttaaacgattcctccaaaccatacatttataaatattgtcatatttaaaatgcttgaaaggcatgaattctccattaatggaaaagcagtttgctattggcaacagaaaaaaactcagcgataatttaccaaatgctttaaaatttaaaagctatactgtttggattcacacttgcgcagtaatcttgtcattacaacaactgcaaattgctttgtactcaccttctctcaagtaaaatctaaagaaaaccccaccgtatccaatgtttgtaatgtttacttcaagtgaatctaaaaaatttctaaatttagtttatggtaaatacctcaaaatacctaaaataggtacgtatcaaccacttaagggtgtgaaaattgtttcagattcactgctttaaagggtcttcaaatatattttaacagaaccttacttcattccaaattattatcagatatttcaaaatc

SEQ ID NO: 434218 - DNA, 721 bp, Homo Sapiens
  misc_feature (178)..(227): n is a, c, g, or t
  misc_feature (309)..(452): n is a, c, g, or t
tataaggaataatctgtgaattaaccttctgtagcttttccttgctgaccagggaatacctccccattgaagcctaggccagattccagtccgttttgaccataccccatcatggtattttagagtacacctgaataagatacatggtgccatgtacatggaaactgactgctctcannnnnnnnnnnnnnnnnnnnnnnnnnnnnnnnnnnnnnnnnnnnnnnnnnaattggcactgttgccataagccagggaactacctaggagatgctaggagagaggcctagaatggaaccctccctcccccgnnnnnnnnnnnnnnnnnnnnnnnnnnnnnnnnnnnnnnnnnnnnnnnnnnnnnnnnnnnnnnnnnnnnnnnnnnnnnnnnnnnnnnnnnnnnnnnnnnnnnnnnnnnnnnnnnnnnnnnnnnnnnnnnnnnnnnnnnnnnnnnntcccccaatccagaactgtcctcctttggataataaaaacagcaataattatagtgtcattaccctgagtgactggtcccactgttggtcattctttgtagatgtgagttattgccctattgagatcagaagtcctctcacttagaggcatatctaagacttttttcttgtggagggagctcactcaactgtaggtaaggtttgactcatctgggttagtagtaagaacaaacttccaagtgggcaccatcttaaaggtgcaagcccat

SEQ ID NO: 434219 - DNA, 593 bp, Homo Sapiens
  misc_feature (339)..(401): n is a, c, g, or t
ctggaggtggtgacattctttatttctggaatgtccataagcagctatttggagagacagtattctgaattttgaaaaaatataagaggttataaaagaaatcatcaatgatacatattaaaattcattataatgaaaataagctgtaaacataacaatataattgaaaaaattgcagaaatgtgttaaaggatttctaacaattataagggatatctaattctcacgtataaaatttcaaaacaccaaatatatgaacataagacacaagtagataattcatacatggggaataaacaactataaatgtttaccttcacagttatttaaagaaattcnnnnnnnnnnnnnnnnnnnnnnnnnnnnnnnnnnnnnnnnnnnnnnnnnnnnnnnnnnnnnnnttggtaatattcaatggtggcaaaagggtgttttaaaatgaactccatacattgctggtggcattgtacattggtatagcctttgcacaagcaagaaaacaagttaaaacacatcatataaaccattcataacttgcttcattaaatctattcttcatgatattgtctaaagaaacagctcacgtgatatat

SEQ ID NO: 434220 - DNA, 1448 bp, Homo Sapiens
  misc_feature (97)..(152): n is a, c, g, or t
tagtcgctttgcaccgctacttaattcttttccatatatgtgatacaaacttttgaatatggaatcttactatttgaatagaaatgtgtatgtatannnnnnnnnnnnnnnnnnnnnnnnnnnnnnnnnnnnnnnnnnnnnnnnnnnnnnnngcatgctgtgaaacttgactacacaacataaatcactttttaaattccaggaacgggtagtctgacacggtgattatccttttgaggctgaatccgttattaacttgttatttaggtttttactcccagtagcaagggattctaagttagttgcacttacatgattattgttatttaaaactaagaataaaggctgcattttcaaagataaattggaattgctgttggtgaaataacaaccaaaatagtgaatctgatgtacatacaggtttctacaggaagagatggtataatttacaatttggagatttaataaccaggctacccagaaaaagtgacttgataacatggtaccaataagtaagggatgctctctcggtttgcttttgccactttcaagattttaacttctcaggttattaatcaaaattattgtataagttagccaatagaatttttaggttaaaacaacagatggggggtttgtggagtgtttaatgtcatgggcatttttagtagcatagaccctttgttctgcatttgaatgtttcgtatatttttgtttcacagttaatcttccctccccaagtttgctattcaaatcaactgcctgaatgacatttctagtagtctgatgtatttttctgaggaatagtttgtgattccaatgcaggtgtcttcattaccattacctctacactgcagaagaagcaaaactcctttattagaattactgcacatgtgtatggggaaaatagttctgaaaggctagaatgatacaagtgagcaaaagttggtcagcttggctatggagtggtggcaataatctctaaacattccaaaagaccatgagctgaacctaaactcccttggaatctgaacaaaggaatataaaattgccatttgaaaactgaccagctaatctggacctcagagatagatcagccagtggcccaaagccatttcaagtacagaaattatagagactacagctaaataaatttgaacattaaatataattttaccactttttgtctttataagcatatttgtaaactcagaactgagcagaagtgactttactttctcaagtttgatactgagttgactgttcccttatccctcacccttccccttccctttcctaaggcaatagtgcacaacttaggttatttttgcttccgaatttgaatgaaaaacttaatgccatggatttttttcttttgcaagacacctgtttatcatcttgtttaaatgtaaatgtccccttagcttttaaataatttccttttgaat

SEQ ID NO: 434221 - DNA, 769 bp, Homo Sapiens
  misc_feature (98)..(153): n is a, c, g, or t
tagttgctttgcaccgcctacttaattcttttccatatatgtgatacaaacttttgaatatggaatcttactatttgaatagaaatgtgtatgtatannnnnnnnnnnnnnnnnnnnnnnnnnnnnnnnnnnnnnnnnnnnnnnnnnnnnnnngcatgctgtgaaacttgactacacaacataaatcactttttaaattccaggaacgggtagtctgacacggtgattatccttttgaggctgaatccgttattaacttgttatttaggtttttactcccagtagcaagggattctaagttagttcgcacttacatgattattgttatttaaaactaagaataaaggctgcattttcaaagataaattggaattgctgttggtaaaataacaaccaaaatactgaatctgatgtacatacaggtttctacaggaagagatggtataatttacaatgtggagatttaataaccagggctacccagaaaaagtgacttgataacatggtaccaataagtaagggatgctctctcggtttgcttttgccactttcaagattttaacttctcaggttattaatcaacaattattgtataagttagccaatagaatttttaggttaaaacaacagatggggggttgtggagtgtttaatgtcatgggcatttttagtagcatagaccctttgttctgcatttgaatgtccgtatataaggttcacaagttaatcttccctcccaagtttgctattcaaatccaactgctgaatg

SEQ ID NO: 434222 - DNA, 1600 bp, Homo Sapiens
  misc_feature (236)..(295): n is a, c, g, or t
cggggtggttttgtttccccccttggaaaaatgcagccctctattccttagttttaaaataacaattaaatcatgtaaagtgcaactaacttagaatcccttgctactgggagtaaaaaccttaataacaagttaataacggattcagcctcaaaaggataatcaccgtgtcagactacccgttcctggaatttaaaaagtgatttatgttgtgtagtcaagtttcacagcatgcnnnnnnnnnnnnnnnnnnnnnnnnnnnnnnnnnnnnnnnnnnnnnnnnnnnnnnnnnnnncatacacatttctattcaaatagtaagattcccatattcaaaagtttgtatcacaatatatggaaaagaattaagtaggcggtgcaaagcaacttactttctcctaaaaatgtaatgtcattccctatattttaagaaagctatgtaagtattttgcttttatgacactaggtaggaatgctgcaccactgcccagcagctttattaaacaattaaaacaaaatgttaagattgaccattactcttctccatatattgggtaaaaaactaagagggaagaggaaaatcagtaacctttcaaaactgatgatctttatcagcagaactagactgaatttcattacattttagaatgaacagctctcaacaacaaattatcaagatgtttaaaagattcacaatttgaagtctgaataatgatactgcaaaaacaagtcaagattgcagacaaagcatccgaaaatatcactgtggttttaccttggacacaaccatggtctgttacaaaagtaggtcatacatacaaaggtataaagaacattaagtttttagctgaaggcagcagtctgtttaaagggacatccccggcaatccaatgagtagtagaatttaagtatattaagctcatgacaatgctgaagaatgctgatgtcttattcagtagagtcttccccgactacgatttcctcgtgtgccccaacctcggccacctctacttcccctgaaggctcctctcataattaaagttgcccaaattgctgctatatttcccactgggagggttataaatctgcctggcatctctttttggtcctgctgaagatttcttgggtggtgaacctgaagttgtatcttcactggctctcttttgcccaatctcaaccttttgtacaggtttccaggatagtgttactgtgctcttataagaaggaggaatgtggaagagatccttgattaaaacattgatattgtttgttattttcaatgcaacgactttaatcttgttctcttctgtttttaaggcctcacccgttttaccctggagagctaagcgaagttgtctgatataaacttgcaggccccgtgcaaagtactgcagcctgattttgaaatctttgagcttttctgcattcagtttggctgttaagaaatctggaagttttcggcccaactggtgaaaactgtacaacaaacattccacataactgaactgtagcttgggttcttcattaccagcattctctccattttctgcctcttctggagggaggggcatgtattccccctgtggaacagtaggggatc

SEQ ID NO: 434223 - DNA, 556 bp, Homo Sapiens
cttttccacagggtacttttcactttgggctagctaattcttggagacagcaaaggactgagccctgagcatatctaactattgtcaagaacatagccgcaaccttcccctttatctaactttcacacaccaagccaatatagaaattgccctaactcaccccaggggctaggtaccaagcaaatggagaccgcccctccagcccagagcctgctggaattattcagacttgccaattggaaactgttggccttgctctgccttgcctccctgcagaaacctcagtcagagcctatgctttcttcttgctcctgcttctgccccctccctccagaagaggcagaaaatggagagaatgctggtaatgaagaacccaagctacagttcagttatgtggaatgttcgttgttacagttttcaccagttgggccgaaaacttccagatttcttaacagccaaactgaatgcagaaaagctcaaagatttcaaaatcaggctgcagtactttgcacggggcctgcaagtatatatcagcacacttcgcttaactctccag

SEQ ID NO: 434224 - DNA, 986 bp, Homo Sapiens
  misc_feature (867)..(868): n is a, c, g, or t
  misc_feature (871)..(891): n is a, c, g, or t
  misc_feature (898)..(898): n is a, c, g, or t
  misc_feature (910)..(910): n is a, c, g, or t
  misc_feature (976)..(976): n is a, c, g, or t
agcggcttttttcagttctgtcttcctgaggctgctgtttctgggcatggccagggatcttcagactttacaaaccagttgtgcagagccaggcatttcaataaggaacaaaatgctgagtaacaacatgaagtcagagtgttgcttgccaagagctgggaggcctgggtggtttcccaatcttaaagaagcagaaggatattaaagtgagcctcccaaaggaaaacgtggatctacttaccaacgcagaaaatgatacacacggattcgatttaggcacgctacattcaaatgacttggaagagcaggttctctgagcccaggatactaaagtccctgtttaggaaagagccacgttcgtatgctttaccctaccacaaagcatacgcaattctcggaggaaagtggctctgggaattgaacagtggctcagtgatgttggggccaccaagtctgcaattctccctacctgttcttcatggttgtaagatgactgctgcaattctcggcatcatgtgcatgttaatgtcaggaggaagaaaggaagagggagcactgggatgttacattcattttgtcaggaaaagcaaagcctttccagacagctccgaaacttgcttacctctcattggccagcaccatcacttgaccacttgtccactcctagctgcaaggaaagtggcaaagtagaaggtatttgagaatgtctgctgggttagccaaaacaatagtgacttctacacccaattttctgggcactgcagaagtatccttgagtcctatgtgatcagagggagagcaaacctcaataatgaaacagattcaatttccatcacccagtgagacaccatgggattagaataaatnnttnnnnnnnnnnnnnnnnnnnnntgcattnttaaaaacacanaatcagaaagggatgaaaggtgatatttctagcatatcagtttggtggtgggtaaattattacctntatacaaggc

SEQ ID NO: 434225 - DNA, 639 bp, Homo Sapiens
ccattccccacaatctcaggcttacagcctttcctgtaaccttgaacccaaggcctatccatgtagtttaaacccctcaagaataacctctcctacactagagggctcatttcccaggccaatactcatacatcttcccttatttgcaaccaaagtaaatgggacagttcccatttcacaacgaatccagcccaggacaatttactagttacatggagacactgccagagcatttatgtggctcttgaagcattcacagtttcaaagggcaaaagcccaaagacaaaggggtcccaggttggcatccaggtaagttcttcggtggcagggtggaggaagccttggaaaacaggcaagactttccccatagtttaagcttttacattctagctgtccatcacaaagcaagcttgggctataccctcccagttccccacacagcaagagggagggagcccaatttcaaggcaccattgaaggaaaaacacaaatgtccttttcgaacattctgactttgattccatgtgaaacccgttcagctcacgtggcatacctaactgccacacccaaaagaaaatgatagcaatgaccaccttgcagtgagaatgtcattatggggagctaaattagactaagcaa

SEQ ID NO: 434226 - DNA, 2682 bp, Homo Sapiens
  misc_feature (100)..(100): n is a, c, g, or t
catgcagctctcaagttcatatcatgagcgcatagttgtatgcttatcgcaatcctttttccagatgaaacactagaaataatacatccatatgatgctnattccatagtcaccatagagaatgaatttaattttaatacatttatttttgtgtgattcttaataaaacactttcaaaacattctgtacatttcaagccactcagaaccgcattacatttctacaaatgtgatttgttgggatgaggtgccaagatgtctctgtacaaagatgtacaatatgtacaatcactgtaagtgcaagctgtgcaaagcagagtctagaacactaattcatgccaaggcttacaaaaacatttcaacacataagactaaagcttgaaacagcgttgtggttttttccctgggcaaatgattattttataaacaagtatatgtatatgtcatacagaaagaagagtttgactcctcagctcagtcagtaccatgcagctgactggatacattacagggctgctctcctaggcctctttcttcaaggcgccattttgccacactcaacagttgtctcatcactgagtggctgccactgctgcctttggctgaaccacagcaacactaggagacttaaatttcgggagataaaggccaaatttgttttcgatgcctgcaaacgtggctgtggcgagtctgtatccaccgatgtgatcagggttggcaggaggaaggtctgcaatgcgtgacttaggtgttggttctgaaccagcgggtttgaggcctccaaaatcaatgtaaaaccaccgctggagaagttcataagtgaccaaggtaacaccaaactggggagaggatcgaaacactcgagctgcagtccctttccaaaatgctgagggcccttcttcccggagaatcttcctgaaacagtcgatgacaccactgtatgtcgtctggccagcgcgggcagccacttgcagtcttgtcttgatgacatcagcaggggtcaccagagatgcagctgggacacctgccatggctccagctgcaagaagatttaaacctcccacgtgtccacatcagccagaagtagtttgcaatgagcataaacaggaaaatagattgcagagaagggaatgtctcggaggaaacacgctttggcacccttatacagaccaaaaattcccaagtcccggagcacattcagggcgctgactctgggtcccgtggtgatctctccagctacttgcagacgaatcttcactatctccaatgggttggtaaaaatgacctgagagcctccagcacagcctccagcaagaacttctgctggaagtggaacagagccatctcttctggtaaatttgtcccgaacaaaatcattaacagtcagtttaatggccttttctggagcaacccctataagttgtggtatcagacccctgtagagtccaaagaagccctcataacgcaagactttcttaaaacagtcaaagctgtttttgtacattagctccccaacaacagagccagagccacgctggttttgcattcgggtcttcaccagatctataggatacactgcagtggctcccacagctccagcaactgagcccagagtgaatctgtaagcagactcggcaatctggagccagataggcctgcctaacccaggagactgctgtctctgaagttctgccaggttgtaaggtaaggccccctcagccaatggggctattctctcaatatctgccaaagtcaagcgccctgaagcattatataagtctgcaagctgatatagaatatcaatttctagtggtgtgacttgtccatagcgtatggcactctgggcaaattcctcctttgtgacttcaacatctttccttgtgccagctagagtgctatatatcttacgaacaagctccatgttattcagtaacgagttaaatgcattgaagtaggagaagctaacctggtgtgagatacttcctccagctgctgaaactaagttctcctccacaaaaggagtaagcatgtgagatctaatggtaaccatgatgtcactgaaatccagaccagaaatcatgccacttttgcttttgtctttgagtgcaaaggcttgtcttgcatgttccaattgcagctcctggagaaactgcgtgaattctgtgtagttaagatgcttcttccggttatgcccaaaatgcagtcggataaattcacaatcccagttaaaagggatatgatgatgaataatagtctgtccaaaaatttctttgacattttcaaatgtcacctctccatttccactcttgtcaaacaactggaaagccactatgaacatggaatctggagcacataaaacagattcaaatgccaaaaactcttgataggagatcaacccatccttggtttgatcagctactcctgccaagagctgcacgatctttgggttactatttggatcattatacagtccaagatagcgctgaacaaagtcttctggggtcatgtaacgctctccatcaacctcagtactggcatactgtagaaatatgtttcttaactcatgaggatcccctcgcttagttgtctgcaccttgaccgccatgctgtgctcggaagccggggacgagtgagtgagcgagcccgctctcgacgaattcgagctcggccgatttggcctgat

SEQ ID NO: 434227 - DNA, 535 bp, Homo Sapiens
  misc_feature (97)..(119): n is a, c, g, or t
  misc_feature (153)..(278): n is a, c, g, or t
  misc_feature (414)..(414): n is a, c, g, or t
gtagctcatgcctataatctcagcattttgggtggtgggaggatcacttgagaccagttctaaaccagcataagcatagtaagaactcagctctacnnnnnnnnnnnnnnnnnnnnnnnaattaaaaattagccaagtgtggtgatttatgcnnnnnnnnnnnnnnnnnnnnnnnnnnnnnnnnnnnnnnnnnnnnnnnnnnnnnnnnnnnnnnnnnnnnnnnnnnnnnnnnnnnnnnnnnnnnnnnnnnnnnnnnnnnnnnnnnnnnnnnnnnnnnngatgctgctgacactggcacactgtcgcagaatttgtacaactttaattttacatgtaagcatttgataattttaaattttattcataagacaaatattttgctgacttgggaaaagcaacagtattgccagaagnggaaatgggttggggaattttgggttaactgatgttgtctttctaattagggttaatgattttgttcgggacaaatttaccagaagagatggctctgttccacttccagcagaagttcttg

SEQ ID NO: 434228 - DNA, 1555 bp, Homo Sapiens
  misc_feature (29)..(29): n is a, c, g, or t
  misc_feature (363)..(373): n is a, c, g, or t
  misc_feature (403)..(431): n is a, c, g, or t
acccaaaacagggttaaggttaatctccnccgggaaaatgggggccctgccctgagttgagaaaccctccctgaaagtccaacagtccaagaaaacccaatatggatataactataactgtgtattagggaaaaagatccccagagatatcctccgtgcttattcctgtatctcagtccaatcaggtcctttcacaaccctcgtgtttttgcatatgcccttccttttacctagaatgttcctcctctgcttcttatatggaaaatctcattcttcaggacccagctgaaatatgatgcctttctcaagtactccagtgagttacctacttcttcgcctccataatactttatctgagctttnnnnnnnnnnntcttgctgggcgcagtggctcgtgcccatnnnnnnnnnnnnnnnnnnnnnnnnnnnnnttcatttccctctgcaatccggtagcccttgtctacagctaactgtaccaaaggctcaggaatggggcgggctgagcctggcagacagaattgggtgtaggcataatactgaaagagggcaaagggaaggccaagtgtgaacaccgacagaaacagagaggccatcagcttaaagagctgtctcagaggattcagcatcgttagagaagagaaaaagccttggcattgagaatgcatgaggaagccaacactgaccagcccgttggagcgtaccccagtggcaaaggcaaagaggagtacactagtccagactcgggcccttttcccagttgccccatggcactggatgtcaggagggccaaacaaagcttttgagtaaccagctgccaggaagacattggcagggctgagacagaaaagcagagctgcataaaaggactggtgggggacagtgcaaaaccagacaacccaggtcatgaagtgcaactgcagccaacatgaagaacaagaaattgagtgatgctaccgaaatcagcaggcaactgcgtagactcagtaacccccgtaagggtctcaacagttcagtccccaccagcagggccaaggggaaaccaggaaagaaggcaaagttgtgctcatacaggtagccatgctcagcaatgaacaagaagtgttcagcatcccagtgagacaggccgcccagaagaccttccacgagttggtccacaaagcctgagggggccaggcgaggaggagagaaggcttctgcatggtgatctgggatgatggcattgaagagggcctgcagcatcagagtcaggatacggcggctgactgcaaacctcagcacctccttccgggatgggtcctggggccacatcctttcaccaccaggaattcaggggtgttgctaccaggattgagctccctcaggcctccagggtcctcagagccaaaggcctcgtgggggctgccttctgtcagcccagccgtgtccgcaacccgtttctggccggctccttttggacacagtcccttctgggtactaatcatccacgctcaccccagaggggccacggcccaaggaccactcccgagggagcctatcccgggaattccggacc

SEQ ID NO: 434229 - DNA, 3094 bp, Homo Sapiens
  misc_feature (98)..(98): n is a, c, g, or t
  misc_feature (127)..(141): n is a, c, g, or t
  misc_feature (164)..(173): n is a, c, g, or t
  misc_feature (183)..(201): n is a, c, g, or t
  misc_feature (233)..(242): n is a, c, g, or t
  misc_feature (302)..(365): n is a, c, g, or t
  misc_feature (376)..(386): n is a, c, g, or t
  misc_feature (465)..(507): n is a, c, g, or t
  misc_feature (536)..(551): n is a, c, g, or t
  misc_feature (562)..(672): n is a, c, g, or t
  misc_feature (1910)..(1935): n is a, c, g, or t
gtgtggagaggagaggtgtgtgtctctcccaacatctagtgtcggccgcggcgcgagaaaataatatgcgttttatttataaaggaagagttaattcnctccccacacccccgttgttttttttttnnnnnnnnnnnnnnngtgggcccaccgcggggcgcgcnnnnnnnnnnctttaataannnnnnnnnnnnnnnnnnngtggggagccctccgccctcttgtggggagannnnnnnnnnttgtggtggtggagagagaccccccccgcttataaagagcgcccccctcgccagaagaannnnnnnnnnnnnnnnnnnnnnnnnnnnnnnnnnnnnnnnnnnnnnnnnnnnnnnnnnnnnnnncggcggggcgnnnnnnnnnnnattggtggggggggaatccacacacccctttgtttcttttccccccggggttttttcttggggaaaaccactttatggnnnnnnnnnnnnnnnnnnnnnnnnnnnnnnnnnnnnnnnnnnnaacagaaaggtttttgaaaagcttttttnnnnnnnnnnnnnnnnccgccccaggnnnnnnnnnnnnnnnnnnnnnnnnnnnnnnnnnnnnnnnnnnnnnnnnnnnnnnnnnnnnnnnnnnnnnnnnnnnnnnnnnnnnnnnnnnnnnnnnnnnnnnnnnnnnnnntttttttttcttgacatgattttaataaaaaatacagctgacataacagattacatgaaactatacacaatgacattctctgcatagtaaccaacactgatgtgtgtacttgaatttttaaatggattatttataatcctttaaagtgcaatttattgaaaggtttaagcaaatcaggataaaggatctttctaataaatgactaacattaaagagatgctatattgatatatttagataaatctttcaaaaatcataattgatttctatagatgccaaatttacttctgttgtaacaatgacctgcccccctcaaaccccaaacttaattgctgaggattaagaagatcctctaattggcaagagctttttctgatgttaatatttttgtctgtttcaatacatctaactaaaaagaactatgggtctagagtagttgctttagcagccctgagttctataaccacaatggtattcctgttagaacttaagagaatgttgtgaacgttccccattctatttgaggagaaaacaaagaactcagttgctttctgatttagcaaagtaactatgctttgggctatagtgttaatgtctaagataaaggtagcaaaaattggagttatctaagaatcagaaaatgctttagagaaatgaactgtaagaggaatgtttctaggagctgtctgatggggtagaagggattgcaacacaaaggccatttactgctgtgattgaatattgtcattgtttttctgtctatttcctttagttggtgaaaatatttcaatatgctgctgtcccaaaagcctggccattagaggataaacaagactcctttacagggttaataaaggagcaagatcttaagggagcaatgccagcctaactttattctgcttaaagaattatttctctcgaaaagctgcttacatgagcatctgcaaaatagtactgtttgtggctgtactggctcagcaattactttcccaggaagagggtagtttggggggtaggggtgagtaggaataaaaaagaacttttccctccaagtgtaaacaggaagcttcagccgatcttcggagcactgtgatcacaggttttggctttcctcaaagttcctttttggaaattctggatggagctgagcaaggcccctcggctcatgccattcacagcctgagacgagagctgggcaggtgcctcggtgctcgcaggaggcaagggagctgctggtnnnnnnnnnnnnnnnnnnnnnnnnnntaatgcagatatccctgtggaggaaaagggggacaatcagtattcacctccacagctgccctgcacacacgctgctgctcagtcctgagcacaacggactggtgagagtccacatgtttttctcagagggaccaacatacctagtactgtatgagttcttaaaatactaaagaaagctagaagcatcaaaggggaattaaaagttgccatgtttctcaaacaatagtcatgttaaaggctgttggaacaaataattacagattacatgaaaccacatatggtgacattctctgcatagatgaggctctgaccccatttgcaaagtaatagtccccaaagaagagttccatctatcagttactttagccaggtcccaggaagctctgtctgcttctgagctagcaattaaagatagacatctgcatgatggagttgggcttcctgaatgtcagttattcataaggggtgaacagttctttcgctgctccaacatacacaatgtttgaaggatgtgatcttaggtaaaatgacagaccactcaggattctcagcaaggaatcagtgcctcctgggttatgcatttcccagaggagtctgtctcgaataataatttcctattaggttgcattaaagaaatataaaatgctaataactgttagcaatgcaaagcagggggcagaggggtctctctgccatggtattcttacagagaaatccttctcaagtactattctctccattgtggcccaaccaaggaacaggacataactgcactaaatgtctttgacgaagcatcaggagaaactagaatgttgtgctgtaccgcagtgggcaaggagagggaaactgggcaggtgtctaaaacttccctcagcttccaggcacatggacatttgcaactcgaattttatattttagaatcaatgaatggttctctcaggacagaataaacacccgagttcagaaaaagccttgccttaaagaatgttcctgtgccacagttagttgcctcgtctcctgtgaccttgcagctctctgagactctgtcagatgctgtctctgtccctcccagggctactccagggagacattctgccaggtggtttcccctacactgctactgagttgtgataagtaacaggtaaagctaccctactta

SEQ ID NO: 434230 - DNA, 462 bp, Homo Sapiens
  misc_feature (85)..(85): n is a, c, g, or t
  misc_feature (209)..(234): n is a, c, g, or t
aaaaaagaacttttccctccaagtgtaaacaggaagcttcagccgaatcttcggagcactgtgatcacaggttttggctttcctnaaagttcctttttggaaattctggatggagctgagcaaggcccctcggctcatgccattcacagcctgagacgagagctgggcaggtgcctcggtgctcgcaggaggcaagggagctgctggtnnnnnnnnnnnnnnnnnnnnnnnnnntaatgcagatatcccgaaaattcacgttcaaaatggtgcatgctctactgatgtagagggtggagttggcgatgacggggacgtgagaggtgagctggccccagaacctgaattattggagttgctgtacttcgctgaatgctcttcactattttcaagagcagatcgtttgacttctttcgagctaaaatctttcttttttttctttcctcctcagatccatggtgg

SEQ ID NO: 434231 - DNA, 1264 bp, Homo Sapiens
ggctcataactagctttgcttactaaaccaggttcttttccatttgttattaggtccctttcttttttataacagcctcaaagtttcatgaattgctgcagtaaacatagattttccatgtttgtgagtctgcaagcccagctgggcagctctacttccaggtggtaagggtggatcagacctattccatatacttcttgttctccttgtccagtggtttctagggatatgttctcatgatgaaccccgcagaggctcgtgaaagtgagaggaaactaggatgcctcttaaggtcttggtcaggatggggtctcctgtcacttctgtcacaggctattgtaagtcatatgagcaagctcaataaaatataaacaagtcagataaacagtgggaggaatggcaaagtcatatggccaaggccatgagtgattaattttaacacaggaaaaaagtaaagcattaaatgcgattatttaatatacaatgtcttattaactgaaatataaaatgtgtttactgtaaaatataatctgcttatctcaccaaaggaatattatctttaaaaaatgtcattacttctaaggacatcatcagtctgcaacttctttccatagccttaatcaggatgctgtggcagctcccacattagcctcgccttctaaactggtagatgtcctaggaaaccatacatctatgtatttttcttattttatacgtttaggacaatgtatagctaattacccaactttttatttgcatacaaatctaatacaactgaacacaatcagttttatcacaggtataatggatttttcaatagtgaggaggtgcctccatgagccttctctttagaaaagtggcattcaagactcttcatttgaagtgaagattgctatgtcttttgcattgctctattttacataaattaagttataaattgacactataatcaactgacaccatgatcagtgatgatgatcaccctcatcagcactagagttgacttgtttttataacccctttgcatgtatgttgaatagcaaagttcatcagagaacatgtattagtcaatggtaagtaagatactctcatctaagaaataacatcacctcttctaatgaagttctaagaagagagggaagaaaaagtcttgggagctagtcagggaatagtgtgtatttgcaattacctaaactgaactctaccattactcctaacccagttcctcctcctgtgttttacatgattaatgccacccctgcct

SEQ ID NO: 434232 - DNA, 884 bp, Homo Sapiens
ggcggtggtgggagggctgtttattggcgagggtccctgcggtgtggccgcgggtggcggtcacaagtgccgcgacgcagtcggtgcccgtgtatcccggcaggcgcagagcgaacttgcggcgcacgtcatcgggcacgaacctgccggccacgaagtggtggcgcccggagaagcggccagcgcagcgcttgggcgccgcgagagacaccagcacgtcaggccgcagcccgtcctccgaatcgctgccggtctctgcgtcccagcctgaggggatgtccaggctcacgagggggatggacagcagcttgagcgtggccagcgcgcgggtgcaggggcccccgacctcgcccggctccacgccggggcccagtacggcatccaccaccagcccataggcttcgttaatgagctgcacctcagtgggcaggtagctcaggaaggggatgtccatcttctcgcactgggtggtcaggtcccgatgcagcaggtccagcgagcgtgtggggtagaagatggtgggttcatactcaaacacccgcaggtgccgggcacagaccagccccactgccccgttctgctccgggccacacacgaccagcaccgtcctctgcttccgggagagagcgggcaacgggaacgccttggtcacagccacggcactagcatgaccgcacagctccacgagctgctgccgcccaaagcgataatcctccagcagctcccgctccagggcggctgcctccgcggtgctgaggaaatgccgctcttcgggcgcctccgacgggtctgggccggctgcgctgctcatggccgaggtgagcccgggcgccagggcgctgccgccaccgccaccgccttttaagcgcatccgtggagggagg

SEQ ID NO: 434233 - DNA, 928 bp, Homo Sapiens
  misc_feature (44)..(80): n is a, c, g, or t
gatgtatgactatatgggcgctggattttcacgcggggcggcgnnnnnnnnnnnnnnnnnnnnnnnnnnnnnnnnnnnnnatcaggccaaatcggccgagctcgaattcgtcgagagcggggcgtccgggctcacctcggccatgagcagcgcagctggcccagacccgtcggaggcgcccgaagagcggcatttcctcagggccttggagctgcagcccccacttgccgacatgggaagagcggagcttagctcaaatgctaccacctcccttgtccagaggaggaaacaggcctggggaaggcagtcatggctagagcagatttggaacgcagggcctgtttgccagagcaccgcggaggcagccgccctggagcgggagctgctggaggattatcgctttgggcggcagcagctcgtggagctgtgcggtcatgctagtgccgtggctgtgaccaaggcgttcccgttgcccgctctctcccggaagcagaggacggtgctggtcgtgtgtggcccggagcagaacggggcagtggggctggtctgtgcccggcacctgcgggtgtttgagtatgaacccaccatcttctaccccacacgctcgctggacctgctgcatcgggacctgaccacccagtgcgagaagatggacatccccttcctgagctacctgcccactgaggtgcagctcattaacgaagcctatgggctggtggtggatgccgtactgggccccggcgtggagccgggcgaggtcgggggcccctgcacccgcgcgctggccacgctcaagctgctgtccatccccctcgtgagcctggacatcccctcaggctgggacgcagagaccggcagcgattcggagggacgggctgcggcctgacgtgctggtgtctctcgcggcgcccaagcgcttcgctggcca

SEQ ID NO: 434234 - DNA, 1528 bp, Homo Sapiens
  misc_feature (677)..(734): n is a, c, g, or t
  misc_feature (1439)..(1459): n is a, c, g, or t
gggtataattttcaaactctgtcaataacttgctgggtccaacctgcagaccctggctgcgtgatggatgaagaaatgcactcagacacaggtatcctgtgaaagaatggggtaggggactgggcagctcccagacactgaggagggtgctatgaagagtcagcaggtgctataaagagtcagcaggcacagccctgtcaggctggggctccaggcatttattcagtacagatttaatgacaaagttctcaagtaaacaccacaccactagagggtaattaacattgctgacctcctgagtagagagcagtcatgcgcccgcaaatgatcaaaggtctgttttaggaccacatgagtaaacaagctatttagataaacttctctacattcctatgtatctacgccctaagcttttaagagaattcagctgccttcagccaaatcttttactgaaggtatgcaaacctcccagccttccaagaagttttgtgtctatctcctacaacttaatttttataatttctcccaccaccctgacagatcccctacaaaagaccatgtttcttctcagcttgctcagtccagctgagccagctttccactggactcctgaatgtgagaaggacacaggctccccggactatccagaagcatgcctcatcaccataaagctctgnnnnnnnnnnnnnnnnnnnnnnnnnnnnnnnnnnnnnnnnnnnnnnnnnnnnnnnnnnttcctttctgcagaggcacctgctgtcacttgctcctcacgaattctgctagagctacactatgtgtagacatatggcagcgtgctcctcagcctcttccatgctggtttgtccactgaatttatcttggcgatttttcctcgtgattacatgtacagctgcctcattatctacagtagctgggatgcacatttcacatgtttatgtacactgacttccaaaaggttgcacttacagtatgtgagtttctaaaaaggagagaccatgttggcagttctccacacagaagacaaactgagaagggagagctggcacgaattactcatctgtccacagagatggtgagacagctcagtgtgggaagctgtataatggaagtatatacaattctacctgtaatgtgcaaattaacaaaggacatttccatttgttaatttttcacactttcaaatgttacccccccttttaacaaatttaaaacctttccctttatcacccccaaatttctccaaaaacttttaaagattcccaaaggaaaaggggggccaaaactttttaaaatttaaaaacccccaatttaatattgtattttgtcacccccaataggggtccactctcttcaaaaagggccctaagggggcccaatatcccaaacccctttaaaaacctctttaataaccctttttgaaaaaatgtcggacaaannnnnnnnnnnnnnnnnnnnncaccccctcaagtggtggctttttacaactattaggacagggggggccccccctctcccgctttttttt

SEQ ID NO: 434235 - DNA, 854 bp, Homo Sapiens
tttagtttttcaacaaggtttcttttatttatttagcaagaaattactctttattgatcaaatcaccaggaatctgccgcaaaagacttaacatcttaatgaccactgaggcctgggctctgaggcttgctctgcctctcccagtccttaatggggtttagagggagagacgtcattaacagagaccaagtcagatggttgcaggtcctcctttcccagtcatcagacaagttgctcaattcttgtccagagcaggaaagagccagtacttcagtaaaattgaataaagaatttgatgttgcattataagatctctcttaacaatttagatttatcaacaatattggtccaaaactcatttgcttctaatttttttcattttgcaatttactttgtgtgtgtgttactttaataatctcactccctgtgcagaaattaatcaaccccgtgcaaagaaaaatccctcaacctggaatagcttcatcttactttggcaagagaaaacagaggtatttttgctcctcttctacccaagtgatgaacaaatatccccccaaagttcaaaatgttactctggcctcggaatgcatataaagactgctttagatgggctgattccaatcacctagaaagggcagccggaaccactatgcaggcagccttctttggaaatttcttacaatcaactcttgagaaccatccgtgattgtggacaatggctctaaggtccaaacaacttctgttctttcatctcacgagctaggctcagaggaggcatttgaactgtcaggagcaagaacagcagctgtgggcccacgagggaggacttcaataactcgcggcttgtcaatgat

SEQ ID NO: 434236 - DNA, 1019 bp, Homo Sapiens
  misc_feature (18)..(18): n is a, c, g, or t
atctttacttaatcccanctttcaggattatccaagccattggtgggcattgaacagcaaacctgggttcctaacggtttggttaacacaccagcacgtccccaacgacggcgctgtccggcattatgaactcatttggttggcatactacagtggcaactccaccgattataatccaaagggttgaccaccgtttgcccaccggtcactgccgtccctccttcctcagccgcatcccgaaagcctttgaccatgagtggcgttaccttttcgcgttcctcctcactcatactctggctgacgctgagtaacatcaacatgttgtcacactcagtaatccccatggcgtagaggtcactcagcacgttggcacaagctatgcgccccatcatgtagggatcttctaccaaggggtaaaagaagtccgtggtctgcaccagtgacaggcccccgtgcctcagggggatgacgcaggagtccatcccgatgcccagggctggaaaggtggggctggggcccgctcctgccggcaggccggcttcctgggacgcctcttcctggccacccaccaggccccggcccagcgggggccgcacgtccggccgcgtcagtcccgccaggagtttgagcagcgcctcctgcgggaccttgcagcctcagcccttcatgccggagaagcccgtcagccgccagctcgggctgaggcccaacgcctggggctcgaagggccggtagttcgagaagctccggcccagagtcaagcccgccgggcccgaggagccttccgccgctgccatcgcctctccgcaggcgcccgtcgccgaggcttccgccatggcgcctgcccggcagggaagcgagaggagaagagggcccttttattttccactcagattaatatgaagcaaaagtcaaatattacctgcagggattctccctagcgctactcaagccgtcagacccacggcatgcacatcttcctgatagaggagccgccggactcccttatttatagcctg

SEQ ID NO: 434237 - DNA, 1251 bp, Homo Sapiens
catttggcaatttactttgtgtgtgtgttactttaataatctcactccctgtgcagaaattaatcaaccccgtgcaaagaaaaatccctcaacctggaatagcttcatcttactttggcaagagaaaacagaggtatttttgctcctcttctacccaagtgatgaacaaatatccccccaaagttcaaaatgttactctggcctcggaatgcatataaagactgctttagatgggctgattccaatcacctagaaagggcagccggaaccactatgcaggcagccttctttggaaatttcttacaatcaactcttgagaaccatccgtgattgtggacaatggctctaaggtccaaacaacttctgttctttcatctcacgagctaggctcagaggaggcatttgaactgtcaggagcaagaacagcagctgtggccccacgaggcaggacttcaataactcgcggcttgtcaatgatccgggccgttcggtttcccttttccacaatgccaacgatccacgcttggtgaccctctccgtacttggaggatttgatttcagaacaaaagcgagccgcctgttctcttggcagacaaatcagtaatcccccagaggtttcagctgaggttccttgaagaagcccaaaccgtccactggccttgctgacggcagccatcttggcaattattggcagattatgaataacaaaggacacttcatttctttgttgttttgcaaggttctgggagtgtcctagaatgccaaagcctgtgatatctgtggccgcatgggcattaaatgtgtgcattaaacctgcagcagttctgttgagggtagccatattgaacatggcttcctgataggccagctccacctcttctctggagaccaccatctttactttattccatctttcaggattatccagccattggtgggcatagacagcaacctgggtacctaacggaatggttaacagcagcacgtccccaaagacggcgctgtccggcattatgaactcatttggttggcatactacagtgacaaatccaccgattataatccaagggttgaccaccgtttgcccaccggtcactgccgtcccaccttttccagccctgggcatcgggatggactcctgcgtcatccccctgaggcacggaggcctgtcactggtgcagaccacggactacttttaccccttggtagaagatccctacatgatggggcgcatagcttgtgccaaggtgc

SEQ ID NO: 434238 - DNA, 1587 bp, Homo Sapiens
  misc_feature (1408)..(1422): n is a, c, g, or t
tttttccggcccccaaaagtggaaagtggggggccgcggggggcccccgaggggcgggtttttaaattgtgtgagagttaatatggggtggcctcccaggggttgtggcggctcctcccgcgcttgggaaagagggttcccacagccttacaggggcctcttcagagaaccctcgcccatttttgggaggtttgtctcccagaacccccctccgggtttagcccgccccgggcacgttctttttttattggtgggggaagatagccaaaggcatttaaggtcatgtcccccaggattctcccctagggagaaccagctaagggaccagtgttccccttacgctgagtggggggccgcgccgcccaaaggaaagggtctagaaaaggcttcttgaggggccgaggcggcccgacagggttgggcctctcgcctttttgtttttgtttgcgaccgttgatttttaatattttcttaaaaaaatacaaaggaaattaactctgtaggtcaatacaactcagggaaagagggaaaaatggaatttcagagcaaaggttgtttaggttatcacattcccacactcctaatacccacaaaacaagaatttcactccatgacacagaggaacattgaatggtagctcagaaatgttgatagctgaggtactgaaactaacaaaaggattttggttgtccttgattattctgtcctgtgatgaataaaatctacactaaaggacaggtaaggaaaacttatagcagaaaaaagactagatgtaccaaacacagcagtacaaaccactccttggcagacatgtgcttctaaaagaatggggcagtaatcaggtagctgaactactaggctactgtcactcccagcccatccccaaataaatagtgtggaagtgtaatagtgtagtagtatttgatccaacaaagaaaggctttcacccccattcaaggcaaacattgccatggctagatgagccctggcaggtaataagatgactgtaaaatcacaggttcttctagtttatccccagttatactgaactcccacattgatgtcatcttctctcatcccaacatttgttcactcttttatgctgtctccagtgcgaaagacctcggggaaataaaaagatccttcaaataatatacccttctcagtcttccaggttatgtaatacttcagtgctgttctaggttcactcacaatcaaattcagtttaattcacttaattctaacttcaattctgatatacaaatcctgacctccaaaagaagtgtcagatgagtctctctctcccttgtccccaaagttttgtggggctctcccttttgtttccctctagaatggaactgtgttgcccctagctacctgtatatgagaaaatgtagttgttcctggnnnnnnnnnnnnnnngacttggattttaccaagtttacttaaactggtatctttccaatcatctaggctggatattgcccatatctagtaggctatactcaccttagttctttgcaacatatgaggcacatcatacatatagtacaccaagcatgtggtaagttagaaatgacaggaaag

SEQ ID NO: 434239 - DNA, 1686 bp, Homo Sapiens
  misc_feature (114)..(130): n is a, c, g, or t
  misc_feature (194)..(197): n is a, c, g, or t
  misc_feature (212)..(260): n is a, c, g, or t
cagagccccctctttgtgttcctagtggcccccgccgggtttctctctcttggggggaaacccacaacctctatgagcccccacttttctcccctttttccctttatagggggnnnnnnnnnnnnnnnnnaaaagagaaatggtttctaaaaaaacttttttcggaggggcccaagggcgggcccccccagggnnnngtttttttagtggtnnnnnnnnnnnnnnnnnnnnnnnnnnnnnnnnnnnnnnnnnnnnnnnnnttgtcatctacaacacatttatttgtacaatccagaaactagcaggaccaaaattagcagcaatgctgagacatttactggcagctttgccttctaccctaaggtcaaagtacttgagacattgcctgtgtgcctaaggaggcatcacacaaggaaagccccaccccctacttccttcatctgagcaaaggaacctgtttacatgcacagtgcttagtgggtgggactctccaaagcagtggaaattcatctttaacctaatttatacaggtctgcgtcacgatggcaaattgaaggtgccatgatttagctggtttctctggaacattcctttcaggagcccacacttgtcacacttcatgccccaaagggatcaggtgctctgggatgtctacctggaatacatccttgcctcctttcctaggtatgggctccagtaaccacctggggtttgaaatcacagtcaggtacttctgcttcaggttggtcagtgcagcttgattttctagttccacaacctcatcgggagttaagtcttcggggcattgcaaagtttccccaatgtcaacgagtcccgctatcactcctcgaccaaacttttcccctttcctgagcaaggcctgaatctgagcaggagtcatcccgagtctctccaccagcagctcccgccaggcatcgccttcccagtccctgtgagcaatgtggacggcgatggtacagttccgctggctgctcagcaggggacgccagcgcgtctccacagtcttgattccatttaagacaaagccagcataaggctgccggaaggagaggcagccaaacttcatcttcgcaagcgccccgggcctcccgtagccttgatggtctcctgcttccgtctgtcactgatgtccagcaccacagcaggcccaagggaaggggctgggattcggctgactcaggtccatcccatggagtctttggggcggtccggagtagggcggggacagctggtgctgcagagagtacctgctttacggccagaggaggaaacactcttccacttagcttctttaccgtccgcaagaaggctgagcacacaggctcccgcagcatgggccctggcacctgtcagccccggcaggtctcacggcctccggaaccatggaccctgcgagtcgtgggtgtctagggccgactccggcttttcgccacaggaatgaacagtcctctgcttccccgagacccagcgaggccaccggagccaggacgatgggctcccaagcaaggagacgtgggccgctgtgagaagagggagcgcctggctagtgtccaggctgcaaggtcgttgccgctaactccgggaaaccagtggccagtgacaggtgttagcggtctataactcttccgctttcatacagctcccgtcatccctttcacgaagaac

SEQ ID NO: 434240 - DNA, 891 bp, Homo Sapiens
tttcgatttcactaacctcatcgggagttaagtcttccgggcaattgcaaattgtcccccaatgtcaaccgagtccccgctatcactcctcgaccaaacttttccccctttccctgagcaaggcctgaatctgagcaggagtcatcccgagtctctccaccagcagcttcccgccaggcatcgccttcccagtccctgtgagcaatgtggacggcgatggtacagttccgctggctgctcagcaggggacgccagcgcgtctccacagtcttgattccatttaagacaaagccagcataaggctgccggaaggagaggcagccaaacttcatcttcgcaagcgccccgggcctcccgtagccttgatggtctcctgcttccgtctgtcactgatgtccagcaccacagcaggcccaagggaaggggctgggattcggctgactcaggtccatcccatggagtctttgggtcggtccggagtagggcggggacagctgctttacggccagaggaggaaacactcttccacttagcttctttaccgtccgcaagaaggctgagcacacaggctcccgcagcatgggccctggcacctgtcagccccggcaggtctcacggcctccggaaccatggaccctgcgagtcgtgggtgtctagggccgactccggcttttcgccacaggaatgaacagtcctctgcttccccgagacccagcgaggccaccggagccaggacgatgggctcccaagcaaggagacgtgggccgctgtgagaagagggagcgcctggctagtgtccaggctgcaaggtcgttgccgctaactccgggaaaccagtggccagtgacaggtgttagcggtctataactcttccgctttcatacagctccc

SEQ ID NO: 434241 - DNA, 1267 bp, Homo Sapiens
tggatgtctacctgaatacatccgtgcctcctttcctaagtatggctccagtaaccacctgggtttgaaatcacagtcagtacttctgcttcagttggtcagtgcagcttgattttctagttccacgacctcatcgggagttaagtcttcggggcattgcaaagtttccccagtgtcaacgagtcccgctatcactcctcgcccaaactttttcccctttcctgagcaaggcctgaatctgagcaggagtcatcccgagtctctccaccagcagctcccgacaggcatcgccttcccagtccctgtgagcaatgtggacggcgatggtacagttccgctggctgctcagcagaggacgccagcgcgtctccacagtcttgattccatttaagacaaagccagcataaggctgccggaaggagaggcagccaaacttcatcttcgcaagcgccccgggcctcccgtagccttgatggtctgctgcttccgtctgtcactgatgtcgagcaccacagcaggcccaagggaaggggctaggattcggctgactcaggtccatcccatggagtctttggggcggtccggagtagggcggggacagctgctttacggccagaggaggaaacactcttccacttggtttctttacctttcagccgcggccggtctcacggcctctggaccctgagagtcgtgggcgttcagggccgactctggcttttggcctcagagtacagtcctccgcctcctcgcgacccagcgaggccaccggagccagcgaggagacgtgggccgcggtgagaagagagagcacccggctcgtgtcagggctgtaaggtagctgccgcttactcccggaaaccggtggccagtgacagatgctagcggtccataacttcggctttcatgcagctcccgtcgtccctttcatgaggaacgtacgtgtgcgcgtaatcacgcacgtacgtacaccacgcacgtacgcaggaggcccgtattcagccacgcctatacaccgccaatcgctaggaagccacgtattcacgaagccacgcagtgacgtcgccacgcacgtacgcacgcacttgccacaaggagacgctgttcagtttaccggatcctgtcccgcgccagccaaccaggacaaggccggggagctcgagacaggcagcctagaccaagaaccggaaggaggaaaaggaaccggagggaggaagaggaggggcgggacgagaccaccaggcaggatttttaagcccagagctgc

SEQ ID NO: 434242 - DNA, 1259 bp, Homo Sapiens
gaatgcatcctggcctcccttccttagggtaggggctccagtaacccacctggggtttgaaatccacagtccaggtactttctgcttcaggttgttcagtgcagctgaattttcctagttccaccacctgcatcggggagttaagtcttcgggggcatggcaaagtttctcccaatgtcaacgagtcccgctatcactcctcgaccaaacttttcccctttcctgagcaaggcctgaatctgagcaggagtcatcccgagtctctccaccagcagctcccgacaggcatcgccttcccagtccctgtgagcaatgtggacggcgatggtacagttccgctggctgctcagcagaggacgccagcgcgtctccacagtcttgattccatttaagacaaagccagcataaggctgccggaaggagaggcagccaaacttcatcttcgcaagcgccccgggcctcccgtagccttgatggtctgctgcttccgtctgtcactgatgtcgagcaccacagcaggcccaagggaaggggttaggattcggctgactcaggtccatcccatggagtctttggggcggtccggagtagggcggggacagctgctttgctgccagaggaggaaacactcttccacttggtttctttaccgtcggcaagagggccgagcacacgggctccggcatcaggggccctggtacctttcagccgcggccggtctcacggcctctggaccctgagagtcgtgggcgttcagggccgactctggcttttggcctcagagtacagtcctccgcctcctcgcgacccagcgaggccaccggagccagcgaggagacgtgggccgcggtgagaagagagagcacccggctcgtgtcagggctgtaaggtagctgccgcttactcccggaaaccggtggccagtgacagatgctagcggtccataacttcggctttcatgcagctcccgtcgtccctttcatgaggaacgtacgtgtgcgcgtaatcacgcacgtacgtacaccacgcacgtacgcaggaggcccgtattcagccacgcctatacaccgccaaatcgctaggaagccacgtattcacgaagccacgcagtgacgtcgccacgcacgtacgcacgcacttgccacaaggagacgctgttcagtttaccggatcctgtcccgcgccagccaaccaggacaaggccggggatgccgggaattccggaccggtaccagctggcagtaaggagggaggaggaa

SEQ ID NO: 434243 - DNA, 1318 bp, Homo Sapiens
  misc_feature (194)..(194): n is a, c, g, or t
  misc_feature (623)..(657): n is a, c, g, or t
  misc_feature (693)..(713): n is a, c, g, or t
attggggggagaaattcccaaggcccctaagtccaggggcccaggattctcccttagggaaaccagggtaaggccccatgtttcccttttccctactggggccccgcggcgcccaaacggaaatggttcttaggaaagcttttcgaggggcccgagggcggccgacaaagatataatttataagtagtttgtcncaggggttgggttttttcatgggtttttgttttgtttatttcgaatactgaaaaagtcctttgggctctgtggggttccccacgctcacggctcctttctcccacactcactgcccttcttcccacagcaaatctatttcaaggacagtactttttaaaatgattaatgttgagttctcaactagctctgcagaactagaggagctgtttgcatctgtctgtgcggatggagtttcttttatctgacaccaggtctccaaccacactgaaacaaggcatttatctacagagctcaactagaaccccttttcattaggctactccacttccttcccctcatacctaccccacatcagccacgtggttaagaaggatagtcaggaatgtttttaccaactccaagccctaattcatactcctccatatctnnnnnnnnnnnnnnnnnnnnnnnnnnnnnnnnnnngaatttcattgatatttctcccaactgttatttggnnnnnnnnnnnnnnnnnnnnngttcaaggtcttggtgctcagcccaaggggctccatgtgctgggacaccaacaggaaagggcttctgcctctccagcccacacccgagccacctcctgacccctggctgcaaaagcaggaaggggcaggagccagcacaggacccgggtggggcagggaggggaagcgtctcaggatctggcagagccccgggcagcatcattcaacttggccacccgcaagcttgctggtgacgagcgaggactttctctggggcagatcctgtggggtggggatgtgatcaccagtcaccaggttcttgtctggtcctgcacttggcagctgcttattcttcatcttggctttggccatgttgtagtctcctgagtcaaagtacttttgccctttctggagtctcttcatgaggaagtcggagcctccaggcttttgtcctaggcttgggtatttggcctttagctttgcctcttcagctctctcaggcagaataccttctttctcctgcgtgtcctgcttcttgtttctgggacatggcgggaccgggactgtggagtgtaaggggcccgggaaggcaaccggagaagggaagggggaggggaaacggggac

SEQ ID NO: 434244 - DNA, 831 bp, Homo Sapiens
cggagggacgagagaaaggcaaagtaagcagagagaaagagcatagagagctgaaagagcggggatttgtagaagcgaggaagaagggatacacacatgagggaagaagcgaaaattcatttcaagttgaggatttatttctgtaggatagatggtttgatcttcttctgaaatgatgcatcccaaaatttatctctaatgcttaaaaagtgcacaatcctaaaacctccaacattcaaacaggcaaatgcctgggggcagtctgcatttcagtttctaacatctttccctcatttccccacacacccaaatgctccaatttaggccttaatttcctacatgggaaatcaggagggaattgataccacatcagggatttacattaatttgacttgctcttttcaaatttcaaattcgcctctacttctgttcaacaacaaaacctccagaaaaggatccagtagaacctctacagacttcattcgaagaacctcctttagctccaaagaaagagggtaagagactatgccccatacccctttctggagtctcttcatgaggaagtcggagcctccaggcttttgtcctaggcttgggtatttggcctttagctttgcctcttcagctctctcaggcagaataccttctttctcctgcgtgtcctgcttctcctcgccggtctcctccgcagggttctcttcttcttgtttctgggacatggcgggaccgggactgtggagtgtaaggggcccgggaaggcaaccggagaagggaagggggaggggaaacggggacaacctgcgctgctgcttcggctcctgtcactccgct

SEQ ID NO: 434245 - DNA, 966 bp, Homo Sapiens
  misc_feature (166)..(200): n is a, c, g, or t
atttttattacccgttccacccatgacagcctttattacagggccactagacctttcaataggtactccctcgttcccctatcctccccactcaagcacgtggttaaaagatacttcagaatgtttttaccaactccagccctaagtcaaactcctccatattctnnnnnnnnnnnnnnnnnnnnnnnnnnnnnnnnnnnggaatttcagtgatattgtcccaactgttatttggaaaaaaagttaacacaagaaaggttcaaggtcttggtgctcagcccaaggggctccatgtgctgggacaccaacaggaaagggcttctgcctctccagcccacacccgagccacctcctgacccctggctgcaaaagcaggaaggggcaggagccagcacaggacccgggtggggcagggaggggaagcgtctcaggatctggcagagccccgggcagcatcattcaacttggccacccgcaagcttgctggtgacgagcgaggactttctctggggcagatcctgtggggtggggatgtgatcaccagtcaccaggttcttgtctggtcctgcacttggcagctgcttattcttcatcttggctttggccatgttgtagtctcctgagtcaaagtacttttgccctttctggagtctcttcatgaggaagtcggagcctccaggcttttgtcctaggcttgggtatttggcctttagctttgcctcttcagctctctcaggcagaataccttctttctcctgcgtgtcctgcttctcctcgccggtctcctccgcagggttctcttcttcttgtttctgggacatggcgggaccgggactgtggagtgtaaggggcccgggaaggcaaccggagaagggaagggggaggggaaacggggacaacctgcgctgctgcttcggctcctgtcactagggttgctcagtcaaaatggcggcccttgcccgtccc

SEQ ID NO: 434246 - DNA, 1414 bp, Homo Sapiens
agcggggggcgccattttgactgagcaaccctagtgacaggagtcgaagcagcagcgcaggttgtccccgtttcccctcccccttcccttctccggttgccttcccgggccccttacactccacagtcccggtcccgccatgtcccagaaacaagaagaagagaaccctgcggaggagaccggcgaggagaagcaggacacgcaggagaaagaaggtattctgcctgagagagctgaagaggcaaagctaaaggccaaatacccaagcctaggacaaaagcctggaggctccgacttcctcatgaagagactccagaaagggcaaaagtactttgactcaggagactacaacatggccaaagccaagatgaagaataagcagctgccaagtgcaggaccagacaagaacctggtgactggtgatcacatccccaccccacaggatctgccccagagaaagtcctcgctcgtcaccagcaagcttgcggggtaacctgagcccccctctcctccccttcctcaaccactggacgtttatatattataggcagggatgaaatgggcacctagtcagatcttctcagcttgctagccagaaatgactgtgattctgctgggggctgctgagaaggtaatgtaggttgaaaaggggctctaagtttatttatttcgttagattgacacttccacacactccctgtagtccaggtagggcctagaaataggaaaggctaggattggataatgctgcaaatgctttttttgtgtgagaaactggagagatgtgatttctccttttgggagagaatgtcccaaaattgattaggctgagccttgggaatagtttggcaggtttaacatcccaaggctaacctaacgtagttgggaaaggtagattgaatgagacatgttttctgtgcttctaagtgttctgtcccttaggctgctattgcttcatgtttccattatggcaggtttagagaatccttaaaaagaaaaattgacttgcttgcctaaaactacagtgcccccttagcctccattacttagtatctcttacagtttgctctggctctcaaataatataaagattgatgaacattattcacagaaaatgggcaccttctctctctcttccaggcatgttgcttttgaaagtatcatggggatagtggggacgaggcactggtttagggagtcaaggatatctggggttctcactctactcagtcccagcagagctgttgtataaccttgattaagtcatttagcctctctggatttctatttcctcatctgtaaaatagagttaaatgtatgtaagattgattctgattctgaagtcttaactgtcagcagaaaaactccatactgttcattataaaactaaaagtgaggaagactcaggtggtgt

SEQ ID NO: 434247 - DNA, 1352 bp, Homo Sapiens
  misc_feature (1225)..(1260): n is a, c, g, or t
tagaaacaagtcagtgctttattaacctggcaaaggggcagctaggcggcctgagcagcccctgccagaccctcctctgcactcctctgcctaagtcacggcccaagccctggacacgtaggagtgtaggcgggcaggggcaaggccaaggaaggggtggagttgtccaatgcagatgttaaggtccaacccgacttccttactgagtctagggtgtgggggcccccctctcaccccttcctccctgcacagctctggctcttcctggagtcaggaggctgttgtgtcccacatctgctgtggtctggaaggtgatcccatccccaggcaatggggaggccaggaagggccagagccagacgagggccccagcggggcccccagggctgcctgcaggttgtggcagggacccaggtcataggagtgctggccccgagcccactcccatgtggtctggccccgcagcagcagcatcccatggaagagcagcccagccccgcacagcagcgcacccgccacgcacgtgtccgtcacgaaggccaaggcaaactgtgccagagacactctgcctgtgagcaacatgagccagggaagcaggaggagggcagccatgtggaggggcgtgtgggctcgcagcagggccgacagtgcagggcccagcagcacagagacgtggagcaggacgccggcggcatgaagcagcaggcacaggaagggccggtagttgccgaagcccacgcagcggcccagcaggcggcagtggtggtcccgacgcaggatgcagacgcggcaggcagagcagtgtccgctgcgtggcggcacctggctttggcattggtagcagtaagcccagccctggcccagaccgcggccggccagcatcacgccacggatgctgggatccgagcgcaggaagagccccacgttgcccagcaggttgagcagctggaaggcggccagcgccagctgcaaggcccgggccaggggtcccagcggcggcggcccgggaccgagcaccagcacgtaagccagctccaggcccacggccgcggcccacagcgcggtgagcacgagaggcagctgcgcgggcgccccgtccgtgctcccagccgcccagggctgccccatggcctggacacccagctgtcggagccggaggactaggccgcttccgtccccggccgtaatggccgaattcccgggcatatgtccgtcccctcgactnnnnnnnnnnnnnnnnnnnnnnnnnnnnnnnnnnnncgccgcttcctcgctcactaactcgctggcgctcgtcgttcgctgctcagctaggcccatagtgtgtcatctttgggggatgcttgggggtg

SEQ ID NO: 434248 - DNA, 1230 bp, Homo Sapiens
atcagtagtggctacagattcggggcgtgttccatgtcaggtcaatcacgtcaccagctggtgtcacgtgaaggatcccccatgccagaaatccttggccctcaagcaggcttgaggtcgacccaggttacccagcaatattagcacactggatcttagaaccacttcggtgaggttgttatggggtcaccaaccttgtgaacctctactcagaggtcctgaacatgtaatagaaatcctgggcacactgtccgagcctctgagccccagaatctcgttccttttgctcggccaggtgtctcttgcccaggcaggcactaccctaaagtgtgctccatgcttccctaaagccgccagcccagggccacctaatgccagcctgggaggaggggagtgtggctgccccatagcttgaattcctttattgacaagatattggtttgcatttttaaaacacagctgtttaattttttcatttctacaactacgttttaatcttttaataatctcaacaacagacacaatgtaactgcccccaattctctgaatcacacagacaatatcgacaagcagagaaagaagagaggaggtgggatgggacaaaaacccgctcccccaaatcaatccctaaaaccacttctcccccaagagtcaggagaagtacctacaacagggccacagcacttgccaaacacattggaaaaaatcaggagacagttggttacatttttgacactaaaaagtctggagacggtttttgctgaagagtaggtgaagatagccattttgttcagaaggatttccctgtaatgtatgtcttttcttgcaagaagagtaggtgaagacagccattttgttcagaaggatttccctgtaatgtatgtcttttcttgcctaattcttccctaatttgcatgggggaaactccagatcctctttaagacattcctttgagtggttcacgtcccctcctgagcagcccagggctggcagtgatggacgggcggcctcactctgcagagggtgcctgctgcattgcagtctcttctcatccttcctcctcagttccgaacccaggcaggtgaagaggaggccaggagcagatgttaaattactggtatttgctgacacagggtccgctgggcttgagaaatgccatgtggtgtcacactccacgcagcggtcttctctgcttggctctttcctcaaagactcttcactgtgaaagta

SEQ ID NO: 434249 - DNA, 796 bp, Homo Sapiens
gcccagccgccacagctacagcggttgagagcaggctggatcccagatctgcaggcgggtgagcaggtggagcccagtgaagagatgttcctgctgcaggcaattatgcaaagtgagaagtgattgctttccttgtcaaagacaacccctttggaaaaagctttttcctccaggaccctagggaaatgggggttgatgggaacctcagggccttcgtagatgaaaaagcctgaatggagccacagagcagaggctgctgcctgctcagcagactttagccacacaggtttccacggggaccaagcctggcccgggcctaagggcccaattaaggtggtgaacttggagcatttcagagtgctgtgggcgggctcctgtcttcaccacggcctgcctgggccagggcccgtctccgggccaggcgtgacttgcagggaggggaaagcttcatggagcagaggccatcagctagtgcctctggctcctctgctagttcgttctcttcgtgctgagatagctggcggttaagggcgatggcctcagctgcgaagagcgtcaggtccattgtgctgctgttcctggcacaccctgcagacctcgccccggtcccagccacagtcggccccgcagtgacccacgaagggtgggtagccactcagcatgatgtagaggaccacgcccaggctccacaggtcacagcgcttgtcgtagaatgtggcctggtccgtgaagacctccactacctcaggggccatgtattctgcagagccacatggggtggtcagctctggtgtgg

SEQ ID NO: 434250 - DNA, 1195 bp, Homo Sapiens
  misc_feature (79)..(79): n is a, c, g, or t
  misc_feature (245)..(245): n is a, c, g, or t
  misc_feature (358)..(358): n is a, c, g, or t
tgattccggatttcctttcaaacatgttccaagttggggggattcttggggcccagccccaagtaggggaaggggcaangatttcccactgggaaagaaaggcttgggcttttgaacaggcggacttaccatccggagttcgttgccctattggggtttcggtacaaggttcaggcctggatttccggaggaaagagtcagagtctgatccgcaggccccccgagcccccaccactggcaacggncggcgagctgctgctacacgagccgtctagattggtctcgccaatgcagggagaactcgggcttggaacttactgaaagccccccttccaggtaggacgccccggcagccctnggtccttgagcttcttgagcagcagcccgagccccgactcgccgccccgtattctcgttccagtcgctgctgctctcgtcgtagagcaccactgtgtcggtgccacagcgccgggtgaagcggtcccggtcctcgccgcgcgtgaagagcgcgcgcaccggcaggttacccttctgcaggcgccgcagcatgatgcccgggatggccacgttgatggccgactcgatgtgcgacgactcgtatagctcctgcggccggcagtccatcagcagcagccgctcgttgcccagctccagctgctcgttgagccacgccaccgtcttgctgatcgccatttccgacgcgaagggcacgggtctgagcgtatctatcatgggggtcgagctgcgggagagggcggggtgcctaccagacgcccctcggggcaggcataggccgagcgcaccgcgcgcgaagctgccgctctcggagcggggtttaattccgcctcgccttacccaagccgaggctagcggttggggcagacgagacagaagtaaagccggaggttctctctgcacccagctgcagccgctggctcttagtgtcaatgaatctctctcaatgaagctgcccagatagtttttgttcctccccagtgaatgaaatccaattaattcggactccgtgctactgagaggggaggaaaaaaagtctagcggcttctaatccctccctccaaggctgcacctcaaatctacccgggcgtctttctccccggattatttaagactcgatttgctatctcttggactcagcctcgcacaccccctgcgcgaggcagctcctcaacccgct

SEQ ID NO: 434251 - DNA, 1029 bp, Homo Sapiens
  misc_feature (248)..(248): n is a, c, g, or t
ggggaaaattcgtgggcaagagtatatggtctacaccaggtaatcacaagaattcgggataatcgcatttgtatgtaaaacttctacgacgttgctcatatgagagactaggccaaactatgggggctgaaacgttgctaaagatagcaaacattgacttacgcgtatttgccttcctcgatactcctaccatactctggttgacagtcatttgtgcacccagtccctcaaggtaagacggaaagggnccaagagtcgtccactggggaaggaaggcatgactgtttgccactggattacccatccgagttctgttgcactattgggttctcgttcaaggtcagactcgatgtccgaggaagagtccagagcttgatcggcaggcccccgagccccagcactggcaacggcggcgagcttgctgctacacgagccgtctagattggtctcgcaatgcagggagaactcggcttgggaactttactgaagccaccgttccaggtagaacgcccggcagtccatcagcagcaagccgctcgttgcccagctccagctgctcgttgagccacgccaccgtcttgctgatcgccatttccgacgcgaagggcacgggtctgagcgtatctatcatgggggtcgagctgcgggagagggcggggtgcctaccagacgcccctcggggcaggcataggccgagcgcaccgcgcgcgaagctgccgctctcggagcggggtttaattccgcctcgccttacccaagccgaggctagcggttggggcagacgagacagaagtaaagccggaggttctctctgcacccagctgcagccgctggctcttagtgtcaatgaatctctctcaatgaagctgcccagatagtttttgttcctccccagtgaatgaaatccaattaattcggactccgtgctactgagaggggaggaaaaaaagtctagcggcttctaatccctccctccaaggctgcacctcaaatctacccgggcgtctttctccccggattatttccgct

SEQ ID NO: 434252 - DNA, 914 bp, Homo Sapiens
  misc_feature (710)..(710): n is a, c, g, or t
  misc_feature (769)..(769): n is a, c, g, or t
  misc_feature (797)..(797): n is a, c, g, or t
  misc_feature (811)..(811): n is a, c, g, or t
  misc_feature (862)..(862): n is a, c, g, or t
  misc_feature (878)..(878): n is a, c, g, or t
cctaactcaactgtatttgttaattacataggctctggccacagctctagatttctaaccctcccactctgcagacaccatgaaaggcttttattgaaaactaagcaaacaaagatataggagcctgtattataatgaaaaatgcctaagttaaagatgcaattaagttaaatattttaaaaccaaagattaaagaggcagtctagacaattagactgtgcctacaacagtctgtctctaggaatcaggttcattcaggacatcaaggaatgtctgaagaggtttttagagcatgcttcagtgttaggacaggagcaatggaagaatgagacaataaactaagtaattgggaaggagaaagcttttttggagaaaaagttgatagagaacaagtcaaatagatataaaaggaaaaatgaaattgaagaacagaccaacacataaaagggaaaagatgttgtacttagggtttaattcatattagcagttgtttttttaagtggctaaacgttttcaagtttatttggggacagaaatggcaacttggacccaaagaaatctaacaagaatagaaggaaaatctcagcaaactgtactgactcctagatggagcaagagcataggccactattggcgaaggactctatgtagctctaagctacatagagactccttgataaaaaccactgggaactgctcttcaaagactnggacagtgatacgaagtgtaccctgaaagtcaggacaatttgagaggaaatatcagatnaaagcaaaacatttcaagggaattattnggatggaatttccngttgttactataattattaggtagggcatacaagagcttcttgtgttcccnaagggaaatgtggccngaggaattttttaggatttaaggacaggttttaagg

SEQ ID NO: 434253 - DNA, 1141 bp, Homo Sapiens
  misc_feature (33)..(33): n is a, c, g, or t
  misc_feature (201)..(201): n is a, c, g, or t
  misc_feature (256)..(256): n is a, c, g, or t
cttttgctggctgggggccattttgcctttttntgcccagggtggcatctttgggggtgggaggttcgatttccttggggtcttccaccctctgttcaggccccctgcccaatcaaccacttattggagggcacaggcagtctttctcttatagagcccgctgctgtccctaaaaatctttgacagttcctgccttgcagnccaaaagatggggcaacagaaatagtagtttaggggataagactgaacgtttcgnctggtaaaccttggctaatttttctgtctggctctaggctctgtcagaccagccaaaggattgtacagtgacatccaaacgttttattagcagctttctccggacttcatattcattggctatggcttggttaattgcttctatcttttcccagtgggctggtcccattggctttcttcagtaaaggctttcccacatgattaggtggaacttttgctaatgtttcctttaattttgttttcaatcccgctgaagaattggaacatagttatattggctggaggtttggacattcctagagcaatacatatgcctttcaactcttgaaagacctcactaccgcctccttcttgagctttttttggaggagcattcacacagagcattctggcagcttctagttctgagatgaggtatgtgagcaagaggaggcagttcttctgaatgagaaggcgcttggtcacatccccagatgtcagtgaaagatacgggcagttcatctcccctagtagcccactcacctcaagctggaattcttcagcttcactcggactgttagttgcttgcacgttttcctctagtttacagagcactcttaattcagacaccagccaagcacagagtttggtaaactcgggggaactggctccagcagagactgcctgagagagcgctccatcttccaacaatgggcccttgtaacctagatcttccaacgactccaagatgtcagtctccatgaggtcacactccatgctactgtggtattcaaatttccgagtcgtcaggctcccctcttcgccggcaacgcgtacactcgcgcatgcgcgacttccccggaacttccaaatccacagctggcgcctcagctcccgcactgcgcat

SEQ ID NO: 434254 - DNA, 804 bp, Homo Sapiens
ttttttttgaactttggggatgtttattgcaaatggttataatttaagtgatatttacaattgtttaagacagagggcaaacaggctctgagccaggcctcagctttagaggcccatcctggagaggaaatggcacttgcagggaacatgagctcaatcactattgctcactaagcacagggtcacactggagtcatcttagggaggctgcgaggaagaaaagggagtgcacagagccatgaagcaactactttaaattctgaatcttgctgtgttcccactgagcatgctgccttcctagagcaggccttggagccatcccagggactaacacagatccttcctggggcgcaggcttctcacactagcgtagggtgcctaggtcatcctcatcattgtttatcatcacagacttctttctgcctgccagatatcttccctacttgtggctttaaaacaccagcaggaggggaagtcaaggaatgttcttgttagtataaatccatagcaaaaacgatttgagaactggatgcttcccagggttggcaggtgtgtggatggttccctgaattctttatccacaggatgcttgaatgggtggtgctgttgaggctgacaaatgtctgagctttacagacttgttcatgtttttgagaacctatggggatactcattgggcagaatcagagcccagcagaacacggggacggggaagggtaaagaggggaaaccgacagagtcctgaggtcatcccgggaggaagggggactacttccagaagcagcagcacaaagggctctgccg

SEQ ID NO: 434255 - DNA, 1717 bp, Homo Sapiens
gggaaaaccgaacagaatccctgaaggtcaatccccggggaaggaaagggaaaactaacttcccaagaaacaagcagcaacaaaaagggctctgcccgaaaactctgcggagggggtcccagggtactggggttggaggggtcccctcttgcagtgtggggttactgtttgggtaaagcgaagtcccaggcagtttcctgtgcacatttccacatggcctgcatgaggcgagtgaaacccatgtctttgggcttttccaggcctctcatcagccgttgcttcatgatggaaacaaattccttattgctcagttcgccattgccatcacagtcaaagagtgcaaacaccacatcacacacgtggtctgagagctccactttagccactgtcctggccacctgctgcatggtcactttatcaagagatgctccagccatatggtaaaaactcaatgcagtgtccacatcattaatgttctttaggaaagtaaagaagttctccacctcctgaaatgtcagaccctttccttctttgaagtgcttcttgagctgcctctgcatggcggtcagcttcttggactgcaccccactgtaggcaagtagcatgccaccaaactgcctctcagtaattctcccatccacagggtcatggcgttcaaactcaagcttcagaacatcatgctgcagtttacgctgaaattcgaggaagtttttgattgtcagctttcccttcagatcagctccaaaaaagtaggttgtgagggctgaacacaagccagacttgagggtgttgccagtagttggacgatctctgtggcgcatacccatactggtttgggagcgaatgatgctctgaacctgttcaaattcttccatatctacttctccatctccattcaaatcaaacatcttgaaggcaatttcaaaatttctctgaggagtggaaagaacagttgtgaggaaaatgtagtctgaaaaggatatgagcccacattctccaaagggtgtaaaatatactgccttcatcagcaaatttttctcgttcctgggaaattttctttccatcaaagcgttttattatatattgatccagacccaagtgttctggttgtttttcattgggtgttatggatcgcacaaaatcttctggtgtcataaacacttctgcttcaccaggctcactgatgactttcaaggtggcaaaatatcggaagattttgtctggcgtggagtaggctcgaatcctattctcatattccatcacttttctgtctctgaatccagaacgtttcttctttttctcttctgggtgaggggcaagatctgcagtctttttctcatggttacaaacatccccttcatctttattcttccctttatcaccgatgtcactttttaggttgtctacacatggtggagattctgcatgggccctcttccacaaaagaccagtacttgcagttactgcagatgctcccaggaaagccaccatcattagtcttcgccggatctggatgggctgtgatcctccatggtaccatcgagaacccacagccagttctgccaaagcagaaagtgagttcagacgaaacatcgcgtccaaacacgagctccagcagcctctcggtcaaagccgcccacctctgacagccatagagatgaaacagcggagacaaacctccaccccctccgcggacgcgctgggtcgacgatagccg

SEQ ID NO: 434256 - DNA, 800 bp, Homo Sapiens
tctttgccccaatttgctccactgtcatttaagaccagggaacccatggcagaacagcccacagaccggggacggaaagttaaagagggaccgacagatcctgagtcatcccggaggaaggagaactacttccagaacaacagcacaaagggctctgccgagactctgcggaggggtccaggtactggggtgcgaggggtccccctcttgcagtgtggggttactgtttgggtaaagcggaagtcccaggcagtttcctgtgcacatttccacatggcctgcatgaggcgagtgaaacccatgtctttgggcttttccaggcctctcatcagccgttgcttcatgatggaaacaaattccttattgctcagttcgccattgccatcacagtcaaagagtgcaaacaccacatcacacacgtggtctgagagctccactttagccactgtcctggccacctgctgcatggtcactttatcaagagatgctccagccatatggtaaaaactcaatgcagtgtccacatcattaatgttctttaggaaagtaaagaagttctccacctcctgaaatgtcagaccctttccttctttgaagtgcttcttgagctgcctctgcatggcggtcagcttcttggactgcaccccactgtaggcaagtagcatgccaccaaactgcctctcagtaattctcccatccacagggtcatggcgttcaaactcaagcttcagaacatcatgctgcagtttacgctgaaatcctccgtgccgattcagccacccggcctcgtacctagccta

SEQ ID NO: 434257 - DNA, 1214 bp, Homo Sapiens
  misc_feature (461)..(502): n is a, c, g, or t
  misc_feature (1133)..(1133): n is a, c, g, or t
  misc_feature (1169)..(1169): n is a, c, g, or t
gcgctggacaggaaggggctcttcttctccgacagggaggctcgcttcctgtgctcctgcctcttcctcactggcttcagcgattccacactggagccctcagaggagtagtcagactcgcttgtcagtctcgtccttgtggagtctgataaagaactgacctctgaccaagccggggaagaaatggttttccaattgtctgtccgccagtgcttggtgtgctggtctgtgtggctggggttctgcttctgggcggcagagctcccgtgagacgaggtggaggaggcagagagggagctgaacagggaggggtccttcagcaccagcggggaccccttgaggcagccagagctccccagagagtccctgtcatcctccccactctctgaggactcgctctccgactccgaggagcagaacttgtcgctccgctttccgaagcgaacctctctgccttttgnnnnnnnnnnnnnnnnnnnnnnnnnnnnnnnnnnnnnnnnnngctgcttggcattagaaggctctcgtgtcttactaccaggcaatatcgtatgtgccgagagtctcagcttctctcctgtccccacggtgacactcgcgtcctcctcgtccgacgtgtctgacaggatacgatgggacgctttctttggtgcaatcgtgttatttttagtgtaacttttaacctccattttgggtatagagataaaactattggatttcgtttcttttctgtagtcctttttcaataggtgcttgtcgtccaccggaggaaccctgtcctgctcgtcgtcctcatcaaactcatactcgtccttgacgggggctgtggccttctgtggctctgggttcttggccttgtgcttgaggcctttttcgaactcggagtccgtgttgttgccgtcgactgaactggaaggtgcgaaggatggtgtgtcttcctcttctgagctctccgtcgagctctcctcgctggaagtgtaagtgcctttgcctaacaggaggttcaccatcgtgggggagttggccactttcagcggcgtctcgcctttcctgttgctctgctgcgggttccctccgtaccgcagcagcagcttcaccacctttgtagtgccgttggtggcagcgtcgtgcanaggcgtgtcgtcatctaggccccttgtgttcacctncgcacctgcagccagcagctggcttcggacgtcgtagtagccccg

SEQ ID NO: 434258 - DNA, 610 bp, Homo Sapiens
cgtattcattgagtgagtttctgtgttttcaaaggtggaggagaaatttgtgctggaagtttttaagcctccgttttcttggaaatcagtctgtaacactggcaagtcttaagatagtcccatttagactttgcagatgctgaacctggctctgtaacgctgggaagtcttaagatagtcctgtttagactttgcaaaccctgtacctggctttgctcggagattcgggatgctggctcctgcaggcagggcgtgtgggagcctcgtcagaaagttttagaggtttccagcagaagcagaatgaagatggtctccctggccttttccttaattctcaattttgattgaggtgcacaagttgacttttaaagccaacgcttaagatactgattgacatcttcaagggagaatgctcccaggaggggctgaagaagccatagttggaagtggaaggtactcgtcagtgttctccacaaacctttttactctgttgtctcagccgcactggggcggaggcggtcaagggtgagaagtaccgacactcaagtgcaaactgccacgtcgttggcccatcccatcagtgggcagctggctgacgccattcactgga

SEQ ID NO: 434259 - DNA, 1083 bp, Homo Sapiens
tttttttacatcactttagaatatttattgtattccttaatgcatttcttaacatgtatagcactctttaatcaagaatataaagtcatctacttagaatcacattatcttaaagatgcatactggaatgataagtttgaagatgtaactatcaacaattcttttcaaaatcatatcaatatattactctcatggaacttgcacattctaagaagggtcattttttccccccagtactgggaaggtatgcatttaaccatgtggtcagccagaaaggctgttttatatatggtgtgtgttactcataaaaagcctgtcctttctctaatattgtacattacacaattgtagctacacctgaaaagaagtgagtttcaatgaccatcatcacctaaaaacatgaataagtttgtatatttaggaccagaggaatgatatatcgtactgtactatgcctacctctgtccagaggccagctgtctcacctgttcttcagggtgcctagactttttacccatctattatccgggatgcttctgaagtcattcccatgggcccctgtcaggtattgagaataaatacctctaaggaagtttttttcaaacctaatctacccaccatgtttattccctgacactaaaagttcactgactcttcaaatcctagacttgtccaacattattttccctagttggataaggctgaattaaaggcacttcgttaaaggaagtagccttggcagaagaaaaaccgttgttctgtagaagtgtcattcaatatttaaaatctcctctgaaccaaaacaagagcctgaaagtaaaacaccttttattttttacctctgctgtcattgctactaaggattcatggtaaattatcccacagcccttcttggcttgagaggaggtacagtacaagtagccaacagggtctcaataacagaagtattctcaaggacccttgaggatacaaaggaatactgggctgttttaaaatgagaaaactgagaagaatcaagttaggtttctatccctcttcctataagtacgccttagtctttctaagcatagatagatacttcgg

SEQ ID NO: 434260 - DNA, 443 bp, Homo Sapiens
  misc_feature (414)..(414): n is a, c, g, or t
acatcactttagaatatttattgtattccttaatgcatttcttaacatgtatagcactctttaatcaagaatataaagtcatctacttagaatcacattatcttaaagatgcatactggaatgataagtttgaagatgtaactatcaacaattcttttcaaaatcatatcaatatattactctcatgggaacttgcacattctaaggaagggtcattttttccccccagatactggggaaggtatgcatttaaccatgtgggtcagccagtaaaggctgtttttatatatgggtgtgtgttactcataaaaagcctgtcctttctctaatattgtacattacacaattgtaggctacacctggaaaaggaaggtgaggtttcaatggaccctccatccacctaaaaacctggantaggtttgtatttttaggggcccgggggg

SEQ ID NO: 434261 - DNA, 1359 bp, Homo Sapiens
  misc_feature (214)..(257): n is a, c, g, or t
  misc_feature (1330)..(1330): n is a, c, g, or t
atgggtgatttttttattttcatcctctcaggaattttccagagactactggcatgggagaaagatcaccttgatggctaatggaacgtgtgcatctgtattcttgtgttttataactttttctcagtcttaatttctaatacaataaatatggatagatacaatccacaatgagcaagttatttggggtcctcaataacttttaagggtgtannnnnnnnnnnnnnnnnnnnnnnnnnnnnnnnnnnnnnnnnnnnccacaagcgcgaccaccgcgcccggccatgaatataatttatatggacaagattcactttaacctaagtgtttccactaattctactaataggtttttaaataagtttactatcttgtgttcccacacagaagacttttctttgctctcagaagcatttgtttacaaacaccattggctttcccttcaattcagagaaaacgccctgtccaagtggcacagtgacatcatcatcatccatgagtcaaaccacctgtcctttttaggcatttctctgcgtcatttacagcagttcaccatagacaaaaatgttgtatctgaaaaaagacaatagaacaggaagctgaaaaagatacttttacaataaaaacacattctaaaaaaatgatttttgtctaattacatttggaattggaatttgcttctatcacagaccagtcaccagtcctcagtccataaaatcagcacttccagaggaaggttccaggcatcacagtgcacatcgagaaatatcagactttaaagtgctctgaaaatgaattgattcaaagaaataatatggaatatattaactgctgaattctactggtgacagaatgagttgaggctactataatttagaataaccttaaaaacagatacattttaaaaagtgttccaaaagaaaaatactgtacttgaaggtattctcgcagtgctgaaggctcacactagtgtatttccagaggtgacagttttaatagtcatattggagacgcttagtgacctgtgagccatgggttgctcccctaagctacactgcaataaactctaagctcctctagaagtaatatctatttacatgtgaagatttcaaattctcaggtatacatgagtgcactgtcagaagatgattaggcccagactctgagggtatgatcccatgatccagagcagaaagcagtcccatcgggggaaactcgtagagtgtaacgcggttttcatgtccaaacaggatggagacccgggaccctttgagaacatcccagacgttgatagtgtaatcattgtatccagcaaacagcaggcgaccantgagggagaagtccacgctggatgctcca

SEQ ID NO: 434262 - DNA, 766 bp, Homo Sapiens
  misc_feature (208)..(461): n is a, c, g, or t
  misc_feature (468)..(486): n is a, c, g, or t
gctgtaacacgacatgttgaaagggctgacaaatgaaatgtgcttctctatctgaaactaaagaaataactgtaaattcctcaacttttctgaagagccgatactaacctgacattgtactttctataaaagatagggaacagaaaaaaacttataaaccaacaaaaacttttaaaacactatcctgggccgggtgcagtggcccatnnnnnnnnnnnnnnnnnnnnnnnnnnnnnnnnnnnnnnnnnnnnnnnnnnnnnnnnnnnnnnnnnnnnnnnnnnnnnnnnnnnnnnnnnnnnnnnnnnnnnnnnnnnnnnnnnnnnnnnnnnnnnnnnnnnnnnnnnnnnnnnnnnnnnnnnnnnnnnnnnnnnnnnnnnnnnnnnnnnnnnnnnnnnnnnnnnnnnnnnnnnnnnnnnnnnnnnnnnnnnnnnnnnnnnnnnnnnnnnnnnnnnnnnnnnnnntgtctcnnnnnnnnnnnnnnnnnnnctatcctggaataagcatattacagatacaattttccaaattaaaataaaatgtatatataatgatcctttaatgaacgtttaatttctgaaaatcccaaataaatcactacaatatatagtaagtatacatggtgctaccttcccactgaagttggatgttgttctcatatagtcttctgctttctgcagagaaacaagtactttttcaatatctaatggtggggaaaaaggaaaaaaggagtgccaatcagtgtcaataaccgtggtcgcgagctcga

SEQ ID NO: 434263 - DNA, 2564 bp, Homo Sapiens
  misc_feature (1630)..(1642): n is a, c, g, or t
tcattgatgactaagtatttattgagacaaataatacaaattggtggcatacaaattattaaaaatagaatgctgaattttatttataggtgggccatcagatactgtttacaggttaagccttactataatgaactgcaaagaagtatgtatactgtttgaaatgaggaactttatccaggcaaacatgggatgtcaagagtggcctgtggtactggagacaaggaatatcaagtaattgacatgttacttgtctgtcagattttaagaatactgttatttaggcatattcaaagaaacaactgcctgttttaatagggataagtatataacgaaaacatttaatatccatacccccctcaaaaagccctttattcccaagtagcaactagtgtaaattaattttcaattcctttctacccttcctttgctagaaatacttatgcataactaaaacactcaagtcactgaagggaacaaatccttttactgtcacttgaatctaaaaacactcattttgtaatttgggcgaagtagctctcaaatataatgcatttttttctatcctatatatatacttgggtaaaatcggaaggtgagtgcttaggcagaaataagtaactattaaaccagtgggagcaaagttcagttgggcaatactctttatgatactgacaagtgaaggcttattagttccaaaagtgctggctttatttctgtagtcacagagtagtctaaaggtaaggcttacccagctcttggctcccaagttaatgttatttattcagtatgccagatttttctcaaggtgcattagctactcaggataattttactggtgggaactgagattttctagacgcctaaattaactgccaattctggtttatcttagggacatgctcattgaaacagtattctcactcagcttgaatactaaattttgttcccttattgttaaagtgatgaatatgtttgtacaatgaagacaactttcttttggctttttaggctacagcttcagcatgagaattatactttgacacagaaaatcaggtctataagtgaaatataataaagtgttctggaaagcaggagactaccttacaaccccaagagaaaaatatgtggcactaaggtctggttccttcttccctcgttgttttgtcatttttttccaaactttgggaatcaaaatctcggtgcaaatactgaattcataaattgaaacagactcttgggttctattatgaaggcaaataatacttctatgtattttgtagggttatacagtataatacctcgaatccatggttggatctgactgaacctacatagatactaatctgaataactcatatatagaaaatgtgcaatattctaagtacaaaaaattaaactggactagtttgcttttgttttatagtataaatgaaaataatctcgatggcaaactattcaattatctgagcagaaattatgaatgaaagatgtattccagacctatatgattgagggacatttcaacttgaattccccagcggcaaaagtggtgtataaactaatgctagtgtatacactactaaagtgccaagttacgtaacatctcctaattttaaaaatgaaagannnnnnnnnnnnncactgtgaagggcagtaacacaatcttccccatgggtgcaactgaatgatttatttagtacattgatgtacttaattattagtgtttctgggaagctggatttgacataaacttattttgaaaaacacggtttatgaaattttgtactaaaattattaatagacattaagtttctataatcaaatgtgaatatctgttgtcacagttttaaacgtcaaagaaaaacctttgaaaattaatatagtgataatagatatgtgctgtgtttgctgttaaatttaagaccaagaacaccacctagattgatcccttaagtaatcaaattttgaactgtgcaatgcagtttagtgtgtctttggaaaacaatgtcagagctggagaaaatacctaagaatcaaagcttaagccataaatagtacaggtatatctcagcacagctaactgggacatctaggaaaagcacacacacataataaaaccccacaattttgcttcaacagaagaataaagcaaaatggcaacatacacagtatcactttgcgtaacatttccccccaaactttagcagacccaaaatgagcttaaagaccctagaatgatgtctgggaatgctagtctctcttgctttagagagaatagtccataatgggaaaattgctaatatttcgcaagctattaatagtacttagagttaatcatgaaatattaagatttttttaactccttgatgtttcaacagtcatagaactatataaaatataaggaaagtagtatgtgaatatgctgtatataaatagaatttacactgagaacactgagaagcactaatactttcttcatgctgcacacatactgggaatacttttacagtaaatatgcaactgtttgatggagggtgatttctgccccacatttataggtt

SEQ ID NO: 434264 - DNA, 2392 bp, Homo Sapiens
  misc_feature (57)..(75): n is a, c, g, or t
tctgcatcagtaattttaatagagactcttagtggttatcaacaactggtcagttgnnnnnnnnnnnnnnnnnnnccacactgctctctggattcgaacctagtgaattctgggctcagtcctcctcctccatctctttcttgatccagtccacgtagttgagcactttggtgtagaagccatagcccctgctgcacccgatgccccaggacacgatgcccgtggccacccagcgatcagtgttcgggtcccttactgcaaaaacgcccccactatccccctggcaggcgtcctgctttagagatgggtgtccagcacagaacatgttttgagagaacacatccatcctattctttccccggagccagttctcacaggcctgtggattagctacgggcagacggacaaacctgaggtcatgagcaatcttctcctccatgaccccgaagccactgacatagcccatcaagcccaggtcgtagaaggtatcgttgtcagggaggcagatggggaggaggttgggacccagggtgacactattttccagctccagcagggcgatgtccccctcaaaattgtaggactcatcctgacggtagtccgggtggacgctgaccctgcggatggggtgatttcctagcttcatgagctcttccacatttgtgtggcccaggaacacatccaaagaggcgttgctttgcgcttcgtgttccttgggatacagggtgtgggcagctgtgaggatccagcggtcgcccagcagggccccgcccccgcgcccgtggatgttggtgaacacctgccaggggaagttgcccatcttggctttttgccctccgatgatgcgctgcctctgttccacggggttcacgggcttcccacacactggcaagcaccgaggaatcttctctcccttctgttcattcttccaaatgccctgtgctgtgcaggtgtacaccccttgctcagactccctgctgccagctctggtctgcatcttgtaatatggctcatggcagtagtactggatacgggccttgtaggtgttcactcccattgtggtggtgtaacggaagtcaccattaggcaggtttcggggctgcccacagtccttgatcttgcatctgggcatggcacgatgccacgtgccatcatcctggcagacagctgtgaaggaatgcagcacctggttcccctctatgagctggtagccttgcttgcaggtagcaatgaagtagtcacggaactggtactgaggctgcaggttctggatgatggtgaactcgtctagggtcttgggctgggggcacttgatgatctcggtggtgtagcgcagcttccagccccggctgtcccccgactcatctgtgaagaacagcagatccacagcattgctgctggtgtcgaggtcggggggcctttgcttcccacagaactcgccaatgttcttcccgttggcatagatctgtagctggtcataggggcagtgtacttgctggtggtcatcaatatcaaaaggctccaggaacttgaggtgcagggtgaggccccgctccacccggatgctgtagttgcagcgcaggtcaggggggtaggaccgagggtactccaggctggagatgtagcctgatgcctccgtgtacagctcgctgctgcactcagcctggcaggaatgcctgtcttcctgaagctcatagcctggacggcaggaacagaagtagcctccaacgtagttgtgacacaggtgctggcactggggctggggatcctcctcccctgatttgctccgggaagcacattcatcaaggtccacagcttggtagtaggccaggaagcccttgtagaacatgatggtcccattctcctcgttggagaagtctgtgtggaaggtcagcagcatcttgttcccttgggacataaattccttctttcccggggggttgcccagtggagaacccagttgcccacagaacctccccaggcttttcttatcagcagagatcttgacataatcatagaagcagccttcagaaggctccaggtcaaactgctggaagacgagcttcaccctgtatcccgtggggactgtgatcacagtggttgtttcaaagttgttggggtaaggcttggggaacagaggggaagtcacctccccaaataacttctgagggatgggaatggagcctcctgccctgcagaacagggccggcaccaggaggtacaagagccacatttctcaaggcccgtgttgaatcctgggctctcccgacagcgtcttcgtgcactgtgtgcagagggagcccgcgtcatgcacagcagggaggggagggttttctgtggagtggaggggggaccattcccggagcctcgtgccgaattcgccacccaggcc

SEQ ID NO: 434265 - DNA, 474 bp, Homo Sapiens
  misc_feature (276)..(293): n is a, c, g, or t
ttttttttcattttgcacactggcatttctcataaaactttatttggaaaaagttatattcaatgacccaatggtatcaaagtggaagaggaaagtgacaactagagattgataactatatcctctgcaatcctcagaagaaagaaaggggccctttgggttgtttcaggtaaagtacatcaatgggactacaggaaagagaatttcacacacggtctttctgcatcagtaattttaatagagactcttagtggttatcaacaactggtcagttgnnnnnnnnnnnnnnnnnnccacactgctctctggattcgaacctagtgaattctgggctcagtcctcctcctccatctctttcttgatccagtccacgtagttgagcacttttgtgtagaagccatagcccctgctgcacccgatgccccagggacacgatgcccgtgggcacccagcgattcagtgttcggggtcccc

SEQ ID NO: 434266 - DNA, 2125 bp, Homo Sapiens
  misc_feature (727)..(740): n is a, c, g, or t
cacaacaaagaccacgccatttatttacaaaggccagtgtgggagctgggggaggcagggagggaaagccacacagacatcttctctggactgcttgggaccctttcccacttggagcaaactctgttcctcttgccgtcatattctcagccatggggtcggtcctccaagcagctgggccaagtaggagagggaagaggtgatatgagcctcctctgtgctctgacagagaaatgtccaattccagatcaaaggcatcattgccaccctctcctctccttcctcaaagaaaactttctggcctggagggaaatagttaagaactgaaaggccagggggtctggaggaaaaaaaccctctactattcccacaaggcagtgaggggtgataagggtgctagtcacagccctgacagcttcagaaagggtacccacattacctctgggttacccagcatccagagccccaagggacctagctctcccggatatatattcctgcaatggactgacctttttacccacttgtctctggtggtgggagagcactctgaaccagaaaccaacaaggaatccacttcccacccaacttaagagtgtatgcacacatgtggatacacatgcacctccccactactcacacagaccccaacccccttcatgtcttttgaggggggctcaaactactggtgcctggggacacaagcaagacctgggtccatggaaannnnnnnnnnnnnncatataagcacatatgcttgaggaactaaagccaatatgaccccttgtggggcgtggcgcttagcttcattgggctccttttttcagtttaaattccattagcatctctaagtctcttctgccagctcgggcctggattcttctgcctaaaagagctatgagtgcttctgctccccactgctaattccaacttccaagccttttactcaggctgtctcccccattcccttcctccgaataatctcattccctcctctttcacacgaatttcctctgggctgctccagcgtttgttaattcctgtccagagagctgtctcatctccctcttcagacagggagaacaggcatcttcctccttaccctggaatttccaacagttcccaccaaaaagtgctgaatgaaccagaataggggcccgagaaggaaaattaccacctgtttcacctgctcctccttcagagcaagaaattctagcattggttgggctaggggttggggggtagggagaaaaagaaggaagagagttaccaaaagtaaacataagacaaaaccctagtggtatagatggaagactatgttccagtaaaccagagagctggttcctccctcgactctgcacagccactgaaagtttaaagattgcaaaagtggtgtggggcaaggaggtagagtcaatcaatgaaactgtgaaaactgtttaagtagcactgctcaaggagaccaggagagaagagtctgttagagacgtagcagtaaaaccataattctcagacagagctaaggggttggagcccatgcctctaaagtcaccctgctgtttggaaaggatgagggagaagacggaagggaggacaagctgcagagggtaaggattgacagaagaaccgaatgctgacatcgagggaggggagaggcaggaggcatgggccgagggattaggagagctgggagcccagcagtctctcgatagctgcgttgatgtcccctcctgtggcaatcagggcctgcaggttagcctcacgattgatgaagcccatggagttgagctgctccagctgctgctgaaatctcacttctggcgtctgcacctgtgagtttccacttccagccaaaagctggatcatctgctgcatgagttgctgctgggcgctggaagcccctgttggagaagatgtggctggcgtggctggtgaggaagtgggggcctcgggcgtagaccctgcgttgctgcctgctgagggtgctggggtccgggatatcccaaaggagccaaggctgggtaccagcccaggggcctcggtctgcaaggtctgtagtccctgctggatctgcagcaatgcctgcatggctcggggattggtaaggatggagagtgactctggg

SEQ ID NO: 434267 - DNA, 1231 bp, Homo Sapiens
  misc_feature (1108)..(1148): n is a, c, g, or t
caaaggcatatttccgctcagatattttatttgtgtttgtcttttttttgaggctcttgggctgctggcgaacctgggccgcatgcttctgccgcaactcttgctcacgccgcttgttgtactccagctggttgcccagctccgtctggtgctgcaggcgggtgagctcagcccgcgtgcgctgcacggcctggagctgccgcagctccagctcccgcgtggcctcgtgctgccgaagcagcagtgcacactccaagtccttctgggtctgcttcttgttcaggtcctcccgcagcaggtcctggtccaggctgtgccgagccagcaacatcttgcgcttgtactggcgacactgcagctcaaagtactggcgctgccgccgcagcagccctgcttcctcctccgcctggcactgctggagctgctccttctgccgcagcagccactcggccttctcccgcttgggagtgctggggttctcctggagctcctccttcagctgttccttgcgaagtttgtaggtccgcttctgtgcctccagcagggcagccagctccttcttctgctgcccaaggatgtgctgctggaacttccgctcctcggcctgggcagctcgtgcctccttctcacctatggcctggtgccgccgggccagcttttctgcctctgccccaaagccagcccgctgcgcctcaagctcccgctgcagccgtgcactgtgctcctcccgttcacccctcagccgtgactccagggccagcagctgcttctggtgctgtcgtcgcatccgcttatagccgctcagctgctcccgcagcgcagagtcctgctcatgctcctggatctgacggctgaccagggaggcggttcggatggtggcaaagtggtctcggttacggcagtaggcccggcggcgggcagaagaggtggtggaagtgggagctggggctgcaggcggctggagagggctgggggttatctctggctggtaggggtcatcatataggttgtcagagcccggcagccggtggataatggagctctgacgaggtgactgtgtgctccccctcctgcatcatggccatctcccgggcttcagggccttctnnnnnnnnnnnnnnnnnnnnnnnnnnnnnnnnnnnnnnnnngttgtctgaggcatctgctaggctgttgacggagctgctctggccctcgtgccgattaaccaccgggcctatacctgccgata

SEQ ID NO: 434268 - DNA, 997 bp, Homo Sapiens
tcacgggaacgcgaccgcgcgccgggacagaagcggcgcgggaggaccgaacaagaagcgagacccagaaggactggagcggcactgcgctcggcagcacgaggccacgcgggagctggagctgcggcagctccaggccgtgcagcgcacgcgggctgagctcacccgcctgcagcaccagacggagctgggcaaccagctggagtacaacaagcggctgtgagcaagagttgcggcagaagcatgcggcccaggttcgccagcagcccaagagcctcaaagtacgtgcaggccagtcgccccccgggccttccactccccattcctggggctctgggcccacccaacacaggcacccctatagaacagcagccctgctcacctggccaggaggcagtcctggaccaaagaatgcttggcgaggaggaggaagcagttggagagagaaggattctgggaaaggaaggggccactttggagcccaagcagcagaggattctgggggaagaatcaggagcccctagtcccagtccacaaaaacatgggagcctggttgatgaggaagtttggggtctgcctgaggagatagaggagcttagggtgccctcccttgtaccccaggagaggagcattgttggccaggaggaggctgggacatggagcttgtgggggaaggaggatgagagtcttctggatgaggagttgagcttggctgggtccagggcccagcactgactcccgtccctgagcgaggaggaagaagaggaagagggggctccgattgggacccctagggatcctggagatggttgtccttcccccgacatcgctcctgaagcgcctccaacacactgaggccctgcctgcagtcagctccctggactcctgtcccattggctcctggccgggctctcctttgcagtgggggtctcctctggactccttgccctcctgctgctgctgctggtttccattgctggcagccagagtggagggt

SEQ ID NO: 434269 - DNA, 1415 bp, Homo Sapiens
  misc_feature (1120)..(1136): n is a, c, g, or t
  misc_feature (1240)..(1252): n is a, c, g, or t
aaagggaaatcattcatttattaaggatcgcaagacaacatcttaatttctgtagtacgatttaaatgttttacttctttgataaagcagagtacaatagaaaaaaaacaattagtttccagtaatatctatatctctaatcagaattaagtcttccaagacatattacctggaaataaaagcctgttacaataagcaaagcttcaaccagagcggctacttttcgtgccaggaaaaagttcatccctataggaggaatgatgtgctatgtaaaatggctgtaaggtcacagccttgagggcattggaagtatattatcctattccacattaagtatttcagcgaatttcaaacatcagtttatctgcaaccatgctggcaacctttaactgatatttcaatcaaccggtaaaaaataaattaagaaatcccttcacggatattccgtgatttacactgttaaaaggtacactgttcattaacatgtaattctggttcagaattacctttgagactccttgctcaaaatttggttaacagtaagaatcttccagaaattcaagttcttattaatcaataatttgtcagctaggatacattcaggcatcagctgcaactacagaataggtgcacagcctcagcgctttggaaagacataatctagaacactactagcagacaaaaaattacctgcaactggatagcgtaagtgcagtatagcgagacaaaacatatattcatatgttggcttgtttaagcctcaaaccctcgaccctttgttgagatcccataattttattcctatgattttaataactcaagttccaggaggactataagtctaatttgtactccaaaccaaacagcagtgcagttcgctactactgaggctgaatctgtacagacttcaagaccaagtccagaagacagttattatctaaaaaataattacttgaatacatagatgatccttcagagattttacctataacctatttcttgatgaaggttatttaatgcactggagataactgtgacttactgatcaaatacttgaatacttatacttacctgggatttcatttctgctgaaagaaataggaagaacaggactcacttnnnnnnnnnnnnnnnnnctttagaaaggaaggtaaaaatcttacacacactatcacttttggaagcagcatagaaggggcagtcaagggtaaaacactggtgaaacaggtcaaaattaggnnnnnnnnnnnnnctatattattatcaatgacagtaccacaactgtgcccttgataattagtaatcactcctaaaaatcttcatttggcaccagatggtgtgtttaaaacaccctaggatgttttgaatcaggcttgattttgttagttgagttacaggagaattttaagggtgag

SEQ ID NO: 434270 - DNA, 812 bp, Homo Sapiens
  misc_feature (99)..(99): n is a, c, g, or t
  misc_feature (280)..(280): n is a, c, g, or t
cttgagttccttcattttaaatcaaacaaaagcatttgatagctcccaaaatttatggtcaggcccctaaaaacgactgatataggcttcaagtggttnataaaacctataaaaaagactacaccagcaaagtccctgtcaatctgtcagagttcagaaactaacagggagtaacattttagcttaaaaccttatctcaagagaatcatatacacttcacatgaataaaaatacctgaaaccaaacatttttaaaagctccagtacccaaaatataaagnaaaaaaaatccagaagactgaatcaatcccatggaatcacaaagcggccggacaatctatatctcccctccacactaaccatcccatggaagaccaagggagatcagaccttccagacctatgcaccatctggtcgccgcaaaattctacggagattccttgtggaaaagcagtttcccatcttttgtgtctctccctaccatgcaggaagcaagtctggctgtgctattctattaccattatatatcacccatctgcaacaaggtactgtacagacaagtaagaagtatgttatctagttccctttcccccagaaggttgaggctcaggtataggggtaattctcctgtgcagtctttatttatgctgactcagtgacttcaacaggcttaatcatgtggtcaggtttgttgccagctgcataatgctcccacatctgtagatagagccgctctagttccattgtgtattgtttggtgttgaacagagggctagatattctttgcttccagactttgccacgaactttccc

SEQ ID NO: 434271 - DNA, 1169 bp, Homo Sapiens
  misc_feature (86)..(122): n is a, c, g, or t
  misc_feature (564)..(564): n is a, c, g, or t
  misc_feature (1053)..(1053): n is a, c, g, or t
  misc_feature (1059)..(1071): n is a, c, g, or t
  misc_feature (1119)..(1119): n is a, c, g, or t
  misc_feature (1143)..(1143): n is a, c, g, or t
gaaaaaagacggcgcgcaccccccccgccaaaaggcaggtatacactcatatgaggcgccactggagttacacgcggtggcggcgnnnnnnnnnnnnnnnnnnnnnnnnnnnnnnnnnnnnnatcaggccaaatcggccgagctcgaattcgtcgagagcggcctgaccacatgattaagcctgttgaagtcactgagtcagcataaataaagactgcacaggagaattacccctatacctgagcctcaaccttctgggggaaagggaactagataacatacttcttacttgtctgtacagtaccttgttgcagatgggtgatatataatggtaatagaatagcacagccagacttgcttcctgcatggtagggagagacacaaaagatgggaaactgcttttccacaagggatctccgtagaattttgcggcgaccagatggtgcataggtctggaaggtctgatctcccttggtcttccatgggatggttagtgtggaggggagatatagattgtccggccgctttgtgattccatggattgattcagtcttctggattttnttttctttatattttgggtactggagcttttaaaaatgtttggtttcaggtatttttattcatgtgaagtgtatatgattctcttgagataaggttttaagctaaaatgttactccctgttttagtttctgaactctgacagattgacagggactttgctggtgtagtctttttataggttttataaaccacttgagcctatatcagtcgttttagtgtctgacctaatatttggagctatcagtgctttgttgatttagatgatgactcaagattttttctggtccatttcccatttccttttcttccctgacccccataccctcacccttaaaattctcctgtaactcaactaacaaaatcaagcctgattcaaaacatcctagggtgttttaaacacaccatctggtgccaaatgaagatttttaggagtgattactaattatcaaggggcacagttgtggggtactggtccattggataaataantatagnnnnnnnnnnnnncctaattttggacctgtttcaccagtgttttacccttggactgccccntctaagctggcttccaaaagtggnagtgtgtgtaagggtttttaccctcc

SEQ ID NO: 434272 - DNA, 314 bp, Homo Sapiens
attattgaataatgttagctttattattcagtagaatacagtatgacataaaattaagagcttttgctaaactctgtaaagcaacacatgcatctgccataaacaaccttgattcatgttaggttttattgccacttcactgcactaaagtgcaataaacattcagtgtcatcttttaaaaaagtttcctgggagtgaacaggaactgtcccctataagagtgtatctttattttcaaggaagacttaactagtactacatggtttagcaaagcactgtagaaaagctacatataataatttgtttttgataaa

SEQ ID NO: 434273 - DNA, 1123 bp, Homo Sapiens
ccaaaatgggggggacggtaaaaagtcccggaaaggttcctgggtttcccaattgggcccccaacttttctggggagttccccctttggggttctgggtttttccacaatccaaaaagcgggcttcaggtttttcctgccatccggtattttgagcctccagaattcctggaacatggtcacccttaaccattttggttagtttttctgagatgctgaagagttgtgggctttctgctcatgatgaacctctgtgactttgtgggaagccagggtaaatgggagcccctgtggtcttacttggctcaagggcagtcaacttaggatccaaattgtcagagggtgtactggccacttcacctttcccctgtgatttcactggctgaccagattcacaagacactttatttattttggatttcaaatttgaggggccttcagctccaggacctgctaattcatccaaactgaatttccttttagttctcaattccttatttttttctatcatttggtcattctttggggaaagacaaggatatattgtctcccagtcttcttcagtaacttcatattcatactccgcattctccttattttccagaggcactccaagttggatgtagtctccctgatgaatggaatagacccttaaaggttccagacgcgctctgttcagccaaacaccatttagactcttgttgtccataattgtccattggccctcaggattctgcttcaaaacacagtggtttcgagaaatcatcagggggcagatttttgataccagttggtatgtgacaccaaatcctcgtcctacagtcacctcgcacccatcttccagcagcagccacccggcgctcatccccacccgccgcaggcaccagctccggccaccggcgcggtctcctgtgacgaagaagccgggctcccccatcgcctactcgaccccgggggcggtcagcaccgagcgagaccctgacctaggttctggctgcctctgtgcatcccctcagcttccatatctaaataacagacagaagcaatcgccacacgctcgcttcgtgccgaattcgccacccaggcctcgctaccttagtaccgtatagtactgcctcagttcc

SEQ ID NO: 434274 - DNA, 945 bp, Homo Sapiens
  misc_feature (772)..(781): n is a, c, g, or t
ctcgagggcgagctgagttgggctgactgcctaagagacagacccctctgggtctcggtgaaccagccgaggcacttacctcagtggttggcacctggaacctgtccagggccctcacctgactgaggagccgccgggcagtgaagtaattgtccaggtctatgctcttggggtggataccatagccatccaaggtattcctcaggttgtggaactgggtctgagtataggcagaactgggccccaggatgatctcccggagtgggggaagctgtgaggtcaggtaagtatccacgtccacccgtacccccaatcaaactcagcagaatggtgaactggagaagtccttccgttaagtatttcttcagagaaagcattgctgaaggaccagaatgtttatgctttttggtttttaaaatcttccaaaagacaaatcaaggccactgctctgccgctccagccagcaggttaccctcctcagtgtcaaaccccgtacccgaccctggcagaacacaagggatgagctccctgacggccccagaggaaagcacaccctgtggagccaaggccaaggacacactccagaccacattcactttcccttctcgacacctcacctctgaaagtacaactgttcctaacccagtccaggtcctcaagggcccacgtgacttactttctccacagtccacatacagtcacttcctcactcacattagttgtcctctctgtagattccaatgcaggctgttctcaggaacagctgatggannnnnnnnnnccttctccctcctaaggtttattttctttggctggagctacaggcctttcgtcttgggtcagagtgtcccgcctcctccacacttaccaggggggtttccagagaaactgcttagctcggcgtccgccgctgcctccacagcaggccctaagcccgagtcccgc

SEQ ID NO: 434275 - DNA, 893 bp, Homo Sapiens
gggccgggctctggcgggaaccccgctcggcccccgcctcctgcacctcagcaccatcccgtcgccccataagcctcggccccgcggcgctgcaaccctcccttctgggaacaggaatgtgcccgatacccactgcttagctcggcgtccgccgctgcctccacagcaggccctaagcccgagtcccggcctcgccgccgccaccgccggccggcctagagctcggagcctccgcttacctccccgccccctcctgctaccgcactcggaaacccgcccgccgcaaacaccctaggaacagtttctccaatcaacgagccgaggccggggccgtcgacggatgtccctctgattggcagcagagagggcccaatggctgagtgtacctcctcatccccggacctgatttcccaagactgacataattcccggcccaatgagtacctaggcccgccccgcggtatggacccagcaatgaggagggcgaaggccctagtgtctggcattctgggcccctcggccgcgccttcgcggcgggcgatgttagtgggcttgggcgttgggtgaagtatccaggttgggcgcttccagcgctttctgttggcgggggactgacggcctaggtcaggcaactaggacggtgtatcgccgccggagttgcggaacagcctcgccttgaagggtacccacagtgacttgcaaaagtctagtgagacccgaagaatgctgaggccgggaccacgaaggcatgtggtttcttgtggttggcgaccgctcgtggccgccatcttgggtagttggcgagcggaaaccggttaccccgaagttcccctcggtggcgaaccctggagaaagcagcccaggtgtgagggacgggtggcgctcatggccca

SEQ ID NO: 434276 - DNA, 192 bp, Homo Sapiens
ccttctccctcctaaggtttattttctttggctggagctacaggcctttcgtcttgggtcagagtgtcccgcctcctccacacttaccaggggggtttccagagaaacccgagtccggctgagaccaagtcgccatgcccactctcggcgccggagcttctagcctccaggggcggccagcgaacaagtgct

SEQ ID NO: 434277 - DNA, 1884 bp, Homo Sapiens
gcggccgccctggtccaccgtgtacacgtacaccaagttgtcgtgggagcccacggccagggtacgccccgtctggggagaagctgaccactgagatctgttcattgccgtctgtgtggatagccaccaggtcatgggtctccgtgtccagcagcagccatctgccagtcactgtacccacagccaggacagagccactggggtggaagccggctgagcgggcagggtcctcgatgatcctgctccacaggggctggtgggaatctgagctccatagatgcaccagcttatcctgcccgcaggtcacaaactgggcccgactggggtgtgtggccaggccccacagctcttccacatgggccctggaccagcagtgagaagcctgtgtgcacggagccctgcaggatggaattgcgggtggtccccacgtacagtgtgtctccgtggccctctgccacggtgcgcacagggccaaagtcctcagggacctccacttcctgcagcttgctgtagtcagaaccccagaggaccagccgccgatcacggccccctccagacaccagcgtcccgtcccgcagggcgcagagcccaaacacgccgccgtcgtgggcgcccagcaccgcctgtgtgatacggttcccacctttgccccaaacatagaggttccccccagagtcccccgtgaccacgtcgccaccttccaaaaaggtcacacacagcacatacttcggtttctcatgtttctcaaagaggccttgccgcttgctcaagctgcccccctccaaggtccagaagtagatgtgagatttcccgcaggtgataagcacagtggggtccgtggggtggaaggtggccaccaatacagcctcattggagcacttgacatccaccaccttggtctccttggcccagtcccacaccgagagcatgtgatcattggattcatccactgcacacagcaggttgcctccattagatttggagaagcccacacagcacacggctctgtcaaacacccccaagcccagcacgtgtaaggtggagaggggaaactgagtcccagatgccgcacgtggggcggcagcggcttcccttctttagtggttccccgccacctgtcccgtggcgatggtgaccatatctgggtggatggccaagccacactgaagataacttctttggttttgcctttcctttttggcgctacagttgctgctggagggtgtggtccggctgcgggggtcctcacggcgcaccgaggcgaggcgctctgggtgacaagtagcggcggacactgcgcccggaggtcgcctccttcttgggagaggatggggacgtggcatagccacccacgcgccgcgggggtcccgaggccattaaggggcagtcctggtgggaaggcctttcaagagctgacacaccgaggcagtggtgcctaagcgcggaggcgcccggcccttgggggtgccccgcgcagcgtagcgccgctccctgttcttcgcatgcccgcaggcgacgcagagcatccgccagcgccgcctttaggaccgccagctcgtcttcctgtaactgcagccgctgctccagcgccgacacgcggtcgtccacttccataccgctcgtgcccgacaaattgtcatcgttgcagtatcgcagcagcgaggacgtgtcgtacaggccgcagaaggccgggccgcgctccgccatcgccccaccacagccaccgccggcccccccggtcacagcccgggcccggtccccccaaccaggccctgcctcccgttgccatagcaacgcccttcgttccagcatccccagctcagctcgcctggcatcagcaggccggcgccgggcccaggcgctggggtatccccagatgcccag

SEQ ID NO: 434278 - DNA, 1094 bp, Homo Sapiens
  misc_feature (47)..(97): n is a, c, g, or t
tcatccttgtgcacccagcagggtcccttcataagattggagaaagnnnnnnnnnnnnnnnnnnnnnnnnnnnnnnnnnnnnnnnnnnnnnnnnnnntgtaggtggagagggaaactgagtcccagaatgcgcacgtggggcggcagcgggtttccctcctttagtggttcccgcccaccttttccggtggcgatggtgaccatatctgggtgggatggccaagcatttgatgtcatcgttgtgtccccaggtagtgtcgctgcctttgctcctccaccgctgtatagcacggctacggagggcacaaaagtacactatctcccccggtgggcagcaaataaaggttggcccggcagtctcggccacggtagccatagacccactccagcttgagccggcaagaaggcagctccgagcgtgtgtccaggctgtaggtgggtgccagctcgtctgggatcatcatgggcacagggcggcccctcaggaacattttcacggagccatcctccacactgaagataacttctttggttttgccttcctttttggcgctacagttgctgctggaggatgtggtccggctgcgggggtcctcacggcgcaccgaggcgaggcgctctggtgacaagtagcggcggacactgctgcgcccggaggtcgcctccttcttgggagaggatggggacgtggcatagccacccacgcgccgcgggggtcccgagccattaaggggcgtcctggtgggaaggcctttcaagagctgacacaccgaggcagtggtgcctaagcgcggaggcgcccggcccttgggggtgccccgcgcgcgtagcgccgctccctgttcttcgcatgcccgcaggcgacgcagagcatccgccagcgccgcctttaggaccgccagctcgtcttcctgtaactgcagccgctgctccagcgccgacacgcggtcgtccacttccataccgctcgtgcccgacaaattgtcatcgttgcagtatcgcagcagcgaggacgtgtcgtacaggccgcagaaggccgggccgcgctccgccatcgccccaccacagccaccgccggccccatcccaagaatt

SEQ ID NO: 434279 - DNA, 1511 bp, Homo Sapiens
  misc_feature (434)..(458): n is a, c, g, or t
  misc_feature (726)..(852): n is a, c, g, or t
  misc_feature (875)..(984): n is a, c, g, or t
  misc_feature (986)..(1016): n is a, c, g, or t
  misc_feature (1112)..(1377): n is a, c, g, or t
  misc_feature (1389)..(1428): n is a, c, g, or t
gcagcttttaaaatttcatgtttattcatatttttcaaaatatatgtacattaaaaaaggaagatttacaacaggaaagattgccttacatgcaacacaaattccaatgaattcatgatgggatcacacatgattatgatctaattcaagccaatcttctcaagtccatttcccagccatactttaggctacagaagggatcccaggagacaaaagtggaatgaataagaaacaaacatcttttgcctctggcagtactcaaggggccagaagatgtacttcaaaaactttaagacaattaaaatgtcaagtgccacagggaagagaaatgataaccagaaatttgtatttctagctagtactatttaacacaacttcacaatactaaaacaaatacaaataagaaagggttaggtagttgggcttcatttacnnnnnnnnnnnnnnnnnnnnnnnnnaatatctcaaaaaggaagccacttgcttgatatcaaaagtgctgtggaaagaaaggaggggaaaaaaacccacaaataaatgtagaatctagtttattttaccaaactgtatatttttccacttaacatttctacattagcaatgatgtaactctccaacatttccttataaaaaaggcaaacaagaagtgacaactcatgctccaaatattaaaaaatatatttaaacatatgatcaagaagatttgggccgtgagtggtagctcannnnnnnnnnnnnnnnnnnnnnnnnnnnnnnnnnnnnnnnnnnnnnnnnnnnnnnnnnnnnnnnnnnnnnnnnnnnnnnnnnnnnnnnnnnnnnnnnnnnnnnnnnnnnnnnnnnnnnnnnnnnnnntcgtgtgcgcctgtaggacccannnnnnnnnnnnnnnnnnnnnnnnnnnnnnnnnnnnnnnnnnnnnnnnnnnnnnnnnnnnnnnnnnnnnnnnnnnnnnnnnnnnnnnnnnnnnnnnnnnnnnnnnnnnnncnnnnnnnnnnnnnnnnnnnnnnnnnnnnnnngatttgttttgatttttggtaacacaggtgacaccagaaatcacaaatcaatatatttctacacttccccttcagtcaaaatccaagtgggatagnnnnnnnnnnnnnnnnnnnnnnnnnnnnnnnnnnnnnnnnnnnnnnnnnnnnnnnnnnnnnnnnnnnnnnnnnnnnnnnnnnnnnnnnnnnnnnnnnnnnnnnnnnnnnnnnnnnnnnnnnnnnnnnnnnnnnnnnnnnnnnnnnnnnnnnnnnnnnnnnnnnnnnnnnnnnnnnnnnnnnnnnnnnnnnnnnnnnnnnnnnnnnnnnnnnnnnnnnnnnnnnnnnnnnnnnnnnnnnnnnnnnnnnnnnnnnnnnnnnnnnnnnnagactccgtctnnnnnnnnnnnnnnnnnnnnnnnnnnnnnnnnnnnnnnnntgatatagagaacttgtgcttgctgttaagggaatgcaatactttgggccagtgaaaaataccatcccgggaattccggaccc

SEQ ID NO: 434280 - DNA, 902 bp, Homo Sapiens
  misc_feature (192)..(192): n is a, c, g, or t
tgaacccaggggccacccttcgttccccccagcttgtgagaagaggcagctagccctgagaagggccaaggatgaatgagggctgacccacgtcacagggagtcctccaagagtggacggggattcagtcatcgcccacaatggagagggcccggagctcactgagtttggcttcgttctcccgctccccgntgctcatcggagtggcctggctggtcaagctgatgggacaggtctccaaagatcttgtgcatttccgagtagtacacaacctgagctcggatgagggactcaaagctgggctggaagtagtcgaggcggctgccgtagaagcgcggcatctcctccagcagctgcctgttcttggcttcaaagtcctcccgcacaggccgcagctcctctcgtgcctggtggagcttggccagcactggccccgtcttctccttttcctcatacttctccaccttggcctgcagcctcctgtagtcctgcaaggcctgttcccgcctcttcacagccatgttgaggctcgggaagacactgccgaacttttttaagggctcgatcacagtcttctggatctggttcaccttttcctgattgaaggcatccatccgcttcatggccgtgtccagggccgtcaccatgttcagaaggtcctggtcttgctcacagaggggattggagagtaagtccaaggatatcttcacggcagattttgacatggtgctgaagttttccatactccctttcaaagtctctctccactgttttgggcacaatctgtttcttgggctgcccaatcttaaaaggaatccagctcatggtcccgaacctgcgtctgccgccggggtcctcagccacaactcgtttctctagggtcacttccggattcaaccagt

SEQ ID NO: 434281 - DNA, 1552 bp, Homo Sapiens
ggacgtttcattgaaaattttacttgaaaaaataaaattccagatactcaggtgagacacaaacccactgttcctgctttgagacctgtgaattcttgtgggacagttccactgacagcttgcgttcccgaggtaccagtcctcagtgacctcgggaaccccaaccacttaggtcccaaagccacaagggtgccctttgtcttgctgggaagctggctgagggcctgccagggctggaggaccagctctcccgcacagggttcagggcctctcccagaaaaaagaggttttgaagtgaaaaggcaacgaggggccagagggctccccaggatgggtcttttggaggtagatttgatgcccacaacgcatgcaaggctaagacccccaacttagccaacgaagcccatggcctcagaagggctgcagcttgctcaggccgtgggccaggatgcatgctggacggttctccaaataaaaaagccccaagggtttgtctacactgcttacctgctggggctgtgagtggggagacggcggcctgcctagggctcctggtgccaggctcaggaagagtcattcattgcaaagggcccggcaagtgaaccagggccacctctgtccccagcctgtgagaggagcagctagccctgagaagggcaaggatgaatgaggctgaccacgtcacaggagtcctccaagagtgacggggattcagtcatcggccacaatggagagggcccggagctcactgagtttggcctcgttctcccgctcccgctgctcatcggagtggcctggctggtcaagctgatgggacaggtctccaaagatcttgtgcatttccgagtagtacacaacctgagctcggatgagggactcaaagctgggctggaagtagtcgaggcggctgccgtagaagcgcggcatctcctccagcagctgcctgttcttggcttcaaagtcctcccgcacaggccgcagctcctctcgtgcctggtggagcttggccagcactggccccgtcttctccttttcctcatacttctccaccttggcctgcagcctcctgtagtcctgcaaggcctgttcccgcctcttcacagccatgttgaggctcgggaagacactgccgaacttttttaagggctcgatcacagtcttctggatctggttcaccttttcctgattgaaggcatccatccgcttcatggccgtgtccagggccgtcaccatgttcagaaggtcctggtcttgctcacagaggggattggagagtaagtccaaggatatcttcacggcagattttgacatggccaggtctgcgtcggtgctcttcttcatgtctttctgcagcctccgggtctgctcttccagctgctgaagttttccatactccctttcaaagtctctctccactgttttgggcacaatctgtttcttgggctgcccaatcttaaaaggaatccagctcatggtcccgaacctgcgtctgccgccggggtcctcagccacaactcgtttctctagggtcacttccggattcaaccccgct

SEQ ID NO: 434282 - DNA, 348 bp, Homo Sapiens
  misc_feature (96)..(96): n is a, c, g, or t
  misc_feature (182)..(182): n is a, c, g, or t
cttttcctcatacttctccaccttggcctgcagcctcctgtagtcctgcaaggcctgttcccgcctcttcacagccatgttgaggctcgggaaganactgccgaacttttttaagggctcgatcacagtcttctggatctggttcaccttttcctgattgaaggcatccatccgcttcatgnccgtgtccagggccgtcaccatgttcagaaggtcctggtcttgctcacagaggggattggagagtaagtccaaggatatcttcacggcagattttgacatggcagctcatggtcccgaacctgcgtctgccgccggggtcctcagccacaactcgtttctctaggg

SEQ ID NO: 434283 - DNA, 816 bp, Homo Sapiens
  misc_feature (662)..(662): n is a, c, g, or t
  misc_feature (743)..(743): n is a, c, g, or t
gttctgtcatctacagccagagcgtcggacacaagtcccctctctgtaacacgtcagacccactgctgggctgcaaaaggaagcgtagaggtggtggccatgtcaggccattcacgcccaagaaaatgcaggaggtggtgagagacggtagccaggatgccgcccgcagccaggggagagctgagaccggccatgagaggcgagatctgcccatacagggcaaagccagtgaggccctgggaggggagggcaccgccaggggccctggcgacactcgcatgtcacagggccagggtaagacaggcgaggcaaggcgcctagacgagaaagagagctctgaagacaaaagcagctccctggacagtgacgaggacctggacacagccatcaaggacttgttaaggtccaagcgaaagctcaagaagaggtgcagggagcccagggctgcgtgcaggaagaaggtcaggttcagcacagcccagacgcacttcttggagcagctgggcgggctccggagagactggaaagacaggggcccgccagtgctgaagagctgcctctccaagtccaagagagacagtggcgagggtcctgggaagaaaccccccagtgtctttggcagcacggcagagaggatgaggcaggagggtgccgcgagccangacgcggccctggccttccgggtgaggagacccgcctccgcctctgcccccgaagggaatccattccccagggagtcccanggcccagctcccagccccggctccctgtctgatgacagcagttcagtggacagcgacgacagcatcgaactgg

SEQ ID NO: 434284 - DNA, 2736 bp, Homo Sapiens
ttttaccttttagatttttattagtagttctctctgaagaatcaaaatagttagcaaattattttagattcaagactgtatatcctttgtatttagatctttaatgatgtacaacataatacaaaacaaaccagagagactgatttctatgactaggtgttattcattgtgtcatcctaaagcagtgggctggaggggaagctgttcaaggagaacagaggtggagttagtgctggccaactaaatcatggcctgtctgcttacccattcaatgtgctgggaaggggccaatgatttcttaaactgtttcctagagcaggggctctaaaaccctgggtagcagaggactgtggtccaaaccaagccaaaagaaacaggctggggtagggaagcgtggtgactgcctggcagaaaaggcaaactctgggccccatagggaaaagtgcattctttgcacctcagagatattgcagaaccagtgttaacactatgagactttgttaggaggggaaaaaataaaaccctggaagaatctttcacttgaactcaacttgactggagttcagtccaccagtctgaggggaaggggggaagcacctagctccacagcagcactgagtctggccctcccgccccatctccccagcccctctcagcaattaggccaggctttcagctgaggacataaacaccccagaaagactagggtagtctctccggagggctgaagtgggaaggacacttctcaaaatgcaaatgcgtttaatacggaaggagccaggacagttctgggggcactcacatgcccgaatcttccccacctccccagctcagggcctaggctcacagagactggcgagcagtctccacacctgaccttctaacccccaaaagaaaatccggaagctgccccttctctttccccacaggtgggctctgcagggcctcccagggatggtggttctgcggcagggcctaggcagggcctggtctcagctggctcctgcccgagccatgaggtcttccaaagcattgtcctggtcattgttgtgtaatagcaaaacttccttaatgtctttcagctcaaagcccatctccttaaatttgctcattaactgaagaaactccatcatcttttcttctgaacactggtgcatttccagagcctcttccactaaaagagggtcgaagcccttctcacaaagctgtccatgtgcaaagagatagtcgagaatctgctcaatattctctcctttcttcttcatggctctgaggacacactcgtacgagtagcccatgttgaccaccgtctccacacactgccgctcgctgggggacagcatctgcagttcagaataggcctggggacagctgggcatgttgggcacttgtgacactgagaaattaggaggggtgaccgtgggaccagtatttggaggtgatgattcctctgtgcacacagacaaaacagagagggaaggcatctgggaggatgtcagggctggcatctctgtgccactgtccaagttcaaagctgaaagcccaagagtgtgatgcccattgagctcactggcactgctttgggtggaaggctttagggaattctggaacgtgccattgcggaggcaggatgtgctatggaaagtgctcgccagcttggctgtcttctgattgctgtcatcagagtcaagtttggggaaagacagggatttgatattgcttactgcaggtataggggggagggacactttggaagacagtgacatcttttcacagttgcccaactgtggtaaggttataaagccattgggtttatgaagaggcttgaaatctagggttgcccgttccaaggatgccaggacctcctcatcctgtaacacagacccagagcctcccctgggcaagttattgtccaataactgagccataatgggtccagtggttcctaccagaatatttctcagctcttccttctcatcaatagtttttaactccagattatcaaatgggtcttcttcacactcaaagtcagcaagattgaaatccgcctttatgtgaggtgggctgagaactttctgtttcgtggcactactgctgacccgagttggtgtgaggatgctgttgtgctgcaagctggcgaggatggggttaataggaggtggcattgtggctgtactgtgagtcttggagaagctcattttgctatcgccctctgggccactcttagaattcactttagcttctgcttccgcaattttgcactctgcttcccgctcggcttcttcgattttcttaatctcttcagcccactcaatggttttcttttccaaagagaagtcatactgtacttctctgacaacctgcaaacaatcaggcaaggagaagccaataggtagaccaactttagctggtgttttgaatttgtctcctgtcttaaatgggacatcatcaaggtaactgaaagtcccatgaaaatctgcacccaacttcttagaagccatttagaacctgaatgccgctgctgccgccgtctcagaagccgaaaggtgctggcaccggccggcctcccaggctcggtccccgctgagctcccgacagcccctagggagagcgaacgccaccacctccaactctgcccgctccgggccaggccgtcaccgtagccaccgccagtgccgcagccgccatgttgaagtcctacttccctcctccttcccctcaccgccccactcattt

SEQ ID NO: 434285 - DNA, 697 bp, Homo Sapiens
cacaagccacctcttcatttactgtaaaatcctgtttaatgtgtaacatttcaggcagagagaggccttggggactagaggcagaggtggccttgaccaacccctgctccaacttatctgcctgcttctctctccctaactccctcaccccagacacctcctccttttccttgtggccagcaagcactattcctcctttactagtgctggccaccctcccttctccacccacatgtccacagcacccctgccctctgctcctcttacccacatccctcctcactgatgtgactccagaaacagggtatctgacagcacagggttaagattagtttcataattggagacgctgtcggagcatcccatctcttgtacccagtggtcccagagagagggagagggaagagggaagggtgcaggcaacaagggcagcccacactcccagtaaccttgagcactggcatagagtggcctctagctccccacccctccagctcctcaaaaggaaggccccgggaggaagggaagtagcccgggaaggaaggttttgatcgagtaatccccagcaggcagaagcctgtgcaccggcaggggagaaggaggggctcgcccaggccaggggtcgggggtgggatgggaggttgcctggtctgtggcatcagcaggccgagcagcggtcgctcttttcagccagccc

SEQ ID NO: 434286 - DNA, 1113 bp, Homo Sapiens
  misc_feature (24)..(24): n is a, c, g, or t
  misc_feature (51)..(51): n is a, c, g, or t
  misc_feature (135)..(135): n is a, c, g, or t
tccaagcacttgtttaatttcgancacttagaaggtcctgcagcatccttncctttcgctgtagacgctggcacagctcctctgctatctcactctgccctggtccaagtttgcagagcagtgttgcactaagancctccacttctttgttcctatcatgaagagacgtctgtaactgctgaatgatactctcttgttccttctgccaacggctaaatttggtttccatttcttctttcagccactggaggttttgacaggtagtagataactgttccacttccaggcctttggccctcaggagactctccatactttgcatagtagcttcattggaggagaggacatcgcgcagtctctctaagtcatgatctcgctctctcacagcaagacgaagctggcgcagttctttttctttctcttctagagcagagaatttttcatctatagcccgctccagagcaacagctttatcatgtattcgctggcgaagtttctcaagcaacatttcatttgcttcaagggttttgtctgagttatctcgatactgtaggagctcccgaaattcctgaagcaactgctccttgtgactcagactatggtttaggtgctggatgttttgttcctgggttcgaatctcattgtatttttcagcctcccaggcacgaagctgttggctcttattctgcaattcttcttgtagctgctgcaaggcttttcgcaattcctggttatgtttccaagaagcctctttctgctgttcactctcgtgtgctgcagcctctacaaattgcacacattgtttggcatcagccagttggcgctctttctgtcgtaccaccctctggagcttctgtatttcaagttggctgcagaataaagcactctgaagatcaagcagagctacctgttgctgagctggagaagtaccctctgagctgtgaagttgtccaagctggctttggtgcagcatttctcgaagctttgccattgtgtcattttgaccttcaattacctggtacaactcctcagtctcatgttccctgcttttcagagtttccttgaggttctgaattgtaccatcttgcttttgagacgactcctgagcacact

SEQ ID NO: 434287 - DNA, 1780 bp, Homo Sapiens
  misc_feature (425)..(618): n is a, c, g, or t
actccaccattctaaaatttattgttatgaatgcagctcagtttgtggtcctgtgaagttgtgtggctactccgggttcatgattccattcacactcctaatgataacacatgactgtaagagaactgctgacacgcgcagagccagccttgaaagagagccctgggaaagtctgggtgaagaggctatctgtcagatattactaaaaagtgaggacatacacatttctgtttcatttttagtaaatatataattttgttactttgtcatcaatttttacccacaagataaaaaaaactgcaggactcctaaaatatccagaaactttccacatattaagaatcaccaacaggtcaatgagtagttacacctaattaactacactttgccacatgaataccatctgctgatatctgtagctttgnnnnnnnnnnnnnnnnnnnnnnnnnnnnnnnnnnnnnnnnnnnnnnnnnnnnnnnnnnnnnnnnnnnnnnnnnnnnnnnnnnnnnnnnnnnnnnnnnnnnnnnnnnnnnnnnnnnnnnnnnnnnnnnnnnnnnnnnnnnnnnnnnnnnnnnnnnnnnnnnnnnnnnnnnnnnnnnnnnnnnnnnnnnnnnnnnnttaactatagtaccttaaaatattcaaatacaacaatactcccacctaatggataaaaggaaaatgcctggcttattttggttgtgaataataccaccataaataaggaattaaaactacaattagttttttaccaattttattccgtttcatcattctcaaaatatatcccccaaaagtaatctacaaaagagtgcaggctgctccccttaaaggaatggacaagtaatatacactacaaaacaatgtttaagatcatgtataaatgttactctgaatctcatttgttgtcatcaatttctttagtatctcagtgctttggggaatattcttaaccaaacccttcaagcttctggtagaaagtataggcttaaaagcttccactgtgattaggtctaatttcatcacatcagtataacacaagtacagaattgctgggattttccatacttgacagtagcttagaactgctgcaggaaggtcgtgtactatattcggttgttctagcaatggacaacacgccgagtctttgaaattctgtgtttttagggctctcaggaaaggagaaggaaggctgccggtggattctgaggttttataatcggtaacatgtcgacatgtgagaatagttatctgcatgttcttccttggacaagagccaaaaaccttttccagccactgatactgttgatcttctgcaacatagcaactgcactgacagagaaaaaccgagggattggattttagatgataaaacacacaaaaagcctctgtggaggacagatgtgtagtgtctgttgttctacaccattcattccagagtttagcacaaccaacttcctcccagactcctgaattcataacaaatgatgacagaaatgctactgcattatttcctatagcaattataaacttggagcacggatatttttctagcaaagaaacttccaaagatgtttttgtttgtcttcgaaggagccgcacttccctcttccgcgccagctgcagacgcacctccctgtcctcgggcgtctccctccgcccctcctcctcctcctcttcgtcctcagtcccagctcggcacggcgccttcaccacctctccgaagaacgtggccgccatagccgccccgtgaccggctggacacaactgcagcgccgcg

SEQ ID NO: 434288 - DNA, 1159 bp, Homo Sapiens
cccgccctgcctcttcccggtctgcgtaaatggcatctcaaacatgaagcggcggatgttgtgggatctctcaaactctgttttcctttcttgcaactctttttcgtcaaagaaggggatgacgtgagtcacctggatgtatgcatacttagaatccagatccttagggttgaccttgccagaatcctgtatcattttgacattttcagaaccaaatttatccgagtacagtttaaggagtctctgagaaatttccgacagcggtgtgagtttgggttccttgtaaatatactcctttccatcttcatcttcaaagaatccctccacatctgtttcactgtctgtaaactggtattgcgctgcctgcccgaagaaggctacccggaagtaggtccccagaagcctgcggcccgagtgcatgacctcggtcactttgctgtaggcccggtgcagcgtgtcatacagatgggccagcctctcaaaatccctccgcttctcataaatggggatgataagtttgtagatgtcggcgatgagctcgtagcgctcggctttccagagtccatctgcgcactgctcaaggagctccatcagcacatcctcgttgaaatggacatcctgcatccccacgtcttccatcatggaggcctcctcgtcgatgtttggggtaatgaccctgaaggcggtgcatccttgtctaaacacgcctccccggctcctcctcaggcaggcgctatggctgtgggggagaaggggcggctcccactggactgctttccgtgtgagatattctgccactagggctgttacgtggacatagcacattgctgcctctgagagatcgccatttttgacatggatcctggccatgctgtcgagccacgtcttcctgagctcgggcgtgctggcataggatttggccaggctgtactggaggtccaccagcatctctgggtcgttctcatgctccttcatctgggcggtggccattagcaccgtgcgtatccttttggttaagtccttcacatcagaggagaagctggtgtgcttaataagccggtcactgttggcacagttgttgatgatggacagggactgctggaatctggttcccccaatgccaacaacgtctgctatcagctggctgacagatatgatg

SEQ ID NO: 434289 - DNA, 1518 bp, Homo Sapiens
  misc_feature (397)..(397): n is a, c, g, or t
  misc_feature (412)..(412): n is a, c, g, or t
  misc_feature (1188)..(1188): n is a, c, g, or t
ggcttgattcgagaggatctctcataagcacagattcgggtaacagccttccagaaaggaatagtgagaagagcaattccctggataagcaccaacaaagtagcacattgggaaattccgtggttcgctgtgataaacttgacccagtctgagattaagagccctactgatgtgtttccctctacatcttaaagagcatgtctgatgatgctttgtttacatattggaacaaggcttcaacatctgaacttatggatttttttacaatatctgaagtctgcctgcaccagttccagtacatggggaagcgatacatagccagtgtgagaaagatatcaagtgtgcttgggatttctgtagacaatggctatggccactcggacgcagatgttctgcnaccagtcattacttngaagccaacattgctactgaggtttgcctgacagctctggacacgctttctctatttacattggcgtttaagaaccagctcctggccgaccatggacataatcctctcatgaaaaaagtttttgatgtctacctgtgttttcttcaaaaacatcagtctgaaacggctttaaaaaatgtcttcactgccttaaggtccttaatttataagtttccctcaacattctatgaagggagagcggacatgtgtgcggctctgtgttacgagattctcaagtgctgtaactccaagctgagctccatcaggacggaggcctcccagctgctctacttcctgatgaggagcaactttgattacactggaaagaagtcctttgtccggacacatttgcaagtcatcatatctgtcagccagctgatagcaggcgttgttggcattgggggaaccagattccagcagtccctgtccatcatcaacaactgtgccaacagtgaccggcttattaagcacaccagcttctcctctgatgtgaaggacttaaccaaaaggatacgcacggtgctaatggccaccgcccagatgaaggagcatgagaacgacccagagatgctggtggacctccagtacagcctggccaaatcctatgccagcacgcccgagctcaggaagacgtggctcgacagcatggccaggatccatgtcaaaaatggcgatctctcagaagcagcaatgtgctatgtccacgtaacagccctagtggcagaatatctcacacngaaaggcgtgtttagacaaagatgcaccgccttcaaggtcattacccccaaaatcgacgaggaagcctccatgatggaagacgtggggatgcaagatgtcccttttcacaaagatgtgctgatggaactccttgaacagtgccccaatggaactcgggaaagcccaaggcttaacaactcatccgccgaaatctaaaaaatttatccttccccattttattaaaaaaccggaggggatttttgaaaaggttgggcccccccctggaatgaaaaacgctggaacccggggcccttaaaagccaaaggggaaccggaaggctctgtgcatcc

SEQ ID NO: 434290 - DNA, 907 bp, Homo Sapiens
  misc_feature (483)..(611): n is a, c, g, or t
  misc_feature (864)..(864): n is a, c, g, or t
ccttccacctgaaaagctctgtgacacatgggggtggacgtattgaagagctgtttgccgatccacccaggagtggctacgctgagtggggagccggtgaatgatccgtgcaggagtggggcttagcagccacatttctaggagatgcagatatcctatcgccagaatgaaagctattgggacaacaggatcggggatgaccgatggccccatatggtgaatctctggcctgtggtttggctttactgagattccaaaccccactatctgcacctccgtgacagtggtatggagtgtggcaatgagtctggggtctggggcagggaaatgcttgacactgttaacccaacaaacctttgttgtgatgtccctgtcacctgaaacataggtgacatagctcaccaatgtcctaaccgagacacaaactccacagagcaaaatcatttggtattggtggggagaaccccagcccttttcttgacnnnnnnnnnnnnnnnnnnnnnnnnnnnnnnnnnnnnnnnnnnnnnnnnnnnnnnnnnnnnnnnnnnnnnnnnnnnnnnnnnnnnnnnnnnnnnnnnnnnnnnnnnnnnnnnnnnnnnnnnnnnnnnnnncacaatttgtaacctctcaggagacaatgggaagttatggggtagctaatttcccatttacaacacagaaatgatatagagctagttcgctccaactctttaggttgaagcagtgtgcaaaaggaagaaaagaaatgtttaatgttcagacctgccaagagcctccaacagggctcaagaaacatataaatcccatgagcacagccttgaaaaccagtttgactcaagccttcgggcctcagttcattgaccngatgacagccacgtgatgattagggaaggacggatgcattgcg

SEQ ID NO: 434291 - DNA, 922 bp, Homo Sapiens
  misc_feature (782)..(874): n is a, c, g, or t
agctcataatattagcattgctataaaaataacattaataaaaaccaacaacattactaccgtgagaaagtcataataatatacatcaaaggatattaataatatacaatgactttcccatatgccatttgtatggccagaaagccagacacaactcctggcttcctcctgcgattcagacgacattgcttggatgcaaacttacctgaaagaaccacttaataggtttgtcactctaagcaaatactagtgttcaagaaatgttctcaggtgatctaaaacacagtccagaatacctgcttatggcttttcaaatgtttgcaatacaaggcctgcctctgtgctcagctcccagagagaatttttctaatagatgcagtttttcctattagcaatggaacatacacatttgaaacccagctggcagcctctatgattgtaggctaaatctcgtaaacaaaacttaaatgtaaagaagtgtttgtactagctgcaaatgggctactggtttgatgccacaggggaagttgttagcaggtgacatcagaggatggattagttagggtaacattgtgaaccgagagacaggagagatcttgtcactcactgaaggcgagactcttctagagagttgttttctccccaagatctgcgcctttccccagactgagtcaggatctccgaggttaggacctagctacgtatattttgcacaaagaactctgatttggactccaggatttagaaccacaaatgtgcatacagacccaattttgtacatnnnnnnnnnnnnnnnnnnnnnnnnnnnnnnnnnnnnnnnnnnnnnnnnnnnnnnnnnnnnnnnnnnnnnnnnnnnnnnnnnnnnnnnnnnnnnctggtttgcagcagtttctgtaacactagtggatatgaaacaacatga

SEQ ID NO: 434292 - DNA, 1487 bp, Homo Sapiens
ccgggaggctttcgggggctgttccgatgcggccggtgtggaggccttgggggttctgggagcctgtttcggattggttgggctttgcctggattcgccgttccaaggggtcatcagactggtcgagtagcttgtcttgcccagctctcagggtctcagggcctcttgaactcaggctggaacttagacgattctccactggcaatgtcctgcacacccttgtaccaaatccgagaagagtttttgactggcaagggcgggggacagtccttcactctcgccctgaggggtggctgctcccaggcctggcgacagtctcataggtcttgttgctgatgtccagcctcccactggcccagtgaacctgggccgggagcttcagcaagcagcgcttctcttcctcatcctcctcactgtcagagccaggctctgtggaaattacccaggagtagtccacatgtagagggaaggcaaaggtccccgcctgggcctgctccagcagctcctcacactccttgtggtgcttcttcctggctatgtccagagctgtctcgcctgcttcatttactgtgccaaccaaagctctccccttcagcagcagcttgaggcagtcgggctggttgtagagtgctgcgtagtgcagagccgtgttcccgtcagcagccttggcatccaggtgaccaccgttctggatgatgaaatccaccagaggcagggaagcctggttggcgactttgacagccaaatgcaagacgagttcttcaggtgcctgtgcatcaggccctggcagcggctgtccaaagtcctgcccattggcaaaggcctccagtaccgacaggaggtccctgttgcaaatggctgtccagagtcgctgaggctcaggtgtgcaccggcgtgcaaacctatgctccacatacttggccataatgtagtccctgcgggtgcccatgtcactctcagctgagggtttagggccgccgtgtgagggtagctgggcctccatgacctcattgaagctcgtgtttcccatgttcaaggccagcaacaactcggaggggcccagcaggtccaaggtgagtgactgcatgcgcgaaaagcgcacgcccagttcgcggtggacgcccgagcactggatgcaggtgagcacgcccaggttggtgctgagccacgtggggtctgcagccccgcagtcgcagcactggctattcccaggcctgctcttcacctccgcgatgagcagctttgtgaggtcgtgcggctccccatcatggccggcggacccccaggaccccgggccagcgctgggctccccgaggaaggcgctgctcagggcttcgtccatgatgttctgcaacactgacacccacgcctcacactcgtgctcgtcctctgcctgaaagtggtacgtccggttgtgggtcaccaggtcgaagcactttttctcctcagggtttggcctcacttggcacgtcagcagggtcagcttc

SEQ ID NO: 434293 - DNA, 538 bp, Homo Sapiens
  misc_feature (170)..(170): n is a, c, g, or t
  misc_feature (411)..(446): n is a, c, g, or t
tcagcttcggaatgtgacaatttatttggggggtaaaagaggcttttcacccccctttcctggcgttgatacaatattgaagagcagcagaacaaacgtacaagacagagtaatcggcacagacccacccctcccccggaaccgccgaatccagaatggagcccaaaccncacacccccaactaagcgtcttctccacagggggaggggcagggtggactgggggacctgccccccatgctggggcggcacctccgttttccatctcctgccaaccccactcttttcccatctttgaccactggaggcaaagtttagccagctgggagctggatggttgaaccacattacaaaggcaacaacacttcattttaaaaatgaggagaaaaaagagacagtgcccttccccaannnnnnnnnnnnnnnnnnnnnnnnnnnnnnnnnnnnattcattcgtgcacaattcattaaatgaacgtctcaaaaattaaaaaaattataagatacgtatttctttaggcctttgtgtttttaaatta

SEQ ID NO: 434294 - DNA, 475 bp, Homo Sapiens
  misc_feature (451)..(451): n is a, c, g, or t
  misc_feature (457)..(457): n is a, c, g, or t
ttttttttgcacttcgcccacacaggacagtggagccccacctgggtcagttccacttccgggctcccatgcacttgcccaaggcggcctctttgggacggggatggtttgaggaaacacttttaaagaaaaaaggaagacattgaaaggttttagtttcttccctatctgcatgtcctctcatatagaaagcccagaattaggggctagaactccagggagagggtctccccgactcatctcttgctgacggtcaccaggatgcagaaatagggagatggttagtgggggccaaagatgccccctcccaggccttcgtggttccctcctccgccccctgcaatctttgggaggagtcagtgcctcactccagcagtgagtgcctactgtatgcaggtagttcagccagggcaaagagagactaacggtttcatggggggaaccttttttncgggangccaggtagttggaagtt

SEQ ID NO: 434295 - DNA, 1960 bp, Homo Sapiens
  misc_feature (248)..(264): n is a, c, g, or t
  misc_feature (358)..(393): n is a, c, g, or t
  misc_feature (517)..(525): n is a, c, g, or t
  misc_feature (664)..(749): n is a, c, g, or t
  misc_feature (865)..(884): n is a, c, g, or t
  misc_feature (957)..(1003): n is a, c, g, or t
  misc_feature (1026)..(1063): n is a, c, g, or t
  misc_feature (1148)..(1174): n is a, c, g, or t
  misc_feature (1212)..(1254): n is a, c, g, or t
ggggttgacgatttggggtgatgcgtgataataacaggcggggcgggaaatactaaaatatgggaatggatgccaaaaacaaattaaaaggggcggtggggaggcggggggaaaattacgggcgccctttatccctaatatgtgggcggccggcacgccccactcccaaaattacactcggtttctaatatgcctgtagctgcaggttaatagggataaaaaaaacgggtggtgtttaggatattttnnnnnnnnnnnnnnnnncaggaaaaagaagaaagaggagccagctattatcttgtggggaaataaatcaccctccccaagctagtagaggcgttcccccggcccaataatnnnnnnnnnnnnnnnnnnnnnnnnnnnnnnnnnnnnggcatgagcgcgtatttagagaaaaataaaatgagtttgcgcggggggggtccctctatataaggggagaagatgtatttatagtgatcgcccagcgtggcgtctgctaaattataaagcagannnnnnnnnagaaaaaagaaggagggtggtgtgttgataaaaaaggcgaccaagggattgttgaagtatagcggcggggaaacgctcctacaagaaataagagggcgcggcgagtgcgtatgggcaggagttatgcggggtgggaacnnnnnnnnnnnnnnnnnnnnnnnnnnnnnnnnnnnnnnnnnnnnnnnnnnnnnnnnnnnnnnnnnnnnnnnnnnnnnnnnnnnnnnataaatggggagaaagaaaaagcttcgcggggggggccgggaacaaagaatgcgcggtattggggtggctacgccggtatacaaggggggagaaaaatagtttggatttgttaccnnnnnnnnnnnnnnnnnnnntaacaattaaaagcaatattgggacgcggcttgggtggtaaaccggccgaggaagtgggatattctttttgcnnnnnnnnnnnnnnnnnnnnnnnnnnnnnnnnnnnnnnnnnnnnnnntataaagagaatgcgcccgaccnnnnnnnnnnnnnnnnnnnnnnnnnnnnnnnnnnnnnnccctttcttggcgggggaagggaggggtaagaaggagaaaacaggggcgccggcgagggatagtgctaagagaggggaccccccnnnnnnnnnnnnnnnnnnnnnnnnnnntgggtattaataaaggggtgggtggttgggtttcggtnnnnnnnnnnnnnnnnnnnnnnnnnnnnnnnnnnnnnnnnnnnttgaagagtttatttattgctctgcccccttggcacagcaagcccaggctctaccagcaacgatagtcgggataggtctcagacacaaactcaggatggataacatagttgtttctctggggaccaccagacttcttgaagtgacttgtgtcccatctaaggttcggatatgggtagtatgacggcgggggagttgtaacagcacactgcattccgggccggtgctcgtagggaggtacacatagtcggttgctcccggcaccaaggccgcagtgcggcggtcggtgcagggcgccccgctggcgtagtagtccatcccgcgcagacagtagtggcggcccgagcaagcactttcgtaaccatggaagggcaggcggccgggcagcgggtccacgcacccgcatcggggcgtgatccgcggcagctgctggttccgcgacagtgagttcagcatgttcaccatcacttcgcgctcgtaggcattgagccgctccggcctaggagggcattccaagggcattcctcgaactgctgtctccatcctggcctcctggaagcggcacacatgctacctcaagctctgacctggcagagctgctcccttttaggggtcctcccagaacacccagacctatcgccacgccgcaacttctcccgcccttcagcagctccccacctctccagggctctgtgttggcggctgtca

SEQ ID NO: 434296 - DNA, 700 bp, Homo Sapiens
  misc_feature (83)..(142): n is a, c, g, or t
  misc_feature (193)..(203): n is a, c, g, or t
  misc_feature (621)..(657): n is a, c, g, or t
aggagcgcgggaggggccccccatttcgaaaaaaacgttttggtagttagggtgggggaaaaggtctgttgttctcgggcccnnnnnnnnnnnnnnnnnnnnnnnnnnnnnnnnnnnnnnnnnnnnnnnnnnnnnnnnnnnncttttactttgaaattactttaatttagaaatagaaaacatcttgaaaggnnnnnnnnnnncccacaaaacatacaggcaaatttgtattctgtgagtttctcacaccctcacacttgttcaccaatctctaagatgaaaaactctcttccaaaatgtattcagccaccaacaatgatgttattaataggaatatggatcaatttcacaaagaagccaatgaatcccattatagcaaatcctattgctgttgccatggcaatcttctggaattcttttctatcaggtttagtgcatcttttaaccagccgaatggagtcctttacaaactgccgacttggctcaacaaactgcattacctgatccatgactgcctacccaaccgacacctaaaatgccagggacacgtagcactggagcttgctgatggaggcccaccccgctctcgacgaattcgagctcggccgatttggcctgatnnnnnnnnnnnnnnnnnnnnnnnnnnnnnnnnnnnnncgccgccaccgcggtagctccattccccatagtgagtctatca

SEQ ID NO: 434297 - DNA, 801 bp, Homo Sapiens
gcacacacagtgactagaatatatagagagatagagacagtgaaaagacttagtttacctctgagaaaccatccccccaaataaatcctgtattaacaagtgcaaaaaataaacaaacaaataaacccaaaccaaaacgaaagcaaataaaacctccaaacattaaaacacagtgtataaaatggtgtgagaaatttaaagtcactttccagccttttagtcaataaaaagctgtggttgtgtccttgtttggattcaggcccatctgtttaaattttaccctaaaggccttgcaataagtaattcgagggtaaaagcacccagtttctgttacatgagacagcagttgccatttttcacggcgggccagctgctgctgtggtgacactcgtccttccgttactcctcattggttgagttttcttccagcgtgttgatgcctccaaagctcagtccggctgtgttctgtgctgccgaggctgtgagcactgtgtgtaagagaatcagtacaagaacacacagcttgagtctgctgttgctcagtcttgttgctgatgacactgtgagcgatgtcctgtgacaggagccacttttctctactgtccctttggatgggttatttgatttttcttctctcctgacgtcacagcattctggttcatcattggttagaaaggtttcataaagccctgtacagatgaaactggagaggcctccgtagatgacttcatcattgtcgggcaatataaatggacacctcgtctgaacctccaaacagtattgcttgcaaggaattccgct

SEQ ID NO: 434298 - DNA, 1411 bp, Homo Sapiens
  misc_feature (19)..(19): n is a, c, g, or t
  misc_feature (146)..(146): n is a, c, g, or t
  misc_feature (955)..(1023): n is a, c, g, or t
caggtcgtctagattattngtcgatgtagaggtatccttcgaatctagaatcatagagattaagatcttcgatacgtagagctcaaacagttgtatagagatacaacttttatgtgtgatatgctcaagagcagaaacaaaggctnggctccccccaaactctgagttctataggttcaagctgggaaaagccaaggtggggcagaaactgaaagccaggcagaagtcagaaataggaatgtgacagagaagagctggccaatctcctgccattaatgcctggctgggagtgggtggaggcacatggcaagcgtgcctgcacgctggacccacccccttctttaaactgcagcctgccttcttgttcccgagtcatttgaaatagccagctctctgcaggtacgtacctctaaggccatgtcctactactgctgggacacgagcgtcacctccatatgtgaggagaatgtttttattttcattaggtttttaaattagggactgcagttttaagctctgttggcttgaagcactgactctgaagacagctgtgtttgtttcccaggggtggtctcctctgcagactctggagtgcggtctcccagtacagaagggctcaggaggcctcagaaaccaaagacaaggcttgataccaatcagctaagctgtggcagagtgtcccaccacggctacatgttttgttaaagcttctgttagtgtatacacgaatttccgctgtgtttacatatttaaaaatgccattgttcaattaatagtttaagaacttgttttaaatactgtcctgagtttcttttgaaacctgttatttataaacatagaactgtgtgtattgtgaaaacagtgagccttggttttgacctcccggaatattaggaaattcacttgtagtcccagctatgcaggaggctgaggtgggaggattgcttgagcccannnnnnnnnnnnnnnnnnnnnnnnnnnnnnnnnnnnnnnnnnnnnnnnnnnnnnnnnnnnnnnnnnnnnctgtctcaaaaaaagtacacccttcagcacttgctggaatggtgaaacaaacaaggggtatttaacaaacatggaagctgggacactgcctcagaactggtatggtacttcaatttgagaaacacaaaactgatacgaatgtgccttgtagttaatgtttgatatgaacagaaaatagcttcatatttatactgaatgtgtaagtagagaaaactaagttatgtggcctttgaaatgattacaaaattggaatgattacaaaagtcttattttaaaatggaactgtcctcttgcctgataataaatattgtatcttgtagagaaatggtcagcgcgaacaggctgcagcaccagcgctgctcggggtggatcccagaattccggaccg

SEQ ID NO: 434299 - DNA, 1408 bp, Homo Sapiens
  misc_feature (106)..(115): n is a, c, g, or t
  misc_feature (390)..(458): n is a, c, g, or t
  misc_feature (1386)..(1386): n is a, c, g, or t
gtccccatttacacaaaaaggggttccaggggagggctcccgaaaaacccaaagggccaagggcttgaattcccaattcaaggttaagttgttgccagaagtgttnnnnnnnnnngttacatgtttttgttaaagcttcgtgtaagggtataccacgaattccggcggggttttacatattaaaaaatgccatttgttcaaattaatagtttaagaacttgttttaattactgtccggagtttcttttgaaaacctgttatttataaacatagaactgtgtgtattgtgaaaccagtgagccttgggttttgacctcccggaatattaggaaattcactgtagttcccagctatgcaggaggctgaggtgggaggattgcttgagcccannnnnnnnnnnnnnnnnnnnnnnnnnnnnnnnnnnnnnnnnnnnnnnnnnnnnnnnnnnnnnnnnnnnnctgtctcaaaaaaagtacacccttcagcacttgctggaatggtgaaacaaacaaggggtatttaacaaacatggaagctgggacactgcctcagaactggtatggtacttcaatttgagaaacacaaaactgatacgaatgtgccttgtagttaatgtttgatatgaacagaaaatagcttcatatttatactgaatgtgtaagtagagaaaactaagttatgtggcctttgaaatgattacaaaattggaatgattacaaaagtcttattttaaaatggaactgtcctcttgcctgataataaatattgtatcttgtagagaaatggtcagcgcgaacaggctgcagcaccagcgctgctcggggtgggtgctatggttggtagaatgctgtgaggggccccgccataatggtctcctcccaaaaaggtggctgggggcaggggaaacaggcatacaaggaattgttcttccttttcataattagagtatttgttcaaagtatactattttaagtcaaaaataatctttaagcactcaataattcatcttttaatgcactaatgtacaaactgcatgcaattactacctgctcaatctacacacttaatggaagtttccaagaatttcattgaatttcattgactgggttttcttcctccttaaccaagttgagaacactgtctggtagccccctgaaggtataacctctccttctcctccccttaactgactgacttaaacttgatccactgattgggcaccacggaacttcaaaaggtggggtcgctgggagtaggatgtgggtaggcccagctctttccaaggggtgggctcagggatcgggccgtgggcaaactgggggcaggcatccttcaatctccttccctcactttccacatcaattttcctttaggttctttccacantgggcaaggattgctggtttca

SEQ ID NO: 434300 - DNA, 845 bp, Homo Sapiens
  misc_feature (99)..(99): n is a, c, g, or t
  misc_feature (608)..(701): n is a, c, g, or t
tggtttcgggaatatcttgcgccctgggttaggcagcaaccattcgcccatataaagtacagggcaggacctcattttttcccattatacttacaggcntagagcaatccccagcgcccagggggcacctgcgctcccccgatgccattggcccccgtagaagttcttggcatacatgtgcatcgatcctcctttccctttagcaccaacctccttttcgtcctgtaagctctgcgagaatttctcggacggaaaggccccgggtgaaagtaaagccgtgagcccggtaggctgtgatgagatggtctgtggggttgatgccggcctccaggcccacacagcaagcttcctgaccatcacacaagtgacagaaaccacgaataattttctgtttatacagctgatctgctttcaactccattcggcgtacagtctgcatcatcctgtagtatttgagcccatcctccctggtgagcactgttgtgacaggagggccttcttccagccggtgaaggtcacatttcttaatttcaaatgtagcatcatttgcaaaattacgggatgctaccagcactctgcttgcctgcctggttttaagagagtgagannnnnnnnnnnnnnnnnnnnnnnnnnnnnnnnnnnnnnnnnnnnnnnnnnnnnnnnnnnnnnnnnnnnnnnnnnnnnnnnnnnnnnnnnnnnnntctgagaagcgccagacagcacgcgggagacggcggcgagcatcttcctcatgaagcacaggcagtggcggcagcggcgactcctcacaacccaggaggcacgacgcgggtgcccccaagtctccttcaggtgccccagcagac

SEQ ID NO: 434301 - DNA, 1080 bp, Homo Sapiens
  misc_feature (23)..(23): n is a, c, g, or t
tgctggcagtaccctcggggtanaggtagcgaggcctgggtggcgaattcggcacgaggtggaaggagacttgtggggcacccgcgtcgtgcctcctgggttgtgaggagtcgccgctgccgccactgcctgtgcttcatgaggaagatgctcgccgccgtctcccgcgtgctgtctggcgcttctcagaagccggcaagcagagtgctggtagcatcccgtaattttgcaaatgatgctacatttgaaattaagaaatgtgaccttcaccggctggaagaaggccctcctgtcacaacagtgctcaccagggaggatgggctcaaatactacaggatgatgcagactgtacgccgaatggagttgaaagcagatcagctgtataaacagaaaattattcgtggtttctgtcacttgtgtgatggtcaggaagcttgctgtgtgggcctggaggccggcatcaaccccacagaccatctcatcacagcctaccgggctcacggctttactttcacccggggcctttccgtccgagaaattctcgcagagcttacaggacgaaaaggaggttgtgctaaagggaaaggaggatcgatgcacatgtatgccaagaacttctacgggggcaatggcatcgtgggagcgcagggccagatattcgaagcttacaacatggcagctttgtggaaattaccttgtattttcatctgtgagaataatcgctatggaatgggaacgtctgttgagagagcggcagccagcactgattactacaagagaggcgatttcattcctgggctgcggagtgggtggactggttatccctgtgcgtccgagaggcaacaaggttgtgctgctgcctattgtagatctgggaagggggcccatcctggatggagctgcagacttagcgttaccacggaccccagtatgagtgaccctggagtagttaccgtacacgaggaagacattccgggagttagaagttaggagggaccctattatggctcttcgcggcggggtggggacggctcttgccggtgggcgcacttagggatgttggccgtgggggttgggtgc

SEQ ID NO: 434302 - DNA, 1801 bp, Homo Sapiens
  misc_feature (137)..(137): n is a, c, g, or t
agagaaaacctaagttatgtggcctttgaaatgattacaaaattggaatgattacaaaaatggaactgtcctcttgcctgataataaatattgtatcttgtagagaaatgatggtcagcgcgaacaggctgcagcanccagcgctgctcggggtgggtgctatggttggtagaatgctgtgaggggccctgcaataatggtctcctcccaaaaaggtggctgggggcaggggaaacaggcatacaaggaattgttcttccttttcataattagagtatttgttcaaagtatactattttaagtcaaaaataatctttaagcactcaataattcatcttttaatgcactaatgtacaaactgcatgcaattactacctgctcaatctacacacttaatggaagtttccaagaatttcattgaatttcattgactgggttttcttcctccttaaccaagttgagaacactgtctggtagccccctgaaggtataacctctccttctcctccccttaactgactgacttaaacttgatccactgattggcaccacgaacttcaaaaggtgggtcgctggagtagatgtggtagcccagctcttccaaaggtggctcaggatcggccgtggcaaactgggcagcatcctcaatctccttcctcacttccacatcaatttcctttagttcttccacactggcaagattgctgttcaccatcctgtccttgagaagcataatagggtcactcttacttcttacttcctgaatttcttctcgtgtacggtaactgactccagggtcactcatactgtgtccgtggtaacggtaagtctgcagctccatcaggatgggccccttcccagatctacaataggcagcagcaaaccttgttgcctctcggacgcacaggatatccattccatccactctcagcccaggaatgaaatcgcctctcttgtagtaatcagtgctggctgccgctctctcaacagacgttcccattccatagcgattattctcacagatgaaaatacaaggtaatttccacaaagctgccatgttgtaagcttcgaatatctggccctggttagcagcaccatcgccatataaagtcaggcagacctcatcttttccattatacttacaggctagagcaatcccagcgcccaggggcacctgcgctcccacgatgccattgcccccgtagaagttcttggcatacatgtgcatcgatcctcctttccctttagcacaacctccttttcgtcctgtaagctctgcgagaatttctcggacggaaaggccccgggtgaaagtaaagccgtgagcccggtaggctgtgatgagatggtctgtggggttgatgccggcctccaggcccacacagcaagcttcctgaccatcacacaagtgacagaaaccacgaataattttctgtttatacagctgatctgctttcaactccattcggcgtacagtctgcatcatcctgtagtatttgagcccatcctccctggtgagcactgttgtgacaggagggccttcttccagccggtgaaggtcacatttcttaatttcaaatgtagcatcatttgcaaaattacgggatgctaccagcactctgcttgccggcttctgagaagcgccagacagcacgcgggagacggcggcgagcatcttcctcatgaagcacaggcagtggcggcagcggcgactcctcacaacccaggaggcacgacgcgggtgcccccaagtctccttcaggtgccccagcagacgccacgcctcagtcgcaccgcggcg

SEQ ID NO: 434303 - DNA, 443 bp, Homo Sapiens
tcttcacagggaggagaggtctaagatgttgtactggccagaaaacccagaaaagtccagggtatcatctggatggaacatctgaaggaaactaagtgactagagagtaggaaaagctggaaaggttgaagcacatggaactagtgaaaggacaaggagaaacatgtgtttgcctggagggacaggtacttagacgactgaactggcctctgtgttctaatggttgagcctcagagtacatatttggggtgcggtttggtttgctttgtagagttggtttgttctgcacatgtgtatgttctgccatttccaggacgaaaaggaggttgtgctaaagggaaaggaggatcgatgcacatgtatgccagaacttctacgggggcatggcatcgtggagcgcagtatcaggacgaggattgtgtgctgctttagattgcccctgt

SEQ ID NO: 434304 - DNA, 730 bp, Homo Sapiens
  misc_feature (595)..(625): n is a, c, g, or t
  misc_feature (681)..(681): n is a, c, g, or t
gttactgatgtttttattttttccaagaacagttaacatttactaggcacctattggcctcagccacttgcatctaaagagcaaagctagtttacccgcggcccatgttcttttcgatggttagccttatttcttagctctgttaaccactattctaacgttagcttcaagttcagttttaataatctattccatagttgtgtactgctccctgccacatgaacaaaaagtttgggggaataaggcgagcagtttacattttctgtggatacttcaagtaattggccccaaagtgaaactgaattggccatggtttatcgtgttctgaggggataaaatgtgtaaggaaacggacctgtagagagggttgatatccaagtatgcgtgaatgtgtgaaaatccctataactccacttcaactggcctaatatcctgagtcactagatggtcagaagaatagatacagtacaaaaggaacaaactgatgtacatttatactaaaaaaccaaaaacaaagtttgtacaagatgaacagcaaatgaaatagcttctgtcaaaataaaatctcacacaggtaatttttctagtacgtggnnnnnnnnnnnnnnnnnnnnnnnnnnnnnnnagcaagaatgtgtattttgtaagatataggttcttggaaatagacattcttagcanatatggatgacagatcaattgtaatttattttcttttaacactgtatca

SEQ ID NO: 434305 - DNA, 1263 bp, Homo Sapiens
  misc_feature (19)..(19): n is a, c, g, or t
  misc_feature (93)..(93): n is a, c, g, or t
aaccgctcaacctttgtgnaatgcgccggttgcaacctgcaatgaagttctctgtgctgaaacaacttttttgcaactcgctgcactctttanaccccggcggcgggcaagggcccgcaagggaatgctgtaacaatgcttcccaagggctgctggaagaggcaaactggtgcacgaagttgcccgtggggctcgaggggcagggggctccttagcccaggacctctcccagcccagcagctgcatgggccgcctcgtgtgcctgcagtcgagcagctgagcccactttcttgccacaggtgccacactcaaagcgccgtggggcctgggcagcagcggctgcacagcggtgctcccggagccgcagtgaggaggggaaggcagccccacaggatgggcagcggttggtggcgcccggcatggaccacgagctggtgcacctccagcagccgacgcagcaagaaggagcgggggcactcgcgacacttgtaggggtattcacctgtgtgatggtagcggtgcatgagcaggcggtaaggacggtgaaaacgcacccccacatatcctggcagcggtaggggaagtgctgggcatgcagcgaaagcaggtgctgcctcagtgtggagctttgcgtgaaagccttgccacagtccccacaccggtagggccgctctcctgtgtgtgtgagccggtggcgggccaggttggcaggtgagttgaagggcttggagcagtcagggcaggggaagggccgctcccctgtgtgtgtgcgcaggtggttacgcacgtgagacttcttcttgaacatcttgccacaaatgctgcatttatggcgccgctccagccgatgcacaaaacgttggtgccgggtcagctgcaaggcctttccaaattcacggctgcacaggaggcagcggtaggtgcctggggcagcgggccctgctgaggtctcctcagacacagggggctcaggggcctctggctctccagtctctgctggggctggctcagggaaaccaatgacaggttcctctggtgggactggtgttgtgggcagagggacaccccctaccccatgagtacgccggtgataaaggaacttggtaaggttgacaaaggtcttcccacatggacatgaatgcagaggattcggggtgtgggctcgccggtgggccaggaggagggcctctgtgccgaaggccaggccacagtctacacacaggaagtgtgactcgctgctatggtctccaaggtgctggtcca

SEQ ID NO: 434306 - DNA, 1067 bp, Homo Sapiens
gctggcaactcagtctttattgatggtttcatttttggggtcaccagtgctaagaggtggaaggtgggggggcacctttatgtgtgtcaaggaccccagagcacccccctcacgagagaataaatccaatttagaacttacaaggtggtggggatgggaagaggaagggacacagtatgtacagatgcttaaggggatgctggagggccttcagcaacagggaatggaggtgccaaagaggaagtcgggcagagtcagccactgatctggaccccctcagcctcggccagagggtagatctcaatggcttccaccaggggtagcgcctccacagcagtctccatgacggccaggccaacggcagcctccgcctctgccagctgctgccgcacagctgcctgatgctgctgctgatgggtcttgcggtgcttccagaggttggagaaggagcggtagctcttgccacagtcagggcaggagtagggtcgttcgcctgtgtggatgcggcgatgttctgccaggcgcatggagatggcaaaggccttgccacacacttcacaggcaaagggccgctcacctgtgtgcaggcgccggtggtctttcaggtgggtactctgacggaacgctttgccacagtctggacatgggtatggccgctcacctgtgtggatgcgccggtgcacctgcagtgacgtctctgtgctgaacagcttcttgcactcgctgcactctagaccccggcggcgggcaggggccgcaggggatgctgtagcagtgcttccaagggctgctggagaggcaactggtgcacgagtggcccgtggggctcgaggggcagggggctccttagccaggacctctccaggcccagcagctgcatgggccgcctcgtgtgcctgcagtcgagcagctgagcccactttcttgccacaggtgccacactcaaagcgccgtggggcctgggcagcagcggctgcacagcggtgctcccggagccgcagtgaggaggggaaggcagcccacaggatgggcagcggtggggctggcgcccggcatggaccacgagc

SEQ ID NO: 434307 - DNA, 1292 bp, Homo Sapiens
caggagatctccggatctcgtcccaccagaagctggctggcctgcacctggagaagtacagcttccccgtggagatgatgatctgcctgcccaatggcaccgtggtccatcacatcaatgccaactacttcttggacatcacctccgtgaagcccgaggaaatcgagagcaatctcttcaggcttctcatccacctttgaagacccgtccacggccacctacatgcagttcctgaaggagggactccggcgtggcctgcccctcctccagaccctagagtgcctggacgggatctgatgcacaggcaccccacgccatcagagaccagagtggtcctcagcccatttcagactgcagatgccgcccactcccaccccactcctaggctgccttggagggtacaagatccactgagggtggccaccacagccttggctccatggatggcgggtagacaagggatgcctgggctgactgggcacgaggaaccctctagctctgactgtcacatcggctctccctacccatttggctctggaagctgcttggcccccccagatcagggcctgggtgaactccctggacctttcctagccaggccgcacagtctaggcccttgtggggtgaagaatggagggaggagcaggctaggaagacggggccaccaccctctccttgctttcagcccttcccacaggaaacatcaagaagccccagccaggaggggccaggctgccaaggcggctcccctgtttatctagagccttcgttcctggccataccccggactgccctcctgtgcctgatgtccccagctggggtcagtctcaacaggagccagtcttctggagcctctgggcagaaccctccatcagagtggaaatcagacgggaccccctgcagcttccctgaccacgccactgaccagctatctggggaagtttactgtgaaggggtttctgcctttagcaatggggttcactaagggggttcccgaaggcccagggccaaggcactcccaccgccttaccttagcacagggtctctgcaggactgcgggagccaagcgctcctggccgcccctcttgcccctcagaccttgcatccacagaagcacaacccagccaaacaccacagccttctccagagccggcactgtcccggcaaccagggtgccccaggctagctcttctacctctggggcaccacggactcccttggcactcttgggactttggtccacgtcctgagccactgaccacggccagtctctctttttatatgtgcagaaa

SEQ ID NO: 434308 - DNA, 1774 bp, Homo Sapiens
tgaaaattggcttgcccaatgattaaactctatggctgctttaaaggactgtaagataacatgtttttaaagcctatataaaccactgatgcacttttatatactttatattcaaaactaatctatggagctcattccattccatttaaaatagtaagtcctcacatatttgtggttacttttacagtgtttttaaaaaaggagtactgctaataatttaagacatcctaaagacagaataggtgtgaaggcttctttttatatttggggtgttttaggtaatttttaagaacttaaaattattatttgttcctccttaatatgaaactcttccaaaataccttctgaccagtaagtaaatgttccttaggcactgtgaggtgtattaactgatgaagcatgaacccaggctgagaagtgtacaatttgattttaactactgccaaaacagttaacaagctctgtcttatccactgacagcaggaaatgtctttaccccactactcctgagattctaaaaagggaaaactaatttcacaaacaacctttaaaagaatccatagatgattctaagaacagcacatattcagggtattagaaaagatgttttcttttgtaaggcatcaatgattaaaataatagaacgcatatttactaacaaaagatggttaacattatcataaacaccatttatctttttaaacttctctaagttcctgctcaattttgccagcttaaattaggaattgagtgcctcttggcctaatcgactatggttatacaaaactaagacatctgaaactattaggcacatcaaaggtacggcttatgtaattcaaggttcccttcttaaggggcaggtgagttacctggcacattatacatatggaactgtgaagatcatctactaaattcaactttcacatttttagtcaaactgaaagacttatagtaaatatccaaacataccatatcttcagttacaaccgagtaagtgtaacattttaccagataaaaacctggaacttaagtatgagaacccgttcagtatagctgtgctcgtattggtctcttcttttgtagatgaaagccagtcatcaatactttcaacacagcagtttagaagataaacgtccaaaacagttgacttggttgtagtccataatttagcaattcaatgccactggcattacagtgctgtggagcgcaagtgtatctctatatttcagtcagatttgtctttcttctttcctgttaagggcactttgtttacaacagcagacccaacagctgtaacacctccagccacagcagagacaccccctttcaccagccctattcccatggaaggcacagttgtaacagctgttttggtcacttccagactctttccaccaatccaagccacaccaccaatggtggcaccaacagctccctttgtaacactgaagatacccccagtcacacgggacaacatgcctggctgctgctgtgggtgatctttcattgaaccttctggtggttcatcattaaggtatgatgggatttcttgttgatttttatctgtctgattcatgatctccgccggggtcgcggccagcgctagggctggggccgggcggagtgagcgggccggcgcagaggagagctgaggcggcctgggcggcagcggcggccggcacaaccccgggcagtcgcggctccagaggcgtcctctcatgatgtggagctggaagactgtggcggcggtggtggaggcggaggcctctccgct

SEQ ID NO: 434309 - DNA, 986 bp, Homo Sapiens
  misc_feature (910)..(946): n is a, c, g, or t
gggctcgtatgggtttcttcctgttaagaggaaagccaggtcatcaatactttcaacacagcagtttagaagataaacgtccgagacagtgacttggtttgtaagtccaataatttagcaattcaatgccactggcattacagtgctgtggagcgcaagtgtatctctatatttcagtcagatttgtctttggttctgttcctgttaaggggcactttgttttacaacagcagacccaacagctgtaacacctccagccacagcagagacacccccgttttcaccagccctattcccatggaaggcacagttgtaacagctgttttggtcacttccagactcgtttccaccaatccaagccacaccaccaatggtggcaccaacagctccctttgtaacactgaagatacccccagtcacacgggacaacatgcctggctgctgctgtgggtgatctttcattgaaccttctggtggttcatcattaaggtatgatgggatttcttgttgatttttatctgtctgattcatgatctcctgttggtgttgtatcgatattcctggggaacccctgagggcactcacaccagcagaagtttcaaaggcgccggggtcgcggccagcgctagggctggggccgggcggagtgagcgggccggcgcagaggagagctgaggcggcctgggcggcagcggcggccggcacaaccccgggcagtcgcggctccagaggcgtcctctcaggatgtggagctggaagactgtggcggcggtggtggaggcggaggcctctggctgtggacgtggcgcccgacgcgacccgccccctccgccgcctcctcagctcccgcctcctcccgcggctccaccccgctctcgacgaattcgagctcggccgatttggcctgatnnnnnnnnnnnnnnnnnnnnnnnnnnnnnnnnnnnnncgccgccaccgcggtaagctccattcccctatatgattgt

SEQ ID NO: 434310 - DNA, 811 bp, Homo Sapiens
agcgggcgggtcgcgtcgggcgccacgtccgcagccagaggcctccgcctccaccaccgccgccacagtcttccagctccacatcctgagaggacgcctctggagccgcgactgcccggggttgtgccggccgccgctgccgcccaggccgcctcagctctcctctgcgccggcccgctcactccgcccggccccagccctagcgctggccgcgaccccggcgcctttgaaacttctgctggtgtgagtgccctcaggggttccccaggaatatcgatacaacaccaacaggagatcatgaatcagacagataaaaatcaacaagaaatcccatcataccttaatgatgaaccaccagaaggttcaatgaaagatcacccacagcagcagccaggcatgttgtcccgtgtgactgggggtatcttcagtgttacaaagggagctgttggtgccaccattggtggtgtggcttggattggtggaaagagtctggaagtgaccaaaacagctgttacaactgtgccttccatgggaatagggctggtgaaagggggtgtctctgctgtggctggaggtgttacagctgttgggtctgctgttgtaaacaaagtgcccttaacaggaaagaagaaagacaaatctgactgaaatataggagatacacttgcgctccacagcactgtaatgccagtggcattgaattgctaaattatggactacaaccaagtcaactgtttggacgtttatcttctaaacttgctgtgttgaaagtattggatgactggcttccatctaacacgaagagaccaat

SEQ ID NO: 434311 - DNA, 822 bp, Homo Sapiens
atccccgagtaccactggcctgaaaagaatctttttcttacagccacgatcatcttctcattgtcacatttgacagacagggcaatatccacgctcccttgcacctcttctggctctctgagaccaggaaacagttgtatggctgggaatgacagggtcctttggccgagggagcccatcttctccctcttcattccagactctcctggaaatatctgggaaaggaaatggaaggcctccattttggccttcccctccccggatgggcgggttctgcagggcaggcagggcaccagggtccagcaggatccgtagctcaggaggaatagtgtggacttcctcatctcccatctcctctgcattattttcaagccgaagatgaaatctattagccacaggagccattgtgtatgaagttattggactatagccattgtccaaagcccacttcaccagattcccttgggttgaaggaatgtcatctcttattgatttggtcattgtcatagatctttcactctcttttccaaagccaatactgttaggagcaataattttcaggcttcccttaacatcaaaagatttgatcacccagttgacagactttttgcacttcaagatcaggatgagatttttgaccacttcaagatcctcttgagaaggtcttatatcaattgttatatccacctggaaagcactgtaggggttagagttgggggtgattagctcgatgatgtgtacttcctcattctggggctggctggacatcacacacccttctgctgctttgggttgaaggtactcagcaaggtaattgagtga

SEQ ID NO: 434312 - DNA, 817 bp, Homo Sapiens
tgacgttttgaacacagatcactttattggcatggctttgttttaagaaaaggaaaagtgacaaagccaagagacagactctgctaacagatgcctgggggtggctggacatttttgcctcatgctgtgcaaagagggggatcctggcccacacatcctgctgattccttgggacaaggttgtctgcctgggcctcactgcaccttcttgaatacttgcttgcagaccacaccttccactctcatctccaggtgcagctcatcaccctcgatccactgggtccagccacgcccctccttctcacccttctgcacacactggagcttgtctccgtcccagctcactgttgtcatgcacttgcggtcatctatgcctgtcagatcctcctcaaactccttcccaacctggaagtccatgatgtagttcctaaaagtgctcagcgtgcggatgatcatatggtcaccgtcctgcacgatctctttgtctggcttcagcaagttggcgattttgcgcaaggccacattgacgtcgagggcgcgcaggtactcctcgaaattctcgttgaccaacatcttccagtacccagtgaagtcgactggcatttcggggagtgactggagccagttggccacaagcgggcgggacggctggagactgccgggacagcggctgccggtgctacgcgggtggtgggcggcccggaaatgagcgccctccggggacagggggctctgcggggcggcgacagctggattcccagcgcgcacaaagcctgcgggaggatccattgtagcggtcgctcctccccgcttccgct

SEQ ID NO: 434313 - DNA, 731 bp, Homo Sapiens
gttgaacacgagatcacttaatgggcatggctttgttttaagaaaaggaaaagtgacaaaggcccaagagacagactctgctaacagatgcctgggggtggctggacatttttgcctcatgctgtgcaaagagggggatcctggcccacacatcctgctgattccttgggacaaggttgtctgcctgggcctcactgcaccttcttgaatacttgcttgcagaccacaccttccactctcatctccaggtgcagctcatcaccctcgatccactgggtccagccacgcccctccttctcacccttctgcacacactggagcttgtctccgtcccagctcactgttgtcatgcacttgcggtcatctatgcctgtcagatcctcctcaaactccttcccaacctggaagtccatgatgtagttcctaaaagtgctcagcgtgcggatgatcatatggtcaccgtcctgcacgatctctttgtctggcttcagcaagttggcgattttgcgcaaggccacattgacgtcgagggcgcgcaggtactcctcgaaattctcgttgaccaacatcttccagtacccagtgaagtcgactggcatttcggggagtgactggagccagttggccacaagcgggcgggacggctggagactgccgggacagcggctgccggtgctacgcgggtgcctcgtgccgaattcaccacctgggcctcgtacctagcctaagtt

SEQ ID NO: 434314 - DNA, 763 bp, Homo Sapiens
attttttcagagatttgatggcttgtttgatgtttttctgttttaaccagccactatccgatacttttcttaaaatttgggaacttggcttaaattgagctaaacgtgaaatcatttcattttgattgccaaaaacagcctttaaacagagttcaaagtacttttaatacgggacatacaaatgttcacttttgtaagtcccttgggagcagaagtgctaagtttcaaaatcccaatatgtaaaccatggttgcttggagagtaacagtgcttactgcaagaatgtgcttcacttttggtccatttacatcttattatgtttgtatgaaaacctctttgtagactgatgtggcttatcctccagtaatgcttaggtgagaacaagaaatacagttgcttgcttctctgcttcccacaaacacttcttgcattactaaggaggtaaatatatatatctacagtcagattaatgagacataactttgaaatcatgtctattttctagtgacattctctcacttcttgaacgcttcatttaagaaatgccataattcatggtcttacttattaaacttcaggtaatcatgtagaccttggaggagaagacaatcgggatgcaggccgcagtcactaggtctgcagcggcgactcgctcgttcccggcaatgacgtccagtccactccgctctcgacgaattggagctcggccgattgcgcctgatcgattacttcgtataatgtatgtaaacgcgggggtcgccgc

SEQ ID NO: 434315 - DNA, 1915 bp, Homo Sapiens
ggggtgtggtaagtaggtgttgtttgatgtttgtgtgtgttagagatttagtatatgagtgaagagacaaagaccattatatattcggacacacgagaatgtgtcgcagtctgggcagaacacgcgatatgcatctgctactcggctagacagtgggacgtcggataacagcacaaggaggctggagagagggaagtagcgggcaatgcagagtggattgtcggccgacgaggagggtcggcacgggagaaggtaggcaaagcgtggtgtggttgggggctttcgggaggaagggccagcgaattttgtaggtagtgtgggggaaggccaaaccacggccccttgtttcctcccaccatccattggagagatttcggattccttctccctttccactggatcccacatagcccattagggcccaaaattcttctaactgcagctgaaagagtttcatccttaatttgtctcagtcgtaataaatatggaataattcttttccttgacagccactccttttccttcaggaaattctagaagatgaaaagtcagttcttcaaccctagtaatgcagagctttgggtcagttgttcttcttaatgcctgaactaatgcccgggtcctgttatcaatactcacccttgcgataatcttttctcgctgaagagataaacgctttttctcctctgcatttctgtctttgctgacagcctgatcagttttagcaggctcttcctgttcttctgactgactctttgaatcatactttaatttggggacaagtccaccaatataaccacctactaaagcttgtacaccttccgtgggacgagaaagaaagttagcaatactttgtttagttgaaacttgaagaacatcaggtatcgcagaaggacttgtaggcttgtccaccgtatgtacagattctgagcctggcttataagccaggatgccaggatctggagatcttaatttcccctcttctacctttttatcttcaagttctgatttgtcccggaaatgttcattttccttttgttgagacattttttccttacgtttgaaatatgaattaatatgatttgataaaaagtagaatgagtctccaaattttgtggttatagaacttgtgtaatgaaaaagatgcgtttacctatatcttcttcctttgtctataatgtgacttttctcttctggaaaaggactcttttctgctgatttgtcactatattttttcagagatttgatggcttgtttgatgtttttctgttttaaccagccactatccgatacttttcttaaaatttgggaacttggcttaaattgagctaaacgtgaaatcatttcattttgattgccaaaaacagcctttgaaacagagttcaaagtacttttaatacgggacatacaaatgttcacttttgtaagtcccttgggagcagaagtgctaagtttcaaaatcccaatatgtaaaccatggttgcttggagagtaacagtgcttactgcaagaatgtgcttcacttttggtccatttacatcttattatgtttgtatgaaaacctctttgtagactgatgtggcttatcctccagtaatgcttaggtgagaacaagaaatacagttgcttgcttctctgcttcccacaaacacttcttgcattactaaggaggtaaatatatatatctacagtcagattaatagacataacttaaaaatcatttattttctatgacattctctcacttcttgaacgcttcatttaagaaatgccataattcatggtcttaccgggatgcaggccgcagtcactagggctgcagcggcgactcgctcgttcccggcaatgacgtccactccaaccggcctgcatcagctgagcttccaacacaaacactggcgcagcagctaggtcg

SEQ ID NO: 434316 - DNA, 1149 bp, Homo Sapiens
  misc_feature (258)..(258): n is a, c, g, or t
  misc_feature (340)..(352): n is a, c, g, or t
tggaccggtccggaattcccggcatacctttaaaaattgttttaaaatcttatttaaatttaaaccagaagctgaaaaatagatcagctttattatacacaaaattattactgcttatctttgctcttttccttgttatcccgcaagttttagttgagaagatacaaaatgtttacagtgttggcacttagagtttttaaattcaagtacatgaaattcagtaatagcattgccttgagctaactaggaagtaccggngaaaaaagttaaatctacatcaagtttcttttgaactttgaagtgttttctgacccactgctaactgtagcaacaaaatttnnnnnnnnnnnnncatactttatctggctattataacataaactgtcacgtaggtttgctgccttcagaataccgcaatttaattgcgggaatataataatattgggactgtttcacagcacaaactcatctttacagtgttgatcaatgcatcagttaagaaataatgccacctcaggaattaactggcattgggaacatttgcctcattctcctgctatcctcttcattcacccctgccactgtaatatctataagtacttaagagacttgtgagcaaaacatactatttataacagtatatgattgatttatgcttatgtggttgttcagtttgttcccatgtaactcgtttgttttaaatattttgccagatttcttgtatttattccacatcattatgcctataatgtgccgctttgtggttgggcatttgcctacttttctttcataattagtgatatatgcgatgtaaaaccactagtaaaggtacattttaatacttgttattttatactgaattagccttggaggttgactgtgcaatgttatttactgttgtaattactgtaataccaacatatgggccccatctgcacactcctgaaaaacagaaagtgtattcaaattttatccgttttaagaaaataaagctgtgataaatactgtaattccaacctacattagaaggtctaagtgtaggtgatgtgccattccataatggcttccagactagggtgaattttatgttctgtactgtactgtgatgtagctttcttctgtaacagttatgttttaaaattaagtgag

SEQ ID NO: 434317 - DNA, 592 bp, Homo Sapiens
  misc_feature (37)..(37): n is a, c, g, or t
  misc_feature (46)..(46): n is a, c, g, or t
  misc_feature (57)..(57): n is a, c, g, or t
cattatttcttaactgatgcattgatcacacttgtanagatgagtntgtgctgtganacagtcccaatattattatattcccgcaattaaattgcggtattctgaattttcttttaaattttgttgctacagttagcagtgggtcagaaaacacttcaaagttcaaaagaaacttgatgtagatttaacttttttcccggtacttcctagttagctcaaggcaatgctattactgaatttcatgtacttgaatttaaaaactctaagtgccaacactgtaaacattttgtatcttctcaactaaaccttgcgggataacaaggaaaagagcaaagataagcagtaataattttgtgtataataaagctgatctatttttcagcttctggtttaaatttaaataagattttaaaacaatttttaaaggtccatgctacaattgtaaaggctatttctatgcacttttaattctggacacaattttcaaaattgcatgatggaggtaagaattttaaaaacccaccagaatgtaaataacagggaagaacattttcaaatcaaagcatcaaacatacattcaggtgcagaaatc

SEQ ID NO: 434318 - DNA, 891 bp, Homo Sapiens; identical to SEQ ID NO: 144670

SEQ ID NO: 434319 - DNA, 246 bp, Homo Sapiens
ttgactgccaattctttcttctatggtatgggccaattctggtctatttgggattatttaaagaaaattggaagtacaagtgtttcagattccttcaggcttactatttaatatttggagtttaatcttttgttcattaataatctacatagggtctaagaaactcctagatatttttttcttaaaaagaaaaatcaagggccaggcatggcggttcatgcctgtaatcccagcactttgggaggc

SEQ ID NO: 434320 - DNA, 919 bp, Homo Sapiens
  misc_feature (279)..(293): n is a, c, g, or t
cattttttaaaattttattactgtttaccaatggggagatgcagtttatttacaccagcagccataggggaaaggggaatacagttaatcagctatctgtataggatggactacttatgcaaaaataaaaatctccaaaacaaaggacagtggtgagcttcactaccctcccccgatgatcccagcatgcgataatgccaggcagtggtccctgggcatgcgatggtgggaactaatgtatggaagaaaaagccacaaaccacagaaattttaaagaannnnnnnnnnnnnnnataacacacacatacacacactcagatacataataggattgcagggtgattcaattacacataatcaagggaaaaataggaattctgctatttaaaaggaaggtaggtagggaaagggagagttcctaaccactgtcaactatatggtagggagcattctctcccaagaaaggagtatgtaccctctgggaacctgttggaccaagcccaccttatacccatccagggcaggaggctactgccctattggtagaggggccagaaacaaaaaccaaaaggggggtaatatgaacaaagtattactcaaaactactttccgcttcctcctctaaccaggagaaaaggccagaaagaaaacagtaatttcaggatttgagttccctatctgaaggcagagggattggactgtggcctttctcctttaccatcatcccacttccaagacattgttaggaagtaggccagagtctcacttagactctcctttcttcagctcttgccaaggtttgattttttttaagttaatgcaattctttaagactaatctgtaactaggccccaagcctgatcaggacaactctaggacaaggcagtaacagttccaaggcccaaactctatagtttcc

SEQ ID NO: 434321 - DNA, 1536 bp, Homo Sapiens
  misc_feature (302)..(309): n is a, c, g, or t
  misc_feature (1343)..(1394): n is a, c, g, or t
cattttttaaaattttattactgtttaccaatggggagatgcagtttatttacaccagcagccataggggaaaggggaatacagttaatcagctatctgtataggatggactacttatgcaaaaataaaaatctccaaaacaaaggacagtggtgagcttcactaccctcccccgatgatcccagcatgcgataatgccaggcagtggtccctgggcatgcgatggtgggaactaatgtatggaagaaaaagccacaaaccacagaaattttaaagaacccccccttcccccataacacacnnnnnnnnacatacacacactcagatacataataggattgcagggtgatcaatacacataatcaagggaaaaataggaattctgctattaaaaggaaggtaggtagggaaagggagagttcctaaccactgtcaactatatggtagggagcattctctccccagaaaggagtatgtaccctctgggcacctgttggaccaagcccaccttatacccatccagggcaggaggctactgccctattggtagaggggccagaaacaaaaaacaaaaggggggtaatatgaacaaagtattactcaaaactactttccgcttcctcctctaaccaggagaaaaggccagaaagaaaacagtaatttcaggatttgagttccctatctgaaggcagagggattggactgtggcctttctcctttaccatcatcccacttccaagacattgttaggaagtaggccagagtctcacttagactctcctttcttcatcctcttagatgtcgtctacaagtcaagggcaaagatatctccaaattattttagctcttgccaaggtttgattttttttaagttaatgcaattctttaagactaatctgtaactaggccccaagcctgatcaggacaactctaggacaaggcagtaacagttccaaggcccaaactctatggtttccttaatcctctaaagtatgtaatctaaatcagtctatacagtctaaatagtaccttctgggataaggattgatacatgcacagcaagggtgagagaatggacaaggaccaactccatccccctgtgtgtcaatcagcctttactgcttttctacttaggtcctaaccggcagtattgaaatggaggtgggaagatacaactccttatgaagtaagacacagcaagagggcacactagcaaagcagtcctatataggagaaatgcttataggcatgacactgcattttaaatacaaaattaagttctcttccaattccaatctcaacagagggagccataagaaagattctcctctgagtcttctacnnnnnnnnnnnnnnnnnnnnnnnnnnnnnnnnnnnnnnnnnnnnnnnnnnnnttgggcaggcttcggaagcaggagcattaagagctgaattgaaactgttcaatgtgacagctggagtggcaagcagcacctggggcaccagataggcagtggagcaggggacaggaggaacacagggccaagcccgaccgct

SEQ ID NO: 434322 - DNA, 785 bp, Homo Sapiens
  misc_feature (627)..(679): n is a, c, g, or t
  misc_feature (712)..(712): n is a, c, g, or t
  misc_feature (747)..(747): n is a, c, g, or t
gctggtacggcccggaataccgggatatccgtcgaccacgcgtccggattagtgctaggaagccaaggagcaggactggattatctcatctgactgtgtgcagaatcctgttgaatgtccctgttttctttggttgggcagagctctgctatggtgaacatccagactgtcaccactttctgtctgccgctcgaaagggatagtcctttaccactcggtcccctttggatcttcttgacaacaggagcagtccttttattgttagaagtcagagaaagacctccagaatctcctgactttagggaatggtataggggaagatgggaagtaagagtcacatatcaaaactaccctccactttattccctgagcgagggtttatgaagtataaaggggtgggagccccgaggtgagcgggaacggtgctgctttatttgaaatgttttcttacctcattctgtgccccagtagggggtccagcctcatctgtctggcttggccctgtgttcctcctgtcccctgctccactgcctatctggtgccccaggtgctgcttgccactccagctgtcacattgaacagtttcaattcagctcttaatgctcctgcttccgaagcctgcccaannnnnnnnnnnnnnnnnnnnnnnnnnnnnnnnnnnnnnnnnnnnnnnnnnnnngtagaagactcagaggagaatctttcttatggntccctctgttgagattggaattggaagagaacttnaaattttttgtatttaaaaatgcagtgttcatgcctat

SEQ ID NO: 434323 - DNA, 823 bp, Homo Sapiens
  misc_feature (143)..(195): n is a, c, g, or t
agcggtcgggcttggccctgtgttcctcctgtcccctgctccactgcctatctggtgccccaggtgctgcttgccactccagctgtcacattgaacagtttcaattcagctcttaatgctcctgcttccgaagcctgcccaannnnnnnnnnnnnnnnnnnnnnnnnnnnnnnnnnnnnnnnnnnnnnnnnnnnngtagaagactcagaggagaatctttcttatggctccctctgttgagattggaattggaagagaacttaattttttgtatttaaaatgcagtgtcatgcctataagcatttctcctatataggactgctttgctagtgtgccctcttgctgtgtcttacttcataaggagttgtatcttcccacctccatttcaatactgccggttaggacctaagtagaagagcagtaaaggctgattgacacacagggggatggagttggtccttgtccattctctcacccttgctgtgcatgtatcaatccttatcccagaaggtactatttagactgtatagactgatttagattacatactttagaggattaaggaaaccatagagtttgggccttggaactgttactgccttgtcctagagttgtcctgatcaggcttggggcctagttacagattagtcttaaagaattgcattaacttaaaatttatcataccttggcaagagctaaaataattttgagatatcttttcccttgacttgtagacgacatctaagaggatgaagaaaggagagtctaagtgagactctggcctacttcctaactatgtctgaagtggcagtcgataaacacg

SEQ ID NO: 434324 - DNA, 475 bp, Homo Sapiens
  misc_feature (301)..(326): n is a, c, g, or t
  misc_feature (383)..(383): n is a, c, g, or t
tttttcattttttaaaattttattactgtttaccaatggggagatgcagtttatttacaccagcagccataggggaaaggggaatacagttaatcagctatctgtataggatggactacttatgcaaaaataaaaatctccaaaacaaaggacagtggtgagcttcactaccctcccccgatgatcccagcatgcgataatgccaggcagtggtccctgggcatgcgatggtgggaactaatgtatggaagaaaaagccacaaaccacagaaattttaaagaacccccccttcccccatannnnnnnnnnnnnnnnnnnnnnnnnntcagatacataataggattgcagggtgatcaatacacataatcaaggggaaaaattnggaatttctgctattaaaaggaaggtaggtagggaaaggggagagttcctaaccactggtcaactattatggtaggggaggcattctctccc

SEQ ID NO: 434325 - DNA, 849 bp, Homo Sapiens
  misc_feature (831)..(831): n is a, c, g, or t
cagcacctgctagtgaagacatcccggccggcccacctgaaagcgagcgactggaaagtgaacggcgcgggtcataaagttagccatttctatggatttggtttggtggacgcagaagctctcgttgtggaggcaaagaagtggacagcagtgccatcgcagcacatgtgtgtggccgcctcggacaagagacccaggctctgctaatattttacagaccagtgtgtgccatccggagtgtggtgacaaaggctgtgatggccccaatgcagaccagtgcttgaactgcgtccacttcagcctggggagtgtcaagaccagcaggaagtgcgtgagtgtgtgccccttgggctactttggggacacagcagcaagacgctgtcgccggtgccacaaggggtgtgagacctgctccagcagagctgcgacgcagtgcctgtcttgccgccgcgggttctatcaccaccaggagatgaacacctgtgtgaccctctgtcctgcaggattttatgctgatgaaagtcagaaaaattgccttaaatgccacccaagctgtaaaaagtgcgtggatgaacctgagaaatgtactgtctgtaaagaaggattcagccttgcacggggcagctgcattcctgactgtgagccaggcacctactttgactcagagctgatcagatgtggggaatgccatcacacctgcggaacctgcgtggggccaggcagagaagaggtgcattcactgtgcgaaaaacttccacttccacgactggaagtgtgtgccagcctgtggtgagggcttctacccagaaagagatgccgggcttgccccanaaagtgtgtcgaaggtgt

SEQ ID NO: 434326 - DNA, 3611 bp, Homo Sapiens
  misc_feature (181)..(198): n is a, c, g, or t
ttttaactgtagaaaagaatattttattgaaacagtttctcaattaacaatggagcaaagtacaatttgactcaaacctgtccaaccagcatcaacagctactgaaagaattcaaacatacagaagaggtgggggtggggtgaggggtgggacccttaggtccatctctgccaatgtggcnnnnnnnnnnnnnnnnnnggaaaagacaaatgactgacacagccaggttcattcttgtcttggagctgaggcagcagccctagctcctgctacagacggaatactggaggacgggctccctaggcgtaggtatggtgggtcgggggcccccaacctagcagagtgatgcacagaggaaggccagccctgaccctcctccttcatccacaggcctgcctcagagagagggaggtggcatctctacattcacaccatggtctctcctttccccaggatcttgggatagggactcacagtagaaagcacattttggtcagcccagggggtcagggggtgagggaaaggctctgtctgggaggagcagaacagcagaagagaggaggaggcagggagttacaggaacctggggtaccaggctgctgggaagatgcagattatgacagagcttgcacgatgctggcaccccatgccaaccactctacgtggctttcctcttcggagaggtggtgggctcccttctttcactgtgcctcctccctcctctggccactaggggtgggaaatacgagtgagaatccttccagatttacttccgccaatccagaggtacaggcttttaggcaaggggcagagaactgcccaatttgctgcaggaagccaaggaaacccagggggaaaggagctggatgggaatggggaagggaggctcagagcaagagaagcccgcagagggaggaaagagcacagataggcactcagaaaccaaacctggtaactgaggctctgcagacactggcctgaaaggatgctcatcgcatggtgggagaggaagggagggaaggaacaatcaccagagaagagtggaaactccccggcaacctgatacccttcccatcaccgggacccatcagccactggcagccattctcttcctacccacaggcaaaggattcagaaattaatagtgatttttcccaaatttagggcctatatgggtagggaacagggagtggggctggggaggagaacagtttccatttttaaccacagaggtactgcagaaggaaccagtgagctgtccctcccttccccttctccacacctccaaatcacaggggtgagaaaggaactccagccgagggcaggaccaacccctcccccaaccctcgatgttaaataaatagaagtggtgggggaagggggtggagatgaatggggaaaacagaggtgggggttatagttcgtcgttcttcaaaggccgcttctgtcctgtcgattgttctttctgttcaggttctgctccaggacctcctaactccaaaggctcagtgtctcctggctcggatccagtctctactttctcaggttctgaaatgggctctgcatcttcagtctggcctgctggagggatgaccttctccccctggtcactggcactggcattgaggggtggctctgcccgggtcccattcttgtccttaggccggggccggggcttggtaaacttggccttattgagcagatactgcacctctcggtccagggccatcatcttagcttcaatgtcttttgagagcaacacaggcttctctgtggcgggcagcttagcctgctcggccagagttgcattcttccaggcccaggtctcattgatgactttctctaacgttgtcatctccacctcagtgaagatctggtccatctctgggatgagccgggcccccttgaggaacatgctggaatggttgaggagattatcgagggcagacagccgttcgggccacttcttgcgctcctctacccgaaaaaacagcccttggcacagcttcctcagctcagccagcttctccttcaacatcactgtggtggctccaacaccctcatcctccagccaggtggatgcggcgctgagcttcccagagatctcctcacgctgctcctctgtggacacttcctggtactcgggctggtacagcttgtcctgggtctcaaatatgaacgcttccaagctgttggcagctttttcccgttcctgcttctccaggtctcggagtgtcaagtcctgaagtttctgcaccgactgagccagcttatcctctggcaagtcaggcaggtccagaacaaccagctccaccccgatctcctctaccattcgccgcttcctggcgggcttctgcttcttctctccctctggggctggagcgacgccctcaggccctgcctctgccttctcacttggtttctgggcctcagacttgtccccattttctttttctgtggccttttctccctcaggggttgcatctcccttaggttcagggggtgggggctgagagccatcctccactggggcctcagcttcctccttgagctccacctgctccccaggctcgtccttgctcccctctgcagggctctcctcttcctcctggacagtatcagtaccattctccttggcatctggtgtggtaccgcctccaaacaggctggaaatggtgttgccaagtttggtgagagtagattcctcttctgcgctgtcctctaccagtgtctcaaatacagactcccaccctgtctagactgagcacgccactctcatccaggttgaagtgagccttgatgcccttggactcgtagtcaggatacttcttgaagctgtcacccaccccttttagcttcactgtggtcagattctgggagccaaatacccgaagatcttcaggccccaggaagcccaggtcgccgtagttgatgtggaagttgaaatcatggctgtagcggttaaaggtgatgactttgcgttgagggtagggccccatccgagagaagagtacccgtttattgtgcttcaggctgtgaatcccaggctcctcctccacctccctcgtgaactccaccaggatggggtagaccactgcatctcggacgacaaatggcttcactttaaaggctttgctgagcgcagctgcctggtacactgcccccatggcggctgcttcatctgcattgatgttcttccccagctcctccttgcccacggccttcagcagcacctcctgaactctggggacccgagtggccccacccaccaggatcacctgctcaatctcatccagactcatttcggcactctggagggcctgctgtacaggcccaggcacccgctcaaacaagtctgcacacaactcctcaaattccacacgagtcacttttgccttgaagtccacatcatccatcaggccttcaatctgtgccatgtggtcagcgttggcactgaggacggttttgagccgattagcctcacgcagcagcttggccatggcacgcgggttctcccgcacatcctttgctctctgacccttgcgctgctcattgaaaagcccagccaggcgttctcgaagccggcctcgtgccgaattcgccacccaggc

SEQ ID NO: 434327 - DNA, 749 bp, Homo Sapiens
gggaactataacccccacctctgttttccccattcatctccacccccttcccccaccacttctatttatttaacatcgagggttgggggaggggttggtcctgccctcggctggagttcctttctcacccctgtgatttggaggtgtggagaaggggaagggagggacagctcactggttccttctgcagtacctctgtggttaaaaatggaaactgttctcctccccagccccactccctgttccctacccatataggccctaaatttgggaaaaatcactattaatttctgaatcctttgcctgtgggtaggaagagaatggctgccagtggctgatgggtcccggtgatgggaagggtatcaggttgctggggagtttccactcttctctggtgattgttccttccctcccttcctctcccaccatgcgatgagcatcctttcaggccagtgtctgcagagcctcagttaccaggtttggtttctgagtgcctatctgtgctctttcctccctctgcgggcttctcttgctctgagcctcccttccccattcccatgcagctcctttccccctgggtttccttggcttcctgcagcaaattggggcagttctctgcccctttgcctaaaaggcctgtacctctgggattgggcggaagtaaaatttgggaagggattctcaattcgttattttcccaaccccctagtggggccaaaaagaaggggaagggggccaacaggtggaac

SEQ ID NO: 434328 - DNA, 2003 bp, Homo Sapiens
  misc_feature (105)..(154): n is a, c, g, or t
  misc_feature (335)..(343): n is a, c, g, or t
  misc_feature (414)..(435): n is a, c, g, or t
  misc_feature (450)..(459): n is a, c, g, or t
ataagccccccccactggaaaggccgcctttatgggaggttaaaggtgaatgttaaaggcgaaccaggcaaagcaggtccccactgctccctattagattggggnnnnnnnnnnnnnnnnnnnnnnnnnnnnnnnnnnnnnnnnnnnnnnnnnngagaaaggtacatttttgtaatctctggagaagagcacgagataccaaccccctaaagtgtgggacggtggaggaacaatggtgggaatgggaagaagtctccacctaaatgcagcagccgggattgaggctggtttatctttgttcttttgtgatgaggaactaaatttgggaggggagnnnnnnnnntttgtccatgaaatattccacctgcaggtaatttttcagggaatcccctgagttatgaaaagttcgagttnnnnnnnnnnnnnnnnnnnnnntcagcctattataannnnnnnnnnatgactgaactactataaatccacaagcaacggttcagacacggtgcttctgaagtgtttcacccctccccgccaggcgcaagctgcatcaaggagagggtggactcccccacctctgctcaggcatcaggagacagatagggccgttactgctgagcgccagcggcagctggaacaggcatcccaagggggttggcagcagcaatcactggtgagcctgccagaggtccaaggggtgaaggggttggcactgaagaaatccctgacatcatattggcgctgctgacgggcgtactgccccctggcatgctagatgaacccattcgagcctggtccttcacaacagtgtagaaataggggtgctccattgcctctcttgcagtaagccgtgactggtggtcatatcgcagcagtttgtccaggaaatccaaggcctcagggctgacaaggtgctgattttcactgtggacaaagcgttcccatcgctttcgagagtgtctgcccaagatatcattgaaacgtggatctaattcaatgttgtatttgtcaatatagtcatataaatcttctgtccccagaaccttggctatcctcaccaactgatcataattgtcatgtccatggaaaaatggctccttccgaaagatcatacttgccagcatacaacccaaactccacatatccaaactataatcgtacatctgatagtctacaagtagctcaggacctttgaagtatcgggaagcaactcggacattatattcttggccaggatgataaaactcagccaaaccccagtctattagtcgtagctttctgtgctcatgatcaatcatgacattatggggcttgacatctctgtgcataattcccatgctgtgacaataatccagggccttcagaatctcatacatgtaaaatcgaatatcatagtctgttaacgtctggtacaattgcttgaagtctgtgttgtttacgtgttcaaaaaccaaggcgggggttcgtgacacagggtcttttacaatgtctgccagtgtgatgatgttgggacctcctctcaaattctccaaaatctttatttcacgcttaattttcttcttttttactggcttgagaattttaacaacaactttttcattatttgtgatgttgatggcttcaaatacttcactgtatttacctcggcctaattttcgaaccagctggtagtcatcttgatttccccattccaccacatgtgactcgtaatcccagtattctcgaggtctgtgtgtattaacatctgtgtaaactctggccctgcttggcacgggtcccgacatgtcagacaggttggcggacaaagctggacttgatgtttggagatctggcagtcactgtgttcagaagcagctgggggtaagaccttgtttcagacctgttttcttcaaactgtggtggaagcggcagcggcggcggccgctctcccctctgctcacacagacaatatggcggcgatggaggaggagacacacggctcggccgccagccgcagggaccagaga

SEQ ID NO: 434329 - DNA, 834 bp, Homo Sapiens
gaaaattcaaagggacccatttatgggggggcctttgaccattcctgctggggcaataaatttcccccaatgcctggtggacccaataattcccagggggcccttccagaattcttcattccaggtaaaaattggaataatccataagtctggttaacggtctggtaccaattgccttgaaagtctggggttgtttaacgtgttcaaaaaaccaaggcgggggttcgggacacagggtcttttacaatgtctgccagggtgatgatgttgggacctcctctcaaattctccaaaatctttatttcacgcttaattttcttcttttttactggcttgagaattttaacaacaactttttcattatttgtgatgttgatggcttcaaatacttcactgtatttacctcggcctaattttcgaaccagctggtagtcatcttgatttccccattccaccacatgtgactcgtaatcccagtattctcgaggtctgtgtgtattaacatctgtgtaaactctggccctgcttggcacgggtcccgacatgtcagacaggttggcggacaaagctggacttgatgtttggagatctggcagtcactgtgttcagaagcagctgggggtaagaccttgtttcagacctgttttcttcaaacaaagagatgtgaaactagtcagtatgggtgaatgatgtttcttggagattttatgaggttccacgctgcatgatttaccatgtgatgagcacactgcttgacaagccttgatagagctgtggtggaagcggcagcggcggcggccgctctcccctctgctcacacagacaatatggccc

SEQ ID NO: 434330 - DNA, 1000 bp, Homo Sapiens
  misc_feature (46)..(67): n is a, c, g, or t
  misc_feature (544)..(544): n is a, c, g, or t
gggaaccccccaattgggggaaaaaccccttccgggggtttttttnnnnnnnnnnnnnnnnnnnnnnacattgggggcttttggtaaattccccccagttatttttttgaagggttccgggggggtttttttaaccctttcggggggctcccagggtcccaattcccgggccctttattggggggcttttaacatttttggggggcataattttcccccaatgcctggggaccaataaatccccagggccctttcaggaatttttccatcccatgttaaaaattggaattatccataggtccgttaaagttttgggttccattgctttggaagtcggggttggtttacgtgtttcaaaaaacccaaggcggggggttcgtgacacaggggttttttaccaatgtctgcccagtgtggtgaatgttggggacttccttctccaaatttctcccaaaatctttatttcacgcttaattttcttcttttttactggcttgagaattttaacaacaactttttcattatttgtgatgttgatggcttncaaatacttcactgtatttacctcggcctaattttcgaaccagctggtagtcatcttgatttccccattccaccacatgtgactcgtaatcccagtattctcgaggtctgtgtgtattaacatctgtgtaaactctggccctgcttggcacgggtcccgacatgtcagacaggttggcggacaaagctggacttgatgtttggagatctggcagtcactgtgttcagaagcagctgggggtaagaccttgtttcagacctgttttcttcaaacaaagagatgtgaaactagtcagtatgggtgaatgatgtttcttggagattttatgaggttccacgctgcatgatttaccatgtgatgagcacactgcttgacaagccttgatagagctgtggtggaagcggcagcggcggcggccgctctcccctccctcgtgccgaattcgccacccaggcc

SEQ ID NO: 434331 - DNA, 857 bp, Homo Sapiens
taatttgctaaactttattttatacatacacgtttacatttactagtcatggtgtcaacttgttaacacaacgaagccctaatggacccgttttgaaattagaagctggacagttacaggctttggtctcttcaagaatccaattcacccctgggtttcgcttggcacacaccccaggagaacgtcgatgcacacagctgtgtagctgcaaacggaaaccactctcttttctctcgtatttttcagtcagactcactcaggattttgaaatgaatcatcacgagaaatttgttttaaagttgaatcactgagaacatctaacaactgttcacattctttatcacaaaaactgaagtcggaaaagacgccctgaaaacttgcaagggctaatactctatgatagaatattactactgttcaccatgttaatacatttacttactaccatacacctgaacagtcacggcagaacaagagcatgtgaatgacgaaaggaaacttgctttcagggtgtcagattatagaacatgcacaggaatttcttccacttctaacctcgctcatcagtcacatttacaagaaactcaattttaagcaaagagatgcctgaaataactaagacgtgtacaaaaacaagttaacctatgaacacaaggtaatattctgatagtcttcgatgtgacttccaacatatctgagtagtcacttttcagttttttaaacacgtgagaaaaatagatttggattacattctttggggtccgggtacgattcaggttgggaaaccattatctcaagggaccctgcttttttcctttacacatgcgcaacgcaaacccacacaccacgccccacac

SEQ ID NO: 434332 - DNA, 533 bp, Homo Sapiens
  misc_feature (185)..(185): n is a, c, g, or t
aaatgcacaccatgcctgcagacgtcagcactcgccctgtcccacttgccctggtgggaaacagcctgcagtgaaaacgtcgctctgccttttatgctggacaaagccgaagtgtgctggaggtggctgagccaggcttcccgcggcaaggagcgggactcctgaccccacagccctggctcccnaccctcgatgtgctcctgcctttgccttcttgctggtaacgctgccattggtgctggtaacgctgccattggtgaagaacacgggagcccatccagcccatccaggaagcaaagaaacggtgctccagacaccatgcggatagcttcacccgccgaccccggccaggcccagctgctcccacagcacctggcatggagggggaagtgagcaagggcaggcggggagagaagaggctcgccctcctggctctgccccagacacccgtccgatagcactccagtgccttccggtctctcccgctctggaactttctggttactgattacaagtgctttaatccaggaatg

SEQ ID NO: 434333 - DNA, 674 bp, Homo Sapiens
  misc_feature (102)..(102): n is a, c, g, or t
  misc_feature (139)..(139): n is a, c, g, or t
aaccctcacgaatcggaaaccctaatttttgcacaagtcccaatccttggaaagttaaaaacaacaatgtgtgtaggtggtggggaaggggttcctaatttncccgtaatccatataactcacaatgtgaaagaactanggacccaggtattggctggaattacctgtcccaattcctcgacctcctgtggaggggatggatggtcactcccttgtcacagcttcaccaagggcagcctacacttttccactccttaatattgggcctggtcctgccacttgtatgggctgagaggacattggcaatgtgacccaagcagaggcttgaggtgtgcttgttagactcaccctcctgtgttcttggcatgaccacgagagaagcgtgctcgctctgggtagcccaccagccgaagaagaaaacgaatatgacttgatcaaatctgagacttgctgccaagcccagccaagctcagcttaacccgaggcaacccacagactcacgacttaggcagatgctttagcttgtctgccatggagatcttgttaataacaatagctaactagtacagacatcatcacaaaccttgttgactcagtgctcagggtctgcaggcagaatgctggccactttccacacacctttcatgtgacctgaatgccaacctaagacacag

SEQ ID NO: 434334 - DNA, 752 bp, Homo Sapiens
  misc_feature (518)..(519): n is a, c, g, or t
taggatgctactgatcaaagtgatatctgtgtctgttggaatcttgatagctgattaatttgccctcaattctgctccctgaacttcacacataaatcttcccaagtgggttttagggtgtatagatcccagcaggattaaggaggtggaaaagcagctaacatttcttgaggctctaccacatagcaggcactgtcacagagtaatggcattaatccccataataatcctgtgaaggtgatattctcatcccatcttagacatgaggatattggaactcagagaggtggctattgcattgcgcagaactctacagagcccatgctcttcccagagcagcacccacaaaagcaagcattgattttgtgctcagtgtgtgccaagcactgtgcagagggtacacagttcctgccaggttaacaccctcccttcaggcctcccaaaggcataggcttgcaaagagcagaaggtgtgaaatcacactcttcctctgggcatcctggatccctgaattatcnncccccccatgaagtacttcaagggccaagctgcccctttccctcctctccgcccatgaaaatgcctccaaactgagatgctttcagctgagaacagatttgactcacagacattaccaaagaggagcttgtgaatccaggaaaagctccagggggctagctgatctgagcagagagctttcagtgacccattttcctgtctagactctgacttaagctagtggcatcgataaa

SEQ ID NO: 434335 - DNA, 1210 bp, Homo Sapiens
  misc_feature (928)..(928): n is a, c, g, or t
  misc_feature (959)..(959): n is a, c, g, or t
  misc_feature (970)..(1123): n is a, c, g, or t
  misc_feature (1182)..(1182): n is a, c, g, or t
gggaaaaattaattttttaaaaaacaccatgcttggagggtgggggtagaaatagacacaatattatttctaaggaatcgggttttcatttactctggactggtgaaaatattttttaaagccagtgctctaagacctcagcttttatctcagaaccccatgggttccagaccaagagtacaggaaatcaaattgttgtcctgtctgtctatagcttggaacagggagctttgattactgactccggttccacacactgtaagatcaaaaaaccatctccacatttgaaagagatgtaaggtgtattcatagggatggtggctcaacaaatcaagcaaactggaatcaaggggagggggaagggaatgaaatggaaagggaggctgattcccttcccctgacttaccactaatttactaggctacctactttcatgagtaacctctcacagctacccagcacatgccacaatcctatgctcttgccttcttttatctgcactgtgtgaagggactcttttaaataaatgagcaagtgtcctaagctatgtcatccaaagattgtcctttccattctcaaatcctgtgactgggatcactcaacagcactgtgatgtattattttcaatgaggtgcctttcttaactgaccaaatgctgccttgtttggcccctaaatcaataaaatatgttaaaatttgtatcccctgttgtggcattttttttagataatctaagctagaaaaatgacattgaattctggacctggctggaaggaaaagaagccctttcttgtcgctggcagctgtgtggtagggaggtccaagtatgtgcatatgagataagcctgcaacctcttgaccttcagctcctatgcaggcttctcttgagtcccagagacaagggcagcttgggtctagtggagatagncactgtgcttgggagttcaggggacctaggnacaaatcccannnnnnnnnnnnnnnnnnnnnnnnnnnnnnnnnnnnnnnnnnnnnnnnnnnnnnnnnnnnnnnnnnnnnnnnnnnnnnnnnnnnnnnnnnnnnnnnnnnnnnnnnnnnnnnnnnnnnnnnnnnnnnnnnnnnnnnnnnnnnnnnnnnnnnnnnnggatccagatatacacagaaagatatctgcttcctgccagggttgataactgttgaatngacacttgtccatagtcttgaaagccag

SEQ ID NO: 434336 - DNA, 771 bp, Homo Sapiens
ccctgcgtcagctgaccctcttcccaggtaggggccctggctggtgcactttgcactccatgagaacatgaaaagaggtggaaaaggtggggctgggcaacaggaaaagacgcagaggccatctgggcaggtgctgagcaaggccaggaaagagtccaagatggtgtcctgaatcaaccctggctccgggaccaccagcgtgcgtgtcacgtccgtaggcctgcctgcagtggctctgtgggctgaactgcagtggccagtgtgggcagagttccgggtgggcctcctcctccatgtggccactgctactctgacactgtccacacattgtctagatctgtgctccatttgcccctgagaggaagggcctgtggtggccgctcacacgcccaggaggacagcactgaagtgggagccactgcgcactgtgagggagcagccgctggcgttgtccaagaacacggaggtccactgccccatctgcaggtacaggacgccattcacagagatggtgaagagctcactgctgctctccaggcccatgatggcctccagggaggcgttgcgctggcaccgggactggatgcagatgagcaggcgcaggtggtcccgggggcgcggcggccccctcctcggcggctccccgagcgcaggtagtagacgccaagctcgtgcagcgcgcgccgctccaccaacgcgtcccggcgcaggcggcagaggaaagcggcctccacgcgcggcgcccgcggccccggggccaggggcgcggcc

SEQ ID NO: 434337 - DNA, 1371 bp, Homo Sapiens
aagagtatgacagtaacagcgaccagtcaggatcccaggagaagctgctcgttgacagccagggcctgagtggatgctcaccccgagactcaggatgctacgaaagcagtgagaacctggaaaatggcaagactcggaaagctagcctcctatctgccaagtcatccaccgagcccagcttgaagtcttttagcagaaaccagttgggcaattacccaacattgcctttaatgaaatcaggggatgcactgaagcagggacaggaggagggcaggctgggtggtggccttgccccagacacgtccaagagctgtgacccacctggtgtgactggtttgaataaaaaccgaagaagcctcccagtttccatctgccggagctgtgagaccctggagggcccccagactgtggacacttggccccgatcccattccctggatgaccttcaagtggagcctggtgctgagcaagacgtgcctaccgaggtgacagaaccgccccctcagattgtacctgaagtgccacagaagacgagccgcctcttccacgaaggcccaggcccctggagcaagactctgctgtcgaccatgcattgctactgagccaaagcaagagattttctgaacctcagaaattgacaactaagaaactggagggctcaatcgcagcctctggtcgcggcctgtcaccccctcagtgtttgcccagaaactatgatgctcagcctcctggagctaaacacggtttagcaaggacgcctctggagggccacagaaaaggacacgagtttgaaggaacacaccatcccctgggcaccaaagaaggggtagatgctgagcagagaatgcagcccaaaattccatcacagcctccacctgttcctgccaaaaagagcagagaacgccttgctaacggactccaccctgttcccatgggccccagtggggtcctccccaggtcccgatgcgccatgcctgccagtgaaaaggggcagccccgccagccccaccaggcctagcgactgtcccccagcactggctcccaggcctctctcagggcaggcgcctggcagcccaccaagcacaaggccgcccccctggctctcagagctccccgagaacacaagcctccaggagcacggtgtgaagctgggcccggctttgaccaggaaggtctcctgtgcccggggagtggatctagaaacgctcactgaaaacaagctgcacgctgaaggcatcgatctcacggaggagccgtattctgataagcatggccgctgtgggattcctgaagccctggtgcagagatacgcagaggacttggatcagcccgagcgggacgtcgccgcaacatggaccagatccgggtgaa

SEQ ID NO: 434338 - DNA, 410 bp, Homo Sapiens
  misc_feature (338)..(359): n is a, c, g, or t
tgacattgcagatggtgcagacccttgctttatttgtctgacttgttcacagttcagccccctgctcagaaaaccaacgggccagctaaggagaggaggaggcaccttgagacttccggagtcgaggctctccagggttccccagcccatcaatcattttctgcaccccctgcctgggaggcagctccctggggggtgggaatgggtgactagaggggatttcagtgtgggacccagggtctgttcttcacagtaggaggtggaagggatgactaagttctttatcacagacctacaaaaaatgagataattagatattactctcactagtttggggnnnnnnnnnnnnnnnnnnnnnnaacaaaacagcagctgggaaagagaaatttagggtgggcagacgagccggg

SEQ ID NO: 434339 - DNA, 992 bp, Homo Sapiens
tctttttacaaaacagcagctggaaagagaaatgtaggtggcagacgagccaggcacgaggtttcagattggaagggaccaagatgaggaccaaggtgtggctgcctgactaggaacgctgtgggctggcccaggctctcgccacacatcctgggagaactgccataggccctagaaggagggatgaaaggcgtatgggagggaagacagcggtccccggatcagcagcagcaccaccatcctctgatggcccctgggcagtccgccagctcggaagcactcagggctggagcctgggctctaagcatgggccccaggagccagacaggagggaggcagcaggaagggctggcatggaagggctgagttctattggggtcccacgcgggcaagggaaccaggactcatccctgcttgtcagccaatcagcttcttcaggaaggcctccaactgatcctcatccttgatgcccacaaacttgtccaccacgtccccattcttcatggccagcacagtgggcaccgctgacacctcatactcaatggcgaggtctgtgtggtcatcaatatccaccttggccatcaccaccttcccgtgctgcttggccaccatcttctctaacctcggccccaggatcttgcagggtccacaccactgtgcgtggaaatccacaaccactggtgtctcactgttgaccactcggtcttgaaagtcaggtccatcctggatattaaaggttgtcaaggagatcctcgtggtgtatattgtccgggctgggttgggtgttacagtcaggccaccaggactgcattgtggggtctgcagggctctggaagtgaggggtggccactgaccctgagagggcttcctggagatgacagaggccaggaacctcctcagaagaagtcgctgagccatctccctgcaatgcgagcggagggatgcacagcctagccctccctgcctgtcaagggcacgcctgccgccccgct

SEQ ID NO: 434340 - DNA, 1833 bp, Homo Sapiens
  misc_feature (631)..(631): n is a, c, g, or t
  misc_feature (1611)..(1611): n is a, c, g, or t
  misc_feature (1618)..(1618): n is a, c, g, or t
  misc_feature (1656)..(1656): n is a, c, g, or t
  misc_feature (1671)..(1672): n is a, c, g, or t
  misc_feature (1690)..(1690): n is a, c, g, or t
gagaaaattgtgtcctggatgattagcacatgggtaaaggagatttctggaatataaaatggattgtttttgaaatttctaggtttggctctatttactgtaatggttgaaaacaatttagtatttgggtgacccttttgtttttcttctaaatgtgcctctggtaaaatacagaactagactaaagatgtagctttttaatatttgtcttttgatggtggcaggagttcatacattaattgaactaacacatcatattttgacctactatttctatcatattgacttactgtttctgcacttctttgaccagacttatcttaaaaagtccacttttgttaaaatgtagtcacacctctgatataatccaacaagaagtgttcaaaatattttaaatatttgtgcattttataatcactaaattaatctctctctcttctctttgaacagcttagcagtgtctgcaaaaacgaatcttttcctacaacctgttaactgactggactgttggtaacaaagtaattgtgagaaccatgtcggtcaaaaatttggcatctgctgaaaaaaatgaatgccattttcaagttcccaaattacttctatactgatttcactttccagaaatgggagnatatgaaaagattctctggaatccttgaaagacttaatagagatacatgagactaagttaatcttggaacaaaattatactttttttgtctttcatgggagtgatactcagttattgcatatctttacaaaattgtaacctttggagaattacagtatttcatcaagaaattagagtttttacataatcaagagcatattctatggaattaacatttagtggactagaattacataagcaggccatcagtgatcacaaggcatatgagtttgtatttatttcctggaacatgagagctaatttggagtacagacagacaccctgctgagtagaatataaaagttaatgtaaagttctgaactataaagagtagtccttttaaatagatgcattgatttgtatatctttgaaaaagttgattatgattaaatgtgtgggtagttaattacaatttagggtaacaacccaggatgtatgggattcttgaggtttttggcttcttgagcctttctcttgagtacttgatactgttttctgaatattttgaggtttctaattaatggtatgctagtttctactgttttatataaaaatttatctagtgttgtataaggactttagtattgtggatgatgggagtggctttttgtggcatatggttgttttaattgaaatattttttcagtttattacaagtgtgaaaaaacactcaaaactctggattgttttatttcatttttggttggattaatgttaatacattccttcacgtggtttagattgagtcattttatctcacttacttggaaatgtgcagctgatagaagagggattgggtaggagattggcttttacttcataataaatatacagttggttattgtattattcaaaacttattaaatccattcagtttcttaccattttaagtgtattcagtgcctgtgaagccaggcagcagagtattcccactggcttanaacttangcgctgatgctcctacagtacagctagttataattccnagaacaaaggcaccnnacattattttggtgaccnttaactactacttttgatagaacaagactggggtaaattcacttgataatggagtcatttaccttttttaaaaaatgtaatttattctggggttcaagcattttttggaatggtggtaatttttaaaggttcctgaaattata

SEQ ID NO: 434341 - DNA, 1322 bp, Homo Sapiens
  misc_feature (627)..(627): n is a, c, g, or t
  misc_feature (630)..(630): n is a, c, g, or t
  misc_feature (672)..(672): n is a, c, g, or t
  misc_feature (678)..(678): n is a, c, g, or t
  misc_feature (1003)..(1063): n is a, c, g, or t
tttttggggagacagcttttgagtttatttggcttctggcttcactggatcccgaggctaagactccaaccctggctggggcagcaggaaggcatccagagagccctggccccagatgacccccagggcaggaggtccatgctctaagccctagggcaggggccgcagtagcaggacttggtcaaaagtgctggtgacagctgaggccggcccctcttccctgcacctcccctcctccctgcatcaccccagcaggcaattccctgagacaggctctggtcctcccaaccagctgggtacagtgttgggccccagtagggcaggtgagctggggggacctacaggtttcagatgtgggggcgcaggtcccccttccagtgtgaaggcttcctgttcagtttagtgttcctgacccccaaaggggggtggggtccctggggaaactgaggcagctgctgaggctgacccagctcctgttccagtgtatgctgttactcctcctaaggcagctggagctcgggggagtggcctggcccactcaaggccccgcttccggcacccacggggcctgggcacccatgttttttgtctgtgccctgcagtgctggggcgcccccctggaagggnttngcaggtggggagtcccagaaggggtctgagtacgggaacaangtccanggtgctcggcggggtgcaggctgtggtgatggcaggggagaaggccgtggcccagctgacacaaagctccagggatcaatgcggctgcgaaggggcgagggccgaggtcggctgatgaggcccaggggtggtgaacgtggggtgcctggggtgccaggagcagagcttgatgtccccggtgggggtgagacagtgcctccgcggggctcctcctcacgtcgggggctcttggctgaccgctggcccacagggatacccaggtccagcaacaggggtgcaggagtgggcggggagttgggcgttttgagcgagaagcagatgagcnnnnnnnnnnnnnnnnnnnnnnnnnnnnnnnnnnnnnnnnnnnnnnnnnnnnnnnnnnnnnactccccgcgctcgcgtcctgggcctcccggcggctgcaggtcgcggccaaggcccagcgaggcgagcagggcggtgccgcgcagcagcgcccgctggatcagcttgggcgtcccagagctgctaccgcgctctgcggggacaggcctcttgggctcctcgggctccaggctaggccgcggggggttaccattgagtgctgggggtgtggaaggagatcctaagggggatgggtcatctgaatccaggtaccatgggct

SEQ ID NO: 434342 - DNA, 1421 bp, Homo Sapiens
  misc_feature (237)..(237): n is a, c, g, or t
  misc_feature (366)..(366): n is a, c, g, or t
  misc_feature (1226)..(1226): n is a, c, g, or t
cgcggggttagtgggtggggacaaaatatgagtaggggcgtggcaagtcgctctgggtggccctacgaaggatttcgctatcaagactagagcatctgtcgcagccgatggagttacatcgatggaagagaaagcggggagagaaggggcgtcgattaagggtccacgtggtcgacgtcgagcggcatggtgcacgtggactcagttgtgccggtgctgagccatctcgagaagtantcatatttttcagatttttctgcggaataatttatcggtcgatgttgacgggcggtgcgtatgaatcgtaggatttccgttggtgtgctagcggtcgacggctcaacacctcgggagacggcggcggcngtcaaaccgagctcctaatagagagagatatatttgtataacggcgagctcttttgctcagggggggcactagagctgtggtatacggattgggtggtggcaaggtggttcggcggtgtttagggcgccccttgggtgtctatttcaacactttccttccccctcttggtgtaatggagaagctaagataggggggggccaaacgtggagagcgggattcaggctagggctggggggggttcccgagcacggggggtgtgaggtcgcgcggagccaagggtcccagctcgcttcgccggtgtgcacgcgtggggtggttccgcagggggagaacttccttggctcacctggacacaaagctgcagggatcaatccggctgcgaaggggcgagggcggagctcggctgatgagtcccaggggtggtgaacgtggggtgcctggggcgccaggagcagagcgtgatgtccccggtgggggtgagacagtgcctccgcggggctcctcctcacgtcgggggctcttggctgaccgctggcccacagggatacccaggtccagcaacaggggtgcaggagtgggcggggagtcgggcgtcttgagcgagaagcagatgagcggggaagggggcggctcggtcgggcagggcgcgggcgttggcgtggggggtgttgtcggggactccccgcgctcgcgtcctgggcctcccggcggctgcaggtcgcggccaaggcccagcgaggcgagcagggcggtgccgcgcagcagcgcccgctggatcagcttgggcgtcccagagctgctaccgcgctctgcggggacaggcctcttgggctcctcgggctccaggctaggccgcggngggttaccattgagtgctgggggtgtggaaggagatcctaagggggatgagtcatctgaatccaggtaccatgtggcttcgtccatgcgggaccttctgcttccattctgggcttcaccaggctttggggggactgggtaccccaagcccaggatgcctcggcggtctagcattgctttgagttcttccagacgt

SEQ ID NO: 434343 - DNA, 1301 bp, Homo Sapiens
gcgtggtatttttcccccgcggggagggtggggggagaacacagtttgcctcccgcggcgggggcctcccctccctccaacgttcggggggttttctggggctggaccccctggggcccccacagggggaaatccccaggttcccaagccatccaggggtttccaggaagttggcccgggggattttcgggcgttcttggagccgaggaaggcagaatgaagcggggaaaaggggggcggcttccgtttgggccaggggcccgggccgttgccgtgggggggttgttttcaggggatttccccggcgcttgggttcctgggcttccccggcggttgcaggttcgcggccaaggccccagcgaggcgagcagggcggttaccgcgcagcagccgcccgctggatcagcttgggcgtccccagagctgttcccgcgctctgcgggggacaggcctcttgggctcctcgggctccaggctaggccgcggggggttacccattgagtgctgggggtgtggaaggagatcctaagggggatgagtcatctgaatccaggtaccatgtggcttcgtccatgcgggaccttctcctcccattctgggcttccccaggcttgggggaactgggaccccaagcccagcatgctcgccgctctccattgcttgagtcctccagacgtcggggggactggcggccccatgcctggcctggctctgcaggctccaactggatggctcggaaccggggaaaggtgggcgaatccccaggcccgacctcgaagacgtttctcctccggtcaaggccgggtgaggcctgcacggtgatgcggtgcttgaagtcgagtggcatgctgatacgctcgccgccgtcgcgcgcccggagcttgctgcgcttgaatgtcccgcggcggcggcgcacgtgcggtcgctcgcggtccacctgctgcagcagcagcgtcagctcgcgctcgaacacctctagctcccactgggccagcaggtgctcgcgccgccgcagctgctccgcctgtgaccgctgctcgcgcgccgctcgcgtcagctcctcctcgcggctcagtagttccttttccttggctcgcagctcgtcgaagagaccctggatctcgcgcttccagccttcctgcatggaatggaaggagtcccgcggcatttcccgtaggacctgtgcctccagcgcctccaactgctgcaggatggaggcgaagtcgggcctgcggtgggggtcctgcgcccagcagtcggccataagccctcgtgccgaattcgccacccaggcctcgcac

SEQ ID NO: 434344 - DNA, 1254 bp, Homo Sapiens
  misc_feature (225)..(286): n is a, c, g, or t
  misc_feature (741)..(791): n is a, c, g, or t
  misc_feature (805)..(813): n is a, c, g, or t
  misc_feature (1036)..(1036): n is a, c, g, or t
  misc_feature (1164)..(1164): n is a, c, g, or t
ggcctgggtggcgaattcggcacgaggctcaatggtaaccccccgcggcctagcctggagcccgaggagcccaagaggcctgtccccgcagagcgcggtagcagctctgggacgcccaagctgatccagcgggcgctgctgcgcggcaccgccctgctcgcctcgctgggccttggccgcgacctgcagccgccgggaggcccaggacgcgagcgcggggagtcnnnnnnnnnnnnnnnnnnnnnnnnnnnnnnnnnnnnnnnnnnnnnnnnnnnnnnnnnnnnnntcatctgcttctcgctcaagacgcccgactccccgcccactcctgcacccctgttgctggacctgggtatccctgtgggccagcggtcagccaagagcccccgacgtgaggaggagccccgcggaggcactgtctcacccccaccggggacatcacgctctgctcctggcaccccaggcaccccacgttcaccacccctgggcctcatcagccgacctcggccctcgccccttcgcagccgcattgatccctggagctttgtgtcagctgggccacggccttctcccctgccatcaccacaggcctgcacccccgccgagcaaccctggacccttgttccccggactccaacccctttctgggactccccccctggcaacccctttccagggggggccccccaggaatggccggggcacccaccaaaagaacctgggcaggcccccggccccccnnnnnnnnnnnnnnnnnnnnnnnnnnnnnnnnnnnnnnnnnnnnnnnnnnnaaggaccacatctnnnnnnnnngaagagcttcccacgcctggccccctttagggggaaggggaggtcccaccagtggcattaagcacccgcgggaacaacgggggagaacgcggggggctgtcacaaagccgtaccgggtcagagcctgggcgccctcccagagcttgttcgccgcccacgggggagataccctccacaccacaccgcgtcggcttaggtgagggggggcggcccactctggctngccaagaccgtatacacggtggggggcacaccggcgagggagaagaacctcattgtgctcacactctctaacgtaacaggggggtgggagcgaagctctaggcgcacactcacgcttcccgagtcgtnagggaaagagacatcggtgggtgatggggtgcacccccgcctcgacacacgtcaccccaggcatcgcaccacctagtagcgcgcccagag

SEQ ID NO: 434345 - DNA, 1612 bp, Homo Sapiens
ccccgggagccttaacctccgggagccttaacctccggagccttaaccctctttattgcgcacttcagccgtgagactggggctggcctgtgtgccctaggcgtagtattgtaggttggctttcttcttggcctgcacctccaggatgccttccatgtagtcctcgtgggtgagctccgtggcacccctgcgcagtgcgatcatgcccgcctccacacacacagccttgcactgggccccattgaagtcatctgtgcagcgggccagctcctcgtagttcacgtcaggactgacattcatctttcgggagtggatctgcatgattctggcccgggcctcctcattgggcatcgggaactctatcttgcggtcaaggcggcccgagcggaggagggcggggtccaggatgtccaccctgtttgtggctgcaattaccttaacttgggtgttgggctggaagccatccagctggttcagaagctccagcattgtcctctgcacctcccggtccccagccttctcactgtcaaagcgcttggtgccgatggcatccaactcatcaatgaagatgatagagggcgctttctccttggccagggcaaaggcatcccggactagcttggcaccatctccaatgaacatctgcaccagctgggggccagccagctttaggaaggtggccttagtctgtgcggcacaggcccgggccaggagggtcttccccgtccctgggggcccatacatcagcaccccttttggaggttggatccccaagttctcaaacttctccttgtggttcattggcaagacaatggcctccaccagctcctggatctgcttgtccaaacccccaatgtcactgtattgctccgtgggcctctcgtctacctccatggccttcacccgcgagtcatactctgtgggcagcgtctccaggatcagataggagtctttgttcacacccaccaggtctcctggctttagcttttcagcatccaccaacccaatcacaggaaggaagtacgtctgtcgtgtagaggttttgatcacagcacacttgcccttcctctgggagtccaggtcaatattggcaccatcctcctcttggtcattaggatcaacatccaggagctcgatgacgttggagacaaggtacggcagggtcttgttcactttgattttctcactgttctcttttatcttgtccttcatggcttggagctcatgggtgactctcaacacttcactcttcatgatcttgatctcactgtccagcagccgtgtgcgctggatgatctcctccgtggacatcttgagcacctcctccccaattccatcttgctcggcctcatcccacacggtcgccatcttctcctgccgagtcactggactctcaatattcggcagcagattcatttcctggaggagcgggcagaagatgggaccaggcgggagccgcaacgggagattaataccgtctttcttaaagccttctcttgaccagtggaaaacctctccccacaaatcccgactcttgacccgaccagctccggccgtgctgcggagcagcgaatctgcctctccgattccaaagaccaaccccatcccggaa

SEQ ID NO: 434346 - DNA, 1041 bp, Homo Sapiens
  misc_feature (348)..(348): n is a, c, g, or t
  misc_feature (405)..(405): n is a, c, g, or t
aacaccatatgtctcttgtggccctctccccgggccccccagccttttttccccggtaaaaaagcgctggggtgcccgatggccatcccattcattcaatgaaggatgatagagggccgctttttcctttggccagggccaaaggcatcccggaactaggctgggccccattctccaatgaccatctgcaccaagctgggggccagccagctttaaggaaagtggccttagtctgtgcggcacaggcccggggccagggagggtcttcccccgtcccctgggggcccatacatcagccacccctttttggaggttggatccccaagtttctcaaacttctcccttgtngttcattggcaagacaatggcctccaccagcttcctggatctgcttgtccaaacccnccaaatgtcctgtattgctccgtgggcctctcgtctacctccatggccttcacccgcgagtcatactctgtgggcagcggtgctccaggatcagataggagtcatttggttcacagcccaccaggtctcctggctttagcttttgtcagcatccgaccgacgccgatcacaggaaggaagtacgtctgtcgtgtagaggttttgatcacagcacacttgcccgttcctctgggagtccaggtcaatacttggcaccatcctcctcttggtcattaggatcaacatccaaggagctcgagtgacgcttggagacaaggtacggcagggtcttgttcactgttgattttctcactgttctcttttatcttgtccttcatggcttggagctcatgggtgactctcaacacttcactcttcatgatcttgatctcactgtccagcagccgtgtgcgctggatgatctcctccgtggacatcttgagcacctcctccccaattccatcttgctccttccctcttgtcaatggcgtctccctgcgggccccggttcccggacacgccagctcgcccaggtgcccacctcggcctcatcccacacggtcgccatctcctcgtgccgaattcgccacccaggcc

SEQ ID NO: 434347 - DNA, 1138 bp, Homo Sapiens
tggcgctggcgcttgtcggtgggtggccgtgaggggccccagggcattcagtggttctggtaggggatccttgtaccaggtagggcctttcgccttcccgcgtgcgctggtgtcgtaccgcgtgtagcgctcctccggcctgtgtgggcctcgtgggccagtgggtgcatgccgatgcattcgcctggcgggatgttgatgatcttctgcgcagagtttctcacccacgttgctcccggcagatctgccgctcctgctccgtggccagggctaccacatgcaccttgaccgtccccactttccattggatgcactcgtctgagaatggccagcgagacttctttttgtggtagaactccaaggacatctgccccagcccatcgccaccagagttgcgcagtgcatccttgaactccccaacaaccttgcgcagggcacgatccagttcctcagaagagacacgcacataagtgaagtcgatgaagtcacagtcaacatcctgggtgcccacggtgccaatggagtaggtgccctccttcttgtagtggaacttgcctgtgctgcggtgcagaagcaccgtgtgcagcacagccagcatggcctcctccacctgccgcccctccaccgacacctccagcacctccgagcgacagttcatcctgcacccagtaacccacaccaaggtgtggaactaggataaagacaggggatcttcaccctacccaagggccacccttgagtgtagagtttggagcacggattcctcaagctcggctcatgcccttcctcctcctcctcacgccctggtgcgacctccgcaggtacgcttcaacctccgcacggcgctgagccacaagagaccagctccacagtccacgtaaccagggaggaacggactcctcgggtgtctcgggggcggcgccccgcgcccaggctggctggactcggaagctggaggagcgcccgcgttccactgccccgggggatgcccacgccggcacaggagagggggcacacggttaaaacagctcccacctcccccaaccacagtccacgaccagcctctcagatgccaccactctcccggcaggctccagaccacctgggtcggaggctgagccgggaccggaagaccgct

SEQ ID NO: 434348 - DNA, 1000 bp, Homo Sapiens
  misc_feature (912)..(939): n is a, c, g, or t
gggcacttgcagctcccagtaccaggagggtttgaaggcctgtgaggggtacagggtcagattcctccgggttcccagctcagcctggcagggggattgctgtcaccagcacagaccaaagcgcagagactggccctctgggcgtgacagagatgagccttttccccagagctgtggatgctgtgccttctccttggaagacagtcatggtcaagttctgaggcgggtaggacacgttgagttggatggtcttgttcgtggtcacgctggccccagggaaggtcacctgacaggtgaggctggtgccgtggtgctggggctgtgggatgagggtgagcactgaggagcgggtggtggaggggtccaggggggacacggaggtccctatccaggagatcatagggggtgtcccctgctcacaggcccagggcacagagcaggtcagattctgggggcagccggactccagggtgcctgggatgaggatgttgggcctgtgggtcaaggctgtcacattcacagagagccggtgatgtttataattccattttatacttcctttctccatacgaaagaagtatctccccgcatcacttcttctggcatctctgatgctcagggtgcaatttttggtctgtgggtccccaaggaggtggaatcggtcccgagtttcctcctgcactgcccgagctgggttgtttgtggccactggagccttccagcttatatcattccctgcccggaaccagtagccatgaactgggtcagagtcagtctggctgtccactgggtaggagaaggagcagcgcacatggacacacatgccctcttgcacggtcacggaactctgcatcgtcagcgagtaatccttccggttactcttctgtccttccaccctctccctcccccagnnnnnnnnnnnnnnnnnnnnnnnnnnnntatctggggttggaggtgccagggccgcgagggaacgtctgatcccgggaattccggaccc

SEQ ID NO: 434349 - DNA, 1892 bp, Homo Sapiens
  misc_feature (234)..(234): n is a, c, g, or t
gaggttgttaaacaaattctattcagtagctggaaaagtgaatttcctgtggaatgacaggaattacatagaagcaagcaattttattttcctcaaatgtagcaataattttaatctgtacatacataaaacaaacagtgcaattataaaaccttgaaggtgacatgcatattttaaggtgcagttgggatgggggaggatgttagcatctccaattttccttacttttttttnctagttccttatgcaaaagcactgagtcaggaaacttcatctggaatgctgaagttaaaggtgaacttcctgaagtctgcgcgtctaaatatcacaaacaaaatggaaatgaccttctagagcagtttggtagggactagagtaatatggctggctttcaagctggaaatgaatgaaatcagggatgcattttctgaaaaactaaaggagataatgtttgtaactgagtgtccctatttctgtttcatagttgctaaccacatgagcccttccaccaatctttttattcggcatagtttctgaatagatgctgttcaatggagttatttgtaactaggggtggtgagatgcagaaggaaggacctggggaaatggcttcttccttgaagtctgagtccatgctcctcttccactgttcttatggccttttctctgccatggaggcagaggtagctggtgcagaatgtcaggtgctgtcatcattcacaggcccagggatgcagacaaaggtgagtgatgggggtctacctttgcttcttccacaatacctttctcaagctttcctggccttgcagcggaacttctagaactagaaagtcagttcactgggttcttgactcagaggccaggatgagatgggatgtggcagagtcacaagacacaaagggaaaatatggtaccaattagcctcagagcaggatagagaaatttatatttgcactgatgaaaattcaaattcccaaagtcaatctaaaaaatgaagatttcctttgagtattaattttttctctgtacaagtagcctgtgcacttctgttcagatgatcccagggacactctagggcagtatgctctagatcagctggaacagctctttctggcagtgacattttgatttgaaccccaaagtaaatccatacatgacatcacagttattaaaataatgaaatattactaaccaaatgtaactgcaattcaatcaatgttatatttcacacacaaatttagaaaaatcaagagtataataaaagcataaaattaaacagaaggaaatcaatttctacaagaaatcaaatatatttacaatgagatttaaagggaaaaataagctacttggatcataaatttaattttattttaaataactttagctacctcagctgttaatacaataaaggcagaaaaaacaggctgccttttatttttccagatttaatcagaaaattgtatctacaataattgacacaactcacttcttgtccttcacccatctcatcaaaaattattgcattttcccccaaactgtattttttggattcctctgtgaatatactcatttcgtcctctttcctggaggcatcttggtttaaatccatctttaaaaaaaggagaaggggtacatatgtggaggcaaaatattctcttgaagccaacagatacagagttgctagagaagctgattgtacacacaagctgcctgggattgggatggggagggctgctgatttcgagacacatgacagcctttggtggacgggcacaggcaaagccccacgggcccttcttcctgggcagggttgggactaagcggcggaggcggagcttcatcttcttcttggaacttgtcgttttggttctcctccaaaagccttcatccac

SEQ ID NO: 434350 - DNA, 1014 bp, Homo Sapiens
  misc_feature (11)..(11): n is a, c, g, or t
  misc_feature (42)..(42): n is a, c, g, or t
  misc_feature (65)..(65): n is a, c, g, or t
  misc_feature (76)..(76): n is a, c, g, or t
  misc_feature (193)..(193): n is a, c, g, or t
caacacccaancaagaattgaaccccaaaagggttttaaaanaaaggggcccgttcttctaaggntaatgggttanaattcaggggaaacttaggaaaaggaccagagcaagaaccttgggttagttagccggggaacccgggctgaccccacgccctgaggaacaggagggacgcaggcagaccccagaggnagggcccgggccgcccagcaagtccatggcagggagacgcaggcgctcctgccccaggaccgggagaaggggtctggggataaaaccccgatctctctcgccccaccccattattttctgtgagcttcctcttagccatacacgatgagcagctggtgggcaggggcgccccttgacacagccatacgggatacgggtaaggctgggtgggggtgtctggggggcacacagagaataaccagcacacagccaaacccgtgctctctaacccgtcaacagaaacttaacaataagtgttcataacctatacgaaggcaatcataaaacactcctgaagacacaaaaaaaacccgaaatagaacagttaggatgttccagcatcaccgagatgtcagctctccctaatttagggtataaatttaatgcgattctaataacaaccccatgcgtttctctttcaaagagagctagaactgatactaacgttcacatggaaaaataaacaagccttgccagggaagggcggggtgaacggggccagccctatcagacgctaaagcacgcagtggggcctctttaatgagaacagtgcctaatgacacaaaaatacacagggccgtgggagaggagggacagagacaggccccccgctgacgccgtgtgtgaggagggggcgctccagtcactagaacggtcttggtatttcacataaaatggtactgggacaagtggaaaaccatttgcaaaaaagataaaattagatccatttctcacaccatgcccaagaataaactccaagtagatgggagtcctaaatgcaa

SEQ ID NO: 434351 - DNA, 910 bp, Homo Sapiens
tctcatccacataagcactccccgaagaattaagggggttctgttttcaaggcatgccaagtactaaagcaccttgcagagcgtgtctattacaagatgtcatttccaccagcagttcccttaggggagctgaaataaattcacattttctcaaagtctcatagctttggaggagccatctgcttttttggctgctctttttagctggctttttattaggctcagtgacataaaaaggatccaggtaaatgggtataggatttgctggatttactaacaatttccccctgttcttaacacttcctattagtgacttttcagacattgagtttacttataaagagagatatttatgtactctctaagaagacaaatgaggtcataaacactgcataaagcaaggcaaaaatgtatgccacatctcagttatctaaactagattagatccaagccaagttttctcaacagagagcaaagggccaggcagtaaggtagaaatagagataaaaatcattccttccttgtgatccaaagctggtcgagcagctttcctggaggaaaaggttaatgaacttcaggtccctgcaactcagcccccaccacaaacacagccctggaaacatacagtggcgcaaggtcctcttgaaatgttaatggttaatgttcccaaaccagagaatgctttgaaaatgtatcattcagtgtaaattaattacatacatatttttctatatatttgtttcaaactgtaaaaataacataatatgtaattggtgtattagtgagaggttgaagccagttggactttcctgggtccaatggtgcccttgtagaacttttctgtcttacacgaagattgtatgaccccatagggttcttgcacaccaatcaatgctctgtacttaggtgg

SEQ ID NO: 434352 - DNA, 855 bp, Homo Sapiens
  misc_feature (13)..(13): n is a, c, g, or t
  misc_feature (28)..(28): n is a, c, g, or t
  misc_feature (88)..(88): n is a, c, g, or t
gacagtggaaganggattgagtttttanggtcagcccattaagaggctttttccaaagcaacatattcctgattataaaataataagnctatgaggaaataaggattcctgtatacaaaatctcagcttacatacaactttactttcagatagtttttacgggaagaaagctatgttttaaccacttgtaaaaggttaactactgtaaattcagcactttctaataacccttgggtcaaaaaattttaatcacagaattagaagtgttttaagctatattatgttttctgaaacagttgaaagactcctggatcttttgccatttttacaggctgctataaatgcgcttgatggcctcggcttcttccttgtcaaggatgcctttctccacataagcatcagcttgtttattgatgaagtctctcatctttgaaaggtcataatcttctttatttccctttttgtcatgtttcttcaaccattcaatattttttctgatggcttccaaataggcttctgtttttcctttgggttcatctgtctttcctcctgggttggagttatcatcttttgtggaatccttcaagcttccatattccttttccatcttagctgcttcttccttggtactgtctgtttcttcatgactcttctctgatggtgctgggaaaagcttgcttatattgtcagtagcatttttttctagcttgtttttggtctgaagagcaatcatttcatccaagttttcaaggtaggaaacaccttcttctggagatattgttccatatttcaccatcatcttcacaaagtcaatcagtgttttcatgatagtaatcagtgtttctttctcttttg

SEQ ID NO: 434353 - DNA, 321 bp, Homo Sapiens
ccctattagacatctattacagcattgattaaatcttctatcttgtaatagacacgctctgcaaggtgctttagtacttggcatgccttgaaaacagaacccccttaattcttcggggagtgcttatgtggatgagacagtggaagaaggatgagttttaaggtcagtccattagaggctttttcaaagcaacatgttctgattataaaatataagtctatgaggaaataaggattctgtatacaaaatctcagcttacatacaactttactttcagatagttttacgtgaaggatgtctatatggaggtccggctcgatt

SEQ ID NO: 434354 - DNA, 948 bp, Homo Sapiens
  misc_feature (43)..(57): n is a, c, g, or t
  misc_feature (97)..(219): n is a, c, g, or t
  misc_feature (277)..(288): n is a, c, g, or t
  misc_feature (299)..(419): n is a, c, g, or t
  misc_feature (777)..(777): n is a, c, g, or t
  misc_feature (860)..(860): n is a, c, g, or t
  misc_feature (909)..(909): n is a, c, g, or t
  misc_feature (912)..(912): n is a, c, g, or t
tgggggccgaagtttttagaaattccccccctttcccgagaannnnnnnnnnnnnnntaatttaaattgaaaccccctggggccctctttgaaagannnnnnnnnnnnnnnnnnnnnnnnnnnnnnnnnnnnnnnnnnnnnnnnnnnnnnnnnnnnnnnnnnnnnnnnnnnnnnnnnnnnnnnnnnnnnnnnnnnnnnnnnnnnnnnnnnnnnnnnnnncccttttcctttccttttggggccccggccccaaaaaaaggtttttaaaaattttttnnnnnnnnnnnnggccccaaaannnnnnnnnnnnnnnnnnnnnnnnnnnnnnnnnnnnnnnnnnnnnnnnnnnnnnnnnnnnnnnnnnnnnnnnnnnnnnnnnnnnnnnnnnnnnnnnnnnnnnnnnnnnnnnnnnnnnnnnngttaataaagtagaataacatttatttcttaaaatttttattatacatgctgtattcatggaaaaccaagatctttaaaggaactcaaattagatataaattatgttcagctctgagctggttataaatcatgtttagcatggaaacagttaaactgaagctttcttctccttataggttgccatcattttcttgatctctgcaatagctttccctggattcagaccccttgaaaaaagagaaaagaatcaataacaaatgataactgaaactgaaagggaaaacccacaatcttgggtgaaactccttcctcagctggttcagtgtccaagcaaggtgaatgcaaatcaagtccctncaaacccataggggttgggctaagggctctcttctgtctaccttttttaacatttgaagatggtcagctccctctggcaagantctgccacgttgaattccttcttgtgtggctcactctaacaggtaaacnagnccagggcagagatgaactctctgactgctcaaagat

SEQ ID NO: 434355 - DNA, 1199 bp, Homo Sapiens
tggtcataaagtagaataacatttatttcttaaaatttttattatacatgctgtattcatggaaaaccaagatctttaaaggaactcaaattagatataaattatgttcagctctgagctggttataaatcatgtttagcatggaaacagttaaactgaagctttcttctccttataggttgccatcattttcttgatctctgcaatagctttccctggattcagacccttaggacaggtccttgtgcagttcatgatggtgtggcagcggtatagagagaatgggtcctgcagcttggccaggcgctcctctgtgaagtcatctctggagtcaatcatccagcgataggcctgcataagaactgcaggccccagatatttgtctccgttccaccagtagctggggcagctggtgctacagcaggcacagagaatgcactcgtagagcccgtccagtttctcacgctcttctatggactgcagatactgctgcttgccttcctgagattcatccttcttcttcaaataaggctcaatggatttgtactgtgcatagaagttgctcaaatcgggaacaagatcctttatcacatacatgtgtggaagagggtagatttttgagaccttattgaggttggtgtcaatccttcgggtgcaagctagagtgttgcctccattgatgttcattgcacaagagccacagatgccttctctgcatgatcttcggaaggtcaaagtagagtcaacttcattcttaatcttgattaaagcatccaataccatggggccacatttattaaggtcaacttcataagtctgcatatgaggtttgtctccagccttgtctgggtcccatcgatagatggcaaatttcttgatacggggagctgtggctgcagctgtctgggctcctcgggaggcctgcaggcaggctccgccaagggttgtggccggcaaccggcgcctcaaggagagtgcgaccaccgccgccatcttggctcctgacgtcagccccaccccttaaccccgaggtcgctctccgccggtgtcccgtcgaacatcgcggcgcccagcctacatccactgaggacccactagccgcgtacgagcaaccaagtgggaggcggcttccggtttcccgggtgggcggagggaaggcccgctctcgacgaattcgagctcggccgatttggcctgat

SEQ ID NO: 434356 - DNA, 2039 bp, Homo Sapiens
  misc_feature (1965)..(1965): n is a, c, g, or t
  misc_feature (1967)..(1967): n is a, c, g, or t
  misc_feature (1969)..(1969): n is a, c, g, or t
catctatttcaaggggaaagttggttggcaggtccacacccacgctggaagattgggaaattcctttggtgccgcccccaaactcctggttccatcccatcctttagggatcttgttcttttttgtcacagcgttctagctgggcaggtacttcatcagctcccaatttggtcttcatcacctgactcttatagtggtcaatcatcccctcatagtttcttcactgaggctttcagctgctggacctcgaggtgtgcctggttgagtttgtcctccattggagcaaagctggccttcagcctctcattctccagcttgaatgcggaatactcagcagtctgacggtgtagtctctccaccaggctatcccggtcttcccgcatcttctcctccagggtttgttgttggtttacaagatctgttacccggtcattcaggacaataatttccagcttcaaggtctcccttttctttttccaccttggttgtagcggctcctccagggattcccagagtggataaagcttcagcgacataaagatccttgtcagcgagttgcacgtgtagctgctcagcatactcctcgctcttctcggctcgctccttctgggctcggatgcccttcttcaagctctctttgtctcggtctcccttctgcttcaactccttcagctgctccatgatggcctccacttctgccttatgctgattcccgctgcgctccagattcttaatctgcatgcacaggcgactgttctcagcctctttggaccgaagctgtgcctgcaaatgcccacgcatggactccatggatttagaaagctcagaggctgtctttgcttgagccttctcacattgtatttcctgaaggagctcttccacctccttgtccttgtcttgcagcagtaacagcaggcgcgctttctctgagtcggcctccgccagccgtttcagcagtgctccttgttgctccattagtctttcagaatcctctttgcagtgctgttccctcaggaggtctcggagggtgcggttggtctcctcaaatgtgctcagcttctgcaggagaagttccttctgccttgtcagggtgttgatgtccgtgcaggtcatttgtttctccgttttcagcttcccgatggtatccttcaaggccatgacctgcttggcagccgcagccccatccatttccgcctccaccagcttggacatgaggcactccttctcctgttgtaggtgtttcttctgaagtatggtgaagtccttctcctccttcatgcgctcgatgttgtgcctcaacaccgtgttctcgtgctcagtctcagccagttcgtgggccacctcctccagctcttccttccgttcctccaggaaccttttggccatctggcgctcacctttttgcatcttgacctcagacttcagacaaccaaccgcattcattagactatcaatcttcttatcataacggttcattttacagtgacctgagtcatcatcttctgtagagaggtcacttaaccgcatcactgagaccagcttttctgaagatggtggcgtgatctccaggcaatgaggtggattctcccacttgcatcccacaggccgggcagatgattttccagggggcatccaaggtaccttggttttcacccggacactccgccgcacattcacagtgtcccctttcattcctcgcttgtgagatttctggctgctggtcgctgatggtttcgggagtttttttatgtggacgtggacaggggtgttctcatccacgtgaacatgtaaggggggagttgaagagcggtccttcatggttggcttctggcaggtgggggaggacaacacaaaaatggttgatcgtcacagttacactgggtgcgccacaaggtgctctcaagacctttttctgcgtgagactcgttactccgttcttcccacacgatggaaaccaggagcgancnancgtgcgcccagaaacgccgccttatgaagtcgttgaagtcggaggccagggtcgtgccatggagacgccg

SEQ ID NO: 434357 - DNA, 774 bp, Homo Sapiens
tggtatccttcaaggccatgacctgcttggcagccgcagcccccatccatttccgcctccaccagcttggacatgaggcactccttctcctgttgtaggtgtttcttctgaagtatggtgaagtccttctcctccttcattgcgctcgatgttgtgcctcaacaccgtgttctcgtgcctcagtctcagccagttcgtgggccacctcctccagctcttccttgccgttcctccaggaaccttttggccatctggcgctcacctttttgcatcttgacctcagacttcagacaaccaaccgcattcattagactatcaatcttcttatcataacggttcatctttacagtgacctgagtcatcatcttctgtagagaggtcacttaaccgcatcactgagaccagcttttctgaagatggtggcgtgatctccaggcaatgaggtggattcttggttttcacccggacactccgccgcacattcacagtgtcccctttcattcctcgcttgtgagatttcgtcacagttacactgggtgcgccacaaggtgctctcaagacctttttctgcgtgagactcgttactccgttcttcccacacgatggaaaccaggagcgacacggctgcgcccagaaacgccgccttatgaagtcgttgaagtcggaggccagggtcgtgccatggagacgccgcggcggatgcagtctggctctggcagcggctcctcccgcttccgcctccttttccgacacccgtcgcagtcgcccattgcc

SEQ ID NO: 434358 - DNA, 1193 bp, Homo Sapiens
tgttctcctcaaatgggtcaagcattctgtgcagaaaagttccgttggccttgtcaggatgttgaatgtccgtgcagttcatttgtttctccgttttcagcgtccgcgatgggtatccctgcaaggcccattgacctggctgggcagccgcagccccatccatgttccgccgtccaccagcttggaacatgaggcactccgttctcctgttgtaggtgtttcttgctgaagtatggtgaagtccttctcctccttcatgcgctcgatgttgtgcctcaacaccgtgttctcgtgctcagtctcagccagttcgtgggccacctcctccagctcttccttccgttcctccaggaaccttttggccatctggcgctcacctttttgcatcttgacctcagacttcagacaaccaaccgcattcattagactatcaatcttcttatcataacggttcattttacagtgacctgagtcatcatcttctgtagagaggtcacttaaccgcatcactgagaccagcttttctgaagatggtggcgtgatctccaggcaatgaggtggattctcccacttgcatcccacaggccgggcagatgattttccagggggcatccaaggtaccttggttttcacccggacactccgccgcacattcacagtgtcccctttcattcctcgcttgtgagatttcgtcacagttacactgggtgcgccacaaggtgctctcaagacctttttctgcgtgagactcgttactccgttcttcccacacgatggaaacctgggggagccgcctgaggatgaggcagacatggctaggcatcaaagccgcaaaggtgggcaattgggtcagcaggctctgctcagggggacccagaggggcaggcttgtcaatgagcctctcaaggggcccggcatcaaacgtcctctctctgaggggaggagggtggaagctttggggttggcagttggatgaaaacttgggaggcgctcctctactgtccaagtcgcacagcaactgtccagcaggcaggagggtaccggtttctgcccatagagagaaaggtgaagccctgcccgcgggcggcagaggaggggcagagccccgtggtagccaagagaggaaggaggcggccgaccgcccgttagcgggaggaggagaggccccgcgccggtggcggatcccggaatcc

SEQ ID NO: 434359 - DNA, 819 bp, Homo Sapiens
gccgtgtccctcgttcatgcgctcgatgttgtgcctcaacaccgtgttctcgtgctcagtctcagccagttcgtgggccacctcctccagctcttccttccgttcctccaggaaccttttggccatctggcgctcacctgttttgcatcttgacctcagacttcagacaaccaaccgcattcattagactatcaatcttcttatcataacggttcattttacagtgacctgagtcatcatcttctgtagagaggtcacttaaccgcatcactgagaccagcttttctgtaagatggtggcgtgatctccaggcaatgtaggtggattcttggttttcacccggacactccgccgcacattcacagtgtcccctgttcattcctcgcttgtgagatttcgtcacagttacactggttgcgccacaagttgctctcaagacctttttctgctgtgagatctcgttactccgttcttcccacacgatggatacctggtggtagccgcctgaggatgtaggctagacatggcataggcatcaaagccgcaaaggtgggcaattgggtcatgcaggctctgctcagggggacccagaggggcaggcttgtcaatgagcctctcaaggggcccggcatcaaacgtcctctctgaggggagaagggtggaagctttggggttggcagttggatgaaaacttgggaggcgctcctctactgtccaagtcgcacagcaactgtccagcaggcaggagggtaccggtttctgcccatagagagaaaggtgaagcctgcccgcgggcggcagaggaggggcagagccccg

SEQ ID NO: 434360 - DNA, 1096 bp, Homo Sapiens
ccttttttgtggctagaagccttttatcaaccattgttatttccctgaaaggagagttttttccacacttccctttgttctttgtttggccaagcagtaaccaggccgggcggcggttttcttatgagttggggcctctccggcaggccgttttcaggcaggggtcccttggttgttcccattagttctttcaaggaatcctcctttgcaagtgctgttccctccagggaggttcttcgaaggggtgccggttggtctcctcaaatgtgcttcagcttctgcaggagaagttccttctgcctttgtcagggtgttgatgtccgtgcaggtcatttgtttctccgttttcagctttcccgatggtatccttcaaggccatgacctgcttggcagccgcagccccatccatttccgcctccaccagcttggacatgaggcactccttctcctgttgtaggtgtttcttctgaagtatggtgaagtccttctcctccttcatgcgctcgatgttgtgcctcaacaccgtgttctcgtgctcagtctcagccagttcgtgggccacctcctccagctcttccttccgttcctccaggaaccttttggccatctggcgctcacctttttgcatcttgacctcagacttcagacaaccaaccgcattcattagactatcaatcttcttatcataacggttcattttacagtgacctgagtcatcatcttctgtagagaggtcacttaaccgcatcactgagaccagcttttctgaagatggtggcgtgatctccaggcaatgaggtggattcttggttttcacccggacactccgccgcacattcacagtgtcccctttcattcctcgcttgtgagatttcgtcacagttacactgggtgcgccacaaggtgctctcaagacctttttctgcgtgagactcgttactccgttcttcccacacgatggaaaccagcaggcaggagggtaccggtttctgcccatagagagaaaggtgaagcctgcccgcgggcggcagaggaggggcagagccccgtggtagccaagagaggaaggaggatcccaaaattccggccgtaccag

SEQ ID NO: 434361 - DNA, 1149 bp, Homo Sapiens
  misc_feature (193)..(193): n is a, c, g, or t
  misc_feature (199)..(199): n is a, c, g, or t
  misc_feature (204)..(204): n is a, c, g, or t
  misc_feature (234)..(234): n is a, c, g, or t
agtatgggggaagtccctttcctctccctttaaaggcgcgttggaggtgggcccttcaacccccggtttttggggttcaattctcagccagtttcgtgggcccccttcctccaagttttttccttccggtccttcccaggaccttttgggccatctggcgctcacctttttgcattcttgccttcagacttcnagacanccacnccgcattccattagactatcatctttctantcataacggttcattttacagtgacctgagtcatcatcttctgtagagaggtcacttaaccgcatcactgagaccagcttttctgaagatggtggcgtgatctccaggcaatgaggtgattcttgttttcacccggacactccgccgcacattcacagtgtcccctttcattcctcgcttgtgagatttctggctgctggtcgctgatggtttcgggagtttttttatgtggacgtggacaggggtgttctcatccacgtgaacatgtaaggggggagttgaagagcggtccttcatggttggcttctggcaggtgggggaggacaacacaaaaatggttgatccgttccagaacagatcccagacgccggccccagggtccttagggctggatctcctctaaacctgctggaatgcacagctcctccttggatttagtgaagcacagcggaaagcaggcggatccttctacacagtgatctcaacgtcacagttacactgggtgcgccacaaggtgctctcaagacctttttctgcgtgagactcgttactccgttcttcccacacgatggaaacctgggggagccgcctgaggatgaggcagacatggctaggcatcaaagccgcaaaggtgggcaattgggtcagcaggctctgctcagggggacccagaggggcaggcttgtcaatgagcctctcaaggggcccggcatcaaacgtcctctctgaggggagaagggtggaagctttggggttggcagttggatgaaaacttgggaggcgctcctctactgtccaagtcgcacagcaactgtccagcaggcaggagggtaccggtttctgcccatagagagaaaggtgaagccctgcccgcgggcggcagaggaggggcagagccccgatcccgagaattcc

SEQ ID NO: 434362 - DNA, 1112 bp, Homo Sapiens
tttgtggtgtaatgggtaaaaaggagagggacgtgtgaaagagaattgagccaccgagctagacggtttgcagcaggggttcccgaagggccccgacaagggtgttcagggaagacctattttcatagcgttgtccctacggagaggtttaggaggggtcggggttgtctccctccaaaagaggctcagtttgggcaggggaaaattccttttggcttgtcaggggtgttgatgtcccgggcaggtcaatttgttctccgttttaaggcttcccgatggaaccctttaaggccatgacctgcttggcagcggcagccccatccatttccgcctccaccaggttggacatgaggcactccttctcctgttgtaggtgttttttctgaagtatggtgaagtccttctcctccttcatgcgctcgatgttgtgcctcaacaccgtgttctcgtgctcagtctcagccagttcgtgggccacctcctccagctcttccttccgttcctccaggaaccttttggccatctggcgctcacctttttgcatcttgacctcagacttcagacaaccaaccgcattcattagactatcaatcttcttatcataacggttcattttacagtgacctgagtcatcatcttctgtagagaggtcacttaaccgcatcactgagaccagcttttctgaagatggtggcgtgatctccaggcaatgaggtggattctcccacttgcatcccacaggccgggcagatgattttccagggggcatccaaggtaccttggttttcacccggacactccgccgcacattcacagtgtcccctttcattcctcgcttgtgagatttcgtcacagttacactgggtgcgccacaaggtgctctcaagacctttttctgcgtgagactcgttactccgttcttcccacacgatggaaaccaggagcgacacggctgcgcccagaaacgccgccttatgaagtcgttgaagtcggaggccagggtcgtgccatggagacgccgcggcggatgcagtctggctctggcagcggctcctccccgcttccgcctccttttccgacacccggtcggcagctcgcccatcccgggaatt

SEQ ID NO: 434363 - DNA, 479 bp, Homo Sapiens
tgcatcattatcacaagcatttattgagtacccatagaactcatggtaccttcacggtgtttacagaactttgcttatatgccgaccttgcccttaaggagcttacaatctagtggaaagaaagacggagaaactcagatgtgatagagcaatgagtgaacagatactatagactgaaaaataaccataaatgtaaaacacatactgaaaaatgagggttaatggggatggcaaggatgataggtaggcctggatatactcctgacttcttgaaggagtaaatatctagaatattcaaggacgtaaagtgcagttgagaaagccaggatgcaaacaaacatttcctatctgctgtgtattttcttgctccctgcagctgagaattgcaaaaagaaaacagggatagagataatgggtaaaaactttttagtattcttttagtacttctgtttctgaattagaccgaacagtcaccatgt

SEQ ID NO: 434364 - DNA, 780 bp, Homo Sapiens
ttcggcacaggcggctactcccaagattgcatgtgtttgtttaaaagtgacctgctactacctcaccattagcccactgggacttgcttcctctttaaaattttatgtaacactgatgctcctgttttgatgtgtatgaaccttaatctatgtgatatgtgactttgtgaacattgaattttttaattgagacctggggcaaggcatagttgtagctatttttatcctctttcctgggcacttcttccctgtttggcacttccagcccctgcttcttatcccaagactggtatggcattgctgtgtgttaattctgccccactgagtttcataggcaagcactaaagactgttacctggaaataagaaactcttgggcctgttggggggcctcagtgcaggactcaggacatccagttgctagactgcagctgttgtcagccacctgtacttctcaggctctatctgagatatcatcctttctttccaactgtgggcttcttatatctacttctcagacgttcattttcaagggccaaaatgttcccactccaactcacaatctgtgggaaagtagcagctctggtttctagaaaaattcagaaccttccctttccttctttctggaggcaaagggtgaaactttaaagcctgacagaacagaaggcagtttatctcagcagtgaagggatggcagtaatgggatggcagtcagggtggaccagcagaatgggtgaagagatgtattggattggctgacttgctaatcggagctattctt

SEQ ID NO: 434365 - DNA, 1055 bp, Homo Sapiens
  misc_feature (61)..(72): n is a, c, g, or t
  misc_feature (321)..(343): n is a, c, g, or t
  misc_feature (959)..(973): n is a, c, g, or t
gaggaacccctccggggggggccttttttctacggcggaaaaaacgccccccggggaaatnnnnnnnnnnnntaaaataaaaatgctggctcgataaccggattttcttttactacccagtccgttcccaaaaggcccccatattgcaatggttctatcaaaggttaaaataaagacaagaaaaataaacatgttttcaaataacaaagagttgacactttttcccccttaaataaatcagcataagttttccacataatgtaacaatagtaaaaatgcaccttgcaaaatccaaaattactcactgaaaatgtaatagannnnnnnnnnnnnnnnnnnnnnngatctatcttttttgatgccatctttccatagggactgttagctggagtctggagtcttaccaaacatatggtaagagtttagtttctgtccttcaggactacttctagatttcctagacgtttcagtgaaaatccccacacttctttctttaaaacatgtaaatggtaacgtgactcctctaccttttcccgaggctccccatctaagatatgttcaaggtcactgattttagtagctatgcactatggctgccatcatgcgaggatcagtaatttttggcagatggttcttaaggctgaggaaagaggccaaggctagtgtatgaaaggtaaaaagataaaaacactcacatttgagttttgattaagtaactgaaaatccgtacatgctgtttttccacctctgctctgacctatcgagaactgagagcgacagcagaccagtgtgagaacaataccagcccttcttttgtacctcctgcctttgtcaagccaaatctgaaggaatgaaagtttcacacagattcgagttgggaatcccagcatgacaaatatctgtaatatacagtacatgcaggccacatcctactgccttcctaactaagcacaaagggnnnnnnnnnnnnnnntcaactctgtcccattcagtcattcgcacaacagacgaacttgctttttcctacaaattagtgagaagtaagaccgaccgct

SEQ ID NO: 434366 - DNA, 1030 bp, Homo Sapiens
  misc_feature (207)..(254): n is a, c, g, or t
  misc_feature (874)..(888): n is a, c, g, or t
  misc_feature (891)..(891): n is a, c, g, or t
  misc_feature (966)..(966): n is a, c, g, or t
  misc_feature (977)..(977): n is a, c, g, or t
  misc_feature (986)..(986): n is a, c, g, or t
  misc_feature (994)..(994): n is a, c, g, or t
atttttatttcttcctaccaagtcaaacttggatacttggatttagtttcagtagattgcagaaaattctgtgccttcttttttgtttgtttgttgcgttcctttcttttccccctttgtgcacatttatttcctccctctaccccaatttcggattttttccaaaatctcccattttggaatttgcctgctgggattccttagacnnnnnnnnnnnnnnnnnnnnnnnnnnnnnnnnnnnnnnnnnnnnnnnnatggtaactgctttctgttccaaattcagtttcataaaaggagaaccagcacagcttaggatttcatagttcagaatttagtgtatccataatgcattcttctctgttgtcgtaaaggatttggggtgaacaaacaatggaaaactctttgctgctgcccatgtttcaaatacttagagcagtgaagactagaaaattagactgtgattcagaaaatgttctgtttgctgtggaactacattactgtacagggttatctgcaagtgaggtgtgtcacaatgagattgaatttcactgtctttaattctgtatctgtagacggctcagtatagataccctacgctgtccagaaaggtttggggcagaaaggactcctcctttttccatgccctaaacagacctgacaggtgaggtctgttccttttatataagtggacaaattttgagttgccacaggaggggaagtagggaggggggaaatacagttctgctctggttgtttctgttccaaatgattccatccacctttcccaatcggccttacttcttcacttaatttgtagggaaaaagcaagttcgtctgttgtggcgaattgactggaatggggacagagttggannnnnnnnnnnnnnnccntgtggcttagttagggaaggcataggatgtggccgcatgtaccgtatattacagatatttgtcaagcgggatttnccactcgaatngtgtgaaanttcatccntcagattggctgacaaggcaggaggacaaaggaggg

SEQ ID NO: 434367 - DNA, 461 bp, Homo Sapiens
tttctttttttctaaaaagaacaactgaaaaaaaacctttcaacaacatgctaaatgattctcaccctttgatatgattatactatggtcggaatgggtgctaagggctcggaatagagctgcagattataaaattcattgaaaaagggatgttcattgtggctttttgtcttggttaagtgcctagggataggggaggggtaaataaaatgctgctcgataacggattttcttttacataccagtccgttcccaaaaggcccccatattgcaatgggttctatcaaaggttaaaataaaggacaaggaaaaataaacatgttttcaaataacaaaggagtttgacactttttcccccttaaataaatcggccttaagtttttccacataatggtaacaataggtaaaatggcaccttggcaaaatccaaaattactccactggaaaatgtaattaggaat

SEQ ID NO: 434368 - DNA, 917 bp, Homo Sapiens
  misc_feature (800)..(836): n is a, c, g, or t
  misc_feature (852)..(852): n is a, c, g, or t
ggtggccctgaggtttcttctcgttaggtgggattgactgctgtggtcactcctttctgtctcgtccttgttgacactgctcctgtgggagccagcattctgtgctgacttttgggaatgagcgtcttggctgtggttgccgctttgccctggtgcttctctgacaccgtcctggaggccgtcagcttcctggtctggcccccatttcctttggtcgtctttgtgtcctggctcttccatgattgtgcctctgtcctgccagaggccatccctgcatcttgccctctgggtgacagtgtgttcaccatggttttctctttttctgggctcttccatgctgccctctgtgctgtgtggggcaccttgtcctgctcctccggcggtgcctggttggcctcctttcctctgtctccggtggtgtgggccttgggctgggtttgtgtgttgagggcattgttctctggcactggctctgcatagatggttgtcctccttgcccttgtgggtgcctgggacttaggctttgccagggactgtagagacctttctttaatgttctctgtgcgttgatgcctggaaggctttgtttgaggctccttaataaaagagggcaaggcgaagagaaagaagaccaggacagccagaagcaaggaccactggacgccttggctcaggtgcctgcatctccacaggcaggacctcatggtggtgggtcgggttctagaggaaggttctgcatgtcctggggccttgatgtagccgctctcgacgaattcgagctcggccgatttggcctgatnnnnnnnnnnnnnnnnnnnnnnnnnnnnnnnnnnnnncgccgccatcccctgnccgattaaaaaacttcccgcgagggtggcgccccttatttaattgaggttttcagtatacagttt

SEQ ID NO: 434369 - DNA, 782 bp, Homo Sapiens
tttccttgggctgcgttgcgccttaatatggcggaaaaaactggggggtttggcgtggggccaaacaaaggacttatcaaagcccgggggagtttttcctccgtagggcaggggatgattcggggctttgtcccttggtaggacattgccggaatgggcatttgctggtcccttgtcagctgagtatgccagttaggatttcgtcagccagaacctgttttcccttcatgggggctcaagggcttcttgtccagtgcccgccggccatagtcctcccagcctggccggcgcccacagatccatggtctggcaagaggccttctttcgacaatgaagaggccccagcttgggctgaggtccctctatggctccggttggtgacaatgctaggcgtatggcggtggacagagccggatgacccccgacagtgctggaactctgaatggatttaagtttctgaataaaatgtcccctcaggggcgcaggagttagtcagctcaggcggctcaaaggtcttgacggtggagaacaccatccccagggattcccgacgcggtgatgccatcaaagcgttaattctgagatgggcctgcccgggtgcggactctgccgcagcaagagaagggttaactgccccgggccttcgccgtgggggcggggcctcggggagggtcacagcccgggactgagacccgaggttaaccgcccggggtgggctccacgggggcggggcatgctctccgcggctgctgccggtatagagcggtaactgcccaggaccc

SEQ ID NO: 434370 - DNA, 1245 bp, Homo Sapiens
gcagccacactgggtcagccctggggatggtgcatgcgcaggggggcagggccagggcagcaggcagaggtttccagaagcagggaggggagctgaagagcctgccacggatgggcatgctctgcgcatgcccacgatgttctgttcccgagcccgtgtagcaccgggcctgcagctggggcaggccgacgagcccagttagatggctggcagctccttgcagaaaacagaaggggtcagatggacaggaaggcgggctctgcgggcggctgaagggtggggcctggtggcggctgcccagccgacatcacatggtccggctgtactcgatgccactcttggaagagatgcccgaccatggcaggaaggtgcagagcaggctgtgggcctggcggtagactctgtgcggaatggagcaggggctcaggctggctagtgcagagcccaggtgctggatgtagtgcaaaatcgtccagggaggtgcccgccgttgatgtagaggacataggtgaagccatctttgaggacccctcgaatggagtagtaataggggagatagtggtgctgcttgaagtctctgttttcatagaagtttattgctgtgttgttggtggtgaggacatgcaggtaaatggctttgcagtggtcctgggcggtggttgatatgtgatcctttaaactttcaagtaagagggaacctatgccgtgcttcctgaactctttcacgacgcccagacttaggatgtacgcgacttgtgtgtcaacagagaagttggatgctagaatatctccatcctctttatgtattttggtcctgttcttaatttcagctactatcattcccacaatggcacctctgtaggttgcagcaagggaaaagaacttcttgttggatgtgatatcacgataccatgagtctgggtactcgatggggaaccagtcgccacacaggtgcttcacagtgtctatgtcatcgtggcagaggaggcgcaggctgacctcgctgagcgcgctggatggcaccacctctgtcattcacactctctggagctcttctccaaactcaggctggctccgcacttccttcctccaggtacagcctttctgtatgcgattttctttcgagttccggtgtctcccagtcttctttctgtccttcttctcggaaacattacgtccccctggggtcaccctaagactctacttcagcaggcaaacaggcccggagctcacggaggaatcccg

SEQ ID NO: 434371 - DNA, 1432 bp, Homo Sapiens
  misc_feature (33)..(33): n is a, c, g, or t
agggctggccccacccctcaattcagccccctncatggagggagtggggggccactccttcaccccccccaggtttctttgggctggttctggaaggggacgggccattccctttattgcgcccccttgttccgaggctcctgtgcctttacggtcaagtgtgtccataatacttgcgttcctcccttgcaggagaaagtcccctccagctttccaggaaggagctgcaagaacaggcagcggagtgggagaggcccagtgagggcaggcccctcccgtgaatgcagccacactgggtcagccctggggacggtgcatgcgcaggggggcagggccagggcagcaggcagaggtttccagaagcagggaggggagctgaagagcctttgtgtctgctgtggcgtacctgccacggatgggcatgctctgcgcatgcccacgatgttctgttcccgagcccgtgtagcaccgggcctgccagctggggcaggccgacgagcccagttagatggctggcagctccttgcagaaaacagaaggggtcagatggacaggaaggcgggctctgcgggcggccgaagggtggggcctggtggcggctgcccagccgacatcacatggtccggctgtactcgatgccactcttggaagagatgcccgaccatggcaggaagctgcagagcaggctgtgggcctggcggtagactctgtgcggaatggagcaggggctcaggctggctagtgcagagcccaggtgctggatgtagtccaaaatcgtccagggagggtgcccgccgttgatgtagaggacataggtgaagccatctttgaggacccctcgaatggagtagtaataggggagatagtggtgctgcttgaagtctctgttttcatagaagtttattgctgtgttgttggtggtgaggacatgcaggtaaatggctttgcagtggtcctgggcggtggttgatatgtgatcctttaaactttcaagtaagagggaacctatgccgtgcttcctgaactctttcacgacgcccagacttaggatgtacgcgacttgtgtgtcaacagagaagttggatgctagaatatctccatcctctttatgtattttggtcctgttcttaatttcagctactatcattcccacaatggcacctctgtaggttgcagcaagggaaaagaacttcttgttggatgtgatatcacgataccatgagtctgggtactcgatggggaaccagtcgccacacaggtgcttcacagtgtctatgtcatcgtggcagaggaggcgcaggctgacctcgctgagcgcgctggatggcaccacctctgtcattcacacctcgtgggggagccggcggccgctgggggtgttgtagggctcagcgccctcgtgccgaattcgccacccaggcctcgctaccta

SEQ ID NO: 434372 - DNA, 1120 bp, Homo Sapiens
  misc_feature (122)..(122): n is a, c, g, or t
  misc_feature (998)..(998): n is a, c, g, or t
  misc_feature (1002)..(1002): n is a, c, g, or t
  misc_feature (1004)..(1004): n is a, c, g, or t
  misc_feature (1024)..(1024): n is a, c, g, or t
  misc_feature (1030)..(1030): n is a, c, g, or t
  misc_feature (1056)..(1056): n is a, c, g, or t
  misc_feature (1060)..(1060): n is a, c, g, or t
  misc_feature (1090)..(1090): n is a, c, g, or t
  misc_feature (1105)..(1106): n is a, c, g, or t
ttgaaaatcagcacaatatttcatttatttattgtataagtttggcaaacagcacaaaaatccagcaacatttaaaacatataaaaaagtcaaatgctaaacaggactagggattttttttnacatcattagaaataacgagtacacattttaagattctgcaaagctagcaaaatgaagatgcttgccttctgaacatatactacaaacacacatacaaaaaaacaatataatttatctttacaaaaattacagccaagcaatagaaaagaaggatgttaatgatgaagatagcaacacatatgtttagtacatatatcttacacattgaaatgctacatcttataccctgaaatgccatgtgtagagagccaagcagagtaaatttaggctcattactgaggttaagaattatttgagaagaatttaattcttatatgtaacatattcagttaaaactttctatataggagttgctagaggatgacaatgtatcccattatagatctgagaagttgagtcttctttgttggcagtataaaatttctgaccagtatcaaaattctggtaaaacacaaattgaaggcattttctagtgtatgcaaacattacaaggggcatcaatgaatgtagaagaaaatcgtagatttttcacatcaagtttctgctgagctttgtcaaaccaaatagctcaactataaggcaagagaaaacaactccctataacagattagtggatcttaccaagtaaatataggaattcaatcttagggaaaaattccctacattaatagatctgaaacagctggtcttgaaacaaacatctagaaattaacgaacatcttgacattcagtcattggttcagaagcgtgacaaacaatctgttggtatatattattaaattaactttttgggatcagcaccagtccccaaaacctcaaaattataatatttaatcttcattaaaatatattttttgtgctacattaacacgacnacantnagttaaagaagctggatttntttacntattgtatatgtttatgttactaggngggncttaatttctttattactgtgctctgtttnggggctttgatgagnnaatcaattcccagg

SEQ ID NO: 434373 - DNA, 335 bp, Homo Sapiens
atacagtaaaacaataacttctggctatatttgtagaacatctttatgtacgccattttatacatatattttgcttttttacaaacctcatatgtgaaacagcatttacaaaatagatgcattgggggaatagtaaagtgtttgagattatttttctgttacttcattatctctcaccctttcctaatgcagacttctttttaagataatgaagatgaattatagtagctgaggaaggaggacaaagaaagcactgaagaagtgataaaggggaatgaaatgagatgttatcagaaattgctttttctttggctacagttgggaggtcccatgtt

SEQ ID NO: 434374 - DNA, 389 bp, Homo Sapiens
ccaggccgttttttgtgggcaattttaccattgggtaaggatttagttttcagtttcgaaatattttaaaaaacatttgaaattaaaaattgccatccctctttgcataccagtaaaacaataatttctgggctatatttgtagaacatctttatgtacgccattttatacatatatttttgcttttttacaaacctcatatgtgaaacagcatttacaaaatagatgcattgggggaatagtaacttatgaattaaaatattttggctttaccaaataattcaccacgtttttaaaaatatctagcttttctagtgtattttgcatgtgtagttcatttaaaaccctcctttgttttatgggtaattatatgttgctagtgaaataac

SEQ ID NO: 434375 - DNA, 756 bp, Homo Sapiens
attctctgcaggattgaccactgggtccacgtgtgactgagagatgtgagaagctcagcagatgggcagggatggactcactcatcatactaatgtgattccaccaaggaaaggcatgttttcttcttcccaatatgctgtgtgttcaaggtctgagatgctccaaggattcaccaaggttccccacaacaaggggctcccgttcactctgggggcaccctgccaccagcagcttcccattagcgcacgaaggataccacgctggtggctaccgcaaacggggcggagtaggctgcagcgaagccttgcaggccgatgaccacgtagcggcatcctttgatgatgaccttcccgacattcttgccgtacttcttcagcttcctccggtacctcttcctgggctgctcgctcggcgccggctcctccagtggctcgtagcgctcgggcaggagggcgaagtgcaccctccgcgcgccccgggtccccgggccccgctcgtccgccgcgctcgtcccgctctcggccgccgcctccgcctcgtccgcgtactccaggtgctccaggatggcggccgcctcctcgtccccctcggttcgccctcgccctcggggcccgcggcgcaggaggctgctctccgccttgcttcggagcctggctcccaccgtcatgatgtcccggcccctctggcgaaggtccgagcgcaaagacaccaacctttggtccccgcccgctcctccgccccagcccggacccgct

SEQ ID NO: 434376 - DNA, 1019 bp, Homo Sapiens
  misc_feature (29)..(29): n is a, c, g, or t
  misc_feature (42)..(42): n is a, c, g, or t
  misc_feature (77)..(77): n is a, c, g, or t
caggaacaccaactgggggcccatctggnaaacataaagaanggcccaatgtgtttaaaggccctaaaaccctgganttgaaggcaaaagatgcacttgcccctggtcccaagaccccactctggggcaagaatgggaaagggcctgctgaatcactgcaggccctcccgccttgatggttctctgctgctgggattctagaggtacacaggaagacagctctccaatggcttcagggttttgggtataaaatgaggattcaatgaggactccccagtcgcccccataccacgactgcttagctctgcaatgttccttcttttatctgttggataaagaggtttctctcatcttctggagtcctcccattctgagcccggacaatacacgtgggccgatgaaggttgagcatgtatatcaaatgctgcttctcgttcttgagctcctcaatgctgagccttcagttcagcattcacactttccagcttctccgactctttctgcaggcactccgtcttctccttcttcttgtttcggcactttgcagctgcaatcttatttctttctcgtcgcctctttttcctttcatcttcttcaggggctacctcggcttttgtgatggacaccccgaggggtctgtcgctgacagtgactgattccagcgcagaggacatccggtggcagaggtgcttgttctggatggcaaacctcagctcttccttgacaaagggcgtcaggttagcaaaatcctcaaacaccagtgacccaggaggggacaggcaggggacgatggcagaagcactcacttccgaggcagagacctggcctgggtgttgaagcatcattttgctccaggctccgctcggggcggccagggtcgggacggggtcgggcgggctgtttgtctggccggcgggcgagcaccgaggactcacggccggcgcgcgggctgaagggtgcgctcgggcggcggcgagagaagagagctgtgcagtgcgcgcctggctgcgtgcgactgt

SEQ ID NO: 434377 - DNA, 1225 bp, Homo Sapiens
gtttaccatgtcttggttccaatatttattattctgacaggttaggaatactaggataaataagtaatattttctcttacagaaaattgtaatgataccattgagtacaattaaacactctgagaatttcacagaaacatcagaattttaatagacagtagccagcgtccttgtggccagtgtgagtgacttctcacagctgcaaacaccctgggccagatttcttaaaacagctacatgacaaaaacaatgctattgacatccaataatgctaaagcctgggtaccacccaggctccactgactgtggtttccaaacatctctccactgactgtggttttcaaccacaaggaaaggaaaatggaatattctttggctcttccagcctagacacaactcctgacctaagacattgagtggagagtcctaaccctttggaagttgaactttctgctttcttcctgtgactttggaactgagtttgcaacagaggacctgccatcatgctgcccatggattttgtgttaacgctgggagaattctgtcctcctcttgctgacaagctcttctggccacctgaatatcttgagatactgcacgtggtgacagccccgccccccaaaactcttagaaaccagatctgagaaaaagcatataaaagtcacatcagtgttgtgtgacacaaacatcggaagagtacattgcctagttttcttgcacacacaatttctggacataacagcatatttgctagaaagcacaaccctggccgttgcacaacttcactaaatgctgttctcactccacatcccctacgagtgacaatggtagccacggtgaaggagatggccccatccctcccacccgaggtacagacactgctgcctgaatcctaacggtgggcatcctggttttttgtagaatccagatgaaaggcgggcaggacaccagctgggggccatctggaacataagaatggccagtgtgttaaggcctaaatcctggagttgaggcaaagatgcacttgccctggtccaagacccactctggggcagaatgggaagggcctgctgaatcactgcaggccctcccgccttgatggttctctgctgctgggattctagaggtacacaggaagacagctctccaatggcttcagggttttgggtataaaatgaggattcaatgagactccccagtcgcccccataccacgactgcttagc

SEQ ID NO: 434378 - DNA, 2127 bp, Homo Sapiens
  misc_feature (651)..(655): n is a, c, g, or t
accagcctaccacacttcacatctgggtacactggccattagcaacaatgcagtctcatgcagcagcacattaaaatcaaacgggtggcaatcgttcaccaccctcagagtgttgggagactttcacatttcatcatccttataatccacaaacagaaacatgaagggatgcaagtgagttcagcattcactcttttggtgcactcaagttctgagagtattgcagaatttacagtgtcacatgaggattatatccatctgtcataatttgtaaaaatggttaagttgtggtatttaaaatttggttccctcctcttcatacaagtggaagaaaaggaggggctagggtacccactgggccatgaggttaacccctttagcacaggcaatgaagaacatccaatgccacagattctgcaggaggagaaatcccaagggtatacagtattcctgagaaagatcccagatttttctgaatcagtcttaatctgattttgttttggctacacagttatgctgttatacctttgacatacataaaaatggtcattttatttcaatccagacagctcagcattgtacaaatgatggcagaaagatccatttgttcagactcagcttgctttgtttttaatactggggaataaaccnnnnnaaaaagtgtaatttttatcatttgtatccttcattctactttactggagtggaatccccagggccttcagataatctgggaagacctgactattcctgtgaggcaagcacagccctgctgagctttactcagaataatgcatgatagactcaacgtaattcccaggaaaaagcccagtcactccattcataactccctcataccaaccatcgtcattcttcttgatgacataaataatggctccttcctgaaaggacagctcatcttccttgtcttttgtatagtcataaattgccacaaccttttccaagtaagaacgtggagcccacggtgggtcctcttcagcataaggatcactatactcaaccacagcagcttcctcctcttcgtaatcttctggaggaggaggaggtgggggagactcatcaaagactggttcttccacaggtggcggtggaggtggtgtatctgaaactggattctggctataaaaaggtcctccattcatctgattctgaaggcttgtttgtgaagtaatggaaggagggcgtctatagggcaacgagccccctattgttgggggagtatggcgagaggcaggcctattcatgctgtagaactgtacaggatgacctggaaagacactgggaggagatggagtaggaacagcaataggaacccccacactaccacttccactgttctctcgactgctgctccgactacttgggtggctccctccactactcccactgctgctgtaagttcgatttctttgattcacagaagctgtcctcacagggctctgctgcgagggagccatattacgggttgggctaggtacgtaatcatttggtaccactggaggacgcactggctccagtgtgcgatagggggagtgccgcccaagtgtccctttccctgacatagggggactagggggcttctgagttggaggtgttgtacgcggcagcccacccatcttcatgttctgggtactcacctttactccatgtccaatatcatctagaattgtatagtcaataggttttctaatataacgaactggtcgttcaaggttggctggagcaataatcttatgtgtccttgaagtgtttttattggtagtcaaaataccaatttctcttcttgcaactttctctttatgaatatcaactgtttgtgaaatatgattgattgaagattccatccttcgtagctgggatgcctggatatccagcatctgcaggacattgttggccaaggtgtttatcagataggcaacacttgctaaggattgggtggtgtaggctttggtttcttctagggctctctgcttatctgctgactgtatgtagttgttctcgcagtaatcggccacccgttccagatttgtgtagctgtcgaagagggcccggcggccccccgggatttcctcttccagcagcatctgcagctccgccatcttcaca

SEQ ID NO: 434379 - DNA, 338 bp, Homo Sapiens
cccgtcccctagcgcacttctggacgagagcgatgtgtgggggactcatcaaagactggttcttccacaggtggcggtggaggtggtgtatctgaaatattttcttggactctggccacaaatcccatttcaggtaactgaggagttacctgtaggatggagggaggaggaggagcaagagatactggattctggtctataaaaaggtcctccattcatcttattctgaaggcttgtttgtgatgtaatggaaggtgggcgtttatcgggctacgagcccccttttgttgggggagtatggcgagggctggcctattcatgagaagtgcgcctgggtg

SEQ ID NO: 434380 - DNA, 929 bp, Homo Sapiens
  misc_feature (55)..(55): n is a, c, g, or t
  misc_feature (280)..(280): n is a, c, g, or t
  misc_feature (317)..(317): n is a, c, g, or t
cttctgggtcttgcccacctcatcctccgtggatggtggtgatgcagcctgaggnccggaagccgttggccccctccaggagcaggaactccaccttgctctgcagctctgagtccagctgctcaaaggggtcatagtagaggtcagtgaagctggctgaagtggaggagtccaggctggatgcaaccagggagccccggctggacgtgagggaaccggggctgctgcctgaggacagggactgcatgctgcttgagagacttttcagctgggagtgcanagttgccacctgccgggtggcttcctccagttctctnacaagctggttcctcttactgtttaactttaacctctccgtcagcgccttgctctgggtgtcccgggctgcctgcaggtccttttccagccgcttccgggccatctccagctgctccacctcccctgggtccacttgcgggggctgatgaagcgcatctccttcagcagctcctccttctcgttgataaggatcagccggtccctctctgagtccagcaccccaggccaggcctcactgtcaagcttggccagctggatcttcaggttggcgatccttctcttagcctcttcatatcgaaggcgcaatctgaccttctctgccaactgattgttgctgttgatgccgaagcttcccgagatgtctgtctgggagcttacatccaggtactgtttcggtagcgggaaactcgaactctccagagagctgctgctggaccacaggtctgagtgagaccccctgtcagtgcggaagccgtccttcaacatggcaaggctcttaatgagatcttgcttttccttttccccacaggtaatagcctttttgatggcttttgtttctctcaagacagcctgagcttcatccagtttgtagctgccctgagcatcagaca

SEQ ID NO: 434381 - DNA, 1267 bp, Homo Sapiens
gttccggtgggagaatgttcttcttttacaaaaaatccgtggccatgatggcaaagattaagaagagaggccatttttgtttccttcaaataaaaggtgctttagggggttcttttcaatatattattgagcaggcttcatcattataataatttgggccattattcatatctccctttttcggggggcagtttaacttgattgctcaaggtaatggggcagtttcataccaaatatcagggtgatggcccagcacaagcagggctctgttcataagcaaacataactctttttgttataagggtctgatcctctgtacgaagagggttgctcttttcccactgtatatatttcttccacatatctacttgttgagcttcttgaggagtattctgaggaggcaccgagggagcattacggtccaagcctttcattactgtctcatattcctttgctacacgtctagcattcatataatctctactccgatcttcaatcatttttttagctaaatgaatattgataccctcttcatacttgttatagtctctccagagctgttcaatgttgatcatcggattaacacaacctcgttgataaactcttcggacagctgttattctttgattttctgcataagatcctacagcttccacgccttttaggaaattgatgtaatccacccaaatctgataggacataatttccattccaattttatccagtgcaaagtcatatgcttgagccattttttctttgtaacttggtagtttacccttggtttctcggacatatgaaagataacacttccataaatcaatgtgcaaaaccttcataaggcatctctgaaatagcttttcaaccttgtcataatttttagctttaatctctgcttcaatgtacagtttccagaatctgccagaactggggaactgggcaacaaggcgttcataagtcttccgtgctttgtctataggttgattctgtgcctctcgaatgagaatgctccaagcatcaaggtcatatggattctcttctaatttcttttccgctttcttcaccttctctgggacatactcagctgcctgctccgtggctccgtctcctgacatggcctcagctgattacaacgtgcgcactgaccgtcgatgggaagctagaaaagaaaaattaaactaaaaaccacccccaaatcagtaaagttaccccctgcccagctgagccagaccgccaacaccaatcgccaccgcccactcaaatatgaatt

SEQ ID NO: 434382 - DNA, 533 bp, Homo Sapiens
  misc_feature (472)..(472): n is a, c, g, or t
  misc_feature (497)..(497): n is a, c, g, or t
aggttgtggagcaagaatttgagacgagaaagactgattctagaacctttgtgacattttgtaagttggcctatttccattcagctacaaagtgggaacaattaaaagcattgtttgatttgtattgaatcataaagcttataaaatatgcttatcttatttaattttttgaataggtaatacattcacatggttaaaagaaacaaacaatataaaaagttattcagtgaatgtgttcctgtgtccttggcccagcttcctccactgcacactcatctcccaccatgaatagcctgtgctcttggtttcttaggtttccattcacactgttgtagacaggtacaaacatatacaaatggaaagtcttattttttctctcatttttactcaaaaattgacatcatatacatacgacttcatttttttcacctaggtatttcttgggcagtcttcacatatgactaggataggntttcctccattttttgaaggtaggntacttgggggattcctggttatggtggaatgtgccc

SEQ ID NO: 434383 - DNA, 867 bp, Homo Sapiens
  misc_feature (16)..(16): n is a, c, g, or t
ccagggtcttgcccancatcacccagcagggatggctcagctggacccacaggcaaagacagtacctgccctccccacagccactcccctgggcagcggctgccatccagatacacagagatagggaggaaggaagatgatggacagacaggcagatacataggtaagagggtttgggaataacacatagatattttaacttttcgagagaggaaaaggaaaaaatggcttgtgatagacattttttggacccaccaaagccttgcatatctgaaaagaaaattactttggctttctggaaacattaaactgcattcaatcaaaaaaacagactaaattataacacatcacaaccagtaagcttcatagcagccgcagtaggagtgatggcatttcgtgttggtgtgcgcgtacacgtggaaaggaagtttgcagggcaacaaggtcagcaagaaccagacctcagattgtttcactcaccacagaagaaaaacacccatggcaattcccttttggaaagttaaagcttatctcctcggaatgaagttccaaagacatccatttccacagaagatggaggaaaaaagacaattacatttcaaatctgtaagtcacaaatagacaggcagagttctggcgagccgtgtcacagttaaccagtttgaggacatcagtgtcttcccccagagtctgtaaacacgcagccagtcaatttcctaatgaatgcttccctttaacaaaggctgctccatgcctgttggccattccctttggtgctgacagcactcacattgtgaaatccacttgccctgtgaaaaacacctggaaatgtaccaggagaggggtagttctctttttggaacccat

SEQ ID NO: 434384 - DNA, 1250 bp, Homo Sapiens
  misc_feature (889)..(1201): n is a, c, g, or t
acctgtgtcctggttaagggtctccagggttctttggggcccgaggtgccaatgggtcatgtttggttagaaggtgacaatctacagaattctacagattccaggtgctatggacctattccatatggactaataagaggacgaatcttctttaagatttggcctctgagtgattttggatttttacgtgccagccctaatggccacagattttctgatgattagtaagcatttattcttttgacttgattattgtctccttttcatgtgaatttattactcccgttgaaaccgtgtacttaccaataaactatttgctattcagttttagttgttttttaattgttaaatgtaaagaattattcaacacacattctgccaagttctggttagttcaaaatatatggataaaaatgtaacccaaaaaaagtcatctaaattttatgatacaaaaatattgtgggagggggaaacctggatgactacctcacttttgaattcttgttcttataggtataatgaaactaatctattcttcttaaatatacctcatactttagcagctacatttacaagtcagagtagtaactattcgtatttataagttcaacctgacaatgccaggtttgataaaaagctgctagtctacatgctcagcccactcatttgaaattaagtaaaaatgtttctaaaggatcccttaaagttctttaaatgagttctgacttttactgtacacaaaatattagatacatagaaaaatgcatctttaacggcatatgccatctgtagttggctatagtccataatactttataaaagttcatttcagcatagcagcagtgcacatggccctgtcttcataaatacaggcattaatactatatcnnnnnnnnnnnnnnnnnnnnnnnnnnnnnnnnnnnnnnnnnnnnnnnnnnnnnnnnnnnnnnnnnnnnnnnnnnnnnnnnnnnnnnnnnnnnnnnnnnnnnnnnnnnnnnnnnnnnnnnnnnnnnnnnnnnnnnnnnnnnnnnnnnnnnnnnnnnnnnnnnnnnnnnnnnnnnnnnnnnnnnnnnnnnnnnnnnnnnnnnnnnnnnnnnnnnnnnnnnnnnnnnnnnnnnnnnnnnnnnnnnnnnnnnnnnnnnnnnnnnnnnnnnnnnnnnnnnnnnnnnnnnnnnnnnnnnnnnnnnnnnnnnnnnnnnnncccggccgtaatggccgaattcccgggcatatgtccggtaccgtcgact

SEQ ID NO: 434385 - DNA, 515 bp, Homo Sapiens
  misc_feature (98)..(157): n is a, c, g, or t
ctttggcggtgtttctttcttaacagactcttccttcttgggtacttttggttttaaagcagctggtttttttgcttcagacagaggagtagatgatnnnnnnnnnnnnnnnnnnnnnnnnnnnnnnnnnnnnnnnnnnnnnnnnnnnnnnnnnnnnacttccttctggatgacgtaggcttcgactggctcagtttccttcagtttctcttcgtcttcgatttagctccagcttgaggctttgatgtccctttgttacatcgacctcttcagcctttaactcttcaaagtccttggttagatcctcaggagatgacataagggacctctcagcttcgagttctttggcagggccaatggctgctattccagctgccgccatgacagctgctgtggtggctccagtgccgacagctgcagcgacagcctctgcggccttgccttccttcttaatgacttttattttccccttctcctttggctttccggcagcaacagaatctttcttgacagac

SEQ ID NO: 434386 - DNA, 2078 bp, Homo Sapiens
tcctcctttttagccacttctttctttggcttttctttcgcctctttcttgtcttcatgctttacctttgtttcctttttcaccgtcttctccttggcagctttgggtttgacatctgtggcttgcttctcagccacctcggctttcactggagatggctcttctttgctgggaacctccttttcagtcactgaaggtttggtctctgtttttactggcttgtcttttttcaccattaccttttctttgctttcaactttgggtggcttttccacgtgattcacttttgtgacctcaggggtttcttcttttgactccttgcgcacggatttgctaggaagtggttttgcggctggcttcagactttctcggctatcagccctctgtttcagttttgtttgtttcaccacaggagtgggcacctggccagtgagatccttttgggtggccagtggctgcttcagaaagtctagatgtttgagcttttccaacccttccaggatgttgtactgggtgctgttcccaggaaacaggactcggatgattttctccgcagggtttgctggatgccacacaatcaaagatgagactgaagttaagtaggaaatcgggagatctacttcttgaccattaggcagaatgaattcagccttgtctttgttggtaccagtccactgctgcataaaatactgcatttccttgctgctcttgactggattaagcacatacatctcaagtttacctactcccattttttggaaaagaatgacaggatcaatagtattgcctacacttctaaacagaggttctggtttcatggacaatttgtttaggtactggagagtgaagcaggcttcttctatgcttctcttcatcttgatgtttggctctggatttttgagattttcaggtacattgagaaatacaactcctaagtcaggggagatgaggtttttcatccagtcactatttgtggtggagccctgggactgttcttcctcgagctctgcaattttccgctgtaacatgctgtttattccaggcaaattgtcatccccaatgtgggtgagcaggatggagtccactcggtctaagtgtcggatgagcttccagaagcaggattttctctctgatccgccattgatgagcatattgaaaccattcactgcaaacaaggcagaatcgcccctccctcctggaaaaatataacagcagggcttggagagcttcagaaatccacccgatgtgggaggttccaagatgtcaaagggagatgggacttccactgattctgagagatactcggtaaactcagaaagtccttccatttctggcaagatagaagctgaattgagtttaatattgatgaagtcttggagattgtgtctgtcaagattggagttcttccagtccccttcttcaggacagaacagggttaagctggctttgttggcaggatgggtggtgcttagtaactccccgatctcttgatcggtgaaaatctctatgaagttctggaaggagaaagagccggactggagaatgagctctccggtattttcaaagcactgcccggtcagcacgagcagcttgtgtcgggcagcatcagtgatcattaagcgcacctcggtgctgactgcttcatcagaagggttgatcaggaccactgtttctaaaacgtcacttcggtgatgaaggatcttttgtcctgggacttcaggagagaatcttgcagagtgtcgagatacaaaaagtttgagttcttggtccaagttgcattcaatcaggtttgtgtcccatgatcggattccgagctcgatgttgccgatggcacgccgcaggtgctcctcggtcacgatctcgccgacgaccaccagcaagtagaacttgctgtcaaggaagcggtgcgacaggctaggcgaggtggacgccgccgggttggcgatgctgccggacggctccggctcggtggcttccaccaccacggtcgccatcctgccggctgctgtgcctcggcgaagtgtctcgctccggccgccgacgcgtgggtcgacgatatcccgaagatttccgggccg

SEQ ID NO: 434387 - DNA, 496 bp, Homo Sapiens
  misc_feature (166)..(360): n is a, c, g, or t
  misc_feature (376)..(436): n is a, c, g, or t
tgcttcattcttaatgactttaatttcccccttctcctttggctttccggcagcaacagaatctttcttgacagactcttccttcttgggtacttttggttttaaagcagctggtttttttgcttcagacagaggagtagatgatttctttgcgtctttagggagnnnnnnnnnnnnnnnnnnnnnnnnnnnnnnnnnnnnnnnnnnnnnnnnnnnnnnnnnnnnnnnnnnnnnnnnnnnnnnnnnnnnnnnnnnnnnnnnnnnnnnnnnnnnnnnnnnnnnnnnnnnnnnnnnnnnnnnnnnnnnnnnnnnnnnnnnnnnnnnnnnnnnnnnnnnnnnnnnnnnnnnnnnnnnnnnnnngataggtgttttgtcnnnnnnnnnnnnnnnnnnnnnnnnnnnnnnnnnnnnnnnnnnnnnnnnnnnnnnnnnnnnnacctttgtttcctttttcaccgtcttctccttggcagctttgggtttgacatctgtggct

SEQ ID NO: 434388 - DNA, 1942 bp, Homo Sapiens
tgtttgtcttggtaaagactagtagaagtcatttcagaaactggacttacttggtctggagagccttgttttccactcttttcttcaaaaggactttcggcacctctgccagaagccttgtcatcagcacttagaaaactttcataagcagactcggatccaatgaggggcgggctgcgtaaaggagacaaaactttttcaataggagactctgagtcaggcacgggctcatccatggggcttactgaagccctttcattctcatctttggcatcactgaattcaaaactcactggaactgctggtggtttttcaatgacttctgtagggagatgactggatttctcgtcagtaggagattgatagtaaggtgtgtgaccagcactgccagtcacggactgagatggtgacaccacttccagagtcttgtcctcaggactagcacaatgttcttcaactacttcttgggtcacctcaggagacaccggggctacttctgcctctgcagagactttaatctcattgggcgtcagagagaagttcacactacgttcacccaggggggtcttttctaagggtgatggtggagatggactcagggacgggctcttcgatgggctgaccttttcacttgaaacagctgagatgctatctttgatgtccaaagtggtgctggctttcacttcagagcagtaagcatcacgtaaagcagatctgctgaatttgtcttcctccatggaagagggtggtgatatggtagaggctgaagcattgtaatccttgccatcagtggcatctgtttttgatccttcagaaaatccattgagcggtgtaacatcagcaggtttagagtattcctgagaatacaatgaagattcatatttggtgatatttacgaattcctgagaaggggactccgtctcttcattgttggtctcatcactcatcacgtctcgaggggtagacatctcatccatgggggtgggctcactggatatctcaatagtagactgagtgtagccagaggtggcagtgaattcctcaggctggtcttctcgattctcctcatcagaagcggtggcctcgctctctgagcctccaggtaaagtctcatcatgaattgaagatgcaggttctcggccaggagactgggctcctagttgcttggttggtgtggtgaggaatccatactgctcctcggcaccaccagcctctgcagccttgtcgaccacagccatcacatagtcttcagcttccattttttccggctcatattcctcctctctggcatcttcagctttgtcctcctcatcagcctcctcttcagattgttcagcctctcctttctcaatggcctcatccatgtcttcttcggcctcggtcatccccactggccacagactccctcttctccctgatgtatgcatcagcctccgccttggcactttcctcatcctcagtggggctgtgcttggaggcgctcacacatacgtgttcctccccatcctcttctggctcctcagcctcctcagtttctgccttctcttcatagtctccagtctctgaagattcttcaaaaccggctccttcatcttcaaatttttcaatgtcgtctactccctgcttctcgacgggctccagctcctcaggtgtctgttcacattcgccctccccttcagtggtagtgattccctcatcaggggactcggcaggacctttggtgacttctctctccttctggatgacgtaggcttcgactggctcagtttccttcagtttctcttcgtcttcgattagctccagctgaggcttgatgtcctttgttacatcgacctcttcagcctttaactcttcaaagtccttggttagatcctcaggagatgacataagggacctctcagcttcgagttctttggcagggccaatggctgctattccagct

SEQ ID NO: 434389 - DNA, 452 bp, Homo Sapiens
  misc_feature (22)..(22): n is a, c, g, or t
  misc_feature (28)..(28): n is a, c, g, or t
cggcccagcaatcaaattgganccattnaaaagccacctcggtggctgaactggcttccatcaagaagggtttgaatcaaggacccactgtttcctaaaaacgttcacttcggtgatgaaaggatcttttgtccctgggacttcaggagagaatcttgcagagtgtcgagatacaaaaagtttgagttcttggtcccaagttgcattcaatcaggtttgtgtcccatgatcggattccgagctcgatggttccgatggcacgtcgcaggtgctcctcggtcacgatctcgccgacgaccaaccagcaagtagaacttgctgtcaaggaagcggtgcgacaggctaggcgaggtggacgcgccgggttggcgatgtcttggacggctccggcctcgggcttccaccaccacggctcgccatctgtcggctgctgtgcctcgcgaagtgtctcg

SEQ ID NO: 434390 - DNA, 501 bp, Homo Sapiens
ttttttttacaaacagaaccccactttattagcagttagttcgagattgtacattaatggaggaaggtctcacctttaacacaacccaaaacggctggttcgagagccctcatcaggcgaactggatagcaccccctctttttactctccccacccccttacaagggaaggaaacctctgcctgcttccccagtgtgccccccaccctctccagtcggccctctcctctcccaggaaatgacatgaatttcatgcacaaattacaaaaggagccctcttgctaataataaaagctaacacagtcatagaaaaccctctcctccctcattctcctccagggccggaaacagtaagagcaggagggatgaacttcttaggataaaacgcattcagtttcccccaggttcctggcattgtccccacaaaaccctatgccagtcccttagggaagctgaaaactcgccagcctgtctgagctggcaagggcagccagcccacagc

SEQ ID NO: 434391 - DNA, 1472 bp, Homo Sapiens
  misc_feature (833)..(875): n is a, c, g, or t
  misc_feature (1345)..(1372): n is a, c, g, or t
tacggtccggaattccgggatatcgtcgaccacgcgtcgccagcgatgtctgctatctaatctgtattcaaatccccccaatgtctcccaggtaacttatgtgtctggtttggaatcagcatccagtcacggtgcacacattgtattttctaactatgtttttaaaacctctttgaatgctgaaaggtcttccctcagctcactttgagtttttaaatgacattgtttttgaggccctaggcctgctgtctttttgaagccccacattctgaatttgtcagattgtttgctcatggtgtcgcataaccacttcttctatcccctgtactttcaaggataatttaggctacatgagattttgccttttgtgctgacttgacagcttcacttctgcctaagatgcgcctccactgtcacctgtaccaagtgccaaaacagcagaggggccagttagagcaagagctctgggggggccggaaagtctccctggagaaggccgtaatatctgggccttggaaggaaggacacagggctctggaaggaggaggctgcatgcctgaaggctgggccttcgaccctggggatgggccacagggcaccaaacacatcatatgtctctctctttctattttggggtcccagggttttcatttcctggagacccgtggtctgtgtgcactggagcagagccaggctctcagttgcagcagggaaaagcctacatggggaactgcctcccgcaagctgtggtgtgagaagagccctggctggcaggcaggagctgtgaagtttcatcccagccgggtgcatttagtagctgcctgaccatcttnnnnnnnnnnnnnnnnnnnnnnnnnnnnnnnnnnnnnnnnnnnggggccacagcagggattttcacacatcaaaggaggcagcctctgttctagttgatgtgaggatgagggggcggcctagaccccctgctgcccaggccgttgaggcaacactgggttcctggcttgacagctgtgggctggctgcccttgccagctcagacggctggcgagttttcagcttccctaagggactggcatagggttttgtggggtcaatgccaggaacctgggggaaactggatgcgttttatcctaagaagttcatccctcctgctcttactgtttccggccctggaggagaatgagggaggagagggttttctatgactgtgttagcttttattttagcaagagggctccttttgtaatttgtgcatgaaattcatgtcatttcctgggagaggagagggccgactggagagggtggggggcacactggggaagcaggcagaggtttccttcccttgtannnnnnnnnnnnnnnnnnnnnnnnnnnntgctatccagttcgcctgatgagggctctcgaaccagccgttttgggttgtgttaaaggtgagaccttcctccattaatgtacaatctcaaactaactgc

SEQ ID NO: 434392 - DNA, 923 bp, Homo Sapiens
  misc_feature (130)..(130): n is a, c, g, or t
  misc_feature (150)..(150): n is a, c, g, or t
gagattctttataccattttgttagtggtagggtggtatttcttaggaattttttgtttcattaaatttaaacaaaagtacagtagaaaatgttgccaggcccatcatcgcaccagggatagtttgtacnggtaaaatgctttgcatgangtcatacttctgggtacgcacttctgttgcaggtgacagcacactgccatttgcaacttcatcattttttctttcttgcggctgtacttaataggaatttaaattgtgtgaaaataaataataccaataaaggttatctataaagtttgaacattctttagcattctttgtttagcaaccacattcttcagcatctaccaaaaaaaactcgcatgatacactaaatttaaaatgctatgaaattatacattactctctaaaaataattgatgtccaatgattaagaaacattacaaatcacaccagaagtagcaatagtagcatactatgctatagtagactatatgttacgtataaaatagtgatgaattcttcacacaaatcaaatgggtaaataaaaactataattatttctttgcaaaatagcaacaggtataacttaactggttgcatctaatttacattaatatccttcatttaatttcacatcagaggaatattttaatgagcgactgcataaaataacagtcaaagataagtaatgtttaataaaacaaggagaggttaggagctgtcactcgtgctttcatgacgcttctaaatccaaagcatttgcagacaagcagaagaattttccttttccaggactctcaaatatcatacatctccattatgtaggctttaggcaccaagccaatggctcccttcatttctcctacccaccagccatatctattgtattccttgctaagaatgtaaatcacatcaccacc

SEQ ID NO: 434393 - DNA, 1890 bp, Homo Sapiens
  misc_feature (676)..(677): n is a, c, g, or t
gcgggggaaagcctccgccgccgcctcccccagccccgcaggtggcgccgccggtgcctggcggctcgccgcggcgggtcatcgtgcaggcgtccaccggcgagctgctgcgctgtctgggcgacttcgtgtgccgacgctgctatcgcctcaaggagctgagcccgggcgagctggtgggctggttccgcggtgtggaccgctcgctgctgctgcagggctggcaagaccaggccttcattacgcctgcaaacctggtgttcgtgtacctgctgtgccgcgagtcgctgcgtggggacgagctggcgtcggccgccgagctgcaggccgccttcctcacctgcctctacctcgcctactcctacatgggcaacgagatctcctacccactcaagcccttcctcgtggagcccgacaaggagcgcttctggcagcgctgcctgcgcctcatccagcggctcagcccgcagatgctgcggctcaacgccgacccccacttcttcacgcaggtctttcaagacctcaagaacgagggcgaggccgccgccagcggcgggggcccaccgagcgggggcgcgcccgccgcctcctcggccgccagggacagctgcgcggccggaaccaagcactggactatgaacctggaccgctagggatacccaggggccgcgcccannccccgccccagcccctgacacacactcggaccccccgggaccacaaagccaccgccgctgttaccgccgctcagcgccccggctgggcggaggaggagacgcccatgcccctcaggggaaagtggagaccgggacaccagaggccgcggtgtttggatttgctgggcgtggagtggggacggaagatgagcgcgggaaaggcactccaacctcactcttcccgtctgtctgcgcccccatttctccatttctgccggggtctcccccttcccttcagcccattccccctcggttttatccatttccttgcctcctttttgtgtcttcatttttcctcctgtctgcattcctctttatctccctactactatcctgttcctctactttcttacctccctctacctgcctttccattttccgttccttgggtttgtgtgtctgcatctccatcttaccccttgcctgactgtaccccgtagacccctgtttctcctcctgcacctgtgtccccatctgcccttcttgttgctcctgtcatgtgtcaccatcttccctcctgtctgccttcttcctccacttgtgtcagcttgcatttttttattcctgactgagtcaccacacccctctcccctgatcaaagggaatattagtttttaatttggatcgactgaggtgccaggagaaactgcagtcccaggtatccagacagccaccaggatggtccctcgccccacccccaccgcctctccccaccttttccaacgtgttgcatgctgggagctggggggtgtgggggaaggggctgccggcttctttcaggaggctgaggtttggaggcaaaatcaacctgggagaccaccccggccgcggcgcctcagtggacaggtgggaggaaaagaaaacttcttaccttggaggagggacatcccgcttccttatccttagcttttttgttgctcctccccactgccccttttaatttatttggttgtttgcggagggaggggggaggggggtaggctgggccgggaactgtccgaggtgctgagctggggcgggaccggaatcctcccggtagggtaccagggactgagttgggcctggggccgtgtccaaggtgccaatgatgcgggccgacagagcgggccgcactgtctgtctgtccgtctgtcccggaaagaactataaagcgctggaagcgcctgcagatggt

SEQ ID NO: 434394 - DNA, 1007 bp, Homo Sapiens
  misc_feature (42)..(42): n is a, c, g, or t
  misc_feature (52)..(52): n is a, c, g, or t
  misc_feature (76)..(76): n is a, c, g, or t
  misc_feature (102)..(102): n is a, c, g, or t
  misc_feature (140)..(140): n is a, c, g, or t
cccaaggaaaccccaacaaaaggtaacaggggttgggcaagnaacaacccgnaaatgcctctggtgtcctcctcangcaatttcaagcgctctccctaaaangttggaattgttgaacaatgttgtaatgggaagagggntggccccttggggctgccctgttgtccccgaaggtgaactggatgttgatggggtcatggcaggacaggaactgctggttgtattggagctggtccagatgctgccgtgtgctgccagccgccaccacttcatcccaggagcagggtccccggcaaaggggcatccaccgagatgactgtggtcagatctgggagcctctgactcgttcaaggcccctggctgggcattctccacttctggacagatctgcttcaggacgttgtagtattgctgggtcttgaattgcttggggaacacaagggccttgcagcccaccttcttgaggacgtactccagttccatagcctggtaggctgggttcacagacaccagaatgatgcccgcctgggcggtggccaactgcatgagcacccatgcataggagttaggtccccacatgcccagccggtcacctttgcagaggccaatgctcaggaggccagaagcagctttgtccacctcctccttgagttgggcaaaggtcaacctgacgtcttcatggaggacgaccaaggcctctcgttctgggaccctctgtgctgtggtctccaggcactggcccacagtcttgctgttaagatgctttttggtgcacccctgaacgtagctgaggcctccgatgggcgtggagaccatgcgatccacctctctggaactgaggaagcggacaccctgcaacctggcttcctgccaactccgagagagggcggcccgggcccccagcacccccgagctcccggcgcacagcctccccaggcgcagcatcccgacgtagacagccatggctcgctttgccctgcgtcccggcccgagtaaacttttaaagt

SEQ ID NO: 434395 - DNA, 861 bp, Homo Sapiens
acccctttgggttggggggccttccaggggaggaaaaaaagcccacttacccttgggtttttgaaaacccaaacaaagggccacctggtttttgatccctgggggctgaggggccctgagggggctcccctttcagtgatgttccccccatgcacaccaagctgtgccaagcaagcccctcctcaccagaatgatgcccgcctgggcggtggccaactgcatgagcacccatgcataggagttaggtccccacatgcccagccggtcacctttgcagaggccaatgctcaggaggccagaagcagctttgtccacctagtgtaaaagatggggcgcaaggggtgaaagggggcaagcaggaaggggcccaagactcccaccctcagcccttagcccggagttctcatcacagtcactggggacaaagggacaggcagattcccagcctcagtgggtctgccctggggcctgcatagttaacaggtgccccaggagctgctgatacaggaggcattggaccccttgtgcgtcagtcctgtctccttctcctgccatccctcggggttctctggcagccctagcacattgccccatagccaggtgcccacgctcctggttctgcccagctagggcagcttgggagctagtacttgcccactttgaggtttccaggtcaggacccacctcctccttgagttgggcaaaggtcaacctgacgtcttcatggaggacgaccaaggcctctcgttctgggaccctctgtgctgtggtctccaggcactggcccacagtcttgctgttaagatgctttttggtgcacccctgaacgtagctgaggcctccgatgggcgtggagaccat

SEQ ID NO: 434396 - DNA, 1149 bp, Homo Sapiens
  misc_feature (947)..(947): n is a, c, g, or t
  misc_feature (962)..(962): n is a, c, g, or t
  misc_feature (979)..(979): n is a, c, g, or t
  misc_feature (990)..(990): n is a, c, g, or t
  misc_feature (997)..(997): n is a, c, g, or t
  misc_feature (1000)..(1000): n is a, c, g, or t
  misc_feature (1003)..(1003): n is a, c, g, or t
  misc_feature (1006)..(1006): n is a, c, g, or t
  misc_feature (1012)..(1012): n is a, c, g, or t
  misc_feature (1016)..(1017): n is a, c, g, or t
  misc_feature (1021)..(1021): n is a, c, g, or t
  misc_feature (1024)..(1024): n is a, c, g, or t
  misc_feature (1031)..(1031): n is a, c, g, or t
  misc_feature (1034)..(1034): n is a, c, g, or t
  misc_feature (1037)..(1037): n is a, c, g, or t
  misc_feature (1042)..(1043): n is a, c, g, or t
  misc_feature (1047)..(1047): n is a, c, g, or t
  misc_feature (1053)..(1053): n is a, c, g, or t
  misc_feature (1055)..(1056): n is a, c, g, or t
  misc_feature (1062)..(1063): n is a, c, g, or t
  misc_feature (1074)..(1074): n is a, c, g, or t
  misc_feature (1080)..(1080): n is a, c, g, or t
  misc_feature (1086)..(1087): n is a, c, g, or t
  misc_feature (1097)..(1099): n is a, c, g, or t
  misc_feature (1105)..(1105): n is a, c, g, or t
  misc_feature (1107)..(1107): n is a, c, g, or t
  misc_feature (1113)..(1113): n is a, c, g, or t
  misc_feature (1116)..(1116): n is a, c, g, or t
  misc_feature (1122)..(1122): n is a, c, g, or t
  misc_feature (1127)..(1127): n is a, c, g, or t
  misc_feature (1133)..(1133): n is a, c, g, or t
  misc_feature (1136)..(1136): n is a, c, g, or t
  misc_feature (1141)..(1141): n is a, c, g, or t
gcctgcataaaatactgtttattttgtcctttaggaagactaaagtagtccagctcccctacagcccagtcttgcccccaccctgcactctgtcgccttagttcctggggaccaagcatctggcatttctcaagcagaccctctccttgttgctccttttcagtccctggagtctggcttcccaaagccaaagctggaggagagctcattgctgaggaagcagggttggagcctgaggagatgcagagggcctggacccctcgctggatcccagaggcccaggggcagagatgctgggacagggctctaggggaccactgggtgactcttgaggggctagaagcagggctgggtgacttttgctacggtgggctgcaacactgtctggcttctcaaagcgcttgccgcagaattcacaggggaagcgcaaggcagccaccgtctctgcatgcttgcgctggtgccagttcagggaagccttctggcggcaggtaaacccgcatatctcacactgcaggggtttttctccagtgtggatacgtctgtggatgacaaggttgctgctagtgcggaaagaccgggcgcagaactcacagatgtagtcccgggtgtcactgtgcagcttcatgtgctccttcaggtgtttcttaaagttgaaagacttcccacaggctggctctgggcaggagaaagacttctggtggatgtgctggtactttttgtggtgattcaaatactgccggttggagaagatccttccacagccagggaagtcacaaggcatcagctctcttttggcagctttcctaattctcttggggccaatttgtgcagtgtcctcatcccaggccggggttggagcagactgggcctgactcccagtgctacgggcagcaaagagggagcagagggcctcgagggagggccacatcccaggacgccccttnccctttctgtctcanccatcaaggtacctggncaagggctcantctgctnggncgnttnaggggncctnntaanttntggtgcnccnganttctnnaggnggaggngnntggaannaaatgaggatntgaaanggcggnnacaaaaggannngaaatntncggggntgntgtttnccccntttagnttnaggtnaagggaag

SEQ ID NO: 434397 - DNA, 2444 bp, Homo Sapiens
  misc_feature (4)..(4): n is a, c, g, or t
  misc_feature (41)..(41): n is a, c, g, or t
  misc_feature (46)..(46): n is a, c, g, or t
  misc_feature (111)..(111): n is a, c, g, or t
  misc_feature (173)..(173): n is a, c, g, or t
tgcnctctgtcgccttagttcctggggaccaagcatctggnatttntcaagcagaccctctccttgttgctccttttcagtccctggagtttggcttcccaaagccaaagntggaggagagctcattgctgaggaagcagggttggagcctgaggagatgcagagggcctggncccctcgctggatcccagaggcccaggggcagagatgctgggacagggctctaggggaccactgggtgactcttgaggggctagaagcagggctgggtgacttttgctacggtgggctgcaacactgtctggcttctcaaagcgcttgccgcagaattcacaggggaagcgcaaggcagccaccgtctctgcatgcttgcgctggtgccagttcagggaagccttctggcggcaggtaaacccgcatatctcacactgcaggggtttttctccagtgtggatacgtctgtggatgacaaggttgctgctagtgcggaaagaccgggcgcagaactcacagatgtagtcccgggtgtcactgtgcagcttcatgtgctccttcaggtgtttcttaaagttgaaagacttcccacaggctggctctgggcaggagaaagacttctggtggatgtgctggtactttttgtggtgattcaaatactgccggttggagaagatccttccacagccagggaagtcacaaggcatcagctctcttttggcagctttcctggccagggcctcagtctgctgggccgcttgaggggtcctgctgagctgtggctgcaccctgacttctgcaggtggaggagctctggaactcaatgaggatgctgacaaggccggcacagcaagaggactggagagtgctgcaggggctggtggtgtctccccctctttaggtgtgcaggtgacaggggaaggcagtagtctgggggcatcaggctcactatcatctggggaggagctgtaggtccataagctggcatcactgagcatctcctcttcatcctcatcattgtcctcttcttcctcaccctcttcctctcctggaggtgggaaggtctctggtgggggtcccaccctcctgggcaacctggcctcttgagtcctctcatcatgctcagattccaaatctgcaagctcctgcccactcgtggcctcggaacaccaacttctccgagtagtatgtggaagggaggctggcttgggtgcctctgaaggtgtagggctcaaagagggtccccaggagaaggtatggcctgctgagcactcccacacaagccccccatcttggccgccaggcccccgaagcccgggcaccaggctgcactctcggctgtgggcatgagacaagagcaccagatactgcagaccttttggaggcaaaggctcaggacctggaggggtgggggaagcagtcaggctgaactgggaagtctcctcctcttaccctggagagccatacccagggagccctgttccctcaaaccccagggcaacctcagccccagtccaatttatcattcttcagaacctagacacactagatcctgagacattgctcccttccccacccagaggttgcctccatcaaactaccctgtgctccccaactcaccccacccttcccaaacttactcagggctccctttgaaaggagggtgtttctgggtcaccctgtggtccctcttccctctggctctcaccccctgccatcccctacctacctgcacagaggacacagcctgaagaagtgtacctgccagcaggagaagaggcaggtcaggactcaggtggccagccaccctcagccctgggcactcacacatgtaaggggccagccctaagggccgctattcgctgagaccatgaggaggggagcaggaccctcggaggccacaagtcacacaggccgtcctggtaaagtgagaaacctgagggtggaaaagagcagcaggacaggccctggagaggaggctaggggctgctgcctgggtaccctcccccaagcccttctcccggcccctaaccggtccaacaggaacttggcgagctgcgagtgcagggagaagcccagccgctccttgaggaggcaccactgctccatgtggccgcccaggcggatgcggcacttgctgcggcgcgcgtccagctgccgccgcttctcccgccgcctgcaggacacgtccaccgccggggaggaagccatgtgcaccagaggctggagggtggaagggacgtcttcagcgccctgccgatctcgggggtcggggacccggctccacctgccgttagggcctcagtttcctcatcagtgaactggggcaagactaaactatttcaatagcagtggcaggtgtggagccaaaccccgtccttctatgatacagggtgttgaagctcagcgctaccatgtgagtgtcgtcgggtgggaggcaggcagacaga

SEQ ID NO: 434398 - DNA, 1237 bp, Homo Sapiens
ggctgggtaccgggtccgggaattccctgggatgcagatatgaatggggagcctagggtgggggtagggttgtttcaagtttgagatcttttcagtttaggggctagggtcgggcaggggatggctgactgcccagaaagttaatgccatcttcctctttgttctcctttcagtagtgagcctgatgcccccagactactgccttcccctgtcacctgcacacctaaagagggggagacaccaccagcccctgcagcactctccagtcctcttgctgtgccggccttgtcagcatcctcattgagttccagagctcctccacctgcagaagtcagggtgcagccacagctcagcaggacccctcaagcggcccagcagactgaggccctggccagcactgggagtcaggcccagtctgctccaaccccggcctgggatgaggacactgcacaaattggccccaagagaattaggaaagctgccaaaagagagctgatgccttgtgacttccctggctgtggaaggatcttctccaaccggcagtatttgaatcaccacaaaaagtaccagcacatccaccagaagtctttctcctgcccagagccagcctgtgggaagtctttcaactttaagaaacacctgaaggagcacatgaagctgcacagtgacacccgggactacatctgtgagttctgcgcccggtctttccgcactagcagcaaccttgtcatccacagacgtatccacactggagaaaaacccctgcagtgtgagatatgcgggtttacctgccgccagaaggcttccctgaactggcaccagcgcaagcatgcagagacggtggctgccttgcgcttcccctgtgaattctgcggcaagcgctttgagaagccagacagtgttgcagcccaccgtagcaaaagtcacccagccctgcttctagcccctcaagagtcacccagtggtcccctagagccctgtcccagcatctctgcccctgggcctctgggatccagcgaggggtccaggccctctgcatctcctcaggctccaaccctgcttcctcagcaatgagctctcctccagctttggcttttgggaagccagactccagggactgaaaaggagcaaccaggagagggtctgcttgagacatggcagatgcttggtccccaggaactaaggcgacagagtgcagggtgggggccagactgggctgtaggggagatggactact

SEQ ID NO: 434399 - DNA, 1198 bp, Homo Sapiens
  misc_feature (1134)..(1134): n is a, c, g, or t
tcccgggatctctggggcgcgggcctcagttccgggctacagcagccgacgccgagaggcaccgtttcttcttaaaagagaaacgctgcgcgcgcgaggtgggcccctgtcttccagcagctccgggcctgctcgctaggcccgggaggcgcaggcgcaggcgcagtgggggtgagggcgcgtgggggcgcacagcctctggtgcacatggcttcctccccggcggtggacgtgtcctgcaggcggcgggagaagcggcggcagctggacgcgcgccgcagcaagtgccgcatccgcctgggcggccacatggagcagtggtgcctcctcaaggagcggctgggcttctccctgcactcgcagctcgccaagttcctgttggaccggttaggggccgggagaagggcttgggggagggtacccaggcagcagcccctagcctcctctccagggcctgtcctgctgctcttttccaccctcaggtttctcactttaccaggacggcctgtgtgacttgtggcctccgagggtcctgctcccctcctcatggtctcagcgaatagcggcccttagggctggccccttacatgtgtgagtgcccagggctgagggtggctggccacctgagtcctgacctgcctcttctcctgctggcaggtacacttcttcaggctgtgtcctctgtgcaggtaggtaggggatggcagggggtgagagccagagggaagagggaccacaggggtgacccagaaacacccctcctttcaaagggagcccctgagtaagtttggggaaggggtgggggtgagtttggggaaccacagggtaattttgatggaaggcaacttctgtgttggggaaaagggacccacgtctttccggatcctactgtgtcttaggtttttgaaaaaaaggtaaatatccggccctgggctccgaaagcttcccccgccgggttcgccggctaacagggactccccatgaagcacgttttcccctcatcgtgaattagatgtgcgactcttccccgcctttaaccgcgcactgcgtttccgccaacccttctagggacacttgaaccttttctccgccccgaacagccgcttgtgttatattgtagtcgatcccgtcaantcttggccccaacgcccgcgcttaatctccccccggtgcggcaccacagtcattcccttcgcga

SEQ ID NO: 434400 - DNA, 525 bp, Homo Sapiens
gtataaaataccatttattatttctttgaaggctaaaacctggtatctggagcccaatggtgctctaccctccactgcactcacctaacttttctctctgttcctggggtctggcaccccaggtgaagaaatggatgttgaggaggcagggattagagtcagaagtggtagagatgctagccccctcaggagactgcagggattcaggggcagaaatgctgggactagacaccaaagagccaggtggctcttgtgctgggagcagggctgggtggcttttgctacagtgagctaccacactgtctggcttctcaaagcgtttgccacagaattcacaggggaatccgcagggcagctgctgtctctgcatgcttgcgtcggtgccagttttagggaggccttctgccggcaagtaaatccacatatctcacactgcaggggtttctctcctgtgtggattcgtctgtggatgacaaggttgctgctagtgcggaaagatcgagcacagaattcacagatgtagtc

SEQ ID NO: 434401 - DNA, 685 bp, Homo Sapiens
  misc_feature (639)..(639): n is a, c, g, or t
gattcatactcatatactggtattgttagccagggcacggaacacagtaacctatgtttgccacgttggactttcgaagaagtgtaaaacttcttaaaggcagagacctcagtgacatctgtttcacacttcatgtcatcactgcttgtagaagttggcagacagagcagtcaattatgaaatattaatgctaattgcaattaaacaaatatacgttatgaacatctaatttggaaaactactttgtactaacagtataaaaccctaactcatgatgttgattccttaattaccttagaattactaccaacttaaacaattactatattgccttttgtctaaatgattcattataatcaaaagaggaggtaagaattagaaaggaaataatatttattaagtgtcatatgatgtgatatgctaacaattctatcatgacaaagatacctggtgtgatttctatttgacatgtaggaaagccaaagctcagaaaagaatttgccttgcaatttagttattaagaaactagacaaggatttgaaaatgtgtatgatgtcaaagcctatgtttacaagtttatattagtttaccaagcaaacactatcccagacacctttacaagtgaagtaaagaggtacncattggaataaaaaacgttcttattcatcatctggagaagcacttt

SEQ ID NO: 434402 - DNA, 2130 bp, Homo Sapiens
cctggtacagatacaaatgtttattctacataaaaatttcacaaaatgggcagctggttgtaccaagacctttggtgaaggggttggggggaatcgctgttcaagaaggcaacacggacagtggtcacagtcactgggcaggagtaaagccgagggagggtggggcacacggacacggccccatcccctgctgcatgcactcgcatgcatctccctgcctgtccacaagggagagggtcctggggcgggggcacatttcccatgagaagccccaaggtggtgaggaggaggaggtagccctccccggctggctgccgaatactgcatctgggacacgtgacacccacgtggcacatcgatgggaggatggcaagggcaggatgagactgcaggcctgaaatgacatctgacttcccagagcgcaagacaacaggagccaccatcccaaacatgcaacgctggcttgagggactgactgcagcctgctttgcctccctagctgctggggtggctggaaatagggcaccagccagccccttccagagggacacctggggtcagacctagcccaaggggttgctcctggggccggaggaatgtgggaagggaagctgaggcccaggacccgatggactttgcccctaggcaggggagggagcctggagccatggcagcctgagcctccctggcagtgatcagcgactgagactcagagctgggctgtccctcagggccacctctcccctaacctgaaaagcagcaccatgtggccagctggtccccacccctcagggctctgcttgtggggacagctggagaggacagggcaggtcagctggaggcgaggttagggtccccagggaagagcagaacctgggcccaccgagttactgaaggcaaggaagggtggcctgtgtcaccctggcggccctgcctgggtctgctcctcgctgtgcacactgcatcacgccccgctggctgcctccctctgcctcttcccgtacagacgcacactcacagagatcatgcacacgacacggggcggggacggagggcccatggcagagaagggagcatgggggccgggagggagggtgctctgagccagaggcgggggttgggagggcagcccagccaggtggcagcagccagggcctccttggagtggcccacctggagtggagtggcagtttgggtggcttctaggcgaagatgcccccaacagtggaggcgatgacgatgcccaggatcacacagcagatgatgatcatgattttcttccggcgcgccttgctctggtacttgacggccttcttggtgtcagacacggccctctccacatagtctaccgcgtgttccacattgtactcgatcctgtcaatcatctctccctggctctccacgagcatggccatgtccatgaacatgtcgtgtagctcacggatgctgttctccagcttgatgatctcactgtgccgcgtctcaatctcgctcagagcctgcttcgagatgctggagtccatgatgatcccagaggcaaagatggcggggttcccactctccagcatgtcctccagctcctcactggtcgtggtcctgccggtgatctccagctgcctctggatgcggcctttgcagcgctcgcggtagtcggactgcgtggcgttgtactccgacatgacctccacaaactttctggacagcgtggagtgctgtgtcttccggatcctcaggtcagcggaggagcggttcaggccttcctcttgctcgatggactgctcgatgctctttaacttggaacgaactttgtttgctgtcttctttatgtcggacatgagttcttccagctcctccttcgtcttctcatcggggttgggggatgccaggatggcactgtgcttccgcttcacctcctccacgttctctgcgatcttgtcaatgaagcctcgaatctcctccacctgctcaaagaactcatccatgaagcggtctcggtccacggtgacagcgacatcatcatcatcatcgctgtccttggccgtgcggagctcctgggttcggtccttcatgctcccgggagtggcagcggcgccggctgcagccgtgtgagccccgcatgcgcgacccgct

SEQ ID NO: 434403 - DNA, 1790 bp, Homo Sapiens
  misc_feature (1683)..(1713): n is a, c, g, or t
ggccttagaatccgtctttatcgggcgatcatccttcgcaggtctggggtgtccacgggccgcccagagccccctacgtgggccagcccctgctgtgggcaccaggaggatgacttgcccgcctggaccctccttgggcctggtcagtgcccccacgccgcactctccactctctcggtcctctggggccaagggccccaccgggtggggtcagggctcctggcttcggggcgaggtggagccgtcggcgtcctgccctgagacggaggctggggcacctgcactgcgtagctcccgggccagcttctcggccagtttgcggaagggtggccggcgggcgggctctgcctcccagcagctgctcatgaggacgtgcacggggcctggacagccctcggggggttccatgcggtaccccttctccacggcctccgacacctctttcagtgacattttagggtacggagcccgtccatatgagaagacctcccagagcagcaccccaaaactccagacatccgacttgctggtgaacttcccgtgtttgagagcctcgggcgctgtccacttgatgggcagctggtttgagtctagacgctccttactgtctcggctttggccaggccaaagtcagttgacctttggccaccaggttctctgagatcaggatgttgcgggcggccaggtctgcggtgcacaagcttcttgctctccaggtactccatgccctcggccacgtgcagagaaaactgcaggagctgagcggtgttcacgagggctcgaccccgggtccgcagaaagttcaccaggttgcccttgctcacgtgctccatgacaatgtacagcccctggtgcaggatcacgcccatgagacgcaccaggttctcgtgttgcatcttcgtcatgacggccgtctcgtccaggaaggcctgggctgtcacatcacacttgatattcttcacggccaccttttgccccaggtactcaccctgcaggacagctccaaactctccctctccgatctgtgctcccaatgtcaaatgctgcaggttcagtaaccagcccgccctggccagctcctcctcggccgacttggtcccgtgtttccgctttggtctcaccagcttggtgcagatagcgcccttgtccttgctgtaatgctccaccatgtccatgaggttgcagaagaacacggcctcatcgattgtgaggtggccgtcgcggtgcagcacgcggtagtggatgacgtcgcggccaaagctcacgcacaggacgtagtcgccggggtggcgcgcggactcccgcaccaggaacagcccatcctcgggaggctgcagctgctggacagcctcctggcccgagatcttcccgtggaaccacggcatgaggctgagcttggggtctgcggagagggcctcccgctcccgcagcgccccagctgccagcagcccctcctgtccactggtgtggtgcttgacgcggtaccagctcttgttctcgcaggcctccaggatggtgaccacgtcgcccttgcggaaggccagctcccctggcttggggcgggtgtgctcgcatttggtgatacactgggtgcccggggcccagcgcctcgttggcatcctggctgagacgggaggggggtgccaggctcggaggaagcgggggctcacctgctcagggggnnnnnnnnnnnnnnnnnnnnnnnnnnnnnnnaggagggcctccgcgagccggctgcacaccccgaggcggtcccggctgcacaacttggagcgagttgctccgatccc

SEQ ID NO: 434404 - DNA, 1267 bp, Homo Sapiens
tttttgtgttgtgctgtcgcatgccatgttgtgcatcatgtcatggttcgttcctttgtgattgtgcctcactctggagttggatgtgtcagttgtggtgtgcgtctttctatgtctgttatgatgtccctcctacatgttggagtgcgattgtcgattgcccatggatcacacagcagatgtatgatcatgactgttccttccggcgcggccttgctcttggtatcttgtacggccttctttggttgtcagacactggccctttccacatagtttacggcgtgttccacattgtactcgatcctgtcatatcatctctccctgcgggtgccgtggggcacccgagctccagagggccccctcctcaggtttgggttggggctcggggcaggacttcaggaaagcaccctgaggctgagaacttggtccctccccggcagggcagcgtgtcgggcagaaagggcgaggttagtgcagccctgggtgctggtgtgggctggagtggagggcaggggggcccggcactcacctggctctccacgagcatggccatgtccatgaacatgtcgtgtagctcacggatgctgttctccagcttgatgatctcactgtgccgcgtctcaatctcgctcagagcctgcttcgagatgctggagtccatgatgatcccagaggcaaagatggcggggttcccactctccagcatgtcctccagctcctcactggtcgtggtcctgccggtgatctccagctgcctctggatgcggcctttgcagcgctcgcggtagtcggactgcgtggcgttgtactccgacatgacctccacaaactttctggacagcgtggagtgctgtgtcttccggatcctcaggtcagcggaggagcggttcaggccttcctcttgctcgatggactgctcgatgctctttaacttggaacgaactttgtttgctgtcttctttatgtcggacatgagttcttccagctcctccttcgtcttctcatcggggttgggggatgccaggatggcactgtgcttccgcttcacctcctccacgttctctgcgatcttgtcaatgaagcctcgaatctcctccacctgctcaaagaactcatccatgaagcggtctcggtccacggtgacagcgacatcatcatcatcatcgctgtccttggccgtgcggagctcctgggttcggtccttcatgctcccgggagtggcagcggcgccggctgcagccgtgtgagccccgcatgcgcgacggcc

SEQ ID NO: 434405 - DNA, 960 bp, Homo Sapiens
  misc_feature (72)..(102): n is a, c, g, or t
ggccgcggcgccccccggcgcccccagaccccggcctccggcacagaggcgggagacccggagcagcagcannnnnnnnnnnnnnnnnnnnnnnnnnnnnnnccgtcgcaggatgaaggatcggactcaagagctgcggagtgcgaaagacagtgatgatgaagaggaggtggtccacgtggatcgggaccacttcatggatgagttctttgaacaggtggaagagatccggggctgcattgagaaactgtcggaggatgtggagcaggtgaaaaaacagcatagcgccatcctggccgcacccaacccagatgagaagaccaaacaggagctggaggatctcactgcagacatcaagaagacggccaacaaggttcggtccaaattgaaagcgatcgagcaaagcattgaacaggaggaggggctgaaccgttcctccgcggacctgcgcatccgcaagacccagcactccacactgtcccggaagttcgtggaggtaatgaccgaatataacgcgagccagtccaagtaccgggaccgctgcaaggaccggatccagcggcaactggagatcactggaaggaccaccaccaacgaagaactggaagacatgctggagagcgggaagctggccatcttcacagatgacatcaaaatggactcacagatgacgaagcaggcgctgaatgagattgagacgaggcacaatgagatcatcaagctggagaccagcatccgcgagctgcacgatatgtttgtggacatggccatgctcgtagagagccagggagaagatgattggaccgcatcgagtacaacgtggaacattctgtggactacgtggagcgagctgtgtctgacaccaagaaagcagtgaaatatcagagcaaggcccggaggaagaaacatcatgatcatcatttgctgtgtggtgctgggggtggtcttggagtcatccat

SEQ ID NO: 434406 - DNA, 948 bp, Homo Sapiens
  misc_feature (92)..(92): n is a, c, g, or t
  misc_feature (734)..(764): n is a, c, g, or t
cggatatgttccggcccctttgcccccggtactgcacccgttgcagaacagctccaaattctccctgtgcgatctgtgctcgcaatgtcaantgctgcaggttcagtaaccagccggccttggccggctccttttcggccgacttgggtcgcgtgtttccgcctttggtctcaccagcttggtgcagataggccccttgtccttgctgtaatgctccaccatgtccatgaggttgcagaagaacacggcctcatcgattgtgaggtgccgtcgcggtgcagcacgcggtagtggatgacgtcgcggccaaagctcacgcacaggacgtagtcgccgggtggcgcgcggactcccgcaccaggaacagcccatcctcgggaggctgcagctgctggacagcctcctggcccgagatcttcccgtggaaccacggcatgaggctgagcttggggtctgcggagagggcctcccgctcccgcagcgccccagctgccagcagcccctcctgtccactggtgtggtgcttgacgcggtaccagctcttgttctcgcaggcctccaggatggtgaccacgtcgcccttgcggaaggccagctcccctggcttggggcgggtgtgctcgcatttggtgatacactgggtgcccggggcccagcgcctcgttggcatcctggctgagacgggaggggggtgccaggctcggaggaagcgggggctcacctgctcagggggnnnnnnnnnnnnnnnnnnnnnnnnnnnnnnnaggagggcctccgcgagccggctgcacaccccgaggcggtcccggctgcacaacttggagcgagttgctccgtttcctcattttgggggcgaagaagggtcggggagtgggggaaagcgggaggcgccgcggcctgggaggcccccgcgggtcctagcgccggccgcactgcgtctcctccgcg

SEQ ID NO: 434407 - DNA, 1019 bp, Homo Sapiens
ggtttccgcttggtctcaaccagcttggtgcagattgcgcccctgtccctgcctgtaatgctccaaccatgtccatgagttgcagaagaacacggcctcatcgattgtgaggtgccgtccggtgcagcacgcggtagtggatgaacgtcgcggccaaagctcacgcacaggacgtagtcgccggggtggcgccggactcccgcaccaggaacagcccatcctcgggaggctgcagctgctggacagcctcctggcccgagatcttcccgtggaaccacggcatgaggctgagcttggggtctgcggagagggcctccacgctcccagcagcgtccccagctgccaagcagcccctcacatgtccaacttgtcgtggtgcttgacgcggtaccagctcttgttcctcgcaggcctccaggatggtgaccacgtcgcccttgcggaaggccagctcccctggctttgggcggtgtgtgctcgcatttggtgatacaactgggtgcccggggcccagcgcctcgtttggcatcctggctgagacgggaggcggggttgccaggctcggaggaatcgggggctcacccggggaagttcctcagcagaatcacagccagtgaaatgcccagccaggaaaccagagagcctcgccccgccatcgcccccagagggaaactgaggcaggtgagaggcacactgagcaagtggtcacagtcggggacgctagggaatggcctgccacaggccaggcggctggcacaggaggtagggagctgggtgccactggaccgagcctggttcttcctgttttctgctacagggggcgcccccagagccagcgccaccagcagcccagcccccaggagggcactccgcagagccggctgcacaccccgaggcggtcccggctgcacaacttggagcgagttgctccgtttcctcattttgggggcgaagaagggtcggggagtgggggaaagcgggaggcgccgcggcctgggaggcccccgcgggtcctagcg

SEQ ID NO: 434408 - DNA, 1016 bp, Homo Sapiens
  misc_feature (193)..(223): n is a, c, g, or t
  misc_feature (899)..(899): n is a, c, g, or t
  misc_feature (975)..(975): n is a, c, g, or t
ggtccggaattctcgggatcgcagtgcggccggcgctaggacccgcgggggcctcccaggccgcggcgcctcccgctttcccccactccccgacccttcttcgcccccaaaatgaggaaacggagcaactcgctccaagttgtgcagccgggaccgcctcggggtgtgcagccggctcgcggaggccctcctnnnnnnnnnnnnnnnnnnnnnnnnnnnnnnnccccctgagcagaaaacaggaagaaccaggctcggtccagtggcacccagctccctacctcctgtgccagccgcctggcctgtggcaggccattcccagcgtccccgactgtgaccacttgctcagtgtgcctctcacctgcctcagtttccctctgggggcgctggcggggcgaggctctctggtttcctggcgggcatttcacggctgtgattctgctgaggaacttccccgggtgagcccccgcttcctccgagcctggcaacccccctcccgtctccagtcaggatgccaacgaggcgctgggccccgggcacccagtgtatcaccaaatgcgagcacacccgccccaagccaggggagctggccttccgcaagggcgacgtggtcaccatcctggaggcctgcgagaacaagagctggtaccgcgtcaagcaccacaccagtggacaggaggggctgctggcagctggggcgctgcgggagcgggaggccctctccgcagaccccaagctcagcctcatgccgtggttccacgggaagatctcgggccaggaggctgtccagcagctgcagcctcccgaggatgggctggtcctggtgcgggagtccgcgcgccaccccggggactaacgtctgtgcgtgagctttgggccgcgacgtcatccactaccgncgtgctgcaccgcggacggccacctcacaatcgatggaggccgtgtttcttctgcaaactcatgggacatggtggnagacattaccgcaaggaacaaggggcgctatctgcgaccaa

SEQ ID NO: 434409 - DNA, 1149 bp, Homo Sapiens
  misc_feature (295)..(295): n is a, c, g, or t
  misc_feature (380)..(380): n is a, c, g, or t
attggatgtttcattttgcgaatgatagaggagtatggatgtgtagggggtgtacagaatgtgtggtggagaattcacaatatcggcatcgagggaacgtgtgtcattcatagtgcgggtactgggtatcccgggcgttagcggatttggtgcttcaccaagtttgtggggcagtatagagcaccctggtggcgtggggtagaaaacatgcccccacatttcccttgagggtttactgaaatatcacggccctcctacgaattttgagggtggccgttcgcggttgcagccacgncgggtagttggatgacggtcgcgggccaaagttccccgcacagggagttagtctccgggggtggcgcgcggacttcccgcaccanggaacagcccatcctcggggaggctgcagctgctggacagcctcctggcccgagatcttccccgtggaaccacggcatgaggctgagcttggggtctgcggagagggcctcccgctcccgcagcgccccagctgccagcagcccctcctgtccactggtgtggtgcttgacgcggtaccagctcttgttctcgcaggcctccaggatggtgaccacgtcgcccttgcggaaggccagctcccctggcttggggcgggtgtgctcgcatttggtgatacactgggtgcccggggcccagcgcctcgttggcatcctggctgagacgggaggggggtgccaggctcggaggaagcgggggctcaccagaagctgctgctgaccacgggtccctcgccgaggtctgccttctcttcgttcagcagggaaatgtccctgcatgagagggacatttaagatgctctagcaccccatgaagactttctcctcttcctctctcgatgtcgcctagcaacccggctcgccgccagcatccgcaaccgatgtccccgcgctccagttctctggcggggagggagagtggtgttgcttctccagccccctgcagcctggtgtcttcctgccacccgccggcctgctccggggaccgcggcctggtgggacgagggttgcggaggacgggtcaggagcgaccgcgtttcaggcccgtggactccgcagcccagacggtccatccatctgcaccgaatcccttcgctaaccacagcccgct

SEQ ID NO: 434410 - DNA, 1087 bp, Homo Sapiens
gggaggttggtcatggagtggcggtagcggcctgacacggggccagttctgctgccactgaggcactggcggcaagagcaggcgacgcctgtgtggcccggcggagcgatgatggtggtcaccgggtaaggcggccctgcttggcgccgcacgctgcggcagaagctggaagtcttgttggtctgcgtgtgggtggtgtagttgacagtgtagttgtaccccagggggggccaagtccacgagctggttgcccctggccacctgctgctccagatagtcacagacgctggcttcataggcagtccaggagccatcgtcgctcagccactcccagacgacacctcggccaggggctgagtgctgggggaacaggtgtctccgcacagcccgcatggtgccggtgtcctggcggaactgggtccagctggggaggtcaataatgtaaggggccagcgaggggtctgcctggcccaaggggatgctgtgggccaggctcccaagcccaaaacgttggcccttctgctggacaaactgctgctcgatgaagctgcagatggtggcactgtaggggtgccaggtgcccagcccatcctgccatagccacagctgcggggctggtgtacacctgcaccagggaagggcttggggccatggccatcttcccaaggagtcccgctgctttcccaaacagcttcagacccctctggcctggagtcccggggtcattgcccagcgcctccggcagatcttttctctctggagagctggcacaaactgtcccttctggatgaagacaccagctccttaggaggaatgacttgtttgagttcccatcttgatacaaaccacaaacaacaaaaaccgggcaaatctgaaaggcttgctgactcagcgacacaaattccaaggcaccgaggctgaggaggacaagaggacggggctgagggcaccaccgcgctcgggctgcagctccggctcggcctgggcagggctaaagctgtggctccgactctcaatcccggatatcccgggccggtcccggcggttttggagctcgttggggcggtgatattggttgttggggaat

SEQ ID NO: 434411 - DNA, 614 bp, Homo Sapiens
attggtttgtgttttgaacgtgtcaacatttattgagtatttaccgtgtagccagccctgttttacaggcactactcaatgtggtccgcacaatgaccccacgagagaattattaacactcattttaaggataaggaaggaaccagaagcactgagaggtgaagccttaggtaacaaagccagtaggggtgagaccggcatggtgatttctttaggggagggtataagagtcctttgcgaagagaaacatttcactttcaaatgcctcagcacctgctgcaattccaggctttggtttgtacttgtatctcagtcacagttattttatagttaggcatatgaatttaaaatgaaagggagaaatactaaagatttgaaattttagttatgtgtcacctcaagggaaagttaattatcatttttgtcggcaacacctacacacaaattgtgactccagtaataaaatgagagcttagaaaaataagcacccagggctgatgaaaataatgcatttgtctcagggcaggggctgaatgtgaagccaactgttcttagagagaaacatgtcaatactaaatcttttcaccagcctttgatggatgtgctaatcttcc

SEQ ID NO: 434412 - DNA, 1118 bp, Homo Sapiens
  misc_feature (51)..(51): n is a, c, g, or t
  misc_feature (451)..(451): n is a, c, g, or t
  misc_feature (1049)..(1061): n is a, c, g, or t
cccggaccccttgggtgggaggctgacccccacggttcccttttccctganggtggggcttgggttctgtcggcctttgaaggggagtgacgggggcagtgaaggttacccatcccccagttgcccccacaggccaaaaggcccaaggtctccagagaaagtcgcagagcaggaagatgacacctgggacttcacagccacccctggcccgcccttgaggggcccaacagtgagccaagggcgggggctgtgggggatgcagggctcgggagcctgcgaagcagtgcgtggtcaggaactgcagttttaatggctcgttgctgccggcggatcaggagaggttcggcatcccgacccagcggcctccggaacagttcttccaagtggacttccagcacacctagggcagcagacgccacccagatcctcggaggccagggccttcgcctcncctcacacctctctgtcacactgaggcgggtcgctggcacagacctccgcagagatgcccaggacctgcaggatgtgctccttggggacgtagtcgcctggggacttctttgctgaccaccagcagccctccgctctgcagcaggtccccagacaagttcccctggatgccaacagccttggccttggcagccacatcacgcacgggcttccccagagctgctgggaggatgctcaggctgttgtaccgcttgaagcctagctccttgtaaagctgcttgctctcatccaggtagagctctcccgcgaagtagtcgccgtccaggaactcctgcagacccagggcctcgggccctacgcccaccaggcgcacgccgtgttggtccaggagcccagcaaggctgctgaggtcctgggcgatccagcggcacaccacgcacccgaagcgccgcagcccggccaccacgcacgcgtgctcccgccacaggctccgcagctccacggctccaggccaagcctcgagatcgcggcgccaaatcctgggtccgcctgcttcccgaaaattccggaccggtaccagcctctttttagggtgggannnnnnnnnnnnngcgtctcccgccccacagaggcaggggggcgctcgttgcggggtttggtggcccttt

SEQ ID NO: 434413 - DNA, 1187 bp, Homo Sapiens
  misc_feature (838)..(838): n is a, c, g, or t
  misc_feature (1025)..(1065): n is a, c, g, or t
atcaggccaaatcggccgagctcgaattcgtcgagagcgggggatccaggagcgaggagccgggagcggggaacagggagtcggggagccgggaaccggggctggcagcggccgccatgagcacggtggaccttgctcgcgtgggcgcgtgcatcctgaagcatgcggtgaccggggaggccgtggagctgcggagcctgtggcgggagcacgcgtgcgtggtggccgggctgcggcgcttcgggtgcgtggtgtgccgctggatcgcccaggacctcagcagccttgctgggctcctggaccaacacggcgtgcgcctggtgggcgtagggcccgaggccctgggtctgcaggagttcctggacggcgactacttcgcgggagagctctacctggatgagagcaagcagctttacaaggagctaggcttcaagcggtacaacagcctgagcatcctcccagcagctctggggaagcccgtgcgtgatgtggctgccaaggccaaggccgttggcatccaggggaacttgtctggggacctgctgcagagcggagggctgctggtggtcagcaaaggtggtgataaagtgctcctgcatttcgtccagaagtccccaggcgactacgtccccaaggagcacatcctgcaggtcctgggcatctctgcggaggtctgtgccagcgacccgcctcagtgtgacagagaggtgtgagggaggcgaaggccctggcctccgaggatctgggtggcgtctgctgccctaggtgtgctggaagtccacttggaagaactgttccggaagcgctgggtcgggatgccgaacctctcctgatccgnccggcagcaacgagccattaaaactgcagttcctgaccacgcacctgccttcgcaggctccgagccctgcatcctccacagcccccgcctttgctcattgttgggccctcaggggccgggcaggggggggttgtgaatcccaggggggcattcttcctgctctggcgacttttctctggaaaacctnnnnnnnnnnnnnnnnnnnnnnnnnnnnnnnnnnnnnnnnnaaaaccccacgttcccccggtcatttccctttcaaagggcggagaggaaacccaagcccccccctccaaggacaaagaaaaacctggggtactccagcctccacccagagggctcggtggta

SEQ ID NO: 434414 - DNA, 2313 bp, Homo Sapiens
  misc_feature (2261)..(2269): n is a, c, g, or t
cgaattcatttctgaatactgtagtgagctcatctctcaggatgaggctgatcgacgcggaaaggtctatgacaaatacatgtccagcttcctcttcaacctcaataatgattttttagtggatgctactcggaaaggaaacaaaattcgatttgcaaatcattcagtgaatcccaactgttatgccaaagtggtcatggtgaatggagaccatcggattgggatctttgccaagagggcaattcaagctggcgaagagctcttctttgattacaggtacagccaagctgatgctctcaagtacgtggggatcgagagggagaccgacgtcctttagccctcccaggccccacggcagcacttatggtagcggcactgtcttggctttcgtgctcacaccactgctgctcgagtctcctgcactgtgtctcccacactgagaaaccccccaacccactccctctgtagtgaggcctctgccatgtccagagggcacaaaactgtctcaatgagaggggagacagaggcagctagggcttggtctcccaggacagagagttacagaaatgggagactgtttctctggcctcagaagaagcgagcacaggctggggtggatgacttatgcgtgatttcgtgtcggctccccaggctgtggcctcaggaatcaacttaggcagttcccaacaagcgctagcctgtaattgtagctttccacatcaagagtccttatgttattgggatgcaggcaaacctctgtggtcctaagacctggagaggacaggctaagtgaagtgtggtccctggagcctacaagtggtctgggttagaggcgagcctggcaggcagcacagactgaactcagaggtagacaggtcaccttactacctcctccctcgtggcagggctcaaactgaaagagtgtgggttctaagtacaggcattcaaggctgggggaaggaaagctacgccatccttccttagccagagagggagaaccagccagatgatagtagttaaactgctaagcttgggcccaggaggctttgagaaagccttctctgtgtactctggagatagatggagaagtgttttcagattcctgggaacagacaccagtgctccagctcctccaaagttctggcttagcagctgcaggcaagcattatgctgctattgaagaagcattaggggtatgcctggcaggtgtgagcatcctggctcgctggatttgtgggtgttttcaggccttccattccccatagaggcaaggcccaatggccagtgttgcttatcgcttcagggtaggtgggcacaggcttggactagagaggagaaagattggtgtaatctgctttcctgtctgtagtgcctgctgtttggaaagggtgagttagaatatgttccaaggttggtgaggggctaaattgcacgcgtttaggctggcaccccgtgtgcagggcacactggcagagggtatctgaagtgggagaagaagcaggtagaccacctgtcccaggctgtggtgccaccctctctggcattcatgcagagcaaagcactttaaccatttcttttaaaaggtctatagattggggtagagtttggcctaaggtctctagggtccctgcctaaatcccactcctgagggagggggaagaagagagggtgggagattctcctccagtcctgtctcatctcctgggagaggcagacgagtgagtttcacacagaagaatttcatgtgaatggggccagcaagagctgccctgtgtccatggtgggtgtgccgggctggctgggaacaaggagcagtatgttgagtagaaagggtgtgggcgggtatagattggcctgggagtgttacagtagggagcaggcttctcccttctttctgggactcagagccccgcttcttcccactccacttgttgtcccatgaaggaagaagtggggttcctcctgacccagctgcctcttacggtttggtatgggacatgcacacacactcacatggtctcactcaccacactggagggcacacatgttaccccgcacccagcaaactccttgacaagaaaggcttcctccccaccccaaaatggggcccagggcccccccagaaatggaatccctggaaaaatcctgccatttcccgccccgcagggggcttttggtaaatttcccaatttgcgggggcaattaatttccaggggggggaaatcaccccccttttccaaagcgccttggggcaacctgtnnnnnnnnnccatttcccccagaagattttaaccgtcccctcaccgaaggggg

SEQ ID NO: 434415 - DNA, 427 bp, Homo Sapiens
  misc_feature (343)..(343): n is a, c, g, or t
ggattctaacactttattaagaggtcacaagccacaggactttaaagtgcatgaaatttattggcaatgaagccgcatgtataccaggctcccctagtccccaccaccttgccccatccatcatgacgtggtggggaggggttgagacccatctttaaaagtgggggacagcagggacaaaggatgggaaactgggaggaacaggagtattcatgaactgaagctgggacaggagactgaccacagtgattctgctcactgaaggaagggtggggtcagtctagtctctcaaaggctggtgaaaagttttttttcacctattcctcacagcgagcccctgggnatttcaaataggacctaactcctcctcttcatctttctctggtttttctcccctatggagtaatttggggacccacagttccag

SEQ ID NO: 434416 - DNA, 993 bp, Homo Sapiens
agatgtgcctagttcctggcaaaacaagaaaactgttatttaagtttgttgcaaaaactgaagatgtgggaaagaaaattgagattacttcagtggatcttgctctgggcaatgagacgggaagatgtgtggttttaaattggcagggaggaggaggagatgctgcttcctcccaagaagccttacaggcagctcggtctttcaaaaggcgacctaagctacctgacaatgaagttcactgggacagcattataattcaggcaagcacaatgatcatatccagagtcccaaacatttctgtacatctgctacatgaaccccctgcactgactaatgaaatgtattgtttggttgtgactgttcagtcccatgaaaagacccaaatcagagatgtgaagctcactgctggcttaaaaccaggacaggatgccaatttaactcagaagactcacgtgactcttcatggaacagaactgtgtgatgaatcctacccggctttactcactgacattcctgttggagacttacatccaggggaacagctggaaaaaatgttgtatgttcgctgtggaacagtgggttccagaatgtttcttgtatatgtttcttacctgataaatacaaccgttgaagaaaaagaaattgtttgcaagtgtcacaaggatgaaactgtaacaattgaaacagtctttccatttgatgttgcggttaaatttgtttctaccaagtttgagcacctgggaaagggtttatgctgacatcccctttctgttgatgacggacctcttaagtgcctcaccctggggccctcactattgtttccagtgagctccaccttgctccatccatgaccacagtggaccagctcgagtctcaagtggacaatgttatcttacagactggagagagtgctagtgaatgcttttgtcttcaatgcccatctcttggaaatattgaaggtggagtagcaaccgggcattatattatctcttg

SEQ ID NO: 434417 - DNA, 1592 bp, Homo Sapiens
  misc_feature (323)..(336): n is a, c, g, or t
  misc_feature (1529)..(1538): n is a, c, g, or t
cggatgcctttgagggcacagaaggggatggccgcatatataaaagaccgcataataacccaataaatattgggaataataccttcagtaatactttctgtaagaagcagaattacaccacatgttattcaacagcataggagtgcataagaaaatccctgttgtaattatgtttggtgtggaatagtaaaaatatgtactgaaaatgacaagttaattggcagagaaattaatctataaaagggttgtgtccagagcggaggagcctcattagcaactgacagaacccactcagaagacgcactcacccacacgtgcgcgtnnnnnnnnnnnnnngcgcgcactgtactgcaaataaatatacacacacactgaagtgatctctccctaaagcatcctgtgtgttcaggccagaattttccctggtggcgggtgcttcccagtgccgggctataagagaaggttggggactgtcccttgcaagtgggaagttcaggacacatgctccttcagtagcaaaaacagccctggccatcctggcgctcagagccctctgcacaccttcgaacgggctgtgtgtcccttctctgatggcagaaagacaacaccagcagaaagacggctgaacaactgcagatcctcctacccccgaagcctggtctgtctcacacatacaagttagagctgggtagacgggtgcttgcactttctggctttggtgggcgagaccttggcctgagaactttggttcacaggaagcttcccttgacaatacttgagtgcaaagcttcatccaggtcccacctgggctgttgccaaggatgctcaagcgttctcttcaatcttccctgtgacttccaagaaacgacaagatctctagcccatccatcggtaaaccaagctgccaagtggcctggaaaattccatgaagaacacggctcttagaaacctcattccaaatctcaacacgccacgttcagcccaagttcagcttgtgcattgtgttttggaattgggacacgagtatctatagtcccttgctgggtgaggaactttgaccacacgcagtggagaatgtggaaataaactatttccaatgggaaggcagagaaatggagcctgtagccggccagaactaaaaattaaaatcctctgtttctctgatgatcttgtaaacctgatgagggcttgaattacctagattttccaagaagtgttcaattccttgaggttgctcattctggcattaacagcaaaaatttctcttccaattataaactgaagttcttgagaaaacgtatgaagaggcagcagagagagagccaggactggttaaatgcagaaagtggttttgttttaaacgcattcattttctatgttaaacataagtccacaaggacagaataggaggaggtcagaaagatgaaggtgctgccaaaaactgacttatttttttccttttggaaacagtgacgttaacagggtttacatctgaagaaactggagggctgagtttggagtaaaggagnnnnnnnnnntgaagagcctccattctcgaaagactgcggttctctgtcccagtgaggttagcg

SEQ ID NO: 434418 - DNA, 1188 bp, Homo Sapiens
tactcctgtcctatgcagggctcatcagagtagttgttgcccagattctgggaagttggctcatcactggagcagccacttgcgaagatggccaccctcatggtttctccagagtcgttggcctctctggcatgtgccctggctgcttcgtagacatgctcttgttgggatgtcttccgacagagcatgatataggccatggtaaaaaccaccatacagcacaaggagatgatgaggatgatggcaaaagacagggcaggctcttttcctggcccagcactggtctcttcaaggtagccatccatgtcagtggtccagtcccaggactgcttcactgtagatgttgctttcaaaggggtatgtcatggttgtaggtgcctcagtcttggtcttgagtagctttgaggagtctttgaccacaaacttcacaatgtcgctgtgctgctcagagccaacctggcccttggcagtgcagaaataggagcctgaagtcggctatcaccgcaggcttgaagagtaaggtacttagggttgctactttgatgggttcctggttattagtctgttgcttataccaaatataactgatgggaggagaaccccgagcctggcattgaaggctaatcctcattccctggggcaccgtgaagccataaccgctgcccagttgtcactgtgggcttggagacagagagtttctggacacggagctcagtaatcttatctctcacgacttggttgccatcaggagtctgccaggtgacttcacacgtgtagtggctccggtcatccatctccagggtgctcaattggagggatacatctcctggaaccttgtggctcacatgcaggcggccctggtactttgcctgctggatatggtctccagaagagtcacgtagaaagatggtgacagggtctgagccacgttgtaccagccacttcaccaagacttgggtgtagccttgcagggggtcataggtgcagggaagattcacatcccctttccaaggtcctgttacactctctggcacttccaggatgggacggccataagtgtccactgttaggtgccccaggagtagcaggcccagtaagatccccatcacagccagagctacttctgtcctttcttccagcctcctgctaccaaagaggctcaaacttctggtggccgccagcgtctgt

SEQ ID NO: 434419 - DNA, 1162 bp, Homo Sapiens
  misc_feature (286)..(286): n is a, c, g, or t
ttttttccccaaagatttctggggccttttttgggaatgtggccccagggctgttttgggtaggcaaggttttttgtttggggattcttttcggccaaggggcgtggttttggccccagtgttaaaaacgcccccattgcgcgccccaagggagatgattggggatgatgggaaaagacaaggcagggtttttttcctggcccaagccatggttttttccaaggtaacccatccatgtcaggtgtcccagtccccaggactgtctccactgtaagatgttgttttnaaaggggtatgtcatggttgtaggtgcctcaagtcttggtcttgaagtagctttgaggagtctttggacccccaactttcacaatgtcgctgtgctgctcagagccaacctggcccttggcagtgcagaaataggagcctgagtcggctatcaccgcaggcttgaagagtaaggtacttagggttgctactttgatgggttcctggttattagtctgttgcttataccaaatataactgatgggaggagaaccccgagcctggcattgaaggctaatcctcattccctggggcaccgtgaagccataaccgctgccagttgtcactgtgggcttggagacagagagtttctggacacggagctcagtaatcttatctctcacgacttggttgccatcaggagtctgccaggtgacttcacacgtgtagtggctccggtcatccatctccagggtgctcaattggagggatacatctcctggaaccttgtggctcacatgcaggcggccctggtactttgcctgctggatatggtctccagaagagtcacgtagaaagatggtgacagggtctgagccacgttgtaccagccacttcaccaagacttgggtgtagccttgcagggggtcataggtgcagggaagattcacatcccctttccaaggtcctgttacactctctggcacttccaggatgggacggccataagtgtccactgttaggtgccccaggagtagcaggcccagtaagatccccatcacagccagagctacttctgtcctttcttccagcctcctgctaccaaagaggctcaaacttctggtggccgccagcgtctgtgactgcttacttcccttccttccctatatctctcccc

SEQ ID NO: 434420 - DNA, 874 bp, Homo Sapiens
ggggccactgctgcagaagccaaggggacactgtgcaccagaggcggcgagctcaggcaggttgcggcaggaccctaatggcccgacggggcgtggcctgaggcattggcatggagtcggggccactaggagcaggagcacggcacgtgggcggggtccgggccgtgggcggggccagaccccgagcccggggtggacttgacgatggtgatgacgctggccggcgccacgagcgtggcgggcccgcgggcggcggccacggagcgcgcgaagccctgcagcgcctcgcacttgccgcgcagcgcgtcgagctccaggcgcatggcggcgttctcgcgcgccagcttgctcacctcgcgctccagctccgacttctgcttctgcagctcctccttctggcacacgcgcttcacgcggcagctggcggcgtagccacggtttttgagtgtgcggcgccgctgcttgagccgtgtcacctcctcggcggagagcccgcgcagatgccggttcagctcgcgcaccgacagccccatcagcgcctcgtccgacaggtgcggcgtgttctcgctcagctctcgcttgatctttagagctttgctggataggggatccacagacatgtttgcagaaggtgccctctgggctgcagacccgcttctgggcccgcttggtccggcgcgctcacacacgcgcgtctcgccgctgtcccggccgctgtcccgatccgcgctccggtcagtctcccctccgctctgagccgcaggtcgctctgaaccgggcgcccgggagcgctgcgctgagttttgttgtggggcgggcggcgcagggggccgaggccgcgcggagttgtaaggcgagcttcccggaattactt

SEQ ID NO: 434421 - DNA, 734 bp, Homo Sapiens
  misc_feature (507)..(552): n is a, c, g, or t
gctcagtggcatttggaaccctctttggtgccctcccattctctctggaattgtttcaagtctgctggttttcaaacaagaaaagaatcttgcacatatactcctgaaggcatgagtgtgtggtccatggcaagaaatagctaaaggctgctttccaggacccaaagccccatttaatgcaagaaccagagaagtgttctaggccattagtggacaatgtcatgtttggagaaagataacaacacaaataatgtaacctttccttaaaaggcagaactcaatccattttatttgatgcttattctaacccttaaccctgggtcacctggaatgaagaactctatgaataatatttgattttacaacgtgttatggttatgtgaaaactaaacatttgccttttataaagactgacaaaatataaatctttattctaaccctatccccaaaactagccaggccacaccccagatgttcttattgactattgggaagatagaaaaggcnnnnnnnnnnnnnnnnnnnnnnnnnnnnnnnnnnnnnnnnnnnnnncagaagaccagtgtctcagttctgtcttagtagtaccacacccgtaaccgtgttttaaaagtttgttttagcctagagacagatcatacgagttcaacaatgtacagtgtgattgaaaagacaggttggtgtctatttttctttttaaaatatctgaatgtgtatttgtaatacgtaaaggt

SEQ ID NO: 434422 - DNA, 1539 bp, Homo Sapiens
  misc_feature (511)..(537): n is a, c, g, or t
  misc_feature (800)..(800): n is a, c, g, or t
  misc_feature (818)..(818): n is a, c, g, or t
  misc_feature (839)..(863): n is a, c, g, or t
  misc_feature (865)..(866): n is a, c, g, or t
  misc_feature (928)..(928): n is a, c, g, or t
  misc_feature (930)..(930): n is a, c, g, or t
  misc_feature (972)..(972): n is a, c, g, or t
  misc_feature (1000)..(1000): n is a, c, g, or t
  misc_feature (1023)..(1023): n is a, c, g, or t
  misc_feature (1046)..(1091): n is a, c, g, or t
  misc_feature (1097)..(1097): n is a, c, g, or t
  misc_feature (1145)..(1145): n is a, c, g, or t
  misc_feature (1173)..(1173): n is a, c, g, or t
  misc_feature (1249)..(1249): n is a, c, g, or t
  misc_feature (1329)..(1329): n is a, c, g, or t
gtctttttcatctgttttattagcatcaatatatacaaagtggaaaatgacttaatttcattattctagcttagaaagtttgttttgctttttattttgtttggcgataaaatggaaatgaaaatttcccaggagaatgcctacctttgggggtgctgaacaactcaaataatatctgacctcaaatgactcgtcatgcctagtcaaggacataggaagatcatgcccttcggattcactcgaagggcatttttgcctgaggcccgtgcctcagcctaaagctacccacatatttgccaaatcactacttgttatacaaccctcctgattatgcagatgctttgcttccttctgggctgtttggcagtcttcaaagctatcagcctgaggttctgtaggctctccaaggggtgagcttcaaaggatcatagttaaagcacatctatgaaactaagtaagaatggccatcaggtagcaatcagaatacttatgttagctaaataattctacnnnnnnnnnnnnnnnnnnnnnnnnnnngctgagctccaagctaaagagggttgagtgtgtgcatttttaaagcacagggtggtagctgacagatacagcttatatgaattagcatgtaatacacaccatcacatgcattctctgaagctcacaatctctgtaaacgtatttccccactgttttaaaaacaaagagtggcttgtaggaaggctcagtccattctcgagtttctcaagagtgtatcctattcaaaaatatttaatcccaatgggttttaatattgatcttanaaaaacagacgtacatgngctgtaatgagatgccttgcnnnnnnnnnnnnnnnnnnnnnnnnncnnttacgtattacaaatacacattcagatattttaaaaagaaaaatagacaccaacctgtcttntnaatcacactgtacattgcttgcactcgtatgatctgtctctnggctaaaacaaactcttaaaacacggtnacgggtgtggtactactaagacngaactgagacactggtcttctgnnnnnnnnnnnnnnnnnnnnnnnnnnnnnnnnnnnnnnnnnnnnnngccttntctatcttcccaatagtcaataagaacatctggggtgtggcctggctngttttggggatagggttagaataaaganttatattttgtcagtctttataaaaggcaaatgtttagttttcacataaccataacacgttgtaaaatcaaatatnattcatagagttcttcattccaggtgacccagggttagggttagaataagcatcaaataaaatggattgagttctgcctnttaaggaaaggttacattatttgtgttgttatctttctccaaacatgacattgtccactaatggcctagaacacttctctggttcttgcattaaatggggctttgggtcctggaaagcagcctttagctatttcttgccatggaccacacactcatgccttcaggagtatatgtgcaagattcttttctggcagaaggaaaatatcccgg

SEQ ID NO: 434423 - DNA, 1099 bp, Homo Sapiens
  misc_feature (36)..(36): n is a, c, g, or t
  misc_feature (60)..(68): n is a, c, g, or t
tccggggtgtgtggttcctagtttaaggccctgaanctgaggcccactggtttttttggnnnnnnnnnccgaaccaatgggcagccactctccaaaaaacccccaaagaaccgccccccgccctttttgtaatcttcccccaatagtgcattaaaggaccatcttgggggtgtgccctggggctagtttttggggattagggtttagaaataaaagatttaataattttgtgcagtctttataaaaagggcacactgtttagtttttcaccataacgcataaccacgttgtagaatcaacatattatttcatagagttcttcatttccaggtgacccagggttaggggttagaataagcatcaaataaacatggattgagttctgccttttaaggaaagggttacattatttgtgttgttatctttctccaaacatgacattgtccactaatggcctagaacacttctctggttcttgcattaaatggggctttgggtcctggaaagcagcctttagctatttcttgccatggaccacacactcatgctttcaggagtatatgtgcaagattcttttctggcagaaggaaaatattctggtcttagacccccaagattgaagtctgagttcctgctgtcaaggagggtacatgtgtgcctaaaatcaactttccctctcttgcttaagatgtttccaatgtaaccaccaaaacatagactccctgctattctccctatggccagaaaggtcttttcttgtttgaaaaccagcagacttgaaacaattccagagagaatgggagggcaccaaagagggttccaaatgccactgagcccgtctgtctgtccaagccattgactgtcaccaccatgtcaccggtcccaggaaggtgaatctgcttcacacatagtatttcttccatgcacccgcaccctccaccttctctttatacctgtatttagaaaagaatcttcccaagagttacacactcaccggtttcactgggttgggggaaaacagaccctgataaaataagaggaatgcccgtgtgactagatgtggggctatgatcccgggaattccggacccggtaccagc

SEQ ID NO: 434424 - DNA, 801 bp, Homo Sapiens
ctggaatgtttcaagtctgctggttttcaaacaagaaaagacctttctggccatagggagaatagcagggagtctatgttttggtggttacattggaaacatcttaagcaagatagggaaagttgattttaggcacacatgtaccctccttgacagcaggaactcagacttcaatcttgggggtctaagaccagaatattttccttctgccagaaaagaatcttgcacatatactcctgaaggcatgagtgtgtggtccatggcaagaaatagctaaaggctgctttccaggacccaaagccccatttaatgcaagataccagagaagtgttctaggccattagtggacaatgtcatgtttggagaaagataacaacacaattaatgtaacctttccttataaggcagaactcaatccattttatttgatgcttattctataccctaaccctgggtcacctggaatgaagaactctatgaataatatttgattttacaacgtgttatggttatgtgaaaactaaacatttgccttttataaagactgacaaaatataaatctttattctaaccctatccccaaaactagccaggcacaccccagatgttcttattgactattgggaagatagaaaaggcgtggtgtaaagttgttgttgttgtggtcattgttgtttgtctcagaagaccagtgtctcagttctgtcttagtagtaccacacccgtaaccgtgtgttaaaagttgttttagcctagagacgatcatacgagttcaacaatgtacagtgtgattgacaggac

SEQ ID NO: 434425 - DNA, 291 bp, Homo Sapiens
  misc_feature (152)..(197): n is a, c, g, or t
  misc_feature (223)..(223): n is a, c, g, or t
gattttacaacgtgttatggttatgtgaaaactaaacatttgccttttataaagactgacaaaatataaatctttattctaaccctatccccaaaactagccaggccacaccccagatgttcttattgactattgggaagatagaaaaggcnnnnnnnnnnnnnnnnnnnnnnnnnnnnnnnnnnnnnnnnnnnnnncagaagaccagtgtctcagttctgtnttagtagtaccacacccgtaaccgtgttttaaaagtttgttttagcctagagacagatcatacgagtt

SEQ ID NO: 434426 - DNA, 981 bp, Homo Sapiens
tgttttttccttaaccccaagggaaaagaattcgggctcctagggttacaaaaaagccctggcgaatagaattttttaattctttcggccaaaaaagtagtggattcagaacttgccccccaaaatgtttgccctggtgtagacccaggaacccattttttggggacataaagttcaaagctggttattgtatctccagggttgtgtcaaaaaaactaccccagtatcatacttacgtgctgcacttttaattttattaaaaaagaagcaagtatcttcaacataccaaatgctttcacatttctgcctgcaggcactgaccacaaaaatacagacccaacacaacaaaagcaattaacacaagataattaagtggtagttacaagtggtgggcaggggaaagtgcaagaggccagctggctgagcaagtggagtcatcacatgtgtcctcaacattgtgggtttagggatccagtgcaatcagttcacttctaagaggactggggttgaggactcgagctaggctgctctaaacttgtacaaacagaattacaaatcagagtgccaatttatctgtagggtttgtttaagcagttcaaatctgaaagactgctggcagagccctgaactggactgagaacaaacgtttttatgagccatcatcatccacctccacaaagtgcctgccttactctagggtttttctcagccaaatctactcatctgatcaggatgccctcttgcctggacaatgtcagaggaacaaggaaaacaactgagctttccagctcttccttttcaacattccatgttagtcaccaaaaagtaacacataatggaaattctctagattacagcttatttcctgtttagtgcattctgtgttgatgtcgtcctttaacagtgaggtagctcagggcatccttagagagactgaagtgttcttggtctgatatctgataccagcaacacatttctttc

SEQ ID NO: 434427 - DNA, 929 bp, Homo Sapiens
  misc_feature (46)..(58): n is a, c, g, or t
  misc_feature (204)..(281): n is a, c, g, or t
attactaattatttttaaagatgggggggaaacacagcgaagtgcnnnnnnnnnnnnngtcctgtgcctggttgggtcgtggtttttatcatcatcatcattttttaagtggactgtgataaacggaatacctgccaatcatcttgtctccccggtttggtgtttgattgacagctccccttgtcagagtgcacgttcagcttnnnnnnnnnnnnnnnnnnnnnnnnnnnnnnnnnnnnnnnnnnnnnnnnnnnnnnnnnnnnnnnnnnnnnnnnnnnnnnagctgcctctttagacgagggtcgcttgttgatgaaggagcctccatcctctgccatcttggcgcggcctcggtttgggaccctgtgccctcgctgtccagagtcttcgccgcattccgctgctccctccgattccctctccctttctcggtgaacgtgtatgcggtttgtttttgttttgtagggttttttccttctccacctctccctgtctcttttgctccatgttgtccgtttctgtggggttaggtttatgtttttaatcatctgaggtcacgtctatttcctccggactcgcctgcttggtggcgattctccaccggttaatatggtgcgtcccttttttcttttgttgcgaatctgagccttcttcctccagcttctgccttttgaactttgttcttcggttctgaaaccatacttttacctgagtttccgtgaggctgaggctgtgtgccagctgcttcctttcggcgcccaccacgtagtgattcttctcaaaggcgtgttccagccttagaagctgggacggggagaaggcggttcggttccgcttgggctttcgggccagcgcgttgtgcaaaaggaaactctcggggctagtgtcgttcccttggaagcgatgacccagatatcggtagcggtgga

SEQ ID NO: 434428 - DNA, 2106 bp, Homo Sapiens
  misc_feature (190)..(202): n is a, c, g, or t
  misc_feature (518)..(558): n is a, c, g, or t
  misc_feature (2021)..(2057): n is a, c, g, or t
cagaaaactaaagcagcacctttattttatacatacaaacagtataaaatgtttattaggtaagagctgtgttttgtttacaatatattatattgcttcaagccaatgcaaaaagttcatacattatattccctatttcattgtgtttagaatatattatattgtttaaatgccactaccacagtgtaannnnnnnnnnnnnaatactgaatctctggaataatggtaaggtcaaaatatattgtattgagagtttaaaaattaagagcaatttttaaaaatgtaacaaacatctaaatatctgacaataaaatctgaaatgctgtaacttcaacattaactgcaccatccaaattcttgtgacttacgcatttttgcccaatttaacctttctgatgttcccctgcccccagacaccataaatgcattgtaattttgaaaatatctgccaactacacactgaaaattttaacctgatcaattgacataatataaaatctgtcccaaagcactgaaannnnnnnnnnnnnnnnnnnnnnnnnnnnnnnnnnnnnnnnnacttaaaaggaagagtaaatatcagctcagtgatttataatgaagctaataaaattcaggccagtattcttaagtgtaatgaacattatttgaacattcaacacatgaaaggttaacaaaggctatgaacttggtgtaacttaaaacgtttcagatgtcggagttcaccagatgttattggattcaggtggatcccgccgctcttcggcctttttaagtgaaggcgtgtgctgcctgagctgggcgcctgctggcctcagggcatgtatgaggctggcttcgtaccttttattgcagtgtcttccatgccaaccttcttgacattggcatttgttgggttcatggcaggttccatgtgcaccacagccaggctcgcagacaggctttgaacagaggtctccctggtaacctttggaacacttacatttgcttttaccaatgcatttacctccatttcgacagggttgtgggcatttgctgatttcacactgctctccctctagtcctggagggcaaatacattttccagggtagaaacaggtccctccattaaagcaggtggttgagcagtttgctttgtcacagttcactccatagaatccaggtgggcagatgcagaaaccaggagtcacacaaagtccaccattcatacatcgtggggtacaaagggctttctcacagtgaggtccgtggaacccatcaggacactcgcagatgcgtctttcattacaaaagcctccatttcggcacccgcctgggcactcagcttgttgacatgttttaaagaagatagcattttgaggtgtttggagaatggtgttgccttcagaattcataacaatcacatccacttcaaatgctgccaccccatcctgttttccaagacatgggaaaccaacttgaacaactgatgccttgtgaggcactgttcccagcagagggacattgacggttggatctgccatgatgcctttatccagggagcgcaaggacaggaattcatagaagtattctgcctgccctgcagcttgccaggtaaaattcatggaatggatattgacaggaatagctggcattctctgttgcgcttttctgaaatcatgtgtaaaaggtgccattttcccctctgaaacaatcaggatatcttcttcaaatcctatgagtactcttgcctggtgagcatcgatccataggtacaggctctcctcctgcggcggcccggcctccgcccgcagtgccagcaggcacaggaggatgctccagagccagagcgcggcggcagggaaggcgctcctccgggccatgctgctcaggacctcctcgctgccgggaaaactcctcgtgccgcacctacgcaacctggcgccgtcagatactctgctgcgctgcagctccctcagccagggctgttcccgtttagacccgctctcgacgaattcgagctcggccgatttggcctgatnnnnnnnnnnnnnnnnnnnnnnnnnnnnnnnnnnnnncgccgccaccgcggtagagctccattccccatagtagtcgtatacatcc

SEQ ID NO: 434429 - DNA, 1598 bp, Homo Sapiens
  misc_feature (653)..(675): n is a, c, g, or t
  misc_feature (1527)..(1527): n is a, c, g, or t
ttttttttgtgttaaacagctttaatctcgctcattgcggcttctcggcacagtaagaaatattgcacatgatcaacatgttttgttctggggaagggggcaagggcagggggaatcaccttcttagaaagtacaacccaagttgggagggcagagggggtgaggagaaaaccctccccgtgcctgtggcaaagtgcaggagcccccacccccaaactaacctgagtccagcccctctggggaaaaaaggggtgcatgaactccccctattccacaggcgcctccctgtggcccaaggcctgcaccaccctccagcttgcagccctcacaggagccattttgcataaagtgaaaagctctgaaggtcacacgctccaggttatgtacaggggcttggaggagggagactgcccctgcagcccctcagctgccccccagcaccgggagggagcttcgagggaagggggtatttacacagaggagcaggcctacattctcgcgcccaaacctggagaggacgaaatggctttagccgggaggagataaccttcactgcccccacatactgtccatgtcctgagggggtactagtagagtcctggcatacttctcaggggtccctacacctgcctgtggagctgtggagggacctnnnnnnnnnnnnnnnnnnnnnnnagccccctccccacgccaggctgtccaggctccgactctgggggtggagtcagtggcggggcagcctgggccgtgccagagtccgagctgggtgaggtggggtcagggccccctgcggggctgggagtgggggcaggggcagcagcggtgccagtggggggcggtacagggagaggagcctcagctccagggggctgctccgtgggagtggcagcctgcatgatcttctggcgcacctcacggatcttcaactgcagacaaaccttggagggaaagatgtctgcatagcgggcctggaaggcggctgtggcctgggctgacgggaagaagccatggtcctgaaagagctgcatgaccagggcccggcgctggtccagggtgcgccgcagggaggagtatggcaccttgtcatactctagctccccaagcacgtcctcggcttctgtacggtcaaaggtgaagatgtccccctcgcacttggcactcttgggggtgttgggctccgagctgcagctggagcgtcttctcatcttgcgcttgggcgaggtggggtcctcgggtgctgaatccaggtccgtggagttcttcctcttcttgcggtaagagcccaggatggcccggggtgaggtggccagagactgcagggtgggggagggcagcacctcctcaggccgaaactcaggcaactcagcaaagcgctcttcgaagtccacttctgacaggaccctgttgtccacagagtcaaaggtcttcttcaggggcgggggccgcaccttcaccttcttgccagtaccagccgcctccttgcgctccggggtgtccccggctgcccgcccactgctgctctcgctngctgccaccagggggtacagctggagctggggccgggatgggaggagtgggaggctcccatcggcagaatt

SEQ ID NO: 434430 - DNA, 858 bp, Homo Sapiens
tcagtttttgttcttggcgttcagcactggtgtaagagtaattttaaagcttgtgtcgcaacgtagtacaaatgggcgtgatatgcagaatagtgacttacacatcagagcgagacatgaacgctttttcaatgagatttttcgatgacagaacgcaagcaggccttgtagtcagacatgaactgggggtgggaggattaactgagatcgtctgatctttgatcgggaatgtgacaccctcagcaaatagctgcagaagagaaggcatgtgaggcaccttcaggtacagtcctcccgtgatgtcacaagccgatatccttgatttcatttcctgattgtctttaacttccttgttcattctatgaatgtagcaaagggctttggccagggatcctgccagcaaagtttctgtatgttgaccctttatgtcacttttggtcattagatcttgtaatctcttcaacaataacttcatttgctgaggttaaaagattcgtattttccatctttactcccagagggacttaaatatcaggagggttgccagggtctccgaagaagtctccaagtctgccattctttccaggatataagaatcggctttcttgaatgtgacttgctatcacagcaagtttgtctgggacgattcatgaataaatgcgaatttcccagcaccatcacggcatctatgcatttgagataaagtgaactgagattcctttaatgccttgctttcccacacctaattgggttggcatcaactactataaccagaagattcaattcatcttcgtctgaaaccatgctgtccgacgcgtggatcgacgatatcccgtgaattccgggccggtaccagcc

SEQ ID NO: 434431 - DNA, 918 bp, Homo Sapiens
ggcctgaattgcaggatatggcaaaccacccagacagacattaccatgttccatgagatttcgatgacagaagcaagcagccctgtagtccaacatgaacttggggctggggaggtattaacttgagattctctgatctgtgatcgggaagaaacaccccacagcaaatactgcagaagagaaggcatctggaggcaccttcaggtacagtcctcccgtgatgtcacaagcctgttggaggagccctgagtcggagtctaaaacacaggcatcaatcaaaatattctgtttctgtgctgcaaagatgacattcatgaagttcatatactgcaacgcactgtcttctgcagccttaatcaccaatatccttgatttcatttcctgattgtctttaacttccttgttcattctatgaatgtagcaaagggctttggccagggatcctgccagcaaagtttctgtatgttgaccctttatgtcacttttggtcattagatctttaatctcttcaacaataacttcatttgctgaggttaaaagttcgtattttccatctttactcccagagggattaaattcaggagggttgccagggtctccgaagaagtctccaagtctgccattctttccaggatataagaatcggctttcttgaatgtgacttgctatcacagcaagtttgttggaacgattcatgaataaatgcgaatttcccagcaccatcacggcatctatgcatttggataaagtgaactgagattcctttaatgcttgctttccccaccaaattgggttggcatcaactacaataaccagaagattcaattcatcttcgtctgaaaccatggctgtcccagcacctcagcgcagagcaagtggtggtcagcgggagcgtctcaaatcctgcgcagcccaacg

SEQ ID NO: 434432 - DNA, 879 bp, Homo Sapiens
  misc_feature (300)..(383): n is a, c, g, or t
tctggcctctccctgctcattggagtcatcttcggtctgggcggctggctcgtcctcttggtgctagcacggtgttttacacttcttcatttctctgccgccttgtctctttccttctcgtgtcacttctacgtctgcggtttctcttcgtcttttttcttttcttcgccgatttgctacatttcttgcgtctgactgtttctccctgcccccgcgccccgtcgcctttggtcccgttgcttgcccttgtgctccttgtggcggtccgccttcgtgtctctcgcctgcgctctcgttgcnnnnnnnnnnnnnnnnnnnnnnnnnnnnnnnnnnnnnnnnnnnnnnnnnnnnnnnnnnnnnnnnnnnnnnnnnnnnnnnnnnnncaaaggtgccttgtttattgctttgagatgtgaatttataggcgtctgctgtactggggttcctgtgccgccggtaggggccccagtcctccggctcccgaatggttctctgctggtcactcccgctggaactgcaaactgactagcgtctcattcagacgctcggcgtgatgatgatctgtggaacgaccactttcttcctgctggacttttgctttacatcaggtttctcttccagcgaagctgccggcggcgggtgcttggctgtcccggcccctgggtggaggctgtccacaggcttctccgactccctgtctgcctgcctggcttcctgggaatgcttctccatcaacttctccttagattttggaactgaataggtggatcccttcttttgctcctcacctttcctgggtttctctttgcttttggaaatggcccatgggtgatgcccaccgccccctccgacgcaagcccgggtccccacacctccgcg

SEQ ID NO: 434433 - DNA, 1047 bp, Homo Sapiens
taatttattcatttatcaataccacaaagctcgctctctgagccagtcactcttgcctcgaccgagctgctagcagctctggggaaggcaggaccaaatggcaatggagaacgggctgcggcttctcacagggtggggcgggcctggtgtaccctccccgagagcattggagaagggggctgcaggttctcacagggtggggtgggcctggtgcaccctccccgagagcactggagaaggggactgcagtttctcacggcgggggcaggcctggtgcaccctccctgagagcactggagaagggggccacggcttctcacaaggtggggcgggcctggtgcaccctccccgaaagcactggagaagggggctgcagtttctcacagggtggggtgggcctggtgcaacctccccgagagcactggagaaggggcctcggcttctcacagggtgaggcggctgttcccgagacgcctatcgcagggagtagcgagtgccatgcaaaggtgcttgtttattctttgagatgtgaattataggcgtctgctgtactggggttcctgtgccgccggtaggggccccagtcctccggctcccgaatggttctctgctggtcactcccgctggaactgcaactgactagcgtctcattcgacgctcgcgtgatgatgatctgtggaacgaccactttcttcctgctggacttttgctttacatcaggtttctcttccagcgaagctgccggcggcgggtgcttggctgtcccggcccccgggtggaggctgtccacaggcttctccgactccctgtctgcctgcctggcttcctgggaactgcttctccatcaacttctccttagattttggaactgaataggtggatcccttcttttgctcctcacctgaaatatatggatcatccgttagacccgggacttaccgaatgcagggcagtgggtcccatcgtcttcagtcgcctgcgtgggtccagaataagctggcttcaagtctcgagtctccgcgtttccgatgcagggaattccggacc

SEQ ID NO: 434434 - DNA, 741 bp, Homo Sapiens
cttagggccttacctagctctgagggcggtttggatctggcacctcgtagagctggcagcagcaaaccagtcgacggtgagggagagacaggactggtttctttccaacaatcatgcgctccacagtctgcacctggaacacatggtcatcgttggtccgcagttcacgcccctggatgcgctggtagatgcccaccaggagttctcgggggatgtcttcaccattgtcaacccctctcaggttcttgatgaagtcatctagtttcatctttcgttcagctttgacgctgggactgtacatgtcggtattgaggaggatgatggcaaaagcaaggatgaagatggtgtctgggttccggaacttggcgcacagagggcttgggttacagacacagtaacctgctggctgaaggcttcgatgagtcgctccactttctgggcctcaccctgaacccggatatgggactggaacttccggagcgcatcatccagatccatggaggagaagtccatctcatccaccacacagtccaacacgtctctgttgaactgcttctgccggttccctaggaattcccctatcatctgccggctgaggcctttccgctccaggatgaagtgagccactcccaccggtgtgtctgacaggaagccccgctcgatcagatactggatacccttctctggcttcttgttgaagaggttgaggccgattcggtagtgccgcctctggaccacatc

SEQ ID NO: 434435 - DNA, 4349 bp, Homo Sapiens
  misc_feature (2627)..(2652): n is a, c, g, or t
ggctgggagaggaggaacagaaggaaagccatagcgctctcttgccccttggcatgtaccccaaggcctgatggccactgggctcagcctgtcccccactcctgcctgcttcccggtgagctgccccccacacgtgcagcccgggctgcctccagggtctggctgagtgggatcaggtggccctccaactcagcacaggaaataagtagaaacatttcagcaggccacctcccctcatcttccccgccctgtccagcgccctggcaaaggctgacaactggctgtcttggggccgaacagcccctgccctgcctctgagggcccaccagcctgtgctgcatacccaccgcccagcttctccctgagggcccaccagcctgtgctgcatacccaccacccagcttctccctgagggcccaccagcctgtgctgtacaccccgttagtccctgatcccaaccttctccctcctgccagcacaccgatgcacacaccggaagtggcgagcccaagccctggggacaggtgtagggagaaaagcagccccaggcctcagactcgcttcccatcctggcatagagtgggggatggctggagggtgtctataggtacagcccgctctggctgctgccaggtgggcccctgccaggggtcctcacccctgtccaccctgtgcctggctgtccctgcacccagatacagcaacatggcctgtacccagcagagtggtggcaccaccatggttacagcggatgccccgagactctgcttggtaaacgtggcagagcagaatgggaggctggaccctgaggaagggcccctctcctggcatctgtctcttgctacctaagcctgtgcctctccctaaagagctgcctccctgctgccgagccctggtctggccacgagccactactgcctcccacaggcaccactgcctcccgctgctgcccacaggtggtgccgccaatgggcagtgccctcaggccgaagcctcaatcccccatctgagccaggcctaatcctctaatagtgatggttggtttgtcctcccataactgcaggtggattccacctggggaatgaggctgcgtgtcgggcgtctgctggccctgagacatccagtcttccacactcaactgtgggatgggagggtggcgtggccttaccccatgaggctgtccaggctctggcacacagctgtgctcacaaaatactgggtggcttggttagagctaattgtagtggagcctgcaggtgagggtgagggagggggctgcaggtcaggtaagatctggaagacagacgtacagcttggagggcagggggactctaaggcaaggagatttacagttgggaaggaggcagtggcagaggggtgagggacaggggcccttaagtccagcgaggaaagctcggtgtgggcccgctctacgctccgtttggggtgacctggaacgcctcttctcccagctccctccagccatcagcagcctcttgtcaagcttctgcctcgccccagtctatccccaaccccaaatcaagaccacctttcttcacggtcactatttattctttgttcctttttctttttgtaagaaacattcacaaaaaccagtgcaaaaccatcagtgtgggcgtcctgttttatattacaaaacttcctctggatatatcatataaaaggggggtctcacaggagagaaacgtgataaattagctctgcaatctacggcaaggaacatagtttttaaaatagactttcaacatatgacccatgggggaaggaggagggggcttctggggagacggcgggtgctggggcctcggctggtttgggaaatcctgtccgggccccttaagcatggatagagacatagacaagggaggctgtggacaggcctgagcaccaaggccagaaattaacagggaccctggggaggggccctcacccccagcccataaagagctattccctttctctaagaggcagtagcttcagagcaggaaagtggctttcgatacaggcagggtttgtgatgagcggtgtagtcttcttgttccttgccctgttagtggggtccgaggaagtctctgttatgggctgttgtatttcggggtgaaaagaaacaaagaggtatccctgcccacccctcccccacaaccccagccaccaccagaacctgctgtgggttgtatctggaccaagccagctaaaccctgtttctccctgtgctctggagggaggctcaagcctgatttgggctgagctttctttgccttgcctccaaggaatggcctcaggcagtcttgcaaatagctaccagcctgagcgaatgccaacaggagcagaaactgcctgtcttccctttccagcctaagagggtggccagtggctggctggcgagctgaatcagggctgattgagggttccttggcacatttgtagaaagctgctgaggggcagtcttgtgtctgcccttgaacccaccttagccagatttcccttcatgaccagccctttctcttgggtcctccctctgacttctgtgggccccagaagcctgggatgcccctggattagagccataaagctgtgcaatttgcctcagtcctgcccagcatggnnnnnnnnnnnnnnnnnnnnnnnnnngggtgtcatcctcagaccagccatttgcctcttccaaaaagctggggctaagcatgtgggtggttcaagaggggcagcccccaggccccaggctgggccgcggtaccagtggcaggtccccctgggtctcaggagcttagcttctacggagctcaggtgtcatttatggggttgccagagcaagctgttaaagggcgaatttggtaagactgagctcagagacctggtgggagggcaaggactggcgggcacagcaggaggagattagaggagggtccacctgaatctttgcagcaggcacagagcttctggctgcatctcagaagggggcagacgcacaggccagggaacacggggctctaggctgtggctccgagtgtccctggtgactggaaagcctgaggggaggctggaagctgatacaggatgccggtggcttgtgagacagaatgagctctttcttcctgaagagggacagaggggagagaagagagcagacatcacactgctccttccatccctgcccgtggcagacatcactaatcaaacttacggtgcctggcagacatcactcatcaggattgcactgccgtctcccactgagcccagaccaaacctcagatccccagcacagcctccagcagccacccctgatctatcagggtaggagcatcttgcaatccagttgccaacactcgtctagagtttgagaactgaatacttgtgggtgtgcatctgcgagtctccctgcccaagcctggagggaatactaagaaatgtgcggacagtgaagagacaggaaaccttgttgcagcagaaatggcctcgatgcttcgggattctttagcctggagagaagagggctcaggggagtcaatgtgtgacctcaacactccaggaaggagagtgggcaagtgggatgccatggacagagccacagaaaaacagaaacctcttctgtgtattaagctgatgctaaagtcagagcagtccaaaggcaggaggctgccttgggaggtagtaagctctctgtccctggaggtatgcaagagggtggagaagtcttggcaaggatgttgaagaagatatccaagcctcagttctgggtgtggagagggagacccagatgatcttggggatttcttccactcttggagctggggagttggggaaggacagggaagggggtggcatgtgggagaggcgggcagttgtggacaagggaatgtgatgtgcacctctgtgtgttcctggggactgagagagaggtgtggggaggtaggagcgagggcgcggtgggaagtcatggaatggtgttttcttagctgtagagcagggaggaggcagttcctggctgacttgccctctcttgtctgggggaaccgggatgctgaggccaggggtgcatgtgggcagcagagctgacagagtcctggatgcagtgacagcagcctggagacaactcagcttcttttcagaactgtcacgcctgtgctgtgtgtctgtggatggtcactgtcctctctgggcctttgagattatttggtccaacagatggggaaagcaaggatcctaccagctgggccattcttggatgccgtgttagcagctcactcttggccccggcctgaaggggggaacagtccatcctccagtggaccagggattgcgctgtgggttccgagtcctcaaagacc

SEQ ID NO: 434436 - DNA, 695 bp, Homo Sapiens
  misc_feature (80)..(80): n is a, c, g, or t
tcagtcacccatcgacctcgtccatctgggatccatccagagcttcgaagggtgagataatggtccagggctcgtcttcntgtggggctcatgggtgcaggggctgagacagttgctgactcctcggcctgtgggccagccgcaggttcaggttccctactgatcttcccactttggagtttgacctctgagggtggcataggggaaagggagacagagggaccaggggcttctggtctgtacttccggcggcagcaactgttatagtggggagctcctgtgcagagcactctgggtgataagtcgtgtctgagttagcagaggagcctcagctttggtttcttcccttctcaattcattctagatgttttggattctgctttctttcctttcccggctgcttcttgccatagaaaagctgcaagctggacagatgtttcttgcctgcgcggtgggcagtcagcatggccagggtgtccagtaccggtcgatgggggcagatggcacaagcaaagcgtccatcccgaagcatcagcgcctcatcctctggaatgtaactggctaggaggtccccgactcttcttttcttcagggagcgactgaagcggctccagatcctctccgctcacgcttactttgagcacattgagttgactccaatcgtctccttccctcttgaaagacatcacgactgt

SEQ ID NO: 434437 - DNA, 1099 bp, Homo Sapiens
  misc_feature (183)..(183): n is a, c, g, or t
  misc_feature (216)..(216): n is a, c, g, or t
  misc_feature (248)..(276): n is a, c, g, or t
  misc_feature (278)..(278): n is a, c, g, or t
  misc_feature (280)..(280): n is a, c, g, or t
  misc_feature (282)..(288): n is a, c, g, or t
  misc_feature (292)..(292): n is a, c, g, or t
aaaaatttcccccgggggttttcggccaacccccggatttcctttttatatcccccgggtttaaccctgggcttttttgggaaaatttaaatagcggcccccccttattagggaagacccgggcaagattttttcccccttttgtttcaaggaaagggtggggtccgggaaaccagctatggncccaatggggccattttcattaacctctttttnccgccacccgaccatagaatgccctggagttnnnnnnnnnnnnnnnnnnnnnnnnnnnnntntntnnnnnnnaagnttctcagcacccattgtaatttatttgtgaatgaatgggaaaagggtatcagtccaaggggagatcaggtggttcctcctcatcagagtcaaactcaacattttcatcttttacccatcgacctcgtccatctgggatccatccagagcttcgaagggtgagataatggtccagggctcgtcttcttgtggggctcatgggtgcaggggctgagacagttgctgactcctcggcctgtgggccagccgcaggttcaggttccctactgatcttcccactttggagtttgacctctgagggtggcataggggaaagggagacagagggaccaggggcttctggtctgtacttccggcggcagcaactgttatagtggggagctctgtgcagagcactctgggtgataagtcgtgtctgagttagcagaggagcctcagctttggtttcttcccttctcaattcattctgatgttttggattctgctttctttcctttcccggctgcttcttgccatagaaaagctgcaagctggacagatgtttcttgcctgcacggtgggcagtcagcatggccagggtgtccagtaccggtcgatgggggcagatggcacaagcaaagcgtccatcccgaagcatcagcgcctcatcctctggaatgtaactggctaggaggtccccgactcttctttttttgagcacattgagttgactccaatcgtctccttccctcttgaaagacatcacgactgtgagtcccagaagtgataaattctctgttccggtttcgatcccgggaattccggaccg

SEQ ID NO: 434438 - DNA, 741 bp, Homo Sapiens
  misc_feature (60)..(60): n is a, c, g, or t
tgattccaccccactttcagccttccaaaaggtgctggggatttacagggcgtgagtcanccgcgccccagcccaaaatcctccttttcttgaaacactaagtaacatctccagaacactagtattcctcagaatacacactggaaaactcttttagagccatctgtctccttctgagccttcctacctctggctttcccgtcccatacctgtacttccggcggcagcaactgttatagtggggagctctgtgcagagcactctgggtgataagtcgtgtctgagttagcagaggagcctcagctttggtttcttcccttctcaattcattctgatgttttggattctgctttctttcctttcccggctgcttcttgccatagaaaagctgcaagctggacagatgtttcttgcctgcacggtgggcagtcagcatggccagggtgtccagtaccggtcgatgggggcagatggcacaagcaaagcgtccatcccgaagcatcagcgcctcatcctctggaatgtaactggctaggaggtccccgactcttctttttttgagcacattgagttgactccaatcgtctccttccctcttgaaagacatcacgactgtgagtcccagaagtgataaattctctgttccggtttcgccactcctccaggccaccgtagcaagagcgggacagcgccttctcttttttccttctcttcctgtcggcctccgtacttccggggccc

SEQ ID NO: 434439 - DNA, 1429 bp, Homo Sapiens
  misc_feature (691)..(691): n is a, c, g, or t
  misc_feature (753)..(753): n is a, c, g, or t
tcacagttaaacattcctttattcaccctatggctcccaagaaaagcattcttcctctggagtactggtgtactaaggggacaatacaccaaatttgttgagtttacaatcaagtctactaaggttggacttccttatcagtttggcgagtcccagggcagaataatcatccatctacaggtctctgtttcctctccctccacagcagtggagagcatcccagtgtttggggcactgtgttcctcttcgtccctgcaccagaccctggaagccttggccagagacctcaccaaactcgacttgcggcgctgggccagcttcatggatgctggagtggagcacgatgacgtagcagagctgctgcaggagctacaaagcctggcccagtgctaccagggtggtgacagcctcgtggactaaagttcccagtgtgggagaaaggagctagtttgcaataaaaacagctggatgcaggagcccagtgtcttcatgcagaggagctcaatgtcgcgggactagctacaccaacatatgcactttttacatttagaaacactgtgattagaccacagaacaataaatatgtgccatcagaccaaaaaaaagtagagaaagggagctgaactccactctcgatgctatttacagagggacatctgtaaagtcttcataaaagaccttgaatgatgcntaggatggcagagcccctgggtcctactccatcctccagcctttgtccttgtcctggcctcntgctctccagatctgtaaactgggctcaaggactgtacaagcagagtacaactaccccccctccccggtgccagggcgcctgttgggtttggtcctgtgtagatgattcccagagtctcattcatccagctcctcttcagacagaaggtccccatggtcagacagctggtctgcattgctggtactggttgcatcatcctcatcctcagagctggcttcacaggcagtgtggaagagctgcatgagttctcgaaaacggtgggaaacctcagcaggggtcttatttcccagctgctgggagatgatgttgaaggtctgtggctgtgccccttgctcctggcacatggtgaggatcacacggtcagcttcccttgtccacaggacaaccttttccccagtggagctgaccttggtgttgttggcacacaccgtagcttctgcggcctttggctgctgctccccctctggacccttggcctgtgttccactgtctttagccaaaccccctctaggggctttgggagaagtctctgaggtgtcaattcctgatggagattcatggacagggcacgtcctgtctcttgtcttcacccgagctctgcttgagggcagccatctctcttgagtgtctggtttcccggacacatgtcttctccctgcatctctggtctttgag

SEQ ID NO: 434440 - DNA, 2490 bp, Homo Sapiens
gcaaatcaatatatagtgcttcataaatgttaacatgttactaaggatcagtgaatacagccctcctcctttcttaggtttcccaccattttcgagaactcatgcagctcttccacactgcctgtgaagccagctctgaggatgaggatgatgcaaccagtaccagcaatgcagaccagctgtctgaccatggggaccttctgtctgaagaggagctggatgaatgagactctgggaatcatctacacaggaccaaacccaacaggcgccctggcaccggggaggcgggtagttgtactctgcttgtacagtccttgagcccagtttacagatctggagagcaggaggccaggacaaggacaaaggctggaggatggagtaggacccaggggctctgccatcctaggcatcattcaaggtcttttatgaagactttacagatgtcctctgtaaatagcatcgagagtggagttcagctcctttctctacttttttttggtctgatggcacatatttattgttctgtggtctaatcacagtgtttctaaatgtaaaaagtgcatatgttggtgtagctagtcccgcgacattgagctcctctgcatgaagacactgggctcctgcatccagctgtttttattgcaaactagctcctttctcccacactgggaactttagtccacgaggctgtcaccaccctggtagcactgggccaggctttgtagctcctgcagcagctctgctacgtcatcgtgctccactccagcatccatgaagctggcccagcgccgcaagtcgagtttggtgaggtctctggccaaggcttccagggtctggtgcagggacgaagaggaacacagtgccccaaacactgggatgctctccactgctgctcccttgggggaaccatccagaaccatacccggtggactgcagcttgagaagaggtgggggtaaggaggagccaccctgcagggagtcagcagcagatgggaagaactcatgactccaggctgctgctgttgtaaatactgagccaagatttcttccccagtggtacatgcatgaagggcagagggtggaggtgtccctggggtgagctggcttgtgtggcatgctctgtctatacccctcagcaccactgactgggcaaagcaacgtgttccagaaggctccccacatgcagacagtggggtccatggggtggctcctccaaactgcatcagggaatcaggaagggactggcctggagccaaggggaaagggatgattgctcctgctgtcaccacctttttcccacagaagctcagcatgtcagccagatgaaccatggaaactggagaggaacacaggcgataaggaacagtgactgtgtccagggctgtagccaggatggcactgcagtggaagggcagagtggcatcataatgcaggtaagggaagctgacaggtggctcgggtcgcaggcccaggctcccacccaaggacaaggggcagacaagagagctgtgagcagtcaggtgcacgagaccaaagctgtgtttaatagacgatagatgtttctctgggcctccccacgatggtagggaccaggtagcaggccccaggtaattattccccgccctgaatattcatcttgtagcagctctgccgccttcgcgcctaccccagagaagccatcgtgcaggtcacacaggatctggaagccctgcaagtagtcacattcctccacgtagaaatgcagcctgtcctccagctcttcctggtacttgggttcctttaggacactttccccttggccaaaagcctccagccgacctgcttccccatcgtggttgtacttctgaatcatacagatgctccggggatggagatggactctgaggaagtctgaccagaccctgatgctggcctctgtagggataagtggttttggagttgtagcggtggggagtggtgaggaacctttgccattgggaatggatttgaccctccagacaccatcactactcagcactccctctgcactcagaaagtcttggagataagggttcttgggatagagttcctctttgtgtgtggtgagcttcccctgccatgctattgcagcatccaactgtttgtccctgtagagtccaccttcctcttttagggagctcaaactacccttcagatccatgaggatgagtcgcggcgtgtaggtctcctggccgtgcagcgtccggcccgtacgatacaggacgtcggggcacagctctcccgggggctccttggaatcggtcgctcggcccagcgcagcatcctgctggttccaccagtgcgcgcccacgaaaccggcaaaatgtcccaactgcagtgtgagcacctcccgggccccgcccgccataatgcgctgctccgacgggaaacgccgcgcgtcagccatcccggaaattccggaccggtaccagcgtgtgaaattgggaagaagcgggacgaagcacggcgccg

SEQ ID NO: 434441 - DNA, 862 bp, Homo Sapiens
gtctcttgccaaggcttccaaggttctgtgcagggaccggaagaggaacacagtgccccaacactggatgctcttccactggctgctcccttgggggaaccatccagaaccatacccggtggactgcagcttgagaagaggtgggggtaaggaggagccaccctgcagggagtcagcagcagatgggaagaactcatgactccaggctgctgctgttgtaaatactgagccaagatttcttccccagtggtacatgcatgaagggcagagggtggaggtgtccctggggtgagctggcttgtgtggcatgctctgtctatacccctcagcaccactgactgggcaaagcaacgtgttccagaaggctccccacatgcagacagtggggtccatggggtggctcctccaaactgcatcagggaatcaggaagggactggcctggagccaaggggaaagggatgattgctcctgctgtcaccacctttttcccacagaagctcagcatgtcagccagatgaaccatggaaactggagaggaacacaggcgataaggaacagtgactgtgtccagggctgtagccaggatggcactgcagtggaagggcagagtggcctgtaagaagacaccaagatgggcacttggcctcaggcctggaaaagaatgtgtggaggcagaatattaacaccagagagacccaggggacgaatcaggggtatgtttgaccccaggctggacaagcataggacagtgtgatctgagaggccacatcacagctgagttcaagctcgggcctcaagaacagagccagtaacagacagcggctgactgggagcatgaggaggccctgtagcctgccgcag

SEQ ID NO: 434442 - DNA, 753 bp, Homo Sapiens
cggcgcggctgaggcgcggcggccccgtgtgagcagcgcagtatggcgggcggtgcccgggaggtgctcactctgcagttgggacattttgccggtttcgtgggcgcgcactggtggaaccagcaggatgctgcgctgggccgagcgacctgattcctaagtgagcccccggtgatggagcttgtgcccctgactgtcctgtatctgtactgggccgtgacgctgcacggccaggagacctacacgccgcgactcatcctcatggatcttgaagggtagtttgagctccctaaaagaggaagtgtggactctacagggacaaacagttggattgctgcaatagcatggcaggggaagctcaccacgacacaaagaggaactctatcccaagaacccttatctccaagactttctggagtgcagaggtgagggcctctgtcctgaactttttaacccggttgccacaacctgagggtctccataggggcatgggagttgctgagtagtgatggtgtctggagggtcaaaatccattcccaatggcaaaggttcctcaccatcaccaacgtacaattccaaaaacacttatccctacagaggccaggcatcagggtctgggtcagacttcctcagagtccatcttccatcgccggagcatctgtatgattccagaagttcaaccacgatggccaggtcggctggaggcttatggccaaggggaaaagtgtctaaaggaaccaagtaccaggaaga

SEQ ID NO: 434443 - DNA, 560 bp, Homo Sapiens
tagtttgtgtgtgtcttgctggggggtggtgatgattgtctcagcactcacgcactgcacaagatggcagcaggatacagcactgcacaagatggcagctcctctgcagcttcctcctcagcctccctccttgcacccccacaggtttggcttgtggtttttgtcatcagtaacctactgcctgagatcatgatctcttaaaagatgagactctcggaagggttgattgtatgcgtcagtgagccttctatcaccttctggaacaaagtcacttgaaatctcttgatgagattaaggagtttagtgttactaagaaaatctgctttgggccgcagcagtgctgggtgttctcagacctgactgaggaagttagctgcgggctgccctgtgggctgggtgcttcaggaggaatccagagaagtgttcagatgccccccttgggctcctttctaattttaatcagctctttaaatagctgcccatctcctgtgattgcacaaccaagcactttgacatttgcaccttagggagaggcagatgttaaaatggaatccaaagac

SEQ ID NO: 434444 - DNA, 1072 bp, Homo Sapiens
  misc_feature (873)..(873): n is a, c, g, or t
  misc_feature (896)..(896): n is a, c, g, or t
  misc_feature (903)..(903): n is a, c, g, or t
  misc_feature (918)..(918): n is a, c, g, or t
  misc_feature (922)..(922): n is a, c, g, or t
  misc_feature (931)..(931): n is a, c, g, or t
  misc_feature (973)..(973): n is a, c, g, or t
  misc_feature (977)..(977): n is a, c, g, or t
  misc_feature (979)..(979): n is a, c, g, or t
  misc_feature (984)..(984): n is a, c, g, or t
  misc_feature (990)..(990): n is a, c, g, or t
  misc_feature (1004)..(1004): n is a, c, g, or t
  misc_feature (1009)..(1009): n is a, c, g, or t
  misc_feature (1013)..(1013): n is a, c, g, or t
  misc_feature (1015)..(1015): n is a, c, g, or t
  misc_feature (1028)..(1028): n is a, c, g, or t
  misc_feature (1033)..(1035): n is a, c, g, or t
  misc_feature (1037)..(1037): n is a, c, g, or t
  misc_feature (1041)..(1041): n is a, c, g, or t
  misc_feature (1051)..(1051): n is a, c, g, or t
  misc_feature (1054)..(1054): n is a, c, g, or t
  misc_feature (1068)..(1068): n is a, c, g, or t
agcggaagaccaggcgggcactgttgcccggcgacgctccggcgctgggtccccgaggcccggcccctccccgggaggaggtgggcttcgagtcacgtgacccgtgccctacgggagggggtgcggtcggggacccggcaggaggcggccgagaagagaggaccgtgggggcgttcgcgtggctcccagcccgggaccccacccccgctggacagtgggggaaactgaggcctgagcgggcccacacaggtccatgaaggtgcttctcctcacagggctgggggccctgttcttcgcctattattgggatgacaacttcgacccagccagcctccagggagcgcgagtgctgctgacaggggccaacgctggtgttggtgaggagctggcctatcactacgcgcgtctgggctcccacctggtgctcactgcccacactgaggctctcctgcagaaggtggtagggaactgccggaagctgggcgcccccaaggtcttctacatcgcggcggacatggcctcccctgaggcgcccgagagcgtggtgcagtttgcgctggacaagctgggcgggctggactacctcgtgctgaaccacatcggcggcgccccggccggcacgcgagcccgcagcccccaggcaactcgctggctcatgcaggtaaactttgtgagctacgtgcaactgacgtcgcgggcgctgcccagcctgacggacagcaagggctccctggtggtggtgtcctcgctgctcggccgcgtgcccacgtcgttctccactcccgtactcggcggccaagtttgcgctggacggcttcttcggcctccctgcggcgggagctgggacgtgcaggacgtgaacgtggccatcancatgtgcgtcctgggcctccganatcgcgncttcgccgccgaagnagtnaggggagtnacgagggtcaagcggccccggggccaaggcaccctggccgtnatcncngcggngcacancgcgggccggcgtnttctnccgngnggttcgcctgctntcttnnncngcgntggctaccgnccncggcctggttatcnccag

SEQ ID NO: 434445 - DNA, 834 bp, Homo Sapiens
accaggcgggcactgttgcccggcgacgctccggcgctgggtccccgaggcccggcccctccccgggaggaggtgggcttcgagtcacgtgacccgtgccctacgggagggggtgcggtcggggacccggcaggaggcggccgagaagagaggaccgtgggggcgttcgcgtggctcccagcccgggaccccacccccgctggacagtgggggaaactgaggcctgagcggagtgaccaccccggctatggccagccagcctccagggagcgcgagtgctgctgacaggggccaacgctggtgttggtgaggagctggcctatcactacgcgcgtctgggctcccacctggtgctcactgcccacactgaggctctcctgcagaaggtggtagggaactgccggaagctgggcgcccccaaggtcttctacatcgcggcggacatggcctcccctgaggcgcccgagagcgtggtgcagtttgcgctggaccagcttggcgggcttgactacctcgtgctgaaccacatcggcggcgccccggccggcacgcgagcccgcagcccccaggcaactcgctggctcatgcaggtaaactttgtgagctacgtgcaactgacgtcgcgggcgctgcccagcctgacggacagcaagggctccctggtggtggtgtcctcgctgctcggccgcgtgcccacgtcgttctccactccctactcggcggccaagtttgcgctggacggcttcttcggctccctgcggcgggagcttgacgtgcaggacgtgaacgtggccatcaccatgtgcgtcctgggcctccgagatcgcgcctccg

SEQ ID NO: 434446 - DNA, 994 bp, Homo Sapiens
ctggttttccccccgtgcgctgccatgctcgccgggctccctgccagcgccgttatcctcgcgacccggacctggattcggaaccattggagttggctatggctgctttccgtccctctgccggtgaaatggagttcgaattcccactccggctattttcgggccgaccctggctgcctcggcgcggaggcgcgatcctcggaggcccaggacgcacatggtgatggccacgttcacgtcctgcacgtccagctcccgccgcagggaccgaagaaccgtccagccaaacttgccgccgagtagggagtggagaacgacgttggcaccgcggccgagcagcgagggacaccccccccaggggagcccttgctgtccgtcaggctgggcagcgcccgggacgtcagttgcacgtagctcacaaagtttacctgcatgagccagcgagtttgcctgggggctgcgggctcgcgtgccggccggggcgccgccgatgtggttcagcacgaggtagtccagcccgccttctgcaggagagcctcagtgtgggcagtgagcaccaggtgggagcccagacgcgcgtagtgataggccagctcctcaccaacaccagcgttggcccctgtcagcagcactcgcgctccctggaggctggctgggtcgaagttgtcatcccaataataggcgaagaacagggcccccagccctgtgaggagaagcaccttcatggtcctgtgtgggcccgctcaggcctcagtttcccccactgtccagcgggggtggggtcccgggctgggagccacgcgaacgcccccacggtcctctcttctcggccgcctcctgccgggtccccgaccgcaccccctcccgtagggcacgggtcacgtgactcgaagcccacctcctcccggggaggggccgggcctcggggacccagcgccggagcgtcgccgggcaacagtgcccgcctggtcttcgatcgcaagaattccggacc

SEQ ID NO: 434447 - DNA, 990 bp, Homo Sapiens
ggaccggtccggaattcctgcgatcgacgctccggcgctgggtccctgaggcccggcccctccccgggaggaggtgggcttcgagtcacgtgacccgtgccctacgggagggggtgcggtcggggacccggcaggaggcggccgagaagagaggaccgtgggggcgttcgcgtggctcccagcccgggaccccacccccgctggacagtgggggaaactgaggcctgagcgggcccacacaggaccatgaaggtgcttctcctcacagggctgggggccctgttcttcgcctattattgggatgacaacttcgacccagccagcctccagggagcgcgagtgctgctgacaggggccaacgctggtgttggtgaggagctggcctatcactacgcgcgtctgggctcccacctggtgctcactgcccacactgaggctctcctgcagaaggtggtagggaactgccggaagctgggcgcccccaaggtcttctacatcgcggcggacatggcctcccctgaggcgcccgagagcgtggtgcagtttgcgctggacaagctgggcgggctggactacctcgtgctgaaccacatcggcggcgccccggccggcacgcgagcccgcagcccccaggcaactcgctggctcatgcaggtaaactttgtgagctacgtgcaactgacgtcgcgggcgctgcccagcctgacggacagcaagggctccctggtggtggtgtcctcgctgctcggcgcgtgcccacgtcgttctccactccctactcggcggccaagtttgcgctggacggttcttcggctccctgcggcgggagctggacgtgcaggacgtgaacgttggccatcaccatgtgcgtcctgggcctccgagatcgcgcctccgccgcgaggcagtcaggagctcaacgtcacgggcgcggcagcctgagcaccggggggtgccctccaagtccagacggcaatgttcctccctcca

SEQ ID NO: 434448 - DNA, 1145 bp, Homo Sapiens
  misc_feature (425)..(433): n is a, c, g, or t
ctgcgggccagagcatggggatgggggggctatggtggggaaactggatgggcgacatgcgaacacggtgagattcagacggcgaagcccggaacccagtgtggcatgtccctccaggtggcgcaaaggtactacgcgtcggcagaccttgtccggccccctaggaatagggaacaagagggtcggttaggcccccggggtcctccctttaagccgctggggagttacccgggatgtgccctcggcggacgaaggcgcgatttttgggaggccccaggggcgcccaagggtgagggccaggttcacgttcttgcaagttccagcttcccgccgcagggagccgaagaaacccgtccagggcaaatctgccccgccgagtagggagtggagaacgacgtgggcacgcggccgagcagcgaggccannnnnnnnnagggagcccttgctgtccgtcaggctgggcagcgcccgcgacgtcagttgcacgtagctcacaaagtttacctgcatgagccagcgagttgcctgggggctgcgggctcgcgtgccggccggggcgccgccgatgtggttcagcacgtaggtagtccaggcccgcccagcttgtggagtcgcagtactgcaccacgctctcgggcgcctcaggggaggccatgtccgccgcgatgtagatagaccttgggggcgcccagcttccgtcagttccctaccaccttctgcaggagagcctcagtgtggtcagtgagcaccaggtgggagcccagacgcgcgtatgtgataggtccagctcctcaccaacaccagcgttggcaccctgtcagcagcactcgcgctccctggaggctggctggccatagccaggggtggtcactctgggcggaggacaggacagctggcccaggtttctccctccactcaaccccaggtgctcacctgggtcgaagttgtcatcccaataataggcagaagaacagggcccccagccctgtgaggagaagcaccttcatggtcctgtgtgggcccaggctcaggcactcagtttcccccactgtccagcgggggtggggtcccgggctgggagccacgcgaacgcccccacggtcctctcttctcggccgcctcctgccgggtccccgaccgcaccc

SEQ ID NO: 434449 - DNA, 1561 bp, Homo Sapiens
  misc_feature (791)..(791): n is a, c, g, or t
ttttttttgcaagagaagaagagtttttattctcgaacaagaggctgggtccagctcagaacacactctttccctcctcctcccgctcagaccctgccaccaggtagacgaacagtgtagacgcccctgcaggtgtgaagagtaccagagaccccagctaggggaagctggcaggagttgggggggttcctcccagatggaatgaatggaaagaataaatcagggacttaaaggcgcaggcaggagatggagaggggtccatgggtggctcaagggtggcgtggcctctctgagccttagtttcctcatctgcaaaatggaagcagtcacgtcatcaatcatggccaaacaggtgaggccttgcaagtccccgacaaaggcgcctaacacggggcacctgcacctcccaagccgtgactggttccaggtgcccgtcgtttttctcggttttgcttttctgtcttgatgacttcatcttgggctgtggccaccctctcaggggtgtctctgtgagtgttctggctccagggacagttggagggaggaacattgccgtctgggactggaggggcaccccccggtgctcaggctgccgcggccgtgacgttgagctcctggcggataaaccaggcccgcgggcgcggtagccagcgccggagcaagcacagcaggcggaaacgccacgggtagaagacgccggccgcgcgcgtggcgccgccgcggatcacggccagggctgccttgggccccggggccgccttgaccctcgtgacttccctggattgcctcgngcggcggaggcgcgatctcggaggcccaggacgcacatggtgatggccacgttcacgtcctgcacgtccagctcccgccgcagggagccgaagaagccgtccagcgcaaacttggccgccgagtagggagtggagaacgacgtgggcacgcggccgagcagcgaggacaccaccaccagggagcccttgctgtccgtcaggctgggcagcgcccgcgacgtcagttgcacgtagctcacaaagtttacctgcatgagccagcgagttgcctgggggctgcgggctcgcgtgccggccggggcgccgccgatgtggttcagcacgaggtagtccagcccgccttctgcaggagagcctcagtgtgggcagtgagcaccaggtgggagcccagacgcgcgtagtgataggccagctcctcaccaacaccagcgttggcccctgtcagcagcactcgcgctccctggaggctggctggccatagccggggtggtcactctgggcggaggacaggacagctggcccggtttctccctccctcaaccccaggtgctcacctgggtcgaagttgtcatcccaataataggcgaagaacagggcccccagccctgtgaggagaagcaccttcatggtcctgtgtgggcccgctcaggcctcagtttcccccactgtccagcgggggtggggtcccgggctgggagccacgcgaacgcccccaaggtcctatcttctcagccgcctcctgccgggtcccatcccgaaaattccggacc

SEQ ID NO: 434450 - DNA, 702 bp, Homo Sapiens
tgcacgtagctcacaaagtttacctgcatgagccagcgagttgcctggggctgcgggctcgcgtgccggccggggcgccgccgatgtggttcagcacgaggtagtccagcccgcccagcttgtccagcgcaaactgcaccacgctctcgggcgcctcaggggaggccatgtccgccgcgatgtagaagaccttgggggcgcccagcttccggcagttccctaccaccttctgcaggagagcttcagtgtgggcagtgagcaccaggtgggagcccagacgcgcgtagtgataggccagctcctcaccaacaccagcgttggcccctgtcagcagcactcgcgctccttggaggctggctgggtcgaagttgtcatcccagtaataggcgaagaacagggcccccagccctgtgaggagaagcaccttcatggtcctgtgtgggcctgcagagggacaggggacagaggtggccggcacaggcccgctcaggcctcagtttcccccactgtccagcgggggtggggtcccgggctgggagccacgcgaacgccccacacggtcctctcttctcggccgcctcctgccgggtccccgaccgcgccccctcccgtagggcacgggtcacgtgactcgaagcccacctcctcccggggaggggccgggcctcggggacccagcgccggagcgtcgccgggcccgct

SEQ ID NO: 434451 - DNA, 1266 bp, Homo Sapiens
actctagaggatacaattactctcctcgcacctcagacatgcgcttctgtcacacttaagatatgcatgcattggatcacccagccctggtctttctgcctccatggataactgcatgaccctgagagaaaacctccttagatttagcatcctaggttcctcacacgcctcaccctgaatcctggccctcccgcagccccagcgccatttgtcccatcagtgacaagattcatattctgatgtagactctgttgccagagccagtgttgagccagtccgcctcttccccgggaagtgcctgcccttccctcctgttagggttggctctcgagcttgtgtgccagttcctgggttggccgtgagagttctacagacaaggaggaagtgctctcggtgtatttcctgtggtgggttcacacgcagctagacacagctaacttgagtcttggagctcctagagggaagcttctggaaaggaaggctcttcaggacctcttaggagccagagaagaggacgttgtcacagataaagagccaggctcaccagctcctgacgcatgcatcatgaccatgagacacaactggacaccagacctcagccctttgtgggtcctgctcctgtgtgcccacgtcgtcactctcctggtcagagccacacctgtctcgcagaccaccacagctgccactgcctcagttagaagcacaaaggacccctgcccctcccagcccccagtgttcccagcagctaagcagtgtccagcattggaagtgacctggccagaggtggaagtgccactgaatggaacgctgagcttatcctgtgtggcctgcagccgcttccccaacttcagcatcctctactggctgggcaatggttccttcattgagcacctcccaggccgactgtgggaggggagcaccagccgggaacgtgggagcacaggtacgcagctgtgcaaggccttggtgctggagcagctgacccctggcctgcacaggcaccaacttctcctgtgtgctcgtggaccctgaacaggttgtccagcgtcacgtcggtcctggcccagctctgggtgaggagcccaaggagaggcctccaggaacaggaggagctctgcttccatatgtggggaggaaagggtgggctctgccagagcagcctgtgaactaatgcccagcattcctcaaggtcagccagacaaaaaggaacttaggtcttgggcagaggaggtgtagcctggggcaaagtgatgagatgtccctcct

SEQ ID NO: 434452 - DNA, 926 bp, Homo Sapiens
  misc_feature (457)..(551): n is a, c, g, or t
gaaacaaatattttattctcagtctttcaaatcagtataaaggtctgggtttccttcccactgacagctcttcttctagtttcactgaaaaaaggggtgttagtatttttatcttggacactctcttccaaatcctttcagcagctcctcttctttatattctgccacatcgacctctaaaccggaattgtccttcagtttgccgtggtgcttgagatagtaccgctggttctgaaagaacttgatgatggtgtacttgggaaggtcgagctgggcagacagagtctggatggcctcttcgtcagggtacaggcccacgtcttgtatgaaactctggaggattcccaaggcttccactgaaatttttgttcgtggccgggtcttctgtcggttttcctcatctgactctgctggagaggccaccgtgggttgccgtggggggagccgagggcctgtnnnnnnnnnnnnnnnnnnnnnnnnnnnnnnnnnnnnnnnnnnnnnnnnnnnnnnnnnnnnnnnnnnnnnnnnnnnnnnnnnnnnnnnnnnnnnnngaacatggataatgtggggcggcctgtcgccatggtgatgcaccgcgttgctctcctgttcataaatggcatcacgttctggctgaggaagactgaggaaccttcggatcatggagaggttctcccacagggttctgttttctggagaaggatcttctttccagcgtaacagctcgcacaaccatccctggcttttggttgctgcaacctttgcaaacagtgcttgagacactttagcacgcttcatttcctgctgaatctcatcataaatggaagcattaatgttcatggtattgttctctggtttcccattcctttcagtggcaatagtagctttttcacctgggaggatccggagaatccggaccggtccag

SEQ ID NO: 434453 - DNA, 787 bp, Homo Sapiens
cagagtatcaactaattttgcccaaggccacacagcaagttgcagcaaacaagatttaaacctgggaatttgctatctggtcccctaagggctttataaacatgggctgagcctgccctttgcttggaccctctgtctcccaacccaccttccgccaaggccatcgcgactccacaagaacacagaatttgcaggcccaggaaaagaaggcagacgcctcaaacacaaaacatcttgttatgcaccaggaacaaaaactgtgcccaagaagtcaccttgcattttgtaatcagtgtaataaactccaacccacattccccaaacatgtcaggaagggctgcggaaaaaagatgtccctttaataaaacgttatcaacatatatcgtacacaaactacaatgtatcataattacttttttttcctctcttaattcagaaccagactacaaggtaagaaaaaacacagaaacagctacaatgttcccaataatccgcacaaagtcttttttcaggcagatgatatctcacataatatgatatacatggatcagaaagggagggagtaaaacaaagaccagctacaggggagggaggaaggagaagggcatgtcaatgtacaaagaattcgggtgtcttccagggcaagacacaaaggtttccgtggggtgatgaggtgagtggggccatgagcaccctcccgggaggggacaggctccactgtcgggcttgttggtttttgaaagtaaaaacaggactggagccagcacgtctgtttggttgtcggtgt

SEQ ID NO: 434454 - DNA, 1501 bp, Homo Sapiens
  misc_feature (523)..(535): n is a, c, g, or t
  misc_feature (537)..(632): n is a, c, g, or t
  misc_feature (1465)..(1465): n is a, c, g, or t
agtttttcttttttactgcttatgttctctcttttctaagtgaaaatgtttttctcctgacagaaaaatagcatatgtttattacattaaagcattttaaaaatactataaagtgaataaaacttaaaatcttgccacccagaagaaaacattgttaacacttcgttatacatccttggagccttttacccctaatgatgggggtatatttgtgtgagtgtctatgttatagtgctgtaggctgtttttaaaaactctgtgccagggaaattagtaaatacagtcaagtgttgtaactgcataaatgtagtgagttcattataaagacatacttaaaaataccaatcttgctattggtagatttaggtgtttctcatttttgctgttctaaataatgctgcaatgaatctatctggttgttttgtaagcacaaaattgaagtagtgttggaggtaggggagaagacacatgcacttaggataggtgacaaccagctcctcactagggtgcaacagtttattcnnnnnnnnnnnnngnnnnnnnnnnnnnnnnnnnnnnnnnnnnnnnnnnnnnnnnnnnnnnnnnnnnnnnnnnnnnnnnnnnnnnnnnnnnnnnnnnnnnnnnnnnnnnnntggtgtgagccaccatgcccagccatttatgttcttgatgagggccaactttccctcttccacaagggattaatcttagaactatagccaatttattataagtactatttagctactctgtgctccacacatcacggagtaatatctttcaaactatgaggtttagtaacacttgactgctgaggtttatttcctcagctctgatgcttcctgggtgaagatgtaagttattaaattaactcaaattttaaagctaacacttcattccatctagaccaggtagctcgctcatttgtacgctctgataggtgcttcaacatctcagaattggcttatttttcatgcattgcatattgtactcatttgtaatattggaatgtaaaatgttcttactaagaatctttatgtcagctattcaacatttccctactttataatttctagctgctttaccatttagcaactttaaatttttatgcagttaatatgtttctttggtttttatgttttctgaatgtctttaatgcacattaatgtatacttagtagatacacatttacacattgagaagtgaagataggtttgtgttctgtgtacaattaggacatccattaaaaaagatttttaaaaactgtgaatgggaaaacatgtttttcctcctgtcctaaaatagaacctgatgacgggagggagcatcagtcagtctggcctaaatcagtgtactgcgcttttggatgcgggcaaaagtattgtcatgttgattactttataataacgtattaatatcattggctcaaacagttgtgatatatacctagtaatcatcgaggatntcaaagatatgcaccagtttgaataaatgctgttta

SEQ ID NO: 434455 - DNA, 1117 bp, Homo Sapiens
  misc_feature (851)..(911): n is a, c, g, or t
ccagtgagctgaccaagagtgacctggacaccctgctgagcatggagatgaagctgcggctcctggatctggagaacatccagattcccgaagccccaccccccatccccaaggagcccagcagctatgactttgtctatcactatggctgagcctggagccagaaacgacggtacccaggagaagggattttgggcccaggagaaacacttacattctggtgccttgtcttttgcttgtacagaatctgtagtgattttggtggccagtaaatgccagccatttctcaaacccacctcggaccacccagagtttcctcttggtccctgtctactaagagtcatgaaggcagggtgctctgcccactccatcaccatgaagcctgggattgggccacgaggaacaaacagcagatgcccttgccttccagtccaagaaactgcttcttgaaatggatttaacaacagccactcaccttttcctcctgagcctgctctctgatcagctggatccccacgtgagcaacagctggcccaggaaaggctgcctgcagaggacaggtgtgttgggcgtgttgagagccttgaagtgactacctgtatcttagatctgagtacaagcctgaggtttttgcttttgtcttttttgatgagggctcactcccccttcatatggtgcccaaacgttgctgcctctcaagttggccctaacatctccggctctttatagccacccaattctctctggcccgttacagatatccccaccaccaccggacatttgtctgccctgctaacctcctccagtcaccgtccccccccaatttccaaatacggtgcctggatcaaagnnnnnnnnnnnnnnnnnnnnnnnnnnnnnnnnnnnnnnnnnnnnnnnnnnnnnnnnnnnnngaaggcctgggagccctccgaccacggggtgacggctcacccctgcactccctcctgctcctgtccccccacttttaatgccccgttctccctttccctccgaaaagaaaattctcccccccagacccggaaaatgccaaccaccccctcccaacatttttggttaaccctataggagcctctcccccgacatcgccgcgtagcct

SEQ ID NO: 434456 - DNA, 1077 bp, Homo Sapiens
  misc_feature (12)..(12): n is a, c, g, or t
  misc_feature (14)..(14): n is a, c, g, or t
  misc_feature (19)..(20): n is a, c, g, or t
  misc_feature (28)..(28): n is a, c, g, or t
  misc_feature (33)..(33): n is a, c, g, or t
  misc_feature (38)..(38): n is a, c, g, or t
  misc_feature (58)..(58): n is a, c, g, or t
  misc_feature (63)..(63): n is a, c, g, or t
  misc_feature (67)..(67): n is a, c, g, or t
  misc_feature (72)..(73): n is a, c, g, or t
  misc_feature (87)..(87): n is a, c, g, or t
  misc_feature (119)..(119): n is a, c, g, or t
  misc_feature (123)..(123): n is a, c, g, or t
  misc_feature (162)..(162): n is a, c, g, or t
  misc_feature (173)..(173): n is a, c, g, or t
  misc_feature (177)..(177): n is a, c, g, or t
aaaatcagatcncncgggnnggtgaatntcttngagtntctccatctcctttccaaantctcnctcnccctnnccaccccgtcattntccccggaaacaaataggatggctcactggtnattnttaacatgtaaaacaccaaaagcagagaaacgccccctngccaccccccncccnccaaaccccagtgctgggagcgcagccggcgggcgaggctgcctggaacgtggagctgctggagctgtccggctgacctggaaagttctttggcctctaggctttacctggaggcctcttcccttcagctccttgtttttccgcacctcctcggcgtgcttgtccttctcttgcagccgttccaacatggcggcgaggtgggcctccctgttctccttgttggattccatcttctgggccagtttttccttagccatcttgatgaagttgttgttttcctcaatggccttttggatcacctctctctcatgttcccgtttctctgctaggtgtttcaggagctccgcttcctggtacttccttcgctcctcagccgcttctagtttcttctggatctcttccagggatgggtctcgccgccttggcagggaggcgttgaactcgggaaccccatcaaaggagggtggcttcaggatgacttcaaaggattggcccgaggtgcatttgttcagctcgatgacttccatgtcggaaatgacgcaccaattcaggtccaccgtgtctgcctgagctcttctttctctccagtcagcactgtctttccgctggctttcatccttcctcctacactgtctcccacaccagccttcatatttgtaggacgacttattcaggggatcggccaggaagcaggagcagaacaaggacaccagcgggagctccttcatcttctctttgtaggcagcaagggtcatgtttctgggatctggtggctgaatctagctgaaagttacagagtgggtctgtcaccagcttgggacgctgtcaccaacgtgcagtccagttagaagcgagctgctctcttcctcactccctcaattagatggtaccctgggcatc

SEQ ID NO: 434457 - DNA, 863 bp, Homo Sapiens
  misc_feature (64)..(84): n is a, c, g, or t
gcttcactggtcaattcttaacatgtacaaacaccaaaaagcagaggaaacgccccttggccannnnnnnnnnnnnnnnnnnnnagtgctgggagcgcaagccggcgggcgaggctggcctggaacgtggagctgctggagctgtccggctgacctggaaagttctttggcctctaggctttacctggaggcctcttccttcagctcccttgtttttccgcacctcctcggcgtgcttgtccttctcttgcagccgttccaacatggcggcgaggtgggcctccctgttctccttgttggattccatcttctgggccagtttttccttagccatcttgatgaagttgttgttttcctcaatggccttttggatcacctctctctcatgttcccgtttctctgctaggtgtttcaggagctccgcttcctggtacttccttcgctcctcagccgcttctagtttcttctggatctcttccagggatgggtctcgccgccttggcagggaggcgttgaactcgggaaccccatcaaaggagggtggcttcaggatgacttcaaaggattggcccgaggtgcatttgttcagctcgatgacttccatgtcggaaatgacgcaccaattcaggtccaccgtgtctgcttcatatttgtaggacgacttattcaggggatcggccaggaagcaggagcagaacaaggacaccagcgggagctccttcatcttctctttgtaggcagcaagggtcatgtttctgggatctggtggctgaatctagctgaaagttatagagtgggtctgtcaccagcttgggacgctgtcaccaacgtgcagtccagttagaagcgagctgctctcttcc

SEQ ID NO: 434458 - DNA, 1720 bp, Homo Sapiens
  misc_feature (50)..(63): n is a, c, g, or t
ttttttttgtcaatgtttcattggtcatgatgatcaaaaaatgatggttnnnnnnnnnnnnnngacctcatcccacctgctgcagggtggaagcaacaccactggtactcacaccccctctggctgggttctctggtgcgccctgcagccgctgccccacccaggactctgtccttcaccctgaagttctaccgccctggttttcatctctcctcaacatggtgcctggaggctcaatgtccaggtagagatgtgaaaatcagatctgcgccgggcagggttgcaatgtccttgagttcttctccatctccctttcccaaactctctcctctcccctctcccaccccgtcattgttccccggaaacaaataggatggcttcactggtcaattcttaacatgtacaaacaccaaaagcagaggaaacgccccttggccacccccctcccccgaaaccccagtgctgggagcgcagccggcgggcgaggctgcctggaacgtggagctgctggagctgtccggctgacctggaaagttctttggcctctaggctttacctggaggcctcttccttcagctccttgtttttccgcacctcctcggcgtgcttgtccttctcttgcagccgttccaacatggcggcgaggtgggcctccctgttctccttgttggattccatcttctgggccagtttttccttagccatcttgatgaagttgttgttttcctcaatggccttttggatcacctctctctcatgttcccgtttctctgctaggtgtttcaggagctccgcttcctggtacttccttcgctcctcagccgcttctagtttcttctggatctcttccagggatgggtctcgccgccttggcagggaggcgttgaactcgggaaccccatcaaaggagggtggcttcaggatgacttcaaaggattggcccgaggtgcatttgttcagctcgatgacttccatgtcggaaatgacgcaccaattcaggtccaccgtgtctgcttcatatttgtaggacgacttattcaggggatcggccaggaagcaggagcagaacaaggacaccagcgggagctccttcatcttctctttgtaggcagcaagggtcatgtttctgggatctggtggctgaatctagctgaaagttacagagtgggtctgtcaccagcttgggacgctgtcaccaacgtgcagtccagttagaagcgagctgctctcttcctcactccctcaattagtggtaccctgggcttctctcaacatcagcaccactgctcgctcttgccatgacatcacctccaagctctgtgattggccagtcagtgggttgtcttggcaattggacagtctcctctggtggagcagggattgcctgagtgagtaactccttagcaggccagggagtgaaagatgatgtcagacaaagagcctgctttctctgctgcctgtggagctggagaaccagaggggtgagggacggagaggaagaaagaaagagggagtggtacagagaaggttggggagaagccatcagcttgcgagctgggggtataatgaatgatttgccaggatctattaggtcctttaaatttgggggtgagagaatatggaatccagtagaagaaataaaaaagaacagatgaacccgtaaacatagcttcctggagggcttggtgcatgtttccagctctgtcagcacggctccgct

SEQ ID NO: 434459 - DNA, 512 bp, Homo Sapiens
  misc_feature (357)..(357): n is a, c, g, or t
  misc_feature (459)..(459): n is a, c, g, or t
  misc_feature (486)..(486): n is a, c, g, or t
gaggaagagagcagctcgctttctaactggactgcacgttggtgacagcgtcccaagctggtgacagacccactctgtaactttcagctagattcagccaccagatcccagaaacatgacccttgctgcctacaaagagaagatgaaggagctcccgctggtgtccttgttctgctcctgcttcctggccgatcccctgaataagtcgtcctacaaatatgaagcagacacggtggacctgaattggtgcgtcatttccgacatggaagtcatcgagctgaacaaatgcacctcgggccaatcctttgaagtcatcctgaagccaccctcctttgatggggttcccgagttcaacgnctcccttgccaaggcgggcgaagacccattccctgggaggagattccagtaaggaaacttggaaggcgggtttagggagcgaagggaagttaccagggaagncgggattccttgaaaaacaacttaggnaggagaaacggggaacatgagaagaa

SEQ ID NO: 434460 - DNA, 950 bp, Homo Sapiens
  misc_feature (851)..(851): n is a, c, g, or t
  misc_feature (882)..(882): n is a, c, g, or t
aatgtttaacttttctttgtaaaaaacttattaaaaaacttaaatggtcagttaaagttaaaaatctattgctgcacaatttaactgattaaaagatttccagatctcttgactccaagagtcatttctttcatttcttacagatctcacacttccagatttctctttagcaaacatgatctgaaatcatttgtaggtaatcagcacttcaagcatatggaggctctggctgaggcagcagagtcctgggagactgaacactgggagattcagtgtcccccacagaaacctagacctgggctcagcccaccactgctaggggtcctgcacaggacccatgtggctcctgcacgggatctatgtggcgaacctgagctcgatcttcgctgtcagtcctcctggtctctcctgagggccgccgacccgccacagtgtggctctccttccaaaagccagagcttcattccactttgattctcatcagctcccatcttcctcctccacagagtttcagaaccaaggaatgaaacttctcaaggctctgccgatgtcccacactgatgaacgtcatccccagctgctggccgatgcgatagagctcgctctccacttcctctgtcagggcactggtggcttcatcaagctactgcgtacttcggctgcaggtagaagagtcgggcaaaggagagccgttgcatctcccccggggacagaacatcataccagttccagtccacctgctggtccaggccctctgtccttgccaccaagttggactgtaacagacccagagggcaggatgtccatgaaatggccagccctgctacctgccatcatggggaacctccctnactccccagcatacacacacacctctaaaanaaatatatgccccagtggcataccaaggcgggggactgtgggacagtctgccccaggcagagaggaat

SEQ ID NO: 434461 - DNA, 2607 bp, Homo Sapiens
  misc_feature (7)..(7): n is a, c, g, or t
  misc_feature (9)..(9): n is a, c, g, or t
  misc_feature (51)..(51): n is a, c, g, or t
  misc_feature (61)..(61): n is a, c, g, or t
  misc_feature (66)..(66): n is a, c, g, or t
  misc_feature (78)..(78): n is a, c, g, or t
  misc_feature (81)..(81): n is a, c, g, or t
  misc_feature (89)..(89): n is a, c, g, or t
  misc_feature (126)..(126): n is a, c, g, or t
  misc_feature (226)..(226): n is a, c, g, or t
  misc_feature (256)..(256): n is a, c, g, or t
  misc_feature (274)..(274): n is a, c, g, or t
  misc_feature (292)..(292): n is a, c, g, or t
  misc_feature (326)..(326): n is a, c, g, or t
  misc_feature (334)..(334): n is a, c, g, or t
  misc_feature (356)..(356): n is a, c, g, or t
  misc_feature (371)..(371): n is a, c, g, or t
  misc_feature (373)..(374): n is a, c, g, or t
  misc_feature (376)..(376): n is a, c, g, or t
  misc_feature (400)..(400): n is a, c, g, or t
  misc_feature (1715)..(1715): n is a, c, g, or t
tttttantntttaacttttctttgtaaaaaacttattaaaaaacttaaatngtcagttaangttanaaatctattgcngcncaatttanctgattaaaagatttccagatctcttgactccaagantcatttctttcatttcttacagatctcacacttccagatttctctttagcaaacatgatctgaaatcatttgtaggtaatcagcacttcaagcatatggnggctctggctgaggcagcagagtcctgggngactgaacactgggggantcagtgtcccccacaganacctagacctgggctcagcccaccactgctaggngtcctgcncaggacccatgtggctcctgcncgggatctatgtggngnncntgggctcgatcttcgctgtcagtnctcctggtctctcctgagggccggcgacccgccacagtgtggctctcctttcaaaagccagagcttcattccactttgattctcatcagctcccatcttcctcttccacagagtttcagaaccaaggaatgaaactacaagagaccaccaccacatggagatcaggctgccctggccgccggcagaggaggccactcggttctctctgctactgctactccccgtttgaggggcctctggccctggccaggctgagcctttgggttctttctcctcctcaggccatccttgtgagcacgggtaccttctcaaggctctgccgatgtcccacactgatgaacgtcatccccagctgctggccgatgcgatagagctcgctctccacttcctctgtcagggcactggtggcttcatcaagcactgcgtacttcggctgcaggtagaagagtcgggcaaaggagagccgttgcatctcccccggggacagaacatcataccagttccagtccacctgctggtccaggccctctgtccttgccaccaagttggactgtagctggtgctcccaggtgggctcgggtcctgagggtccctctccccacttaccaggcctgccaattccaagaacctcaagatcctctcattatcggcagaacctgagtcggggtagacctccttcaggggatatatcacctgctcccgaagggtcccgtcagtgaagaatggcttttgtggcaggaatagcaccccatggggcccaaagtccgtcagcatctgcactgagccccgtgtactcgtccagaggccacccagaacccggagcaaggaggtcttgccagtgcccgtgttgcctgtgatgagcaggctctgtccctcggagatctttaggctcagatccttgattaggggtttgtcagaggagggggcagagatggagacccgctcaaggataaatgctgtgtctgctggctctgccgctggccaccctgggggtgtgtccaagccccacttgctctcgcccaggatctcgcagtcctgtgacttcagggacatgtccagaagcgtctcccgaagctgcccaattctgtgcgtgtagccagccacatctgagagcgtcgtggacaggtcgattagctgggtgaagcagctgatgaggtagatgcacacaaaggcattcttgctgaccagggtgctaagctctgtgggactcaggtctccatagactccgctgaaaatggggatttcgatgacaacgtaactcaggatgctgcccagatagtcaaaggtgttgatgccgactgtagaaagcagcagntccgcattcacccgaatctgcatgtgcttgaacctaaaatctccctccagcttctcctgatgcaccagcttcatcacaatggggcccatcaaagttttgttcaccacgggtccccaaggatgaaatacccgaagatgctcaacaggcccgagccagcctgtgctttggaagcactggtaagtgtagtagacgagggtgaacggggagatgatgagcttgctggccatgctgctgagctgccggcagaatcgctccacgtcctggctgatgcgctggtccctggagccaatgacacagagtagctggacccagggagatgggcccaaaggtagagagaacaagaaactttcacatcacctctgctcttgaccttgcctcacagtgctgtgaacactgaccctatgggaagagggaaccagacaaggctggtttcctaggggcaactaaatcccagggcctttaaacagggttctagagagttgcatcttacggtgcctcagttaatcccctgaaaaagtgggaactgaaaggtccagtacccaggggcctgagccagctctgagcagagccaaagaaaaacttgaaggtagatgagctgttttggatgatcaagaagactatcccctttatctcaatcctcccaaatttctcttatataagccctagcctggcccctttagttatctggctgtgaaagctccaggctgtgaggcacacctgtagtcccagccactcagggggcagaggcaggatggaagccatagccatcagaaagaggcctagaagttaggcagcagcagcagcctcccacgcatctttgcaccaaagctaagcttgagctgagaggtaccccaaccaacaagtgcatcccaaatctccggccgtaccagcc

SEQ ID NO: 434462 - DNA, 1210 bp, Homo Sapiens
  misc_feature (1121)..(1157): n is a, c, g, or t
ggccaagcccacttttgaaaaacttttcggggccaggttcggatgaacctgggggaagcccgcctaatgaggtaagatgccccaccaaaggcattttttggtgaccagggtggttaagctttggggggattcagtcttccatagacccccgctgaaaatggggattgggaagacaacgtaactccaggatgctgcccagatagtcaaaggtgttggatgccgatgtacagccagagttccttggacatcaagctcccttctggtctggaaggagtctctgcagctgcgggtctgtcctcatgtgctccacatgcccagctctgttagaaagcagcaggctccgcattcacccgaatctgcatgtgcttgaacctaaaatctccctccagcttctcctgatgcaccagcttcatcacaatggggcccatcaaagtttttgttcaccacggtccccaggatgaaatacccgaagatgctcacaggcccgagccagcctgtgctttggaagcactggtaagtgtagtagacgagggtgaacggggagatgatgagcttgctggccatgctgctgagctgccggcagaatcgctccacgtcctggctgatgcgctggtccgggttatcgatgtcatcccgcagcacgttgagggtgtagtacgcacggccccggaagtagaggcggtgaaggtgctcagtgaggtccttcctccagctcacatacagcaggttgcaggtgaactgatcaaagctcttcagcgtggagttcagaacaatgagcatgacagccaggaatgtcagagtcttaaacccttccaagtctttgtttcccaggaccccatagtactgactggggatcaagccaacctggtagatcacaaattgctccagtagggtcaggcacaaaagggtcaggaacatcaaggcattttgtgatgaccaagaaggaaacaaaaccttcagtatctgcaggaacggctggagaaattgcagatctaacctgggcctggcgccagctccgggcgcgggctcggcgaccgccatgacctgagacccgagggactctggagcccagctgccccgccgctctcgacgaattcgagctcggccgatttggcctgatnnnnnnnnnnnnnnnnnnnnnnnnnnnnnnnnnnnnncgccgccaccgcgtgcagctccagttccccatatgatgatctttccagggccc

SEQ ID NO: 434463 - DNA, 832 bp, Homo Sapiens
cgcttccgggagagtccgcgtctcccgcaccttcctctctatcaaacgccgtctctgtggtagccggggccccgcccctcctcggactctacccagtacttgaactaggggcagctgggctccagagtccctcgggtctcaggtcatggcggtcgcggggcccgcgcccggagctggcgccaggcccaggttagatctgcaatttctccagcggttcctgcagatactgaaggttttgtttccttcttggtcatcacaaaatgccttgatgttcctgacccttttgtgcctgaccctactggagcaatttgtgatctaccaggttggcttgatccccagtcagtactatggggtcctgggaaacaaagacttggaagggtttaagactctgacattcctggctgtcatgctcattgttctgaactccacgctgaagagctttgatcagttcacctgcaacctgctgtatgtgagctggaggaaggacctcactgagcaccttcaccgcctctacttccggggccgtgcgtactacaccctcaacgtgctgcgggatgacatcgataacccggaccagcgcatcagccaggacgtggagcgattctgccggcagctcagcagcatggccagcaagctcatcatctccccgttcaccctcgtctactacacttaccagtgcttccaaaggttcaagcacatgcagattcgggtgaatgcggagcctgctgctttctacagtcggcatcaacacctttgactatctgggcagcatcctgagttacgttgtcatcgcaatccccattttcagcggggtctatggagactgagtccc

SEQ ID NO: 434464 - DNA, 908 bp, Homo Sapiens
atcaggccaaatcggccgagctcgaattcgtcgagagcggtggggcagctgggctccagagtccctcgggtctcaggtcatggcggtcgcggggcccgcgcccggagctggcgccaggcccaggttagatctgcaatttctccagcggttcctgcagatactgaaggttttgtttccttcttggtcatcacaaaatgccttgatgttcctgacccttttgtgcctgaccctactggctgaagagctttgatcagttcacctgcaacctgctgtatgtgagctggaggaaggacctcactgagcaccttcaccgcctctacttccggggccgtgcgtactacaccctcaacgtgctgcgggatgacatcgataacccggaccagcgcatcagccaggacgtggagcgattctgccggcagctcagcagcatggccagcaagctcatcatctccccgttcaccctcgtctactacacttaccagtgcttccaaagcacaggctggctcgggcctgtgagcatcttcgggtatttcatcctggggaccgtggtgaacaaaactttgatgggccccattgtgatgaagctggtgcatcaggagaagctggagggagattttaggttcaagcacatgcagattcgggtgaatgcggagcctgctgctttctacagagctgggcatgtggagcacatgaggacagaccgcaggctgcagagactccttcagacccagagggagctgatgtccaaggagctctggctgtacatcggcatcaacacctttgactatctgggcagcatcctgagttacgttgtccatcgcaatccccattttcagcggggtctatggagacctgagtcccacagagcttagcacccttgtcagcaagaatgcctttgtgtgcatcta

SEQ ID NO: 434465 - DNA, 230 bp, Homo Sapiens
  misc_feature (186)..(186): n is a, c, g, or t
ccaagcatagcagggccagcacctgcctacctgtagctggtgctcccaggtgggctcgggtcctgagggtccctctccccacttaccaggcctgccaattccaagaacctcaagaacctctcatcatcggcagaacctgcacaacaaagaagccttctgcaaaaagccagagcctcctggctggtnaaaatagacagggcaaggctgtgcacaagtgctcacgcctgtaa

SEQ ID NO: 434466 - DNA, 2445 bp, Homo Sapiens
tttttgacaatgcgaatctgttgatttatttacggctcggtgagacgacgctggacgctggttagggtaagggttagggcaagcattagcagcaggggcatggccctgggaagcacctggaccccagaacataagacaggagggagagatgccatccattcagcgggcacttatgcccacgaccagctgagccagaccagcattcccatttcaccaccccttactcctcaagatgcaaatgaagctcagggctgggcggaagctggcagggctgtccacagggaggacccccgtgtgtctctcgggctgcccaggtggctctgtccacccttctgtctgggaggctccttaagggtggggagggcccagagggaaggagatcctgaggggctggcagattcaggccctccctgcgagctgaggtttgaagaggagagcagaccacccagagtagtgggagaaagcaccggcagaaaagctggcatatccaccgagggcctctctgcttcttttgacctttttcagagtttcagagttatgaaccaaatcgccttcatgagagatgacgaatcagatgctacatagtgggggaggcggcactggcctggctcccccacttccccaggacctccgcctggaggaagcctgcccagggccgcagccctgcccccaaagaccccaggacagaccagagctcctgctggagccgggtgtccccatgctgacctggccatgtccccaggtcccaccccagggtcacttcctgtagctccgacttctctagtggctgattgcagttcccagaatgtataacatcccagggtgccagagcccacccaagcagccactcctgtccagttcccagaatgtataacatcccagggtgccagagcccgcccaagcagccactcctgtccagttcccagaatgtataacatcctagggtgacagagcccgcccaagcagccactcctgagtcactcgggcatgtccaggactcaggtccacacagacagtggcaacagctagccctgggcatctacccccatgaaggggaccctcggttctgcgagagagatccccgaagtgggaactgggcccccatggtgcccagtgcctctccccctctcctctgccactctgccctgcacccagaggcagcgctggaggccttactctaccactcagggcttctcaaacctctggttccacttttctccttttaagctttccattttgtaaactcacctcccccttcccaggcttgggggtccaaggaaccccagctggtgggagaagcggctgcactgtggtgcagggggtggtgagtgagcgaggaggcactagtgtggggcagctacttcacctccctgtgcctctgtgtcctcctctgtcaaaggggcaagataatggctcccattgccgggctgctatacagtgctcagggccacagtgcagtggggggacccacgtccatcgccaccttgatgcatacaacccggacaagtttactgctgtgatttctgccggcgctgctgtgccggttccctggtgctgcacagccacgcactccccatgagtgggcctgcccagcattagctgagtgccttctgtgtgctctacgccaggtgccaagggcaggccagccaggcagaaccatgtgtggggctgggacaggtcagggtggtggaaaggtggacagaaggaggcaggaggcaggtgtgagaagctgcccaccccacccctcaacaccacagcacttccagctccagcaggtccttgttctcagctgcccctgagccatgggtggccaggtctcctccccatcaccccactgagactcgagacagggaggacctgatcctggagtccctcccagccctggctgaggaagccacccaacccgacaatgggcttgcgcaagccgcgcagtgactgctcccagcctctcccaaggacttaggagcccaaagccgcctccctcccggtgagcatcccaaggcatcgctggctgcagctgagagggcctcatttgggcactgccctgaggctggcacttgcaggtgggggcccttgggagctctgggaggcacctggcagcctcccagacaccccgggccggtcctgctctccaggcttagggctacagccacaaccactgggggtaggggcgaggggagtccaggcccaccctgtgctggcagcaactccttcccagctctgggcccagtatgatgcccatcttccctctggggagtcacgttcctcccgctccgggcccgttcccacccaaggtccctttgcagaagactggcactgtcctcctccagcgggaactgggtgtgccctcagcaagactctgccccctcccatcctcatgttctcaggagactgaagctgggcactcagaaccagccccaggagcagaacgcaggcctgcatata

SEQ ID NO: 434467 - DNA, 1100 bp, Homo Sapiens
  misc_feature (93)..(93): n is a, c, g, or t
  misc_feature (469)..(528): n is a, c, g, or t
  misc_feature (862)..(862): n is a, c, g, or t
tgtacttgaccatgttggctcacacagggcaatgcaaaagaagtcaaaacattcatatcaggtcttggtatctgtgtcaggagaaacgtggtngctttcacagcttcttcacctctgtcctctgtcatgcaactccatttttggctaggtactatttcacatgcacactgtcctgggtgccagaaatacttgtggtgtacttggtttgagcagtacctctagtatgcaccattccagggaacatggttgtcaacataacaagtttagtgtgtgtatttgcagacaacatagccctgaaagcatgaaatgtagaataggtaaggtctgtcttagaaaaggaggaggaagtaccaatttggtgcaagaagatcgtggtgaggaaggacatgggagccacagtgaagtgaaagaggctttaaggaatcagatgcacagatggatgctttgatttacacatttatctagaggnnnnnnnnnnnnnnnnnnnnnnnnnnnnnnnnnnnnnnnnnnnnnnnnnnnnnnnnnnnntatattaaaatcatttggagtgggaaccagacaccaatatttgcgaaagcctccaaggcggttctaatgtccagccaaagttgattatcactgctttatggccaactaaggaaaccttgtttgtctgccttggctggtgctccagccccagttctgagtggtcagggaaggcaagatgtaagatatagtaatggtatttattctgtatgtctcacagaacaaaagcatttgagaatttctgaccaggcagtgctccatcaactcttaataatcatctttgtgatattctcctatgtgacttgtccatcaattattccaattcaaaggtctaggnttttttttcaattgtcttacacatgtgacatcacaagataccagaagtagcacagtaaattcaagagcatataaagctaagtggaaaactaattcttcatatttagacagtggaaattctcaaaacaatcatttgctaaattaggtccaaatttattattcattcttcttctggaggagacatgggtaccaggtacctgttctgctgtaggtatatttcactgggacttggtcttagc

SEQ ID NO: 434468 - DNA, 1213 bp, Homo Sapiens
  misc_feature (48)..(65): n is a, c, g, or t
  misc_feature (1132)..(1132): n is a, c, g, or t
  misc_feature (1182)..(1182): n is a, c, g, or t
  misc_feature (1194)..(1194): n is a, c, g, or t
cctgggtggcgaattccgcacgagggagagagagaactagtctcgagnnnnnnnnnnnnnnnnnnctcgtttccccgactttattcagtggcacgttcacagcggggatgggggtagacacaaggtggggcctgatctgtcctggagccctgggggcaccacacaccatgcactatggatgggagggggcacaggaggggcttggtggccccacagaagcctgtgtaccagggaggaggcggtgagtgcctgggtccccctagcccaggcccgcaatgggaggggctgatactgggctgagattgaggggtggggatggggggcacaaagtgtctgctccagaagggccaagtggccaagcccttgcaagggcacaagcccacgccaagggcatgagcccacagggcagctggggacactctggacacagagctatgccactctccctcttcccctctggtgagggagaggaggattctgggctgggccaaacagctaccctgtcctgccccatcctgtcctcggccaatcagaacggcttcgatgtctgcttgaagatgaagcctcgataggcgagtgtcttcatgatgttggcaatgttcttgcagtcgtcaatgccgctgtggggccggcctatgtgttgcaggctgaggcccttgttcatgtctagaagtccattcttgggccagcagcccatggcgaactgtaagcctttttcagattaatccactgcttgaagtaatccgccactggcaagcccaagtactggcactggcctgggagcatgacttttaagtcccagtctccacaggtgacaaaaattgacttgacgtttggatctaagaggccttccttcgccatccattcatcgaccctctccagcacttgctgcaggcttggctgaccatccaccatggcttgaataatcccggtgagctctgtacagaatggggtaagctgtggatggactacaggctggacatacatgtgaaaggtagactcaatctccatggtccggccatttagctttaggatgggggactcgatgatttcctgaggatgaatctgtggcttgtcgcacgtggcctcaagttcagcactaaaaagtagtgatactctggggagggaaggnacattgcggcatggatgcgccaagcgtgggcgcagcttcttgtggtatgngcagactcgganacacaggagaaatagtggg

SEQ ID NO: 434469 - DNA, 1546 bp, Homo Sapiens
  misc_feature (1480)..(1480): n is a, c, g, or t
ggtaccggtccggaattcccgggatggtgagtcggtgtgttgtggactcgtggtgctggctgccgctgttcaggcggccgggaacgggcggtggggagcgggcggagctggccctgcctctgcctggccggcgccgcagtcggcgcgggccgcgcccgccgccgccaactgccctgagcgcttgctgaggccgagggagacgtcggggcctgcacctggagggagcctgccgcgctggccccgaggagggggcgttgccatggcgacagcctctcccgctgctgacggggggcgggggcggccctgggaaggagggctggtctcctggccccccgcccctccccttactctcccctggacttggatgggcccgagttgggggcaacaccccgggcattggggctttccagctctcacagaaccttcagcatccccagctgccggtcttggcatcttcgaagtaaggagagttttagatgcttctggatgttcaatgctagcacctttacagactggagcagctcgattttcttcgtatttactttcaagagcaagaaaagtgctgggctcccacttattttctccctgtggtgttccggagttctgctccatatccaccagaaagctggcggcccacggctttggcgcatccatggcggcaatggtgtccttccctccccagaggtatcactactttttagtgctggactttgaggccacgtgcgacaagccacagattcatcctcaggaaatcatcgagttccccatcctaaagctaaatggccggaccatggagattgagtctacctttcacatgtatgtccagcctgtagtccatccacagcttaccccattctgtacagagctcaccgggattattcaagccatggtggatggtcagccaagcctgcagcaagtgctggagagggtcgatgaatggatggcgaaggaaggcctcttagatccaaacgtcaagtcaatttttgtcacctgtggagactgggacttaaaagtcatgctcccaggccagtgccagtacttgggcttgccagtggcggattacttcaagcagtggattaatctgaaaaaggcttacagcttcgccatgggctgctggcccaagaatggacttctagacatgaacaagggcctcagcctgcaacacataggccggccccacagcggcattgacgactgcaagaacattgccaacatcatgaagacactcgcctatcgaggcttcatcttcaagcagacatcgaagccgttctgattggccgaggacaggatggggcaggacagggtagctgtttggcccagcccagaatcctcctctccctcaccagagggggaagagggagagtggcatagctctgtgtccagagtgtccccagctgccctgtgggctcatgccccttggcgtgggcttgtggccttgcaagggcttgggcacttggcccctctggagcagacaacttgntggccccccatccccaccccctcaatctcaagccaagtatcagccccctcccattgcggggcccgg

SEQ ID NO: 434470 - DNA, 457 bp, Homo Sapiens
  misc_feature (391)..(391): n is a, c, g, or t
  misc_feature (407)..(407): n is a, c, g, or t
  misc_feature (420)..(420): n is a, c, g, or t
  misc_feature (447)..(447): n is a, c, g, or t
gcctcgtttccccgactttattcagtggcacgttcacagcggggatgggggtagacacaaggtggggcctgatctgtcctggagccctggggcaccacacaccatgcactatggatgggagggggcacaggaggggcttggtggccccacagaagcctgtgtaccagggaggaggcggtgagtgcctgggtccccctagcccaggcccgcaatgggaggggttgatactgggctgagattgaggggtggggatggggggcacaaagtgtctgctccagaagggccaagtggcaaagcccttgcaagggcacaagcccacggccaagggcattgagcccacagggaagcttgggggacacttttgggacacagattttttgccatttttccnttttcccttttggttnagggagaggaggntttttgggtttgggcaaacatttaccntttccttgcc

SEQ ID NO: 434471 - DNA, 1332 bp, Homo Sapiens
  misc_feature (69)..(69): n is a, c, g, or t
  misc_feature (184)..(184): n is a, c, g, or t
  misc_feature (246)..(246): n is a, c, g, or t
  misc_feature (259)..(259): n is a, c, g, or t
  misc_feature (280)..(280): n is a, c, g, or t
  misc_feature (305)..(398): n is a, c, g, or t
  misc_feature (405)..(693): n is a, c, g, or t
  misc_feature (697)..(697): n is a, c, g, or t
  misc_feature (702)..(702): n is a, c, g, or t
  misc_feature (705)..(712): n is a, c, g, or t
  misc_feature (715)..(719): n is a, c, g, or t
  misc_feature (721)..(742): n is a, c, g, or t
  misc_feature (744)..(773): n is a, c, g, or t
  misc_feature (775)..(811): n is a, c, g, or t
  misc_feature (813)..(1056): n is a, c, g, or t
gggggagagagaaaaaaaagcgggacgcgggcgacagagcacggcgggggaggaaaaaaaacgagggcngggggcgaaaaagaacagggccaacaggcaaacggaaaaggaggacaggcaggggagaccgcagaacaaaggagaggagaacgagagaacaggcacggggaagagaaaagagganggcaggcaagagggggcaagggaagaaaaaagggcgggaaacagggagaagcgacggcaaanacaaacaagaggngggacgccaacgcggggcggncacaaacgggcggaaggagaagggnnnnnnnnnnnnnnnnnnnnnnnnnnnnnnnnnnnnnnnnnnnnnnnnnnnnnnnnnnnnnnnnnnnnnnnnnnnnnnnnnnnnnnnnnnnnnnaaaggannnnnnnnnnnnnnnnnnnnnnnnnnnnnnnnnnnnnnnnnnnnnnnnnnnnnnnnnnnnnnnnnnnnnnnnnnnnnnnnnnnnnnnnnnnnnnnnnnnnnnnnnnnnnnnnnnnnnnnnnnnnnnnnnnnnnnnnnnnnnnnnnnnnnnnnnnnnnnnnnnnnnnnnnnnnnnnnnnnnnnnnnnnnnnnnnnnnnnnnnnnnnnnnnnnnnnnnnnnnnnnnnnnnnnnnnnnnnnnnnnnnnnnnnnnnnnnnnnnnnnnnnnnnnnnnnnnnnnnnnnnnnnnnngggnggggnggnnnnnnnnggnnnnnannnnnnnnnnnnnnnnnnnnnngnnnnnnnnnnnnnnnnnnnnnnnnnnnnnngnnnnnnnnnnnnnnnnnnnnnnnnnnnnnnnnnnnnngnnnnnnnnnnnnnnnnnnnnnnnnnnnnnnnnnnnnnnnnnnnnnnnnnnnnnnnnnnnnnnnnnnnnnnnnnnnnnnnnnnnnnnnnnnnnnnnnnnnnnnnnnnnnnnnnnnnnnnnnnnnnnnnnnnnnnnnnnnnnnnnnnnnnnnnnnnnnnnnnnnnnnnnnnnnnnnnnnnnnnnnnnnnnnnnnnnnnnnnnnnnnnnnnnnnnnnnnnnnnnnnnnnnnnnnnnnnnnnnnnnnnccgccccccgtcagcagcgggagaggctgtcgccatggcaacgccccctcctcggggccagcgcggcaggctccctccaggtgcaggccccgacgtctccctcggcctcagcaagcgctcagggcagttggcggcggcgggcgcggcccgcgccgactgcggcgccggccaggcagaggcagggccagctccgcccgctccccaccgcccgttcccggccgcctgaacagcggcagccagcaccacgagatcccgggaattccggaccggtaccac

SEQ ID NO: 434472 - DNA, 775 bp, Homo Sapiens
ttgggcccagcaagccccatgggcgaaacctgtaaggcctttttcaagattaaatccactgctttgaagtaaatccggccactggcaagcccaagtactggcactggcctggggagcatgacttttaagtcccagtctccacaggtgacaaaaattgacttgacgtttggatctaagaggccttccttcgccatccattcatcgaccctctccagcacttgctgcaggcttggctgaccatccaccatggcttgaataatcccggtgagctctgtacagaatggggtaagctgtggatggactacaggctggacatacatgtgaaaggtagactcaatctccatggtccggccatttagctttaggatggggaactcgatgatttccccggggtgttgcccccaactcgggcccatccaagtccaggggagagtaaggggaggggcggggggccaggagaccagccctccttcccaggccgcaccccgccccccgtcagcagcgggagaggctgtcgccatggcaacgccccctcctcggggccagcgcggcaggctccctccaggtgcaggccccgacgtctccctcggcctcagcaagcgctcagggcagttggcggcggcgggcgcggcccgcgccgactgcggcgccggccaggcagaggcagggccagctccgcccgctccccaccgcccgttcccggccgcctgaacagcggcagccagcaccacgagtccacaacacaccgactatcccgggaattccggaccggtcc

SEQ ID NO: 434473 - DNA, 919 bp, Homo Sapiens
  misc_feature (112)..(112): n is a, c, g, or t
  misc_feature (180)..(365): n is a, c, g, or t
  misc_feature (432)..(432): n is a, c, g, or t
cagggcaccgtggggaatcccagctccaattttctgccacccctagtttccctgggggtgggactcaaaagatcccctggatttttacctggctccgtgcctcagtttcccntataaaatgggtgataaaacctttccctcacagagggtgttgagggagttaactgcccttactagcannnnnnnnnnnnnnnnnnnnnnnnnnnnnnnnnnnnnnnnnnnnnnnnnnnnnnnnnnnnnnnnnnnnnnnnnnnnnnnnnnnnnnnnnnnnnnnnnnnnnnnnnnnnnnnnnnnnnnnnnnnnnnnnnnnnnnnnnnnnnnnnnnnnnnnnnnnnnnnnnnnnnnnnnnnnnnnnnnnnnnnnnngttgcagttattttaacctggctgttttttcttgagttaactaaaagcctggttgtcaccatccctnccttccctcccgcctctaatctggcctgcccccactggaggtccccatgtctagtcgtccggggtaccgtctccgaaggttgctggagaaagggaagcttctcttccagcttgtccaggcccctgcaggcgaggctgttcatagtggccagctggggctgcaggtgctcgagcagcggctgggcgtggtccagggcacgggtggtcaggccgcacacgcagttctcagccaggcggcaggcggagcccagcagcgggtgcctgtccttggctgcactgtaaacatcgcagaccgcggtgcacgtggccctgaccaggggcagagccaccacacgctgcaccacgttctgctggtcctgctcccacacactggatctggggatctgagccgcctcttcttcagacatcgtgctgcaaacagggtcaccctgggcgcgagcggcttcagacaccagctgtctccgccgaccccaggctcgagtctccac

SEQ ID NO: 434474 - DNA, 666 bp, Homo Sapiens
gcgtgtgcggcctgaccacccgtgccctggaccacgcccagccgctgctcgagcacctgcagccccagctggccactatgaacagcctcgcctgcaggggcctggacaagctggaagagaagcttccctttctccagcaaccttcggagacggtggtgacctcagccaaggacgtggtggccagcagtgtcacgggtgtggtggacctggcccggaggggccggcgctggagcgtggagctgaagcgctccgtgagccatgctgtggatgttgtactggaaaaatcagaggagctggtggatcacttcctgcccatgacggaggaagagctcgcggcactggcggctgaggctgaaggccctgaagtgggttcggtggaggatcagaggagacagcagggctactttgtgcgcctcggctccctgtcagcacggatccgccacctggcctacgagcactctgtggggaaactgaggcagagcaaacaccgtgcccaggacaccctggcccagctgcaggagacgctggagctgatagaccacatgcagtgtggggtgacccccaccgccccggaccgccctgggaaggtgcacgagctgtggggggaatggggccaacggcctccggagagccgccgccggagccaggcagagctggagacgctgg

SEQ ID NO: 434475 - DNA, 1192 bp, Homo Sapiens
  misc_feature (79)..(79): n is a, c, g, or t
  misc_feature (81)..(96): n is a, c, g, or t
  misc_feature (146)..(164): n is a, c, g, or t
  misc_feature (193)..(193): n is a, c, g, or t
  misc_feature (211)..(211): n is a, c, g, or t
  misc_feature (301)..(310): n is a, c, g, or t
  misc_feature (388)..(388): n is a, c, g, or t
  misc_feature (402)..(402): n is a, c, g, or t
  misc_feature (409)..(422): n is a, c, g, or t
gggcggtgctcccgcccgccgcctgccggggtgggcttcccctcgcccctcccctcttgccgtggctttttcctttggngnnnnnnnnnnnnnnnnaaacagttttgtgctttgtcgcccctccctttttcagccttcgcgggtgnnnnnnnnnnnnnnnnnnnttcgtcgttttgccaaaatttcctttgtncggtttttcccgcttggntctgtggcggcggggtgcggggggcttgggccccttccctcccccctccccgcccggggtccaggccgccttgggcgtgcggtcccggcnnnnnnnnnntgtcccctccctgcccccttgccccctgggtggtcccgggggcctcccccgcgcccccgtgcccctcccttgggccgngaggggggccgggntttctgnnnnnnnnnnnnnngcttcttggggccggctctgccgatcggggctgggggcttggctctcctggccccctgcccacccccatcaagctcagttattgcataaaaataagggacccccagcacctggggttggggtggtgagtgggaaggggccgagatatggctataggggcagcaatctccccaccacttcttggggtgcaggagaagtcccctcctttccggtgcccaccatgtcacgcgtcctcagtgttggaactaggggctcccgccctgcggaagaaaaagtgtctttgtgcccacagtgcggaaaagaggggagacgagatgtgtcaggtcctgggggtgggaagtcacttcctgcgcccgctggccctgcgatctccgccttccctcttagggttgccctcctctgtggatgaagtagtgggttgtgtctggccccagcgggcgatctctgcgtgttccgccaccgaggaagctacagcctccagccagccgttcatctcctcctcatcttttgcctggagcaaaaactcactgccatcctgggtctggagcttgaagacatgcttctttttcttgtagtcactagccacctcgctggtggccttgtgcaggctgagcagcggttccccaccgtgtgtgctcccggatgccgggcccttggagtccttgtagaagcccagttcccccttactaagcacacagtacaggctcacccacgactttcagaacattttccttctgttcccacctaagctctacccatcatccattagat

SEQ ID NO: 434476 - DNA, 989 bp, Homo Sapiens
  misc_feature (69)..(69): n is a, c, g, or t
  misc_feature (135)..(135): n is a, c, g, or t
  misc_feature (562)..(562): n is a, c, g, or t
  misc_feature (566)..(566): n is a, c, g, or t
  misc_feature (646)..(646): n is a, c, g, or t
  misc_feature (670)..(685): n is a, c, g, or t
  misc_feature (706)..(706): n is a, c, g, or t
  misc_feature (710)..(710): n is a, c, g, or t
  misc_feature (736)..(736): n is a, c, g, or t
  misc_feature (740)..(740): n is a, c, g, or t
  misc_feature (771)..(771): n is a, c, g, or t
  misc_feature (780)..(780): n is a, c, g, or t
  misc_feature (833)..(896): n is a, c, g, or t
  misc_feature (900)..(900): n is a, c, g, or t
  misc_feature (928)..(928): n is a, c, g, or t
  misc_feature (941)..(941): n is a, c, g, or t
  misc_feature (960)..(960): n is a, c, g, or t
  misc_feature (971)..(971): n is a, c, g, or t
gaccgtcaaagccaaagggtttattataggtacatacagtgtgcgcccgccacaccgccccacaccccncgggccccagcggtttcttccaggcggccatggggactgcccacaacccaatcccccgactccccnagggaggtgctccagccagaagcatgcaggggtgggcttcccctcgcccctcccctcatgtagtgtcatttacaactggaggggggaggagagaggaatacagttttgagctttgacgcccctcccattaaaagccttcgcggatgcggggcgggggaggaggagatcgacgttttgcaaaaataaactaagtcaggaattaaccgcatgtctctgaggcggcggagtgcaggtggttagggccccttcactcccccctcccagacagagatcaaggcagcattggaagtgaggtaaaggcggggagggggtgtcccctccctgccccctagcaccctggatggtccagtgggacctcaccagcgcccccgtgcccatccctagggcagagaggggggcaggaattactgcccccaccaccccagcntctnggggcaggatcggcagagcggggcggggggcggggctcaacgggccccctgcccacccccatcaagctcaggtagggcanaaaaataagggacccccagcaccnnnnnnnnnnnnnnnnagtgggaaggggccgagatanggcnataggggcagcaatctccccaccacntctnggggggcaggagaagtcccctcctttccggngcccaccangtcacgcgtcctcagtgtgggaactaggggctcccgccccggcggaagaaaannnnnnnnnnnnnnnnnnnnnnnnnnnnnnnnnnnnnnnnnnnnnnnnnnnnnnnnnnnnnnnnaagncacgtccggcgcccgcgggcccggcgancgccgccggcccncggagggtggcccgcagcnggggaggaagnagggggtagtgtcgggcc

SEQ ID NO: 434477 - DNA, 580 bp, Homo Sapiens
tgtgccattcgctgcttgggaataaacggtggcattgtatcgggtgccaggctctaacccgacaagcaggacttccgtgtcttgggactgctggccggaggatgggtccacaggtcccacgagggactcatcatgcacaggggcggtggggctccctgcccggcttctctctgtattgctggcatccaatccaccttctgtgtccaaggggtctccctttgtcttatttgattgtagaagatacgggttgatgttgtattgaacccctggcttcaggcccgagatattgacctgaagtcttgagtcttgagtcaactcctcatggcttcctatgctttctagaagaacccggcaggagtcggttccattgccattgctccaggagagagcagcgttcctcacacccgtgagggcaactcggagatcagaaactgggatcggctctgtgatgacttttatgactttgggatctcctcaagtttcattgcctattcctggattgatggagaatacatatgaagtcgctggacgtaagcctgtgatgttacaccatggttgatgcacaacagtaattgtcttc

SEQ ID NO: 434478 - DNA, 2685 bp, Homo Sapiens
  misc_feature (36)..(36): n is a, c, g, or t
  misc_feature (59)..(59): n is a, c, g, or t
  misc_feature (67)..(67): n is a, c, g, or t
  misc_feature (125)..(125): n is a, c, g, or t
  misc_feature (130)..(130): n is a, c, g, or t
  misc_feature (132)..(132): n is a, c, g, or t
  misc_feature (156)..(156): n is a, c, g, or t
  misc_feature (204)..(204): n is a, c, g, or t
  misc_feature (243)..(243): n is a, c, g, or t
  misc_feature (269)..(269): n is a, c, g, or t
  misc_feature (271)..(273): n is a, c, g, or t
  misc_feature (284)..(284): n is a, c, g, or t
  misc_feature (286)..(286): n is a, c, g, or t
  misc_feature (293)..(293): n is a, c, g, or t
  misc_feature (296)..(296): n is a, c, g, or t
  misc_feature (300)..(300): n is a, c, g, or t
  misc_feature (312)..(313): n is a, c, g, or t
  misc_feature (325)..(325): n is a, c, g, or t
  misc_feature (328)..(328): n is a, c, g, or t
  misc_feature (350)..(350): n is a, c, g, or t
  misc_feature (353)..(353): n is a, c, g, or t
  misc_feature (357)..(357): n is a, c, g, or t
  misc_feature (364)..(364): n is a, c, g, or t
  misc_feature (367)..(367): n is a, c, g, or t
  misc_feature (370)..(370): n is a, c, g, or t
  misc_feature (376)..(377): n is a, c, g, or t
  misc_feature (379)..(379): n is a, c, g, or t
  misc_feature (381)..(381): n is a, c, g, or t
  misc_feature (386)..(386): n is a, c, g, or t
  misc_feature (392)..(392): n is a, c, g, or t
  misc_feature (394)..(394): n is a, c, g, or t
  misc_feature (399)..(399): n is a, c, g, or t
  misc_feature (401)..(401): n is a, c, g, or t
  misc_feature (404)..(404): n is a, c, g, or t
  misc_feature (408)..(458): n is a, c, g, or t
  misc_feature (462)..(462): n is a, c, g, or t
  misc_feature (464)..(464): n is a, c, g, or t
  misc_feature (466)..(468): n is a, c, g, or t
  misc_feature (470)..(471): n is a, c, g, or t
  misc_feature (475)..(475): n is a, c, g, or t
  misc_feature (490)..(490): n is a, c, g, or t
  misc_feature (512)..(512): n is a, c, g, or t
  misc_feature (516)..(516): n is a, c, g, or t
  misc_feature (527)..(527): n is a, c, g, or t
  misc_feature (545)..(545): n is a, c, g, or t
  misc_feature (548)..(548): n is a, c, g, or t
  misc_feature (560)..(560): n is a, c, g, or t
  misc_feature (589)..(589): n is a, c, g, or t
  misc_feature (730)..(738): n is a, c, g, or t
  misc_feature (1644)..(1644): n is a, c, g, or t
  misc_feature (1647)..(1647): n is a, c, g, or t
  misc_feature (1653)..(1653): n is a, c, g, or t
  misc_feature (1738)..(1738): n is a, c, g, or t
  misc_feature (1777)..(1797): n is a, c, g, or t
  misc_feature (2048)..(2048): n is a, c, g, or t
  misc_feature (2064)..(2064): n is a, c, g, or t
  misc_feature (2600)..(2600): n is a, c, g, or t
ttctattgtaagaaaacaaaaaattttaagccagtnacaacatttaaattaaagaaganataaacangtcaaaggaatgaaacctagatgttttattatgtgtgaattatgagcgcttacctggncttgngnataacgtataaaccttcacctgtntgcatgtcattcagtctctgcagcaacattccttgtgtccatgtgggngtttctatgtgtgactgtgaatatctgtatgtaaatagnttgtctcttgggagcattagaagggnannnaacccaccgcnantatcatngcnttcnttttcagaaagnntttccaatcttngcntcattttactcaacagaaatgnggngggngggttanagnggnggggtnngngnttggngagagngnggggngnggnacannnnnnnnnnnnnnnnnnnnnnnnnnnnnnnnnnnnnnnnnnnnnnnnnnnatangngnnncnnacancccattccatactcngggagaggtagaccatgaggcnttcnagcagtaagcnactcaacacggccaaganggngagcttacggtngaggtttaggggcactctaattgcctganaatttgatgtaagaacaaatactttaatgagtttgaggcacacagatgtgtagtcatgttcccaaatgacagcgggaatcagcaagagttttccgtagctagataataataatgctttcagcagcaaaatgaagttgggcnnnnnnnnngccgtcatgggccgttctacccacaggaaggtaaaaatgccaataaaataggcagtttgttctaaagcagcaatcgcaaacattctatagaaatcccattccttagcatatctgaacaagtcttcaggggcagtattctggttggaatcttgaagctgccaccacctcaggtatgcttcacaaagcaaacaaaatatgcagagttttccatggatatttatttgagtattgaaaagaatatgtctgtaggcctgagctttgcacaatatagcattaatcaagatgataacaggatcatactcgatatatttgtctacaggtttctggcaggatttctctgtctgtcggtccggtccgttcgccggcttaggtcatatcacccaaatatgccccagtatgagaaaagcgctgtcgggtagctgagttctctatcagtacagatattcatgcaaagatcccgggcgggaatgtcaactaccgaactaaagactgtatcagaggaccctgctcctcgcggtccccaaatcccgccgcgccattttcttctcaagggcaccccacacctgacaactcacacagatggttatcttcagcacaccgtggttatagtctcggtacaactctttggcctcctggttgcattcgatgcacctgtactggcaggaggccgaggcagcagtaggagtcgctgccaccccatccacgttccccttcccctgctgcaggccgctccgcccgccgttgcccatttccactcaactgcagtccagaacttccgattctgtggagggtaagacgtcagacgccagaccggaagacttgcgccgcgcgggcttattgggattcgtagtcccggcaccggcaagggggcccccgggctggccgagctgtgactacctttcccancanaaaaancttctccccttgtcccgcccccttgccacggtccacctgcccgccgtaggttagaggcggggaggcctgagagccgggcaagggntgtcgcacatgcgccttgagggaagatggcacctgccgnnnnnnnnnnnnnnnnnnnnntctggggcggcgctgtggccgccgcgggcgccgcccggcgtgtcctgctgctgctgctgctgggggtcctgtccgccgggctgcggccaggcgccctggccaccgagcactactcgccgctctccctgctcaagcaggagctgcagcaccggcagcagcaggaggccccggcgggcggcggcggctgcagcccgcagtccggggactggggggaccagtactctgccgagtgcggcgagtcatcctttttnaacttccatgactcanactgcgaacccaagggatcatcaccctgtgactccttgctttccctcaacactgagaagattctgagccaggccaagtctattgcagaacagaagagattcccgtttgccactgataatgacagcacaaatgaagagttagctattgcttatgtcttgattggcagtggtctgtatgatgaagcaatacggcatttttcaacaatgcttcaggaggagcctgatctggttagtgcaatttatggccgagggatagcctatggaaagaagggactacatgacattaagaatgctgagcttgctctgttcgaactgagccgagtaattaccttggaaccagatcgtccagaggtatttgagcagcgagcagaaattctgtcccctctgggacgaattaatgaagcagtgaatgacctcactaaagctatccaactgcagccctcagcacggctgtacagacatcggggaaccctgtacttcatatcagaggactatgcaacagcccatgaagactttcagcagtccttagaactgaanaaaaaccagcctatagctatgctatacaaaggtttaactttctttcacagaggacttctgaaggaagctattgaatccttcaaag

SEQ ID NO: 434479 - DNA, 1336 bp, Homo Sapiens
cattctgaaagactttattaaaagcgtttctattgtaagaacacaaaatattttaagccagtaacaacatttaaattaaaaagatataaacatgtcaaaggaatgaaacctagatgttttattatgtgtgaattatgagcgcttacctggccttgtgtataacgtataaaccttcacctgttgcatgtcattcagtctctgcagcaacattccttgtgtccatgtgggtgtttctatgtgtgactgtgaatatctgtatgtaaatggcttgtctcttgggtgcatttgtgggggtgggtatccaccgctattatcattgctttctttttcagaaagtgtttccaatctttgcttcattttactcaacagaaatgaggaggttggtttatatttcatgtcttttctctttcagatacagctggtcatgccacagatagtgaagaagaataaaactcttcagaagtcctgagatttaaagatggcataatcacttccaacatcccattccatactctggaagaagtagaccatgatgctttccagcagtaagccacttcgacacggccaagaaggagagcttacggttgatgtttagggtcactctaattgcctgaaattttgatgtaagaacaaatactttaatgagtttgaggcacacagatgtgtagtcatgttcccaaatgacagctggaatcagcaagagttttccgtagctagataataataatgctttcagcagcaaaatgaagttgggctttttatttgccgtcatgggccgttctacccacaggaaggtaaaaatgccaataaaataggcagtttgttctaaagcagcaatcgcaaacattctatagaaatcccattccttagcatatctgatcaagtcatcaggggcagtattctggttggaatcttgaagctgccaccacctcaggtatgcttcacaaagcaaacaaaatatgcagagttttccatggatatttatttgagtattgaaaagaatatgtctgtaggcctgagctttgcacaatatagcattaatcaagatgataacaggatcatactcgatatatttgtctacaggtttctggcaggatttacagatggttatcttcagcacaccgtggttatagtctcggtacaactctttggcctcctggttgcattcgatgcacctgtactggcaggaggccgaggcagcagtaggagtcgctgccaccccatccacgttccccttcccctgctgcaggccgctccgcccgccgttgcccatttccactcaactgcagtccagaactaaagattctgtgaagggtaaaacgtcagacgcatagtg

SEQ ID NO: 434480 - DNA, 1005 bp, Homo Sapiens
  misc_feature (936)..(956): n is a, c, g, or t
ttcttaagggcttcctgtaagctgccgtggtggtagagcatcattccccggagctggagggtttgcacatgattttggttgagcaacagtgccttttgaaagctctcagtggctgcttcaaaattgcccagttctctatatgcctgccctagacttttatatgcatcaataaagtcaactttctgcttcaaagcttctttgaaggattcaatagcttccttcagaagtcctctgtgaaagaaagttaaacctttgtatagcgtagctataggctggtttttgttcagttctaaggactgcgtgaaagtgttcatgggctgttgcatagtccgtgtgatatgaagttccagggttccccgatgtctgtaccagccgtgctgagggctgcagtttggatagctttagtgaggtcattcactgcttcattaattcgtcccagaggggacagaatctgaagcaattgttgaacaaatgccgtattggcttcatcagacagaccactgccactcaagacataagcataggctaactcttcattttgtgctgtcattatcagtggcaaccgggtatctcttctgttctgcaatagacttggcctggctcagaatcttctcagtgttgagggaaagcaaggagtcacagggtgatgatcccttgggttcgcagtctgagtcatggaagttccaaaaggatgactcgccgcactcggcagagtactggtccccccagtccccggactgcgggcttgcagccgccgccgcccgccggggcctcctgctgctgccggtgctgcagctcctgcttgagcagggagagcggcgagtagtgctcggtggccagggcgcctggccgcagcccggcggacaggacccccagcagcagcagcagcaggacacgccgggcggcgcccgcggcggccacagcgccgccccagannnnnnnnnnnnnnnnnnnnncggcaggtgccatcttccctcaaggcgcatgcgcgacagcccatccgct

SEQ ID NO: 434481 - DNA, 1252 bp, Homo Sapiens
gaaaaaggccgggccaattcttagggttaaatttgttttggaaaaacacccctgggggggtgtcattcgggaaaatggttttgggtataaaataatttctgggaatttcccacaaaaacgcctttctccagaaaatttctccaatctggttccaaagttttctaaggctttggatggattttggactgaagagttattatttgccttcaagttaggcatatttcgtatccatcatagccagagttttaaccctggttgttacaaaactccctgtagtttgaaagatgtgctccatcaataattttctttctttctgttgacattttattttgttgaaagactattgtgaagacaattgacaaatgttgctaatatagttgctacattcatcacttgccagcactgggcaagaccaagggtaaaaagttcattccagtaagctttcaccagtgatatgctgttttcttgccctagagcctggaaagaaggaatcgaaagtgcccagtgcattgataagaacagcagtctggaggcagactccccaatgtagtgcacattcaggtactcaggcataggagaaggcatggtgagcctgaaagctacatgtgaatcgctgagaagtggcccctctttttcggtgtaatttatgcttgaatctccagtgattaggtgtacacttccttccatgcccgctactgagctctggcaggctgtgctctctccaggattcaatgcttttgcaagagtgtcaaatgcccttgaaacatcaccgttggtctgcatttcttgaaattcacacaaagaggtatcatcattgcttaagctttcaatcatagacatttcattactattttgagaaagatctttagtttttccaagattcgctaatgatgtaaccacattggccaatgtacttaaatctccctgacatgattcagccttatctgatgtcatcagcacagctgactcagtttttactccagatggatgaatattcatgaacattcctgaatctaacagtcctgttgaccttgtactttcactatctgttacaaaagttggagttgcagttaatgggctacgaaggtcctttcggatatagattttttctgttgaagcggcacagttggaagatttttctcgtgatacttcaatgggttttctttcacattggacagagtcttgcttcattccaaacgcaatacatctctgtaacctgcagtattgacagcggtttcggtggtgcttatta

SEQ ID NO: 434482 - DNA, 738 bp, Homo Sapiens
cggttgggccaatgattttaacaattatttacagggccttcctttgcttcacctcatggctcacatacaagtgacctgagtcactccatcttcctgatcaaactgtccgtcgtctaattcccggaggacgttgtcactgctgctgaacccagagaagctgttgtgctgtgccagccttccctcctttgtccagcattcccgggagggagaaaggcggcactcctcaggcaggtgtctgctctctgcaggttgtgacgaggttgtgtctaatccgatgcttctactagtggctttattcttgtcttcaccttttatgtggcggctggctttcttatctggtgtttgagcagctgaattccacataactggcctctgaaggaatacgatctgctttgtagccaaattcccttcactgtcatgtctcaatacaggtgtgggcaacacgcttgtcagaagccatccgaattcagccagagtgtgcagcagagggccataatctgttttgatttcacatccctcaataacagtccattgttctactacgatggcatcatttcctttcctactagaacctggaactccagaaccttcttcttcatagataaaaaatccttccaaagatttaggcaaatgttcccctttagatgtttcccagaatacaaaagaatcaattaaagacaagccttgtttataataaaaggtagttaactccagccaatcagcatcaagtgtactaat

SEQ ID NO: 434483 - DNA, 1735 bp, Homo Sapiens
  misc_feature (204)..(204): n is a, c, g, or t
  misc_feature (447)..(460): n is a, c, g, or t
  misc_feature (472)..(472): n is a, c, g, or t
  misc_feature (527)..(527): n is a, c, g, or t
  misc_feature (531)..(531): n is a, c, g, or t
  misc_feature (539)..(540): n is a, c, g, or t
  misc_feature (544)..(544): n is a, c, g, or t
  misc_feature (555)..(555): n is a, c, g, or t
  misc_feature (561)..(564): n is a, c, g, or t
  misc_feature (605)..(605): n is a, c, g, or t
  misc_feature (613)..(613): n is a, c, g, or t
  misc_feature (775)..(775): n is a, c, g, or t
  misc_feature (780)..(811): n is a, c, g, or t
aaaaatgatgttttaattattaaaatggatcttacaatgtccaacatccaatgttaaataaaaatatataataggcctgaattcatcaatgaatagaataagttgtaattaacttggaggttcccatctttcaaagtaagcctttcatagataaatgaaaatcctttattttgtagaattttaaagattgttaaaggctgggtncaaggcaaagccacctctattagaaggggaaagaaaagcaagatgaaacaaaatatgttatcatacatatcgcgtgtgctatgagcatctttctactcctgccagattgaaaattctaggtttcaacattcttcaggatttaacaagtcaaaataaaagcagaattcaaatctagacagatgtaaaagacttcagtttcaaattgaagttgatatttttcctcttcatagtatttggactttnnnnnnnnnnnnnnttaaatcttacnctctactaaggtatttatgtattgagattatgggttcttttcatattgaatttcnaganacgccgcnntgcngtctgcatttntaggcnnnnaggagcaacaacatttatgtgcaatgaatcagtacagggtnggtgacangaccctttaaaagcaaagatacataaaaaagatttttttcaaaaaatattttaacacataggggcgtgctttgtataaacatgcgatagttaaagacaaaatgtggattaattattaaatttgggaaaaagatatttatttgcactaaatagctgtgtgtgngtatnnnnnnnnnnnnnnnnnnnnnnnnnnnnnnnngttatttttcagcttaaataagactgtaacttcctgagaactctctctaattgggtaaaatactgattgagatattcagtctccttaccaggtattgtgagaaagtctacttttgtacattcatgagaagctgaaatagattattgtgtaataaccgaatggaacatctgtttaaccagatgttttagttgagagaagtgtaaacatgattctaaatgtataaatatgttggttattcttccttgtctgggaggttgtgccaaagtttacatagattagaggaaaggctgggtctggaaaaattcaaaaatattacataaatgcagagaaagtaatacaataaggtcagttggcaatgattttaacaattatttacagggccttcctttgcttcacctcatggctcacatacaagtgacctgagtcactccatcttcctgatcaaactgtccgtcgtctaattcccggaggacgttgtcactgctgctgaacccagagaagctgttgtgctgtgccagccttccctcctttgtccagcattcccgggagggagaaaggcggcactcctcaggcaggtgtctgctctctgcaggttgtgacgaggttgtgtctaatccgatgcttctactagtggctttattcttgtcttcaccttttatgtggcggctggctttcttctgaaacacaagacattggtgaccaggagagttaaaaagatgggtgtttcctgtccctctggtctagcacatgctgcctttctgcctccaggaatgtccttttccccagctcttcaaaatcctgctcatcttcaacgaccagctcagagctacctccacattcccctctccacccaaatacaaatgaactcccttctccctgttttgtaactctttgtaggttcctggcacatcattcttgttgatg

SEQ ID NO: 434484 - DNA, 674 bp, Homo Sapiens
ttgcttggctgaaaagtatagggtagtctggctctggacaggcttcttgtccactgtgcagagttccaggtagaggcatttgatcatgatgcagacagactgctcctcctggggctccacttggaggtagaagtcaccctggcgcaataagagagggttgagggtttctcaagtggaccactacttcatccgtcagacagattgtccagccctcgtgtaagaagaggcagtgtgagtagggagcacaggctgcttctcgcacttgctcacacaggcgcttggcagggatcaggaaatccagaaggaagctcagcccatccccctggaagccagagtccaggagacggaacacctgacccaggacggtgggtgctgtggcctcgaaaggaggatagaggcccgccaagggcatgcatggatggcatgtgtcgaagggatgagagggtaccataggtgacgggctgccaagcggcgggcggcgcggctcctctcctgggcgcggggtctgtgggtccgcgggtccgtctgtctggggcagccctcggtcccgcctagtcctggagccaggggatagggcaggcccggggcaccgaccccggcgtcatctcggaggagcgcccacgcgtcacgcgacgcgtgggtcgacatatcccgatactccggaccgtaccagt

SEQ ID NO: 434485 - DNA, 3000 bp, Homo Sapiens
tttcacaggcagaggtactttatttggcaattttaacatgacacgtagagaaaagaaccctgccctccttcaccagcctccccagaaatcccaccttcctatttcaagacagagtaataacagcaccattttacacgaaagggaacagccacagccttggcaccatttctggttccactttccatggaagggcagagaagcattgctcaaaccccaccactgggtcagaaaccaggcaaacagcagcagtcacatctgaccttttgcacacacgagagcccgacactcatcctggctcccaagccttcccaaggtgaccctgtctcagccaccatcatgcagctcttctagtcccctcccggcccactctgaggagctgggcaatgatgagcagaatcttcatgtctctggcaggcggaggagggttcctgaagtggtagagatgcagtccactagctgggccccaatgaggtcgtgcacatggtaggtgaggccaagccgcaccacgacaggcgcccgccggcccaggagctctgataggagcagttcccggtactttgccttccggaccatgctaaggacagcctggcgccctttaacaaagtacttgatgaatctcccagctccaggcacagctagccaccagctcccagcatctcggacggtgaggactccagcattcaccagatgcgtgatttctgagtccctgaagccaaaggtctgtgtcatttggtcctgctggaaactaaggtccccacaggctggaagtactgaagctagaaatttctgcactgccccagcatacggtcggccatcacaggccttgaggactctggtcctgtagtcctcagtgaagataattccatgggcatccaagtcgaagcccagctggacgattctgatctccccctgctcttgaagctccttcagctgccggtcggccacggtcctgtcaggcacaaggctgtacacctggctcctcagcacgatgggcggcagcgcgtcctcaaacaggcctcgcgggaacagctgcatgagttctgagacagccgcgcgcgccgacctggctcaccccgaagaggatccgactccacaggccctcgcttccgccgcctcttaactccaaaggtctccgggatcaggtgatgcctcttccagctcatatcccgggattttatggtaccggggaaggggtaggaatggagggaagagaacctgaaaatagggtcttccggcgcagagcagtgacgtacggtctccctgggcgtccctcctagaccaggtgatgacgaaaggagcgtcaacttgtcgtccctcaggcccgtcagtgctgggagggtcggtggcgacgcacataccagcatcacctccgccaggccgggccccacgccggccgcggattggctccctccaagggcacgcacgccccgggggactcgtttgcaggcgtggaggggcgccggtggccacgttggtgtcaacctccttcgtgaagctcacacctcccccgccccgggaggggtttgcccgccactgtcgctgaatgattgcatcatcgaaagcagaaaaccacttttgcatccttcggcctctggcgtgcctgccatgacgtcatagctctgcggaggtggaagttggggagctttgaggtaactggattcttgatctgagcgcagacgtccttcctaacctcactgcatttggaggacctggagggagggtgggtgaagggcaaggaaagaggcaggatgagagcttggccgcggtggcgtctgaggggcctgaatgtttcaaggccagagcctggcgatcaggtggctcgcttagtcctaaaccagtcatccttctccaggcctcctctgtagaatggaaactctgtacccctgcttgtcttaggacctcatggatcccagggggaccaagagaggagctgagaagacagaggtagctgagcctcggaacaaactacctcgtccagcaccttctctgcccacagaccctgccctctactctgggccctttcctttctaccggcgcccttcggaactgggctgcttctccctggatgctcaacgccagtaccatggagatgcccgagccctgcgctactatagcccaccccccactaacggtccaggccccaactttgacctcagagacggatacccggatcgataccagccccgggacgaggaggtccaggaaaggctggaccacctgctgtgctggctcctggaacaccgaggccggttggaggggggtccaggctggctggcagaggccatagtgacgtggcgggggcacctgacaaaactgctgacgacaccgtatgagcggcaggagggctggcagctggcagcctcccggttccagggaacactatacctgagtgaagtggagacaccgaacgctcgggcccagagggcttgctcggggcaccgcttcctcggggagcttatgtacctgggataccaatttgagcagtacatgtgtgcagccgcctgggaagccaccctctgctcttctcaggggaggtagactgcacagacccccaagccccatccacacagcccccaacctgctatgtggagctcaagacctccaaggagatgcacagccctggccaatggaggagtttctacagacacaagctcctgaaatggtgggctcagtcattcctcccaggggtcccgaatgttgttgctggcttccgtaacccagacggttttgtctcttccctcaagacctttcctaccatgaagatgtttgaatatgtcaggaatgaccgtgacggctggaatccctctgtgtgcatgaacttctgtgccgccttccttagctttgcccagagcacggttgtccaggatgaccccaggctcgttcatctcttctcttgggagcctggcggcccagtcaccgtgtctgtacaccaagatgcaccttacgcccttcctgcccatatgggtatgtgggaagctattgactcaggaaccttcccat

SEQ ID NO: 434486 - DNA, 1920 bp, Homo Sapiens
cctcttagaaatatgcttttattatctgcacacagagatatgactgcctccctctaaagcattactatttgggagagggagtcttggggggtgatgggaggtcctgagtcatagcttccacataccatatgggcaggaaggcgtaaggtgcatcttggtgtacagacacggtgactgggccgccaggctcccaagagaagagatgaacgagcctggggtcatcctggacaaccgtgctctgggcaaagctaaggaaggcggcacagaagttcatgcacacagagggattccagccgtcacggtcatttctggcgcatgcaaaggcgtgggcatatgatgggcagtggggtggtgggaggagagaaggcaggctgttgccctggatgctagacctgtggtcttggtgtttggggatacgggtgggagctgcaacatcgttcccttaccctgacatattcaaacatcttcatggtaggaaaggtcttgagggaagagacaaaaccgtctgggttacggaagccagcaacaacattcgggacccctgggaggaatgactgagcccaccatttcaggagcttgtgtctgacagggaaagcaagggatcagtgggacccctcgtgcaccctccagttttgtcttcacccatgtcctgctcaagtttgtttcccatgtccttcaagcttccggtgtcgcggtgccgagcccgcttctgggcctgtagcgttcggtgtctccacttggctcaggtctagtgcttctccttggaggtcttgagctccacatagcaggttgggggactgtttggaatggggcttgggggttcttgtgcagtctacctcccctgagaagagcagagggtggcttccccaggcggctgcgtagcaccgagcagaaggccacgttggtgttaacctccccagaggggtctggggagcttccaggtttgtctgcacacatgtactgctcaaatttgtatccccatgtccataagctcccgggaggagcggtggccgagcaaagcttctgggcccgagcgttcgtgtgtctccacttcactcaaggtatagtgttccctggaaccgggaggctgccagctgccagccctcttgccgctcatacggtgtcgtcagcagttttgtcaggtgccccggccacgtcactatggcctctgccagccagcctggacccccctccaaccggcctcggtgttccaggagccagcacagcaggtggtccagcctttcctggacctcctcgtcccggggctggtatcgatccgggtatccgtctctgaggtcaaagttggggcctggaccgttagtggggggtgggctatagtagcgcagggctcgggcatctccatggtactggcgttgagcatccagggagaagcagcccagttccgaagggcgccggtagaaaggaaagggcccagagtagagggcagggtctgtgggcagagaaggtgctggacgaggtagtttgttccgaggctcagctacctctgtcttctcagctcctctcttggtccccctgggatccatgaggtcctcaaagctccccaacttccacctccgcagagctatgacgtcatggcaggcacgccagaggccgaaggatgcaaaagtggttttctgctttcgatgatgcaatcattcagcgacagtggcgggcaaacccctcccggggcgggggaggtgtgagcttcacgaaggaggttgacaccaacgtggccaccggcgcccctccacgccgccaacgagtccccgggcgtgcgtgcccttggagggagccaatccgcggccggcgtggggcccggcctggcggaggtgatgctggtatgtgcgtcgccaccgcccctcccagcactgacgggcctgagggacgacaagttgacgctcctttcatcccgggaattcc

SEQ ID NO: 434487 - DNA, 759 bp, Homo Sapiens
taatgtgaatgtttaggggtatcccagctcctaccattctctatcctcttagtcccagtatgattaacatcaagcttttacacttcctgccaggcccctgtgtgcttttgataagccaccaagaactgaattctatttcagggctctttctaaggcccaggtaagataggcctcctctcttgtggggaggaatacaaacttgggtcattttattaacaagaagagtcagctttttggcagcttttctggcaggttcaccaaaaaaacaggaggacaggctggatggaactggagggaggcagggaagcaccagatgcctgactttggttggttccacaagtctcacgtgatttctgagtccctgaagccaaaggtctgtgtcatttggtcctgctggaaactaaggtccccacaggctggaagtactgaagctagaaatttctgcactgccccagcatacggtcggccatcacaggccttgaggactctggtcctgtagtcctcagtgaagataattccatgggcatccaagtcgaagcccagctggacgattctgatctccccctgctcttgaagctccttcagctgccggtcggccacggtcctgtcaggcacgaggctgtacacctggctcctcagcacgatgggcggcagcgcgtcctcaaacaggcctcgcgggaacagctgcatgagttctgagacagccgcgcgcgccgacctgggcagataatcggctcacggacaggaactggggcgggg

SEQ ID NO: 434488 - DNA, 1299 bp, Homo Sapiens
  misc_feature (119)..(119): n is a, c, g, or t
  misc_feature (1146)..(1146): n is a, c, g, or t
aagaagaggccggggttttcccccgggttaggccaggaaggttttaatcttcccgacccttatgattttgcccaacctcggttttcccaaggtgctggggattccagggcgggagcccncggggcccggcccacagttttattctttacaggaggtcagtgcccatcatgttccctgtctacagacaaataaaaagctgctctctccagaggggcggcagcagtcctgatggtccagtgagacccagaagcttccaggagaccttcagtcccgagtccctttcagtcatcatcttctgagtctgactcttctgtggactcagatgcgctctctggcaagtcgtctcccatctgctggaaccttcccgactgtgaatcccacatgtatttgatggtcaccttgaattcagccatctcatacccaaaaagcttcaggacgcgagcctgctctggggtcagcacatcgccctccttgcacacctcgtagtcagacagcagagtcaccacacctctcttgagggcggtgggcaggcccagctgcctgagctgtggctccatggagtgggggaactgctccaggggccctggatccaggctcacagtgaaagctgctttgttaccagctcgggcgtagtccatttctgtgtatttcgtgaaccactcattcacctcctcctttgtgcggttggtgaacaggagacccacctcacccctcaaccttttgctgacctggtgcaggttgtctttgtattcatcagatgggctccgacccaaggccaccatcatcaccttgtttttgccaaagaacatccggctgtgcttccaggcgttccggatgtccttcagcttgctgttcctcatgttggccacagagaagatgaaaaggtacttgtaggtgtccacacatttccgaagctcttctatcaggttttgtttcaattccaagcctttcttggcagttttggttaaggagactttcttgtcgcgcttggatttgggcatcgcgctgaatccacgtgcggcggaagacggtgcaccccgttaggaccccggcggcgcgggggactctgggacggccctcgggggctgcccctcgcgtgtgcctgacccaatgtgcactgcagcctgcctctccctgccaagccgnccgcctgcgctttctcccgcgcctgtagggcaacttcccgtgtgccgaggcagtccctgaatcccgagcgtcccgtccgaccgagggcctcgcgcgctatcccagctctgtggtcccgcggagacggagccgcggcgcggtgcaatcccggga

SEQ ID NO: 434489 - DNA, 1363 bp, Homo Sapiens
  misc_feature (754)..(996): n is a, c, g, or t
agcggagggtccatcggatccacgtgccagcggcggacgtgtgaggtgacgatctcatcatgacccgacatggacgtgtggcgcgccctgaccaagtcgtcgcgcggtcttgggtgcgacctgcagtggggcccctgcggcgcagtgcgcggtgggactggccgtgttcctcgcaggcgcccagggcctgtgtctgcgccggttcctggcaagggcaccttggccgggcggcccgcgtcccctgcgcttcccacatccacgtgggcggacccggcccgcaagctgggccagcctgcggtttccgggcactggggagtgcgcagagccccgggccagcgaccgcagccggggcccctggcttctcccgagcactttcccccggaccggtccctccagggtggcgggcggcacccagggccggcgctcctcaccaacgcgctgcagctacgggctcaggagggagccgcagcgtcggaggaggaaagcatttaagaatagcacaaagccttaggctcgaggaagcgtgactgcttacgtgttgaaaataaaggttctgtaagtcccaccgcgggtgcatattgaaaagaaagggatcattagcacgcgaccctcgcctaggagtatataaaccgcagcacgactttcggatcacaaaggcagagaacagaacacattgaaggcttttgctcacttttccaagttgtttcgtttcgttttgtttctaatgtggacgatcatttacaatgcctctggnnnnnnnnnnnnnnnnnnnnnnnnnnnnnnnnnnnnnnnnnnnnnnnnnnnnnnnnnnnnnnnnnnnnnnnnnnnnnnnnnnnnnnnnnnnnnnnnnnnnnnnnnnnnnnnnnnnnnnnnnnnnnnnnnnnnnnnnnnnnnnnnnnnnnnnnnnnnnnnnnnnnnnnnnnnnnnnnnnnnnnnnnnnnnnnnnnnnnnnnnnnnnnnnnnnnnnnnnnnnnnnnnnnnnnnnnnnnnnnnnnnccattgccattccggcctgcggcacagagccaagaccccgttctccccaaaaaaacacaacaattctcaccaaaattccttcgtggaagcccggggtgcgggtgggccccacgccacgtatatcctcacccacccttggggaaggcttaaatacacggtgggtagctcccccttactctgtatgagcattcccaagaacgttcctgcgcccacaaaattaggcgtgtaatcccccttacgcccgtctcgcgggcgatactccccaagattattgtacctgaaaggcccatgggggggcggctcccttcttgtctctcctcccgcgcgggatgcgtcgacattccctatccgcacacctacagatgat

SEQ ID NO: 434490 - DNA, 1656 bp, Homo Sapiens
  misc_feature (5)..(5): n is a, c, g, or t
  misc_feature (26)..(26): n is a, c, g, or t
  misc_feature (38)..(38): n is a, c, g, or t
  misc_feature (42)..(42): n is a, c, g, or t
  misc_feature (57)..(57): n is a, c, g, or t
  misc_feature (80)..(80): n is a, c, g, or t
  misc_feature (108)..(108): n is a, c, g, or t
  misc_feature (110)..(110): n is a, c, g, or t
  misc_feature (127)..(127): n is a, c, g, or t
  misc_feature (129)..(129): n is a, c, g, or t
  misc_feature (131)..(131): n is a, c, g, or t
  misc_feature (142)..(142): n is a, c, g, or t
  misc_feature (181)..(181): n is a, c, g, or t
  misc_feature (186)..(211): n is a, c, g, or t
  misc_feature (238)..(238): n is a, c, g, or t
  misc_feature (251)..(252): n is a, c, g, or t
  misc_feature (254)..(254): n is a, c, g, or t
  misc_feature (270)..(270): n is a, c, g, or t
  misc_feature (272)..(275): n is a, c, g, or t
tattnaaattaaaaaataacaaacantcttcctaagcnaggngccatcctccccaanccatttcccacattatagaagcncagagcttgcacagtacttaaaaaaaantnacctctatatagaaatnanantctgccacganatcatcatggactatttacaaaccttcacattataagtnttccnnnnnnnnnnnnnnnnnnnnnnnnnnacaaaaaaaagggttctagtgctttcncttgattgatccnnanggggtgggggttactntnnnntagggggtggtaggctactcataactactggcaccagccttagggtgttgtcccttaccacaaggtggtgaacagtcccctcccaattggaggggtggaggatttggtgcaaagccatggagattagacagaataggtgggttggagtaactccccataggcacaagcatccgcagcctgtcctgaccccagcctgcactctctcaactcctcaactgggggttcggggttggggggcaacagttagttgcagtagggggatcagcccagccctgggtagagggagaagcccccacccagtccccactcctatcaatagccagcaaactgtccatccatctgaaggcgggaacaaatggcaggtaggtcggaagaatcaggctggcactgcccccagcctctgtccaacacaggaggaatcgaggtagcaaacggctgaaatgctctgactaggggttaaaagggaagtgaaggaaaggaagttcctacttgtatacagtgcccacagcctaggggctggaagaaagcataccttgcttgtaaagtgctgtagcctctagcagggctaggccccaggcaaacttggaagaaagcagaccaggcaaggaaccaggtaacgggcattcctgactggtatatgccctgctgtgctgcttgcaggggtggcttgggagagtggggtgctaactctgccattagccttcaccacccaccaaccacctcttgtccacacacaaaccaacacccaaccaatactgtgggaccgacccgctcacagctgaaggttatgggccaacagagtttattcagggttgtggccccagcctgggctcctcaatggaagccacaccttgattgagcctgggagtttcttgccggggcagggggtgcttctgtctgccacctcccagggtcacacctcatagaggatcacagggaaatccacgtggatgcgggggtgatccagcttcacgatgccctgaggaatcagattcttatgcactcgcctcagcttggcccgcttctgcccgttcttggtgacgattgtctcctcatagaactcgtgagccagatccccatcctcatcatagaacatagagccgcggcgcgtgaatacgaaggggggcacagctcggccccgaggccgcaccaaagcttgctcagctcctgctgcctctgagccgccgcctccggccgccgaggcgaagggccacaggccccgagctttggacccgctggcgcccatgtcagggccgccggcgcatggcgggccccgtggccgctctgctcacaccgcagtccgcactaccataacctgccccagccgctgatcgcaggtgccgccgccgccgccttccgcaggctcggctgtctccccgct

SEQ ID NO: 434491 - DNA, 907 bp, Homo Sapiens
tttttgcaggatctacaaatcattttattgaaattgaacaaataacacaacagtcttcctaagctaggggccatcctccccaagccatttcccacattatagaagcacagagcttgcacagtacttaaattaaaaagtcacctctatatagaaatcagactctgccacgacatcatcatggactatttacaaaccttcacattataagtattccttttatggtttttccctcctttctttccctacccaggggttctagtgctttcccttgactgatcctgaaggggtgggggttactgtaagggagggggtggtaggctactcataactactggcaccagccttagggtgttgtcccttaccacaaggtggtgaacagtcccctcccaattggaggggtggaggatttggtgcaaagccatggagattagacagaataggtgggttggagtaactccccataggcacaagcatccgcagcctgtcctgaccccagcctgcactctctcaactcctcaactgggggttcggggttggggggcaacagttagttgcagtagggggatcagcccagccctgggtagagggagaagccccctcccagtccccagtcctatcaatagccagctaactgtccatccatctgaaggcgggaactaatggcaggtaggtcggaagactcaggctggcactgaccccagcctctgtcaacacaggagagatcgaggtagcaaacggctgatatgctctgactagggggttcaaagggaggtgccggacaggaagttcctactggtatacagttgccatcagctagggctggagaaagcataactttcttgtaaagtgctgtaggcctctgcaggctagtgccccggcaagttggagaaagcgaccaggcaggaac

SEQ ID NO: 434492 - DNA, 2104 bp, Homo Sapiens
aactggaacatgctctaatctttagtttatttctggttaaaaatatagcaatccagtgcagtgtagtaaagaagtctgctcgaaaggtagcagagaaacagctaaacataagcaaagcaaggcagagtccataagacgggctggccccaagacgaccggatggggaatccctgcagcgcctccccgggcacaggggtcctgcgtatggccgtgcccggacccctcaggcacgtccatgcacacgagagccagggccagggggcactcggacatcctggcaaaccttgttcttttgtttgggtgatggagcgaccctggtggagaaggcagaaacataaggaacctgtttttgttggactgaacaagttacattgtacattttagggggctggatatgctacagtttctcaggaagtttcaagccactgggtttgaaccgcattcctgtcctgggaccaggcccactgtggtgtagcactgaggcatctggaaggaatatgcatatctgttaggggaagttgaggcaggcacagtacagagatgtgaaaacccgtggagatcagtaaccatgggagaaggcgtcctctagggccctcactgctggggacacggaaccccacgcgtccaccctgcacgccaagcgcacacacccagagccccggcgcgagcccagctccacggcacagcccccttggcttccgtgcttagctgagcccaggcggatcggagtgggccccggcttccctggggtctggtgggggaaacagccgaatgggacccacagtgagtgggcagcagaagaaaagggctttgctttaaaactcggtgtggggagtcggcttctcatggaaggccgggggcagtgccgagaagagggaaggacctgcatccgtctcacagggaggaggtggccgatccctccccctccctcaggtgtgcagcacagatctcacacagaaaaaggccaggctactgcccactggggtgggccaccctgccccatgcctcctgcccatacttgtcacccgtctgttctagacagagaaagcagtgaatccactttctaagctcgtgtcgacgggagtcagccctgccactcaggggccgcggggctgaggctctgccccgggctgccctccatccacacccaagacgggacgtgtgaccacgaggacaacgtccgctgttaccactgatgtgccgggatcccttctgtctccacgtggagctggaggggctgcgtgctggcctccttctgccatgccacacagcagagtgttatacaagcaaagaattttggctaaaatccaaaaaacattacccagaaaaaaaggcaaactgtgagtgatacccaatcgtgtggttcttctgtgagaggacttggaagtcgctgggctgtccgagttgcggtctttcccttcttgtggttttgcttttaattttaatgtcccttttttctaccctttctctatttttgctaccgcgacatctcatcagatgaaaaagttaataaacagaatggcgactccgatgttgagcaagatcaccatgaccaccaggataggcgctgagcccgtactggacttgagctcatccccattctcctcgtcggactctagagcgacaggcaaggatttctggggcggggagaaggtcaagtcccaacgcagcaaccggggctcggccccgcccagccgcaggctcgccagtttctgcacggcgggctccgcggaggaggccggcctgaagttctccttgttctgggccttggaccgcagtctctgcaccccgaagccccggtcctcggggcggtggtcgtcccccaagccccggcaggcgccgcccttgctgtagcgtcttttctggggatgcgtctccatcctcagcaagggtttcatctccatccggtagttgctcagcttctcctcctgcagctccagcagcctggagcctccggggctgtggttgctggcccggtggtgggaagtccacgtgaacacggggggtgactccgtccgccgctcccgcggcttggggttcccgggctgcttgcggcccgaacctcgggtgcggaagtcatccacgagcaggccgccgcgcaggg

SEQ ID NO: 434493 - DNA, 443 bp, Homo Sapiens
  misc_feature (433)..(433): n is a, c, g, or t
aactggaacatgctctaatctttagtttatttctggttaaaaatatagcaatccagtgcagtgtagtaaagaagtctgctcgaaaggtagcagagaaacagctaaacataagcaaagcaaggcagagtccataagacgggctggccccaagacgaccggatggggaatccctgcagcgcctccccgggcacaggggtcctgcgtatggccgtgcccgggacccctcagggcacgtccatgcacacgagagccagggccagggggcacttcgggacatcctgggcaaaccttgttcttttgtttggggtgatgggagcgaccctgggttggagaaagggcagaaacattaagggaacctgttttttgtttgggacttgaacaagtttacatttgttacatttttaggggggtttggatattgttaccagttttnttcagggagt

SEQ ID NO: 434494 - DNA, 1077 bp, Homo Sapiens
  misc_feature (67)..(76): n is a, c, g, or t
  misc_feature (236)..(236): n is a, c, g, or t
cccaaatagtaggggcccccaccaaatgggccccaaacccatggggggccaatggggttctggggtnnnnnnnnnnaagggaagatgggaaataaagtggggagttccctgtggagggctattgaagggcagaaggggattttcaggggtttgggctcccatgcaggggtagggaagccagtagatggccggtgggtacccgactcaaaagggcagcaatgccatttccctaggtncagaacaccaattccctcccttggtcaccgatgccctgtcctagaagctctccaatcttcttcaggcgggctggagtatggacgctcctccatgcccaactccctggcatccaagacggactggggcatcaccctccagatcctccatgtggcccaggagttgcttgagaaagtgctcgctggaagactcgccctgcaaggccaggtgcacagccagggcctgcaggatggcgccattgtaacccagggaggaggcgtgtgtcagctgggccgagagccgggcaaacttctgcacatcctggacactgctataggccagggagatgccagccacccgcatggcacctccattgccataggagcctttcccgttaaactgggcccgggcaggttcaaagacatcgcgacatttggggttcaggagcttcttgaagacagtgactactccagcaccatagcccctgtcagggtctttcttgtactcctgagcaaatctgtgagccatgtccacctcgtcaaaggcctccttggctagcagggactgcaccagggccctggccatggctgtgtcatctgtgtagtacaaggcttctgtccgctcactcccgggcgtgccggggtccggctccagactctggacatgacgcaggactgacgtcaggtcgacggtgtcgtgggcctcgtagaaggagcccacgcagtccccgagcagcgcgccagccaggcagcctcggaagcgcgagagggagcgggccgcgccagcccctccacctgccgctgccgccatcgccgctgcggccatccgcgcgcagactgctcgccatcccgggaattccggacc

SEQ ID NO: 434495 - DNA, 1134 bp, Homo Sapiens
gtggaccggtccggaattcctgcgatgccgcagcggcgatggcggcagcggcaggtggaggggctggcgcggcccgctccctctcgcgcttccgaggctgcctggctggcgcgctgctcggggactgcgtgggctccttctacgaggcccacgacaccgtcgacctgacgtcagtcctgcgtcatgtccagagtctggagccggaccccggcacgcccgggagtgagcggacagaagccttgtactacacagatgacacagccatggccagggccctggtgcagtccctgctagccaaggaggcctttgacgaggtggacatggctcacagatttgctcaggagtacaagaaagaccctgacaggggctatggtgctggagtagtcactgtcttcaagaagctcctgaaccccaaatgtcgcgatgtctttgagcctgcccgggcccagtttaacgggaaaggctcctatggcaatggaggtgccatgcgggtggctggcatctccctggcctatagcagtgtccaggatgtgcagaagtttgcccggctctcggcccagctgacacacgcctcctccctgggttacaatggcgccatcctgcaggccctggctgtgcacctggccttgcagggcgagtcttccagcgagcactttctcaagcaactcctgggccacatggaggatctggagggtgatgcccagtccgtcttggatgccagggagttgggcatggaggagcgtccatactccagccgcctgaagaagattggagagcttctagaccaggcatcggtgaaccagggaaggaagtggtgtcctgagctaggggaatggcattgctgccctttgagtcgggaacccaccgccctctactgctttcctacgctgcatgggagccagaccctgagattcccttctgcctttccataagcctcccaaaggactctcatttattccatcctcccttggtgggggacacagaacacccatggccacccatggctgggggcccattgctgggggccccaacctagggggatgggatcaggggcccaaaaaacctgggcaaacaaaatttgtgaagggttaccaagggaaaccgaacttcctggtccccaaagcctgggaccgg

SEQ ID NO: 434496 - DNA, 2291 bp, Homo Sapiens
  misc_feature (63)..(63): n is a, c, g, or t
  misc_feature (333)..(345): n is a, c, g, or t
  misc_feature (380)..(390): n is a, c, g, or t
  misc_feature (527)..(527): n is a, c, g, or t
  misc_feature (535)..(538): n is a, c, g, or t
  misc_feature (544)..(544): n is a, c, g, or t
  misc_feature (548)..(638): n is a, c, g, or t
ccccccaccgccgtgtatccgtctccggggcgcgaatattctgtatattcctcacaggggcanaacaaagtcgcggttatagcacgggcgtgttccacatgtagggggcggagcacctggtcccagttttattatttggggttttctcattttccagaggaaagagcgcccgagaagcgagctcttaaaacaatttttcttccgaaaatattttcccacagggctcgcggcgcgttaaattttctcttatatgagggctcccccccgcgggcctcccctcttgggataaagagtcccggaaaaacggcccctcgagaaaaccctccagtttgnnnnnnnnnnnnnagaaaacgatatcccgctgccctccccgggggggnnnnnnnnnnngggggaggatacccaggcctttagtttctttcccggtttctctcttggggcacccggctacgaaccaaatttcgttttaccctatttggggccgggggccccaaaagaaatggttttgaaaagtttttcgttggggnggtggttnnnncccaantttnnnnnnnnnnnnnnnnnnnnnnnnnnnnnnnnnnnnnnnnnnnnnnnnnnnnnnnnnnnnnnnnnnnnnnnnnnnnnnnnnnnnnnnnnnngagatttaccaaaaactgtttattgcgacttccactggaagctgttaataagccacatggcagccaagagccaggtgtgacctagatcagctggatgcaagtgcctgtcccttcatccacacaacctgctgctcggggaccctgctaggatgcgcttgctggcaaactggctaaaacccaacagggagaaatgatgctactgctcatcatttccacctccccacatcccatgtccaagacaatacaggaaaatgccacaagtacccctccaaaataaacccgcctgcgtctgtctgtcctactgaggagccaggagtgtcctacggctctgcagcaaaccagagacccagcaccagcgaggcaccagtcccttgctcgctgttccagtgacctcccctgcagagaccccagcctcaccggtgtactcagtcagctccacaatgcaggaaaagtgggaagccacactcaaggaagcgcagggtttctgattggagctgtagttggtcccaggggacctggcagagccccaacagctgtagccctcatcaactcttctggaagacacggtgcaggctttgggccaggatgtctgtctcctcgtagccttcacagctttgctgccagctctctggcacctgatccatcccatagtaggcaccagcaatggccccagccatggtggcaatggtgtctgtgtccccaccaagtgagatggaataaatgagagttctttggaggctattgaaggcagaagggatctcagggtctggctccatgcagcgtaggaagcagtagatggcggtgggtaccgactcaaaggcagcaatgccattccctagctcagacaccacttcctccctggtcaccgatgcctggtctagaagctctccaatcttcttcaggcggctggagtatggacgctcctccatgcccaactccctggcatccaagacggactgggcatcaccctccagatcctccatgtggcccaggagttgcttgagaaagtgcttgctggaagactcgccctgcaaggccaggtgcacagccagggcctgcaggatggcgccattgtaacccagggaggaggcgtgtgtcagctgggccgagagccgggcaaacttctgcacatcctggacactgctataggccagggagatgccagccacccgcatggcacctccattgccataggagcctttcccgttaaactgggcccgggcaggctcaaagacatcgcgacatttggggttcaggagcttcttgaagacagtgactactccagcaccatagcccctgtcagggtctttcttgtactcctgagcaaatctgtgagccatgtccacctcgtcaaaggcctccttggctagcagggactgcaccagggccctggccatggctgtgtcatctgtgtagtacaaggcttctgtccgctcactcccgggcgtgccggggtccggctccagactctggacatgacgcaggactgacgtcaggtcgacggtgtcgtgggcctcgtagaaggagcccacgcagtccccgagcagcgcgccagccaggcagcctcggaagcgcgagagggagcgggccgcgccagcccctccacctgccgctgccgccatcgccgctgcggccatccgcgcgcagactgct

SEQ ID NO: 434497 - DNA, 1158 bp, Homo Sapiens
  misc_feature (22)..(22): n is a, c, g, or t
  misc_feature (60)..(92): n is a, c, g, or t
  misc_feature (145)..(180): n is a, c, g, or t
gccctatctggatgatgactantatgggcgaatggagctcaccgcggtggcggccgcatnnnnnnnnnnnnnnnnnnnnnnnnnnnnnnnnnatcaggccaaatcggccgagctcgaattcgtcgagagcgggccggggatgatnnnnnnnnnnnnnnnnnnnnnnnnnnnnnnnnnnnnaggggaagggttcgggtccgggtcgggctcggcgggcgcggggtgcgggacggcccagggcacggcggctgcagcgggagcacactgagcgcccgcccgccatgtccaggaagaagacccccaagagcaaaggggccagcacccccgctgcctccacgctgcccaccgccaacggggcccgaccggcgcgctccgggactgcgctttccggccccgacgcgccgcccaacgggcccttgcagcccggccggccctcgcttggcggcggtgtcgacttctacgacgtcgccttcaaggtcatgctggtgggggactcgggtgtggggaagacctgtctgctggtgcgattcaaggatggtgctttcctggcggggaccttcatctccaccgtaggcattgacttccggaacaaagttctggacgtggatggtgtgaaggtgaagctgcagatgtgggacacagctggtcaggagcggttccgcagtgttacccatgcctactaccgggatgctcatgctctgctgctgctctacgatgtcaccaacaaggcctcctttgacaacatccaggcctggctgaccgagatccacgagtacgcccagcacgacgtggcgctcatgctgctggggaacaaggtggactctgcccatgagcgtgtggtgaagagggagggaccgggcaaagctggccaaggggagccccgggcccggggggtcgccgaggcccctccctcctacccgcgtcgagagccccgcaggtcttcgcgtggatacgtcagcacatcccgctctccctaacaacccccacagccggcgcgagctgcagccgggcgccgcgccgagcgttcgcggcggtctcccgcgagcaccggcgccggagcggacgcatccgcgcagcgcagggactgtgcggtgcgcaggcgaaacaccacctgctccatggagtgcgtgcgccgcctcgcgcggctccacctactcg

SEQ ID NO: 434498 - DNA, 1409 bp, Homo Sapiens
  misc_feature (173)..(174): n is a, c, g, or t
  misc_feature (369)..(369): n is a, c, g, or t
tccacacaagccttggttaaaatctcggccccaccatccccttttaaatgtttttggggccatgaaggaaaaagggaaccaaaattttgatttcccccaccaacaacttttttgcttggtcattcccgtctgccaagggtaaaatctggggttgaaattccaaaagtccaagnnaagccttcctaaccaaacaaaatgccctccaaaagaaggaaaataacatcaggtctgatatcaaagaggagttttgagcctgtagagatgaattcagaagacggagctttcacccgcctccctgggccatgaatggcagctctttttaagtaaacagtgcaccagttgctgccatcacttggcatcagccctccnagtaattagcaaaataaggtcaacaaaccaccaaatccccaagtcctccaagcgtcaacagcttccctactgcagtgccagtgtgtcccaaacagaatcgatccacaccaaaacatcccaggaagaaggagtagagtaaagtggttatgaagtagtgtccggtatactttatacaaggtttattttctcgtagaaaggtcctaggactggcacactcaattccatctaaggcatggcactggactgaagtgtgttccacgtcgctgtaggcctgaccgccgaacttgagacaaccataaccaagttcctgggatgcagttgcatttccgacatgatccactgggtcttcacattctataaattcatcaggtctgtaattcaccagtaagatcatgatcatcatcatacggtctttgcaaatcgctgtttgcatgcacgtaatcaaaacgggcaaaagacatttcttcatcaagttttctggggttcggtttcaccctgctgacccctttccaagccaattaaactgaagcacagcaggtcaaacggacagccaccaaaatgaaccttttgttggagaagggaggtgtttctggtcctgtttctataaggattctacttctgccatggtttcatctcttcagtaggcaaacaacaagattctgggggcaaaatttaagccaaagtattctcagtcctctttgcatttcccaaatgccttttcttgtttgatcaaaaagagatgttaaaaaatggcgtgattaggtaagagcagaggatgaccggagagtgggggtcgccatattcccagctcgcagcacccccggggccctccggctgggcggcgccagcggatgtgagctcaggctcagcggtcgcattttgcgagtggctccgagacacacaatgcagcagaagtaaattccccagcagcaaagccgcctggccgcacagaagtaagtaactaaccgggcaaccacctagcaccatcttcccgggcacaggagcggagacccggcctcaaccacaccccaggccagcag

SEQ ID NO: 434499 - DNA, 1532 bp, Homo Sapiens
  misc_feature (13)..(13): n is a, c, g, or t
  misc_feature (73)..(73): n is a, c, g, or t
  misc_feature (135)..(135): n is a, c, g, or t
  misc_feature (164)..(164): n is a, c, g, or t
tgtaaggatattnttaattttattagcatgggctggtaaacgctgatttttagattggacaattctgccaggnggaatagctcaactcacacatctgatgccgctggctttcaaaacataagtggaatgaaaaanttattgcactgcatatactgcctctggancataatggagacaaaagagggcttaataggatggctcatttcaaatgactaggtttctgcaaaacaaatataattttgagtttattccccctactgaaaatactcatacagtactccaagttggtaaaatttattctacatttaaattcagaaagtcagaatttcagtgtgtattacaatccacggccatttctatttctgctgaagattttcattgttcagcttcagatctccttgcatgaagactcagggtcacaagaggaacatggatccaaatattcattttgctcaacttgttaggtccacttgctccaaaggactgaagatatagcaatgtacagaaaggaagactatggaaacccatccacagcttgtaaactcgccactatcctttatgttttgtgcatgaggaaaggaacaaatttgattccccacaacactttttgcttgtcattccgtctgcaaggtaaaatctgggttgaaattccaaagtccaaagaagccttcttaaccaaacaaatgccctccaaaagaaggaaaataacatcaggtctgatatcaaagaggagttttgagcctgtagagatgaattcagaagacggagctttcacccgcctccctgggccatgatggcagctctttttagtaaacagtgcaccagttgctgccatcacttggcatcagccctccagtaattagcaaaataaggtcaacaaaccaccaaatcccaagtcctccaagcgtcaacagcttccctactgcagtgccagtgtgtcccaaacagaatcgatccacaccaaaacatcccaggaagaaggagtagagtaaagtggttatgaagtagtgtccggtatactttatacaaggtttattttctcgtagaaaggtcctaggactggcacactcaattccatctaaggcatggcactggactgaagtgtgttccacgtcgctgtaggcctgaccgccgaacttgagacaaccataaccaagttcctgggatgcagttgcatttccaacatgatccactgggtcttcacattctataaattcatcaggtaggtaagagcagaggatgaccggagagtgggggtcgccatattcccagctcgcagcacccccggggccctccggctgggcggcgccagcggatgtgagctcaggctcagcggtcgcattttgcgagtggctccgagacacacaatgcagcagaagtaaattccccagcagcaaagccgcctggccgcacagaagtaagtaactaaccgggcaaccacctagcaccatcttcccgggcacaggagcggagacccggcctcaaccacaaccccaggccagcagcacagacccaagaactgcgtggtcagg

SEQ ID NO: 434500 - DNA, 658 bp, Homo Sapiens
  misc_feature (623)..(623): n is a, c, g, or t
gagagatctttaaagcgagtcgggtatagtccaagtacctaaatctatggtggacatggatgctggaggatggaccacagaccccagaagaaatgggatgccagagcataccgactgacttctaccagcaaatcttcttccagttttctctgctcctcttgggagagggtctcacctttctttgcctctgccaggtaatgacgaataaaatgcaactgctgttcttgagtggggtagtctgtgggccttgctttgtagaaagtgcattcctcgtgagtataatcataaacccactcacaaaaatggttcccaatgtcaaagcccctatagttataactgctgtactccgaagtccagcagcatgaggctgtcagcattttctggctctgagagcatgaagatgttccctgggggaatggggtgaggttctgctcactccagagcgctctggctcttccatcttgggttaggagactcagatgccttctcctaccttcctggatgtcattgtggcagaagacgactggcgatggggtagactctagtaacttcctgaggttgcccatctcatccttcaggctgtacatctccagcaggttcatctcagggaggccagttggggncaggtcctggatctgttttaggtacctgaagccca

SEQ ID NO: 434501 - DNA, 1594 bp, Homo Sapiens
  misc_feature (1511)..(1543): n is a, c, g, or t
ggggcaggttctggatcggaagaagaagcttgtttattgtgttacatacacagcacggggctctggcctgccagccatggggacctactcaaactcaggaacaggccggtctcctgaacctcagtttcacttgggggctcagcccagtcgccagggccttctgctcgttgttcctccctccaaggtcctgccctggaggctccaggagaaatccaaggagtgggagggtggagtcaggatgaggagtggacactggtcagctgccccttctgctggaagtagaactggaaccgagactgggcatagtccaagtaaccaaattctatggtggacatggatgcctggaggatggaccacagaccccagaagaaatgggatgccagagcataccgactgacttctaccagcaaatcttcttccagttttctctgctcctcttgggagagggtctcacctttctttgcctctgccaggtaatgacgaataaaatgcaactgctgttcttgagtggggtagtctgtgggccttgctttgtagaaaggccattcctcgtgagtataatcataaacccactcacaaaaatggttcccaatgtcaaagcccctatagttataactgctgtactcgaagtccaccagcatgaggctgtcagcattttctggctctgagagcagcaagatgttcccttcctggatgtcattgtggcagaagacgactggcgatggggtagactctagtaacttcctgaggttgcccatctcatccttcaggctgtacatctccagcaggttcatctcagggaggccagttgggggcaggtcctggatctgttttaggtaccgctccatggtcccaaacagccagtggggctccttggtgaaaggcatctccatgccatgaaattgcgccatcttcgtggcaatggctgctgacaacaactggctctcgaagctcttgagttttcaatggccgacttgggatgtactgttccagccggccctctgggaagactccgtacagctggggccccagcgaccgctccgcaagtatggcgaacatcacgctttctagcaccagggagtccacgccctgcaagatggctccgtacagccgcagaagcacctcccggggctcctcgccaacgctgggcaggtggtccgggagcgagcagcggaagagcaggttgctgaggcctccgctcacggggtaaaccctcagctcctcgggctgcactcggcgccaggccccgcccaagtactcccggcaccattggtaggctcggcgctcggcgtcacgcgacagcgacgaggcgcgccgccgttttggggtagtgtccgggcacttagactgctgcaagccgtctttggccaggcagccgccaacagccccgcttccggccacagctgtcgcctcggccgccatggcgcgggctcgaccgggccccaggccaggctgcgctccgctcccctcccgctctcgacgaattcgagctcggccgatttggcctgatnnnnnnnnnnnnnnnnnnnnnnnnnnnnnnnnnatgcgccgccaccgcgtaaactccaggcgcccataggagtcgatcattccc

SEQ ID NO: 434502 - DNA, 1032 bp, Homo Sapiens
  misc_feature (399)..(399): n is a, c, g, or t
  misc_feature (535)..(593): n is a, c, g, or t
ggacgccccaatggagggtttagctgtccttcccaaccgagggggtgcggactgtgggattccaagttggcctggtgggtttctggagccacaagctttaagccgttggtcttatttttatttaggaaagggggggtctccctaatgtggtcccagggctgttttagagcctccggtgctcaagggattcttatcgccttcaaccttcccaaaagctttggggaaataccaggcccccaggcttccggtgtaatgaggtgttaatccagacggtgaacctcggtgtcctcaactgcgcaacgggaacaatgctacccgcatcggcgtaagcgacagcccctaaagccactggtgctgcggcgctcacaaccccctcacctgcaagatggctccgtacanccgcagaagcacctcccggggctcctcgccaacgctgggcaggtggtccggggagcgagcagcggaagagcaggttgctgaggcctccgctgcagacccacaccaggcgcgctcagcccgcggccggccctacctnnnnnnnnnnnnnnnnnnnnnnnnnnnnnnnnnnnnnnnnnnnnnnnnnnnnnnnnnnnaagaggggggcgaaaacatggagcatcctgagggccccgcggctgacccctgaccccgatccgcgcaccggagaggctgacccctgacctcccacctcacggggtaaaccctcagctcctcgggctgcactcggcgccaggccccgcccaagtactcccggcaccattggtaggctcggcgctcggcgtcacgcgacagcgacgaggcgcgccgccgttttggggtagtgtccgggcacttagactgctgcaagccgtctttggccaggcagccgccaacagccccgcttccggccacagctgtcgcctcggccgccatggcgcgggctcgaccgggccccaggccaggctgcgctccgctcccttcggacgggcatcccggaattgccgggccgggggcgggcggtgagggagcatttgtgttttatggggggtgtag

SEQ ID NO: 434503 - DNA, 733 bp, Homo Sapiens
  misc_feature (291)..(363): n is a, c, g, or t
ctctgggaatacaggcccaggcttcggtgtaatgaggtgttactcagaccgtgaacctcggtgtcctcaactgcgcaacgggaacaatactacccgcatcgcgtaagcgacaggccctaaagccactggtgctgcggcgctcacacccccctcacctgcaagatggctccgtacagccgcagaagcacctcccggggctcctcgccaacgctgggcaggtggtccgggagcgagcagcggaagagcaggttgctgaggcctccgctgcagacccacaccaggcgcgctcannnnnnnnnnnnnnnnnnnnnnnnnnnnnnnnnnnnnnnnnnnnnnnnnnnnnnnnnnnnnnnnnnnnnnnnncgggcgcaagaggggggcgaaaacatggagcatcctgagggccccgcggctgacacctgaccccgatccgcgcaccggagaggctgacccctgacctcccacctcacggggtaaaccctcagctcctcgggctgcactcggcgccaggccccgcccaagtactcccggcaccattggtaggctcggcgctcggcgtcacgcgacagcgacgaggcgcgccgccgttttggggtagtgtccgggcacttagactgctgcaagccgtctttggccaggcagccgccaacagccccgcttccggccacagctgtcgcctcggccgccatggcgcgagctcgaccgggccccaggccaggctgcgccccccgct

SEQ ID NO: 434504 - DNA, 346 bp, Homo Sapiens
gtccatcctccaggcatccatgtccaccatagagtttggttacttggactatgcccagtctcggttccagttctacttccagcagaaggggcagctgaccagtgtccactcctcatcctgactccaccctcccactccttggatttctcctggagcctccagggcaggaccttggagggaggaacaacgagcagaaggccctggcgactgggctgagcccccaagtgaaactgaggttcaggagaccggcctgttcctgagtttgactctaaagccaccatcctcacgagactctggtgccccccaggctcccagacctttgagcaaccttcaccgtacagacccc

SEQ ID NO: 434505 - DNA, 370 bp, Homo Sapiens
gcatgaggcactgcatgtggcctctggcaagcatttaaaagcctgttctgtgacagcccatgacatcagatccactcaagtggagggctggatagagcccccgacacatccgctggcatggaggttcagctcaggagtacaggagccctgaggaggctcctgactcaccgctccatggtcccaaacagccagtggggctccttggtgaaaggcatctccatgccatgaaattgcgccatcttcgtggcaatggctgctgacaacactggctctcgaagctcttgagttttcaatggccgactctgcacccaggaagctatcagggtggtgatggggctggggcaggagtgggaagggctggggcaatgag

SEQ ID NO: 434506 - DNA, 883 bp, Homo Sapiens
  misc_feature (112)..(459): n is a, c, g, or t
gggtgctcagtaatggagaagttacaacagcccacccagcttgggctggttggtgctgctgaggatggatggatgtgaggggcctgcatccatcccagggcaacatacctgnnnnnnnnnnnnnnnnnnnnnnnnnnnnnnnnnnnnnnnnnnnnnnnnnnnnnnnnnnnnnnnnnnnnnnnnnnnnnnnnnnnnnnnnnnnnnnnnnnnnnnnnnnnnnnnnnnnnnnnnnnnnnnnnnnnnnnnnnnnnnnnnnnnnnnnnnnnnnnnnnnnnnnnnnnnnnnnnnnnnnnnnnnnnnnnnnnnnnnnnnnnnnnnnnnnnnnnnnnnnnnnnnnnnnnnnnnnnnnnnnnnnnnnnnnnnnnnnnnnnnnnnnnnnnnnnnnnnnnnnnnnnnnnnnnnnnnnnnnnnnnnnnnnnnnnnnnnnnnnnnnnnnnnnnnnnnnnnnnnnnnnnnnnnggtgcccgcgataggcttctctggttttgtctttgctgttcctggcagcgctatattgggcaggcttctgtggtctccacatgcctgtgtgcagagtcccccaggccctgggttctggggcccatactgaggagtggggatggccaagccttggctgttgagtaggcagtgcccagttgtgctgtatgggatgctgtttctcacttaagaaatctttccctacctggggggtacaaaggcattatcctgtattcccaggttgtaactttctgcctttgacattcaaccttgagtccacctgtaagtgtaactgcggcagaagggaggggtctgctgtcatccttgatagcctgtgatgagcagagcccctctgccgaccgcgatgcacatgtaatatgagcaagaaataaatttttgatgtgcg

SEQ ID NO: 434507 - DNA, 1248 bp, Homo Sapiens
  misc_feature (75)..(418): n is a, c, g, or t
  misc_feature (437)..(437): n is a, c, g, or t
ctgttcctgcccaatatagcgctgccaggaacagcaaagacaaaaccagagaagcctatcgcgggcaccgtgtcnnnnnnnnnnnnnnnnnnnnnnnnnnnnnnnnnnnnnnnnnnnnnnnnnnnnnnnnnnnnnnnnnnnnnnnnnnnnnnnnnnnnnnnnnnnnnnnnnnnnnnnnnnnnnnnnnnnnnnnnnnnnnnnnnnnnnnnnnnnnnnnnnnnnnnnnnnnnnnnnnnnnnnnnnnnnnnnnnnnnnnnnnnnnnnnnnnnnnnnnnnnnnnnnnnnnnnnnnnnnnnnnnnnnnnnnnnnnnnnnnnnnnnnnnnnnnnnnnnnnnnnnnnnnnnnnnnnnnnnnnnnnnnnnnnnnnnnnnnnnnnnnnnnnnnnnnnnnnnnnnnnnnnnnnnnnnnnnnnnnnnnnggtatgttgccctgggatnggatgcaggcccctcccatcctcccatcctcagcagcaccaaccagccccacgctgggtggctgcttgtacttctccatactgagcaccccagcccataggatgatcagctgctgccgtcctatggaactcaggtgtggctctgtggcttcctttggccacagaaatggaagtggggtgacacacattacttgtggcctgctgtggcctttcccctgcctcagtgagcatggagaaatatgtccaggtaggctgtcgtcagcacaggtctgacaggccccagccacggtggcccacaggtgcaagcaagaaataagcagtgccaactgtagccgctgcgctgttggagatctttgttactgcagcacaatctggctcatgctgactgatcctgcagggtaacagctttatttgccttgctcctttattgctggatctttgggcttttccagttctgctgttcaaaaaacagtgacacccatgaggtgggtgttagagggcccagaccccagccaaggcactgcatgggcatcattctcattcaacccttctaaccaccccatgaggaaaaactctggtcacagctcaaaaaggtcaggtaaggaccctcagctcatgcggggaggggaggaggcaaggccaacctccagtccctgctctaaacccccatgtagtggtaccgaaccatgaccaccctggcaagagccttcatgcacctagcaagtagtcacagcatgcatgtgcctagaattgttcctcgtgccgaattcgccacccagcctcgctacctaagggaccgttatagtactggc

SEQ ID NO: 434508 - DNA, 1017 bp, Homo Sapiens
agtcccccgctttctcccccttctcttcactcctatatcttatagttgaggacgatgaaggagccggaattccctgccaataaacacctgctaaagaaatgtgaaaagagtggaaacgtgctatttggaggttattttcgtagtcgacatccaggagatctccagagatctatttcagccccacctgttgatttcatcatgaaaaggaggaagctcaaactgaagtgagttaaaaacttcatctcctagagaggactgtggctcggcctgagttgagttttttttatgtttatgtgcaagcgcaatgaagaagaacaccagcaagactaccatgaggatcaataagcaagatgctctctgcaccccacactcccatgatccgagagatcttcaaaatatgttggatggaggagagtatgccccttttgtatctcctcccatgttagagagcaattttatccaggtcaacagaagaggtgaatccatttaccttcataaccgagccaactgggtgaccgtaggcatctgtttttccagctccacccacaagatccccaatgtgatgctactggcccatctgacacctggtgcccaaaaagatacagaaaccctgtttaaaagtctcctgacatctcctcctgcagagaaactagtgctcaccaggtttctccctctgcagtttgtgactctttctgtgcatgatgcggagaacatgagcctgaaagtaaagctggtgagtggtcgagcctactacttacagctctgcacctctgcatataaacaggacaccttgttttctcaatgggtggccctcatctccctcttgaatcaggagaaaagccaaagtttccaaagtgtcggaaggtttcaagtctctcaggaattacgaatagcacagacatcacaggctccatggatgtgacggatgtcaccacgttcacagcgcatccttgaccccgtaccatgtattgccgggtaccaggccttgaacatgtcagggacagcatagatttccca

SEQ ID NO: 434509 - DNA, 1783 bp, Homo Sapiens
  misc_feature (173)..(173): n is a, c, g, or t
tttgttaaaaaatcggaccgggccccaagtggcccttaagtttttaataatatcgggcccttcatctattaagggggccccacttttgttacccaaaaaaagttggggttaccgcgtaaagacttggggccccctcggagggattatctcttgaggcggccgcccccgatttntaaccatttccacttgtaagaagggttttatgagggttttccagtttctaacaaggagtttagttttattttctctgtgcatttgcaaaatactcaggaccaacataaaaaagaaatacctcctgtggaaaaagttacattaaaaaggggaatggagtgggggtgctgaaagggattagtacctttgccccaaggagctacagcatctctgattggtccaaggaatagaaaagatattgggaaaatgtaacaggaggaaggaaaatgtgaatttactgagggagagggcctcgaagtgggcctcgagggggaactggtggccggggagtgggtctgggtggagggagaggcccccgctggtagccatagggtgggggtcgtggagggccagtgtatccatgggggggcatcagtggaggaggtccacgcataccatgcggaggcataggacctgggtgacccatgggagatccgaatggaggccctcgggggggcatgcccattggaggaggtccaggatgaggcattccaggtggtggtcggggcggtggctggcccccagagcctgggggtccagcgtggggatgtcctaagccatgagggccatggtgtgcaagctgcatctgagacatccctggatggggcatcccacccggtgggaatgggtgaggatgtgagtgtccatgaccaggatgtcctgcccctggggttcctgccgatggggggccatgtcctgcagccccaggaggcataggtggtgggggcatggctgggggtatcccaggtgggagggctccaggaggtggcactgggggtgggaaggagccaggaggaggcatgcctggtggaggaagcccagaccccaatgatgataccacaggattgggagcagagggtggaggaggtgcatctgcaaacagctgatgagggcgatcagcctgggagagcgggttctgagctgccagaagtcgttcggctgctgagccatggcgctcacccttggagtccttcttgaaggcataagatacggtgataggacggttacagaggtactgcccattcatggcttcaattgctgcatccgaagcatcaaatgaagcaaaattaataaaggcataacctttggagttgcctgtgtcagggtcccgcataattttgggggtttgtaagatgaccccaaaggcgctgaaagtatcataaagcaacttctcatcaatctcagggtccaggttcccaatgaaaatgttggcccctacatccaggtttttgttgtgagctgatgctttgttcacccgtattggcttcccatagagtttgatcatgttcatgatcttaatggcatagtcagcatcttcctcactcaagaattccacaaagccatagccttggtgctggccagtgactctatcctttggcatgtgggtgttgactactggtccagcctggagaaacagttcccacagcagcggttcactaaccttctcatccaggccccccacgtacacagtggcatcctgattccgctcggagatcggcccggcagccatggcgaaagagatcccgccgtctcccagcagcggtatcccatactcccgggcgtacagcctgca

SEQ ID NO: 434510 - DNA, 1048 bp, Homo Sapiens
ggggtgggccccccagagggctggggggttccagcggtgggggatgttcttaaggccatgaaggggccatgggtgtgcaaaggctgcatctgaggacatcccctgaatgggggcatcccaccccggtgggaaatgggtgaggatgtgagtgtccatgaccaggatgtcctgcccctggggttcctgcccgatggggggccatgtcctgcagccccaggagggcataggtggtgggggcatggctgggggtatcccaggtgggagggctccaggaggtggcactgggggtgggaaggagccaggaggaggcatgcctggtggaggaagcccagaccccaatgatgataccacaggattgggagcagagggtggaggaggtgcatctgcaaacagctgatgagggcgatcagcctgggagagcgggttctgagctgccagaagtcgttcggctgctgagccatggcgctcacccttggagtccttcttgaaggcataagatacggtgataggacggttacagaggtactgcccattcatggcttcaattgctgcatccgaagcatcaaatgaagcaaaattaataaaggcataacctttggagttgcctgtgtcagggtcccgcataattttgggggtttgtaagatgaccccaaaggcgctgaaagtatcataaagcaacttctcatcaatctcagggtccaggttcccaatgaaaatgttggcccctacatccaggtttttgttgtgagctgatgctttgttcacccgtattggcttcccatagagtttgatcatgttcatgatcttaatggcatagtcagcatcttcctcactcaagaattccacaaagccatagccttggtgctggccagtgactctatcctttggcatgtgggtgttgactactggtccagcctggagaaacagttcccacagcagcggttcactaaccttctcatccaggccccccacgtacacagtggcatcctgattccactcggagatcggcccggcagccatggcgaaagagatcccggaaattcggacc

SEQ ID NO: 434511 - DNA, 1505 bp, Homo Sapiens
  misc_feature (1377)..(1405): n is a, c, g, or t
aaaggagggacccgcgcgctgctggaggcgatccgcgtgcacccggacgtgcgggcggtgggcgtagagccgcacttcttcgacaggaactacgaaaaggggttggagtggtacagaaatgtgatgcccaagactttggatgggcaaataaccatggagaagactccaagttactttgtgacaaatgaggctcccaagcgcattcactccatggccaaggacatcaaactgattgtggtggtgagaaaccccgtgaccagggccatctctgactacacgcagacactgtcaaagaaacccgagatccccacctttgaggtgctggccttcaaaaaccggaccctcgggctgatcgatgcttcctggagtgccattcgaatagggatctattgcgctgcatctggaaaactggctccagtatttccccctctcccagatcctctttgtcagtggtgagcgattcattgtgggaccccgccggggaaatggccaaagtacaggtttttctaggcctcaaaacgtgtagtgactgagaagcatttctatttcaacaaaaccaaggggttccctttgcctaaagaagccagaagacagcagtgccccgaggtgcttaggcaagagcaaaggtcggactcatcctcgcattgactcagatgtcatccacagactgaggaaattctacaaacccttcaacttgatgttttaccaaatgactggtcaagattttcagtgggaacaggaagagggtgataaatgaggctagagaggcagaggaaggctagtcaataagctaaggaggctccttgcctgagtccttgaataccccagcttctgcagcttcacttgctggagtgccaagtagatctcctcctccttcatgcagccaggattgcctccagtgctgttagcttaggcaaacaggtggatcccatggcatccccatggaggaaccaggcccatctgggcagcagcatctggttgaccagatggccaccagaacccactgttcattcttatcttctgctagttaatatagcctgaagacagaggataaatagttgtcaatgtcagagacagtgctattaatgtatatgtgagcgacaaaaaaggtctgctttataggggttctcactctagcttggggagccagggttctagccctgtatctgtcatgggcacctgctgtctaaacctctgcttgggcttctccccagaatgcactttgtggctgagtgctccaggactcctagggagcaaggtcctccctctaaggtgtttctagtcttctctttaaaggtctcatcccacaacccctgacttcctccctccccacatcatgaaggcagaggcatgcacattcctcactgaaaaagaaannnnnnnnnnnnnnnnnnnnnnnnnnnnngaagaaaatgaaagctgacacactcgaagccttctttccaagagccctcttaaatggggttgggtctcaatcttcatgagtatcctgggttgtgcagaag

SEQ ID NO: 434512 - DNA, 679 bp, Homo Sapiens
gcggccgccccctcccctggaggacaacctgttcctcccgccccagggtgggggcaagccgcccagctccgcacagaccgcagagatcttccaggcgctacagcaggagtgcatgaggcaactgcaggctccggccggctccccggccccctctcccagcccggggggtgacgacaagccccaggtgcctcctcgggtacccatcccccctcggcccacgcgcccacacgtccagctgtctccagcccccccgggcgaggaggagaccagccagtggcctggacctgcttcccctccccgggtgcctccgcgggagcccctgtcccctcaaggctcgaggacacccagccccctggtaccacctggcagctccccgctgccaccccggctctcaagctcacctgggaagaccatgcccaccacccagagctttgcctcagaccccaagtacgccaccccccaggtgatccaggcccctggcccgcgggctggtccctgcatcctgcccatcgtccgggatggcaagaaggtcagcagcacccactattacttgctgcccgagcgaccatcctacctggagcgctaccagcgcttcctgcgtgaggcccagagccccgaggagcctacccccctgcctgtgcctctgctgctgcccccacccagcaccccagcccccgcc

SEQ ID NO: 434513 - DNA, 1271 bp, Homo Sapiens
  misc_feature (460)..(460): n is a, c, g, or t
  misc_feature (1106)..(1156): n is a, c, g, or t
taacagttatgcgaagtgttgtctcccccggtgggggttcggggcttttgtccacgggggggtatgggagggtatcccttggggggaaagaaaggccaagggccccttggcctggatttaggaagatggaaaggggttcagttaagttctgttcccaaaaagcttaagaggggttcttcttctttggagaaccaatttcccccggaggtttttccagtggttcccgtgaattttgggcccttctataaaaaaacttcccagagcacctcttgggtagccaagggggagttgtgagcgaacccatggtagcggaagtactcccccagctgttggggagcagctctcttaggtggaagggaggcactgaggtcttctgatctttatgcctgacttcatgcaagtgactcagaatgtgttcataagctatattgttagtctcacccacctcaattaggatgcncaggacagccaggccctgaggcctctcagcagcctcactcaagctgtcataggaatcagagtcataatgtacaatgtggagctctgcaaatgtggcttcactgttgatctggtgttctgacccccctggggatcctttctgaccccagtgcaggtggagctgggcagctacatattttcggggaagtccacccagatacagggtagagggcagagagagttgcactgtgtggccattgttgtgcaggtccaaaggctcggtgccaggctggtcatatccgtggggctgcagagcaggcaaatcagggtcaaatgtcacactgtctgtctgaatatcgatgggcgactgggcattgtttccacactcagggtaagaggctggccaatggtcctgaccatgtgggcctagcttttctgccaaatcaggaggtgtaggatttgatgattagagcaggatctaggagccatatatgtgaaactcaaggcaggaggagatccagaagggaggagcctcatacgtccagtgttgacccccatctgcagccaggatccaaatcacctccagcaggagggcggagaacaacatagtgtcccaggaaggggtgcaggggactgggaatttgaggactagaggactaggacaggcnnnnnnnnnnnnnnnnnnnnnnnnnnnnnnnnnnnnnnnnnnnnnnnnnnncctggcgtgagtgtatttatctctgcttctcttgctgtctctgtctctgtgggcttccaggggattcggtgttcagtagggtatcatgggtttctggatccccaggacaaatctc

SEQ ID NO: 434514 - DNA, 872 bp, Homo Sapiens
  misc_feature (702)..(742): n is a, c, g, or t
ttggggagcagctctcttaggttgaagggagacaactgaggtctttctgatctttatgcctgacttcatgcaagtgactcagaatgtgttcataagctatattcttagtctcacccacctcaattaggatgcccaggacagccaggccctgaggcctctcagcagcctcactcaagctgtcataggaatcagagtcataatgtacaatgtggagctctgcaaatgtggcttcactgttgatctggtgttctgacccccctggggatcctttctgaccccagtgcaggtggagctgggcagctacatattttcggggaagtccatcccagatacatgggtagaggggcagagagagttgcactgtgttgccattcgttgtcgcaggtccaaaggctcggtgccaggctggtcatatccgtggggctgcagagcaggccaatcagggtcaaatgtcacactgtctgtctgaatattcgattggcgcgagctggagcactatgtttccacactcagggataagatggctggctcagatggtcctgaccatgctgggccctcatacgtaccacgatgttgacccccagtctcgcagaccacggagtccaaatcacctccagcaggagggcggagaacaacatagtgatcccaggaaggggtcgcaggggactgggaatttgaggacctagaggactaggacaggcnnnnnnnnnnnnnnnnnnnnnnnnnnnnnnnnnnnnnnnnncgagcgagctcctggcgtgagtgtatttatctctgcttctcttgctgtctctgtctctgtgggcttccaggggattcggtgttcagtagggtatcatgggtttctggatccccaggacaatctcttgctg

SEQ ID NO: 434515 - DNA, 823 bp, Homo Sapiens
  misc_feature (644)..(684): n is a, c, g, or t
gaggcactgagtcttctgatcttatgcctgacttcatgcaagtgactcagaatgtgttcataagctatattcttagtctcacccacctcaattaggatgcccaggacagccaggccctgaggcctctcagcagcctcactcaagctgtcataggaatcagagtcataatgtacaatgtggagctctgcaaatgtggcttcactgttgatctggtgttctgacccccctggggatcctttctgaccccagtgcaggtggagctggcgccagctacatattttcggggaagtccacccagatacagggtagagggcagagagagttgcactgtgtggccattgttgtgcaggtccaaaggctcggtgccaggctggtcatatccgtggggctgcagagcaggcaaatcagggtcaaatgtcacactgtctgtctgaatatcgatgggcgactgggcattgtttccacactcagggtaagaggctggccaatggtcctgaccatgtgggccctcatacgtccagtgttgacccccatctgcagccaggatccaaatcacctccagcaggagggcggagaacaacatagtgtcccaggaaggggtgcaggggactgggaatttgaggactagaggactaggacaggcnnnnnnnnnnnnnnnnnnnnnnnnnnnnnnnnnnnnnnnnncgagcgagctcctggcgtgagtgtatttatctctgcttctcttgctgtctctgtctctgtgggcttccaggggattcggtgttcagtagggtatcatgggtttctggatccccaggacaaatctcttgctgcctctttg

SEQ ID NO: 434516 - DNA, 1126 bp, Homo Sapiens
  misc_feature (801)..(841): n is a, c, g, or t
aaaaaaaggttttgcccaggagccccccttttgtgtaagccaggggggaatttttggaagcgaaaccccctttttaggcagatagtttctggccccaagcctgtttggggaaccaagctttccttaagggttaaaggggaggcccccgggggttcttccgaatttttaatgccctggccttcctggcaagggactccagaaatggggtcataagggatatgttctagtgtccacccccctcaaattaggatgccccaggaccagccagggccctgaggcctgtcagcagcctcactcaaagttgtcataggattcaggattcataatgtacaatgtggagctctgcaaatgtggcttcactgtgaatctggggttctgacccccctggggatcttttctgaccctcagtgcagggggagctgggcagctacatattttcggggaagtccacccagatacagggtagagggcagagagagttgcactgtgtggccattgttgtgcaggtccaaaggctcggtgccaggctggtcatatccgtggggctgcagagcaggcaaatcagggtcaaatgtcacactgtctgtctgaatatcgatgggcgactgggcattgtttccacactcagggtaagaggctggccaatggtcctgaccatgtgggccctcatacgtccagtgttgacccccatctgcagccaggatccaaatcacctccagcaggagggcggagaacaacatagtgtcccaggaaggggtgcaggggactgggaatttgaggactagaggactaggacaggcnnnnnnnnnnnnnnnnnnnnnnnnnnnnnnnnnnnnnnnnncgagcgagctcctggcgtgagtgtatttatctctgcttctcttgctgtctctgtctctgtgggcttccaggggattcggtgttcagtagggtatcatgggtttctggatccccaggacaaatctcttgctgcctctttgccctctctctttatctccctctgcagtctccactccactagctggccagcgactttacagctgcctcctgcttttaaggtggctctgaactggtgtatgtggggacgggggtgctgcctgggctgctggtgaacagctccttaaat

SEQ ID NO: 434517 - DNA, 1297 bp, Homo Sapiens
  misc_feature (991)..(1055): n is a, c, g, or t
gggaaaaaggcccagataccaaccccacccaaaggtttcctatccacctaagatttcagccatttccccccgtgggggtatagggagggattctctgggatgaaagggaagcaaaaggcccatggcctttattgaaaagggtgaaagggcctcgggtagtttggttcccagaaagcttagaggggttccttcttctggggagaacaaatttccccctaaaggttttcccaggcttttccatgaaattctgggaccttctataaaaaacctgtccagagcacactctggtagcaagggggagttgtgagcgagccattgtaggcggaagtactgccccagctgtttggggagcagctctcttaggttgaagggaggcactgaggtcttctgatctttatgcctgacttcatgcaagtgactcagaatgtgttcataagctatattcttagtctcacccacctcaattaggatgcccaggacagccaggccctgaggcctctcagcagcctcactcaagctgtcataggaatcagagtcataatgtacaatgtggagctctgcaaatgtggcttcactgttgatctggtgttctgacccccctggggatcctttctgaccccagtgcaggtggagctgggcagctacatattttcggggaagtccacccagatacagggtagagggcagagagagttgcactgtgtggccattgttgtgcaggtccaaaggctcggtgccaggctggtcatatccgtggggctgcagagcaggcaaatcagggtcaaatgtcacactgtctgtctgaatatcgatgggcgactgggcattgtttccacactcagggtaagaggctggccaatggtcctgaccatgtgggccctcatacgtccagtgttgacccccatctgcagccaggatccaaatcacctccagcaggagggcggagaacaacatagtgtcccaggaaggggtgcaggggactgggaatttnnnnnnnnnnnnnnnnnnnnnnnnnnnnnnnnnnnnnnnnnnnnnnnnnnnnnnnnnnnnnnnnncgagcgagctcctggcgtgagtgtatttatctctgcttctcttgctgtctctgtctctgtgggcttccaggggattcggtgttcagtagggtatcatgggtttctggatccccaggacaaatctcttgctgcctctttgccctctctctttatctccctctgcagtctccactccactagctggccagcgactttacaactgcctcctgcttttaaatcccagagaattccggaccggtcca

SEQ ID NO: 434518 - DNA, 992 bp, Homo Sapiens
  misc_feature (490)..(498): n is a, c, g, or t
cgaagatgcacttttaggcctggaaggcgttgtgggctgggttctgggccttgggtggggttggcaggggcaggctctgcacctgtccgggattcaggtaaccagggcctgccgatgggactgaggcgggtctaggggtgtgtgtcctgtattttattgaaaaactcattcagggatccagcccctcagggggcagagggactgattattctgactgttgggagaggcttgcatggaccagagccccatcagtatgactgaaagtccagcggagccttctgtgtccctgtgcctcccagcagggtgggagtggaggaggcggctgctcccccacgaattctcactccccttgggtgccaccccgcgcgcccacggacgctcccccacacacggccacccccttagccacccctcccggagcccccactggcccgcacgcttccgctagcacattcctcgcatccgcgcggtactcgcatgtactccagannnnnnnnnatccgaaagaccacacccgaacacgcccaacacgccctcggcagacactaccagctcaggcgtctccccctacgctttcctgccgcccccaacgtacaggcggcacccatccccttccccgctaccccccatttagccgcgcccctggcgatactaataccccccgccaaataaactctctcataccaccaaacaacatccgcgcccccgagccacgcctctcccgccctataaacccgatctcccgaccgccgtacataagagatccgacccagcgtacgcgcaagacgtcgacatatcctgcaactagtatgtgcgcgattcacaagctgctaggcacttcggaatttaccccaccgccgccggccacccgggccgaaacactcacacgatccgcctccatcacgagtcttgccgatcctagatcactacggacctaactcagagcacttagcacgtactaacgacgtatcgcccctacagatcgcgccacc

SEQ ID NO: 434519 - DNA, 2348 bp, Homo Sapiens
  misc_feature (158)..(167): n is a, c, g, or t
  misc_feature (182)..(311): n is a, c, g, or t
  misc_feature (352)..(362): n is a, c, g, or t
  misc_feature (386)..(400): n is a, c, g, or t
  misc_feature (409)..(560): n is a, c, g, or t
  misc_feature (761)..(772): n is a, c, g, or t
ggggcgagaattattatttccccacaggggccgccaaggggttctctaatcccccccgggggaattttaggtttcttcccaaccccgttggggagggggttccccctgcggcgggaaattctaaagaaatttccccccctttccccataaattgcccnnnnnnnnnntatttttatttgagnnnnnnnnnnnnnnnnnnnnnnnnnnnnnnnnnnnnnnnnnnnnnnnnnnnnnnnnnnnnnnnnnnnnnnnnnnnnnnnnnnnnnnnnnnnnnnnnnnnnnnnnnnnnnnnnnnnnnnnnnnnnnnnnnncttgggaaaaactttggccccttttcctttccttttggggnnnnnnnnnnnaaaaaatgtttttaaaaatttttnnnnnnnnnnnnnnnccgcaaagnnnnnnnnnnnnnnnnnnnnnnnnnnnnnnnnnnnnnnnnnnnnnnnnnnnnnnnnnnnnnnnnnnnnnnnnnnnnnnnnnnnnnnnnnnnnnnnnnnnnnnnnnnnnnnnnnnnnnnnnnnnnnnnnnnnnnnnnnnnnnnnnnnnnnnnnagaaacaacgtttattgtttattgttaaaatagtgagctctcatgagaaaagagtatgtaaaaagggccttcctacaccctgggctttctcacttatcccagcagactgggactgtcctcactgtgtaggagggaaagttctccacctgctcccagaaaattaggctactccagttttacttttgattatttgcaggcatnnnnnnnnnnnntcaaaatccaacgattaacagtctatctcctcctaggcatatatgctcaatccacttggacacagaggtgggcctcaagtccatatccacatgtacagcccaggattagatggcaccctggaaatcaaatgggtattcctggctagggactgaagaagatctcagctcctggtgatctggttgaaaatatgcacagtgcctccagtgagaacctgagattctctctttaatgaggaatactttgactgtggtaggaccagcagttaactggtaggcagcattcttgccacaggtagtatctggtctggaagctacttgttccatttccaaatccttttaagatcccttaaattgataagaatgaattcaagtttcaaaatgacacactaagttatacacggtgcaggatgtcattaaggcaacagtctcaccaagtccatgcacagggctcggatctcaccattcccctccccttgccctccaagactgcttagttctgcttactactccttctcctcaacgacagcttccagcatccagaagtgaacttgagcagccttcagcctcacaagttgggggtggcccaattaaggaacttcatggcaacttcaaagccaaggaaacaggccgcattggctgggaaggctcggatcatcactgcattgaaccctttgtacaaggatgtgactccttcatcccggatcagctccctcagcacatctctgaaaccattaggatatttcccaggaggtgcagtctggaatcgagacttgagcacatctggggggattgccacagcccagttgaagatccctgcaatgcccccagccaccaagatccgaggggcactgagctcactgaccctctttccctccggagtgaagatatttttcagccattcatatgtcatgaaatacattccactagctgggacatctcgcataagggtaagcacagtccctttgtagatgcctcggatcccaaactcctggtacagcttctttgcacagtccaaggtaccagtgtacttgctttctcctgaagaagcctgaatctgtaataagcacttgatccgttctccaggagtcatgattcctgtggtgaatacgccagataacatcccagctgcaaaaagctggggatagctgagcacatcttctgggtgtttctgttgtagtttcttccccaaaccaaacccaaagaagcacacggcaaacatgggagtgaccccgatgataggggcagccattccccgatatagccccgtgatgccctctctaaaaagagtcttccggaaacagtcaaaggtcccagagtacatgggaggttgtccaggcaaactcggtggctgtgtctgcagtcggaccttgaccgtgtccagagggtgaccgacgaacaccaggcacacgccgccaaagccgccggccagcaggttcttgagcgggctgatgggttttggctggtcggccatggtcagtccgtctgtcactccgtctgtcagttctcgggccgtcctggcttctcagccccagctgcagtgccggcgccgccgacctttcacccactttattccgct

SEQ ID NO: 434520 - DNA, 1275 bp, Homo Sapiens
ccttacacgtccatttattaaacaagttccttcatgacaatttaatacaatagttattaacgattagtgttgagaaaattatttccctctacatacaaaaatacagatttgaacactatgaaaaagatcaagacaagtaccatgaaaaactggtccttcaaatgaaagggggaaaattgagggcaatgtgaggctttgcctgctgtcggggacaaatcaatagcagcaaagctttggggccccaacccactccatacatacagacttgaacccaaaagccaggccagccaggggacgcccacccagggcttccacgtcagctggaaaaaccaaacacataaacctaagtttgcccaacgggcttcgcctcagaaagcccacagttgtgtctttaaactgccgaaatgaaagagacttgatgagtaaaatgtgatagttgttaacattgccccccaaaagtgccaccaggtgaagtaccacggagaaatcatattggaaagttactacttagccatctgacttgacttccttggttatcaaataattacatattctgacccttcagaaggacaccaaaagctacaattttatgtttcaatccatctgtaccttcatttgcaatggctcagctagtttactcaagggttttgggaccagacataactcacgtcctgcaggaaggagaagcaaaaggagccggtgaagagtacgtgtctgtgtcttggtgtcatctagctcctcacagcaaacagcctgttttgttcaggcctgaagcctggaaaaggccgccgagcctagccagagcatccacaacgaaccaatctgagatccgagtggaagatgagagccccggagctggctgaggtcccccaggaagcttcccactctgcagtggcaggaaggccatgcctctgcaggacgctcgcactgattctggaaggggcccaggccagagaatacacttgggctcagttcaccagcccaaaccacaggggaaggagccggacaccggcctctcaccattttacacccaaagacaggaggtcagggctctgatgctactcttctgtttgtaaaatatggaaccactttctttgtactgtttgaggtgagcagtggctccaaactgagcaagtggttaaaaaatgccaaatgcaattatactgacttataattatttcacagaaatatactcttactctcagactatttaaataagcaggaacaagatgcaggagaagcagcagcagagaggaaagaggaatagccagggaa

SEQ ID NO: 434521 - DNA, 1356 bp, Homo Sapiens
  misc_feature (689)..(765): n is a, c, g, or t
  misc_feature (1045)..(1045): n is a, c, g, or t
  misc_feature (1079)..(1079): n is a, c, g, or t
cgtccaagctatcgggacgcctagggggaggtggtgatgttgggagtgggatctcctgagtccttgttgggcagaattggtgaggccaggatggcaggcaaaagtggtaacaagcctctctgcccatctacttccaatccctctctcccttactgattttttgatgccctgtcttctgggcccctaggagggatgagagaggagtagccccctttttcagagagtttggggtctacctcagagctctccctgtcaaaaagcagctgcaagcctcgcaagggtggagtggggggagactgaggaccagtagtacctgcagggtgcccgtggctgtggccagtgtcccttagccaacctgctgggctcaccagttccccgtctgatctgcctgtgcgcctcccattcttctctacccagaacctgtcatgggctggggctcagattttcctggctttgggagcagacagaccagagccaccagccattcagaaaacttcttatagctaccttcatgcaaaactgttttcttcttccttctcaatggtgacatttgaagaggcagagcaccttggggctcctccttctgtcttaagagaaagccaaggcacgtagagtagggagaagaagggcaccatcctctctttcctccccagggtctactgctgatttctagatggatcatgcagctnnnnnnnnnnnnnnnnnnnnnnnnnnnnnnnnnnnnnnnnnnnnnnnnnnnnnnnnnnnnnnnnnnnnnnnnnnnnnggcaagttttgtctaaaaacatctttttaggcttggaaagggatctgggaagccaggtattaattgcagggatagttccaagtctgtcctgtcttcatctctgtgtcccatctctacaacccacatacagacacacacactctctctctctttctttccatcccaccccccttggaattatttagtctttgcaatattagaaaccttgactctgatgcttaaagcttcttgtccatggcttttgtttgatggttttcaatagaggtgactgagattgtangggggccaattttttggttgcccccatgcgtggngggcactactaagaatgctaacttagtcccccacacaaaagatcatcctgtcccatgtcaacattatacccaggggagaaccctggcaatggatttgccctaggaatggatatgggccaaagctatctttccccaagtgggaacctcgtgcatgcaaaatctctggaggggggctttccagggctttggggggctaaaagagaagccctttacaaatgcgaatcttggaaaaacctggccccaaggcaccctggggtcttaatggagtcaccgaaac

SEQ ID NO: 434522 - DNA, 1075 bp, Homo Sapiens
gttccccagaggatctaattcccacttaatttggagaataaataaaagcgtcaggtcccacagcttgtcttctgctcccaaggagaacacaaggaagggagtggaggtgggcgcggggcccacactcaggtctgtcctgaccactgcatggcctggacagtggcctcctcatctggaaatggggaaaacagcgtgccttccccaaaggtttggcgcaaagactatgacgactgtggaataagggcaggggcagtgcctgccccgggggtgctcagcggggacactgagtggaggggagggaagcgtggtcagcagccggaagccacacagaggtcggcaggtgccagacgcctgcagagctcttgacagagtgctgggcctggcccctgaggactccacctgaattttggacatcacagctctggtgatcccaggctcgccacccaccctggtggctttccctgtaggaaaaggagaaaaggaggctcaaatgtatactaaacacagaagctgcagaacaagtagggagacgtatgtaacaaacacatctgaccagccaagcagggagactatgtaacaaacacaacttaccagccaagcagggagactatgtaacaaacatatctggccacaatggaaactaaaagccagatgagcttcccaaggctataatttgtttcactttcagtcacaaaccagctcacagcaagggcactttccaagccacacagagactgagattcttcaacaaatgcaccagaacctaactccccaggactggaaaggcactgtcagactgcggaggtcagacctgagctgctccttccacgcagtcccccacctccctcctggacccacccctgcaccccaaggtcagcctgcctcccacagcactgtccacaggcgactggctgctctaggacccagctcagggtgtgtcccaaggaggccactccactgtggacaaacaacccaagaataaaaaacacaagtgtccatccagatgaatggacaagacaggatgtggtctgtacacacaacggggtgatcagccttaaaaaggaataaaattctg

SEQ ID NO: 434523 - DNA, 854 bp, Homo Sapiens
gtcttggagccccactgggtgcaggagctgctggctgtccctgtggacccgccatccaccgtcctgcccacgccgcctcagcctgccacctcccacctagaggagaccatgggccctgccccacccactccaggatgttagggtcccctcagccaaaaaggcagctgcctgtggctcctgtaccaaccgcccagccacgctccatcgccgcccaaagggaggtgccaaggccaggaacccaagccaccccggctcccctcgcctgcccaggggccgtggtgactcacgggcagggaggcgacatcaggctggttctgccactgagcccctgaggaatctgaccctccccaaaagaagcagtgaaatggaccaaaggacttaagaatttggggggaagtgagggaaaaacgttaggtgctaaccacctgcccagaagagtggatctcacagcccaggaacattcccaagcaggaaaaccgtccgtccgaggaacgtccatcctggctctctgcggctggtgggaaaacacaccctgccctgaggggctgtccaggccttctcccccacaccctcaggccgagatccgtgagagacccactttgctccaacaacttgaaacaagtcactttaccctccttaggacccattttgggggggaaaaaccaacacattccagagctttccaagtcctttgaacttcaggttcacattcagggatcacacagttctgcctgttctcagggcacagcaactgccaatcccgctgaagaggcctccctgggcacagcacaggctgcacggtgcacgcttttccttgaaggcagccccttctgtcgtcttctcgcagccgtata

SEQ ID NO: 434524 - DNA, 1586 bp, Homo Sapiens
  misc_feature (106)..(106): n is a, c, g, or t
  misc_feature (734)..(734): n is a, c, g, or t
cgctgtacgcacggcgcaacagccgccgcacggcgggagattatcgcccacactaccgatgtgtgaggtgagtatatgtgctgcggtgcgtgtgagcggcacttcnccaccgtcgtgagagagagtgttattgtggggtgcgcgccgttgtcggccccgcgcgttttctattttcgtccctctgtaacaacatggggggggatgtcacactgggggcgcctccgacgatataagttattggcgggggggtgcgcccgaggagatatctcacacagcgctcccccgcacgtggtttgccacaacccgggggaggtatgtatctggagccccgcggcgtgtaaaactgggtcgttgtggagtctcttctacatccacgccccgagggggtcacaggaagaggtcttgtcgggaaataactccccgagggctcgtcgcgggtaccctttcccgtgtctccccgagaccaaagtttgcgggggcaaaaggggcccaaccgcggtgggggtgggcccccgcccagaacctgtgggaggttcccagcatgccggggaagccccagcgaagcccccggggtcggaaaattctgccaggaaagtccgcgggccttgccgcagggatagttagggctgaataacttttcacggttacccgtgcccggtgagcaccttcaccttttgggtctgtccccagctcacaagccacactcttcagcacgcgctttacgttgtcacagngcactgcgcaggccgtagtgctgcacgtacccaaagcggtggtgtttgttgagggtgtacagcaggtagtcagccatggtctcctccccgaccaggtggtccagcaccgttccacacagggccagcttcaggcctgtctccacactttcaatccgaggagccagcacgccaggagtgtccaacaggaacatcaggggccgctcagagacctgaattttggacatcacagctctggtgatcccaggctcgccacccaccctggtggctttccctttcctgaggtgctgcctccggagggagttgatgagggaggacttgcccacgttggggaccccaatgaccatgatacagtactccaggttctcttttcggtggtagcggtggcttctcccaatcagttcagtgaccatcgggatgatctgcttgacattttcatcctttacacagttggtaaaaatgacattttttaggccttctccttctaagtgttgcataattttctgctgctctgtaagatccgccaagtccatcttgttgaggaccagcaagtgaggcttaagcccaagggtttcctgaaacagagggttgcggcctgaaagtgggaaccgggcatcgtggacctcgatgatacagtccaccagcttcaggctgctctgcatcttcttcagccccttggccatgtggcccgggaaccagcgcgccacgtcgcgaccgcacagggggaagttctcccgccaggcggcctgggcggcgctgcacagcgcgcgcggggtcaatctcatggcggcaccgtccccggaaacgctcccgcagctgacctcctctgcgccctcgtgccgaattcgccaccca

SEQ ID NO: 434525 - DNA, 497 bp, Homo Sapiens
  misc_feature (40)..(40): n is a, c, g, or t
cgccatgagattgaccccgcgcgcgctgtgcagccgcgcncaggccgcctgggggaggaacttccccctgtgcggtcggacgtggcgcttggttcccgggccacatggcacaggggctgaagaagatgcagagagcctgaagctggtggactgtatcatcgaggtccacgatgcccggatcccactttcaggccgcaaccctctgtttcaggaaacccttgggcttaagcctcacttgctggtcctcaacaagatggacttggcggatcttacagagcagcagaaaattatgcaacacttagaaggagaaggcctaaaaaatgtcatttttaccaactgtgtaaaggatgaaaatgtcaagcagatcatcccgatggtcactgaactgattggggagaagccaccgctaccaccgaaaagagaacctgggagtactgttattcatgggtcattgggggttcccaacgttgggcaagttcctccctcattcaatttcc

SEQ ID NO: 434526 - DNA, 755 bp, Homo Sapiens
cagtgtgtggtggctttttattactggtgtggagtgggtgtgggggcaggcaggagtggtggctcccacctaggccagctccccatttccaaacaggagctgcctggggtgcccaggagggcccgggaactgggggagtgcaggccggaggcaggtgcgagcgaggagcagatctttggtgaaggaggccaggctctatttccagcgcccggtgactttagccttcccgcgggtcttggagactttctggttatcgttgatcctgtttcggagaacattgatctcatatttctgctgcttgaacttctcctgcaggtcgaacttctctgcctccaagttatagatgctctgccacagctccttggccttctccctcagctgatcttcattcaggtggtcaatggccagcaccttcctcctctcagccagaatcttcttcttcttttcccgctcagtctgcctcttcccacttttccgctctgtcttctggatgtaacccccaaaatgcatcatgttggacaaagccttcttcttccgggcctcatcctcagccttcctcctgttctcctcctcctctcgtcgagccctctcttcagccaggcggttctgccgctccttctcccgctcattccggatgcgctgcttgctcggcccgttctgcccgatgtctctcgatcctgtcttcgagagaaacgagttcctcctcctgtatctacctgtctcaaagtgagcctcgatagcgcctgcactcattc

SEQ ID NO: 434527 - DNA, 841 bp, Homo Sapiens
  misc_feature (321)..(348): n is a, c, g, or t
tattgtatctcgatgctagaagaaaaatggcacataacagagatccagatacaaatgaacatttccacaaacatcttgcaaaacaacatcaaagtgaggaatacaaccatctttgtttcaagaaacggtgtctttttcagagcacttaattagctttctgaagccagtaacaaacctagatttgtaacaaatcccattcccacaggcctgagtctgctaggctccgcagccgtcttcttggttaaatcaaagcaggtcgtcattgtggttaataacatttgaatacatattttaaagcatgtgtaacaatgtgagtcaccnnnnnnnnnnnnnnnnnnnnnnnnnnnngcatttgaacaacaacagaaacaaaaccccaaagcaaataaagtttgaaatgtaatgtaaaaccagggccctttgggggctttgctagagtgactgtgttgtttcagagagtggtgccaaatgcccttttcaagtagtttggggatgagggtgagcaaagacataaagtatcagaaactacaacactgaggtagcacccaagctggttgccctttgaccccttgaagtgcttttagattgagaccgtctaaaagcacattcttggaattttagaactttgatcatcttaactttgagtttacaaaaataacagataacattttattttgagcatgttcttttcaaggtctggtgcctccagaacaggtgaaataagagggattcctcttaaggcaaagcaaccatacacttggatacaagccaagctccaggcctgggaagtgggaagagtaccgctaacatccaattatccacagattgggatggttggggg

SEQ ID NO: 434528 - DNA, 1159 bp, Homo Sapiens
  misc_feature (840)..(868): n is a, c, g, or t
cccacaaggccacagagccatcgtccgcgccggacaccatgtgctcctcattgattaggctggatgcagtcgatggacccctggtggccatagaagacaacgactggcgactcctacggggatcttccacacacgtacagtcccatgcccggcccccagccgtcacacagcactcccggctcaaggcatccagtgcagccacagcgtcctggtgtccgaagagcgtctccacgtaggagttctctgccacattccacaccttcacggagcgatcgtgggatgtgctgtagagctggtgggtgcctctgcggaatgccagacccgacactgcatcccggtgtcctgtgaaggtgtacaagtgctggcagctctgggcctcccaaatgagaatgagcttgctgcggtcaccagaggcaaggtacttgccgtcggaggagatggccatgcagaggacgtggctgctgtggccagggggctttccctcggcacccttcttggctcgaggaatcacatgcagcttccgtccactctccacgctccacttaatgatgctgcagtctttggcagcagagaagatggctgagtcatcgggggtgacgaccaaacatgtgatagagagctggtgcccccgtaaaacgcgaatgtcagctgaggctggggcctggatctcttttgccaccaacttctgcagcctgcccctctgctcaagcacatcctccttcaggcgccccgccacctggtcctcctcaaatgcacgggcctcagccttctcctcctcttgctgacggagctgctctaggtagagcttggccaagcgcagcttcttttcctgtgcagttnnnnnnnnnnnnnnnnnnnnnnnnnnnnnaggcttccttggagctaggctctcgctctcagagtcgctggagatctcctcattcatcttgccgccacccttggatttgcccctgtcccccgcagagtcggcctttcgccgccgcttgccggcccccgcgccagccccggccccagaggccggctttccccgcttacgagcagccgctgttgccgacatgctgcccaccaggcgtgtagcagcggccgcagaactcacgtggcagctgaaccctcccgagctccccctcggccgattaaacacccagtcctcgtactagcc

SEQ ID NO: 434529 - DNA, 1628 bp, Homo Sapiens
tttttacaagttactacaatagaactgttttattaaacatatgactgtatttattttgtacaaaatgcagtaacacttcttcttttcctctgcccctggaggcactaccgcagaacttcatgttcacagaaacacacgtcatggcaagtgtgtcaaaaagtcatgacaagcaggaaagtgcaattctgaaagtaatgccacacaaccaaagtgggaaatgaaaacaggcagaggccagcaggtttctcggctagggctctgcctataacgccctggtcctgctcatctttcagcagtaaacattttaagaagagaaactcctgagcactatgtaagtactctcctggtagcatccttccaattccatctatcttgatgttgtaacaagcttatttgtaacttcctcaagaaatcccaccctggattgcatccctgtcaattgcccatctccctctgagcttcaaacaaaacaaaataaaacagaagagcagtaagtttcaaaaggaagtcagaggagacatttgatagatgaaacctacttcctagaagccccctggccagacatatgcagagctggagacaacagattgtgaaactaggtccagctgtaaaatatctcaggtacccagttagatccagttattctgcatctgtggatttaaaatggtcatcatccacagtagaatagatgtgcccctcattgctcagaaaatccacagcttgcttgattgaggatacagacatgtgtttcagctggttcttgagatcctgaaagttcaacccttcaggtcttggacaagccttaatcaaattcaacacctggttttgggccacagtgaggccatttgctggcatgaagctattcccaccaaagttccctgcttcactcattcctggattgctgataggtgctctccctgctgagggctggctgttggctttgcttagtaccatgtgtgcattgatcacttccagaatatgtgtggtgaactcattcatatcctccaggggcatgatcttaaaggctaccaggctctttttgttctgaaaagatctcaggtggcctgccactttcacatatgtttctggaggaaccacagtgttttcactgctggtgtcatctgtgtcaacccactggcgaacgtccatgggtgcagctgtcatgtcatctattttgtaaacaatgttggttggagccttctctgcatgtctgatgatccccacaatagtgacctgtgaaatctcaacattcccaattctgaacacttcatcaaccaaagtggcagaaagcagctgagatatagtacagggcacaatgtgctgggctcgggctcttgatttcttttcggcttgagaaggtgcgggcgatccaaagccccccggggactgcgtgtagccgccggctcccccgtatgaggagctgccatagctttcgaatccactgttccacatcttggtcacgattctccgcaaagaggccgagaaggtgcgggtctgggggaatagcggaaaaccacagaacgcggccgccactgcgccgctctggctacttttctctggcaccacaaacgccttcccgcgaatggcggagccagtcagctcccggggtgctcgcttccagccccgct

SEQ ID NO: 434530 - DNA, 648 bp, Homo Sapiens
ggggctagtgcggagggttttgcccttcgtaaagatggccgcggaggcttttggagccaactgggagcgcagtacgcgttttctggagcatgggcagaggagacaggaacaagcgtagcatccgtggatttgaaagctatggcagctcctcatacgggggagccggcggctacacgcagtccccggggggctttggatcgcccgcaccttctcaagccgaaaagaaatcaagagcccgagcccagcacattgtgccctgtactatatctcagctgctttctgccactttggttgatgaagtgttcagaattgggaatgttgagatttcacaggtcactattgtggggatcatcagacatgcagagaaggctccaaccaacattgtttacaaaatagatgacatgacagctgcacccatggacgttcgccagtgggttgacacagatgacaccagcagtgaaaacactgtggttcctccagaaacatatgtgaaagtggcaggccacctgagatcttttcagaacaaaaagagcctggtagcctttaagatcatgcccctggaggatatgaaatggagttccaccacacatatttcttggaagtggatcaaatggcacaccttggttactaaggcaaaggcccaacagg

SEQ ID NO: 434531 - DNA, 742 bp, Homo Sapiens
tttgtccagttgaatgtggtgagaagagagcaggcattggcttatgtccagtggagatggcggaaggggagaagaaggaaggccgaaagtgccttggagaaagaaccctcgcatgctcctcagatggcacaaaatgggtagaatcatcagacccagccagccctaatacccagcctgaagacatgcagttgctctggtgaccaatggggtcacagcaactatgggaaaggaaaaccttggagtcacagctgcgatcagatcagggtattcttgtgtaagtccaacccagctttctctttgatctgatccttccaactcagctttcagtccctacaaccattccaatgctctggtcctgtctcaagatcctcttcattcatttcttttaaatagctaaaataattatagtccatatgtttccaggctgccctagttctagaggacagagactgtatcttagtcatttttctattttttcagtattacatgtcatatatttaattcattacctttccaccttggaaagatctgcctcctttaggagccacaattttctctagagttactcctactctccctaacccccatctctaaatgatcccactatacaggacctcagatagagatcatggttgataaggaatcagataaactctctgtgtgcagatgttatcttaggacaacttaaagcatttcctctctccagtgagtatgcaaagggactcatttaacagccaatgaa

SEQ ID NO: 434532 - DNA, 1746 bp, Homo Sapiens
  misc_feature (212)..(212): n is a, c, g, or t
  misc_feature (1229)..(1237): n is a, c, g, or t
ctagcgtgatttacattcatgggtattcttggagtgcacggtctcgcccaggtgtccgtcccgtcccgcttccgttccccgcgccgctctttaagtgccgcctgcttttgctatatccggctgccttgtttggccccttgtccatggatctgtgggcgcgtagtcgttggcctccccggggtaaaatctttatggcggtgacccccccttgnttttctgttgtttcgtgtgttgtcccagtccaaaaactttattgagtctatatcagaatcagcctccaggccttctcatgtcactttcccatcactctgttctttgctgttccctggtggttctgactacaagggctaggccctaggacatctggttttctttcttaccccagtccagctcgctgactatccttagcccctctaatcctacgatccccccaacctggagccttggtaaggagttgtgaggttttcagacttgtccatccctccctcttcctcaccccaagctccaggcctctaggcctcagatagatcctccttgggaggtgcttctcctggtggggcctcctcaggtgctggcctgcaggcaacccctccctgtagccatgctgttttcagcatatctttcagcccactgggaaagagatagccctgggtctctcctcccgcatcaatgacccctccaagcccctccagtgctgtttgcaggtaccgcaggccaaggagcaccagagcctgcagtaggaaggtgacagccagcatgctacccagtgtgcctgccaagtcctgcaagtgctccagcagcacctcatggcacccttgggcccagaggttttggttgggttgtcggggatcgaacaggggtgggcgtaggagtctgaaagacggttttgcaggcaaggccggggtgagtgggggttgcaacaggagaaagggaccccatcagtcaggtataggccttctacattgctctggatccggtcagccacatcccggtcaccgggatccaggtaacggctgctgacccactggaccccaaaccaatccttgtacccgtggcgcccgcagcagtggtacctcagttgcagctcatccaccagccttttggcctgacagtgcccaggaacctctgtgtccttgtagtgagccaaggcagtcaccaggccctcctccagcgcctcatccagactcccaggcaaagccagggctagcccgagggcgacgaccaggagnnnnnnnnnaccagccgtgccagccaccagcagcgggcccaggacccctcgccagggagggtatagagctgcattcagacttgcccggctggctcctacacccactagtcctgtgcccagagccaccgcgcccgctgccagggcagcctggggcaggacagggaactgacaggagggagccaggaaggtgccaaggtgccttagctggaccaggaggtgcccactacagaggaggatgacgccaccagccagcgccagcagccaggagaggagccagagcccttgtgccaggcggatgcggggctgcaggggcagcaccaggggcaacaccggcgccatctcccatctctgcccaagggagtgcagaggtgtcagggatggaagctggctggggcaggatgctgagtcagcccggcccggcttgagctgggctaatgccaccctgaccccaataccctgagcatcctcccatcggacgcgtggtcgacagatatcccgtaattccgggccgtaccagg

SEQ ID NO: 434533 - DNA, 984 bp, Homo Sapiens
tgtccgcgagggccacctgcggaagttttgggtaaaaggaaagatggagtacaccaagggcaagccaggcaccccccatgcccgggagctcatgcctaaagtaaacacgggtaagcccctggggatcctggaatcggtgaatggtggcccaagacaggaacaggcaatgcaggcaaccactggggaatggcacagggaaatacacttcaagcttctgttggcccaaaaccaagtctgggtgggcacaggaaagccaacatctttggctaggagcaaccattcaagtgtaggagagcaagttcaggtcataacagccatccacatcaaagcgccgatccttgcggaggtgtgactggcccggatcatctctgtcagtgcccacatctgctggggtctgggagaccctcacggaggagtgcaggttgctcacagggcactgggtgggagagccacttgggaaaggtcacggaggggctctttggtccctgctgatagatctgcagctcctccactgtgaaagacagccacagtggtgatggctgccgcagaatcaggcgtagctccgatattctagccatgtcacacagcatctgatgcttgaacagcgatacatactcctgggctccctcctcactgtgtgggtcaggcattaggcagtagtcccgcaggcaggtcacccacttggcaggtgtgtgtgctgaggtgtactgacggacacggatgctcaaaaaagctgtgtagtaattcttaaacgtgatttcctgcaactcgaagggagcgacgctggggaaggtgacatcgatgaccagcacgccaggccggccttgggaggtccgcacgtcgcccacctggagggctacggagcctttcacatggcaaggcaccaaaacgcgggacatggtgacagcagccgcaactaagtgcaaccgccgctctaggcccccgaccaccagcccttcccggcatcctcagccgagcctcaag

SEQ ID NO: 434534 - DNA, 773 bp, Homo Sapiens
  misc_feature (745)..(745): n is a, c, g, or t
ccgggaagggctggtggtcgggggcctagagcggcggttgcacttagttgcggctgctgtcaccatgtcccgcgttttggtgccttgccatgtgaaaggctccgtagccctccaggtgggcgacgtgcggacctcccaaggccggcctggcgtgctggtcatcgatgtcaccttccccagcgtcgctcccttcgagttgcaggaaatcacgtttaagaattactacacagcttttttgagcatccgtgtccgtcagtacacctcagcacacacacctgccaagtgggtgacctgcctgcgggactactgcctaatgcctgacccacacagtgaggagggagcccaggagtatgtatcgctgttcaagcatcagatgctgtgtgacatggctagaatatcggagctacgcctgattctgcggcagccatcaccactgtggctgtctttcacagtggaggagctgcagatctatcagcagggaccaaagagcccctccgtgacctttcccaagtggctctcccacccagtgccctgtgagcaacctgcactcctccgtgagggtctcccagaccccagcagggtatcctccgaggtgcagcagatgtgggcactgacagagatgatccgggccagtcacacctccgcaaggatcggccgctttgatgtggatggctgttatgacctgaacttgctctcctacacttgaatggttgctcctagcccagatgttggctttctgtgcccnaccagacttgggtctgggccaccagagg

SEQ ID NO: 434535 - DNA, 449 bp, Homo Sapiens
aattactacacagcttttttgagcatccgtgtccgtcagtacacctcagcacacacacctgccaagtgggtgacctgcctgcgggactactgacctaatgcctgacccacacagtgaggagggagcccagcgagtatgtatcgctgttcaagcatcagatgctgtgtgacatggctagaatatcgggagctacgcctgtattctgcggcagccattcatccactgttggctgtctttcacagtgtaggatgctgcagatctatcagcagggaccgaagagcccctccgtgacctttcccaagtggctctcccacccagtgccctgtgagctacctgcactcctccgtgaggtaagccctcaccctaggtaagaaccatgtgtgaatggctctagtgtccaacacaggcttgtagacccaggctggctagacccaggggtgatcctctag

SEQ ID NO: 434536 - DNA, 1218 bp, Homo Sapiens
tgaagacgggggcctcagccatcaacgctatcgtttgcaatgggaagactgtgtctccctgcggtccctcagccggctagtccccagctggggaatacaaaaggcgagatctggaacccatccttggctgggagggcgagatccggtagggggcagtggccaggagagctcaaaggatggctactgacatgcagaggaagagaagcagcgaatgccttgatggcacattgactccttctgatggacagagtatggagagagctgagagccccgacaccaggaatggcccagggaatggagccaggtgcgggccaggagggtgccatgttcgtccgatgcccgttcctacgaggacctgactgagtcagaggatggggcagcttctggggacagccacaaggagggtaccaggggtcccccgccgctgcctacagacgatgcgccagatcagccaggactttagcgagctaagcacccaggctgacgggtgtggcccgggacctgcaggaggagatgctgccaggaagctctgaggattggctggaacccccaggggcagttgggcgaccagccacagagccccccagggagggcacaaccgagggggatgaggaggatgccacggaggcatggcgccctgcaccagaagcatgtctttgtgctgagtgaggcagggaagcctgtgatactcccgtctatgggtctgaggaggcactttccagcactatgggtgttatggtggccctggtgtccttcctggaggcagacaagaacgccatccgctccatccatgcagatggctacaaggtagtattcgtgcgccggagcccgctggtgctagtggcggtggctcgtacgcggcagtcggcacaagagctggcgcaggagctgctctacatctactaccagatcctaagccttcttaccggtgcgcactgtagccacatcttccagcagaagcagaactatgatttgcggcgcctactctcgggctcagagcgcatcaccgacaacctgctgcagctcatggcacgagaccccagcttcctgatgggggcggcacggtgcctgcccttggcggcgcgcgtgcgcgacactgtgagcgccagcctgcagcaaggcgcgtgcagcgcagccatggtcacttctccatcctgctggcccgcaacccagctcgtggcactacgtgcgccgaccggaccaatttctgcaacccca

SEQ ID NO: 434537 - DNA, 832 bp, Homo Sapiens
ttcaccatagtctggaagttcctctcttcagacccatatctggagtacacaggtttccctgcctcaatcagcacaaagacatgcttctggtccaggcccatgcctcccgtggcatcctccgcatccccctcggtttgtgcccctccctggggggcttttgtggcttgtcgcccactgcccttgcgggttccaccaatcctcagagcttcctggcagcatgtcctcctgcaggtcccgggccacacccgttcagctgggtgcttagctcgcttaagtcctggctgatctggcgcatgtcttgtagtcagcggcgggggacccctggtaccctccttgtggctgtccccagaagctgccccatcctcgtgactcagtcaggtcctcgtaggaacgggcatggacgaacatggcaccctcctggcccgcacctggctccattccctgggccattcctggtgtggggctctcagctctctccatactctgtccatcagaaggagtcaatgtgccatcaaggcattcgctgcttctcttcctctgcatgtcagtagccatcctttgagctctcctgtttctcagaggagtccaggacgcacagaaggtgccggtcactgccctctgccggacccatggaggggtaagggtgtccggccggggccggcctgagggcacagcttcgcggggccccggccccctgcgtacacagacatggccacagcgcaggcaccgctccctcccaccgccctcacccggccgccggtgcaggaagatagctttcgccggcctctcgcggccaaggcccagccctcgtgccgaattcgccacccaggcc

SEQ ID NO: 434538 - DNA, 978 bp, Homo Sapiens
caaaaatttttttcaagccaattccaaatgtcccacaaacgtgaagggctgccactccccgggacggtcggttcatagtccagcgcggtccaccttttcggcttccatttggggacttgaaaaagttcagcttcaggtttgtctctcattggatcttcacgcaatgtgtcaggaatttcagtaacattgattttcattttagaaacttctacataaacctggaatctgactcctgaatttaatggaactggtttggccgtaacctccagatttacatcttttatctgtacatgatgtttactcatgcttaccacattttgagcaacttcttctttttcaaaggtgataagtgcttgtcctttttgtatctcataaggaactttcgagctcacttgaaacgaacaggagatatttgacaactggctgtcattctcaggagtttcaactgataagaatttcatctttgtttcaggaatatcctctttaatctggaattctttggtagcctcttgtaactccgctttcaagcttttggatctccttctttagttgaatattgtcttctcttgtaatcttcatcaattagtccctctattcttgattcatctctttataaattcatctggcgaatgctccttaagaatttgttgtgtgtcatctttatcagcttccatgatcccccgcgtccgcccgccgagcgcagctccccaaggcccagcgcgcctgcccttcccggaaaacagcagcgccatgaaacgccggaacccccggaggcactgggaggggaaggcccgggttctcgaaactgtcgctgcctcctgcagaagcgccgcgggagagctgcggggtcttcctgaggaggtggccctcgcaggaacagctgggttccccgcgaaaagaaaaagacagtgaaaaagaaaactgctttaacggcgatttttctttagcatttaaccaatgctcaaatactaaacatgg

SEQ ID NO: 434539 - DNA, 1751 bp, Homo Sapiens
  misc_feature (10)..(11): n is a, c, g, or t
  misc_feature (15)..(15): n is a, c, g, or t
  misc_feature (32)..(32): n is a, c, g, or t
  misc_feature (44)..(44): n is a, c, g, or t
  misc_feature (46)..(46): n is a, c, g, or t
  misc_feature (68)..(68): n is a, c, g, or t
  misc_feature (81)..(81): n is a, c, g, or t
  misc_feature (84)..(84): n is a, c, g, or t
  misc_feature (88)..(88): n is a, c, g, or t
  misc_feature (94)..(94): n is a, c, g, or t
  misc_feature (100)..(100): n is a, c, g, or t
  misc_feature (120)..(120): n is a, c, g, or t
  misc_feature (131)..(131): n is a, c, g, or t
  misc_feature (139)..(139): n is a, c, g, or t
  misc_feature (147)..(147): n is a, c, g, or t
  misc_feature (150)..(150): n is a, c, g, or t
  misc_feature (157)..(157): n is a, c, g, or t
  misc_feature (180)..(180): n is a, c, g, or t
  misc_feature (182)..(182): n is a, c, g, or t
  misc_feature (190)..(190): n is a, c, g, or t
  misc_feature (193)..(194): n is a, c, g, or t
  misc_feature (196)..(197): n is a, c, g, or t
  misc_feature (201)..(201): n is a, c, g, or t
  misc_feature (203)..(203): n is a, c, g, or t
  misc_feature (207)..(207): n is a, c, g, or t
  misc_feature (227)..(227): n is a, c, g, or t
  misc_feature (229)..(229): n is a, c, g, or t
  misc_feature (231)..(257): n is a, c, g, or t
  misc_feature (262)..(262): n is a, c, g, or t
  misc_feature (264)..(264): n is a, c, g, or t
  misc_feature (276)..(276): n is a, c, g, or t
  misc_feature (310)..(310): n is a, c, g, or t
  misc_feature (324)..(324): n is a, c, g, or t
  misc_feature (348)..(348): n is a, c, g, or t
  misc_feature (351)..(351): n is a, c, g, or t
  misc_feature (368)..(370): n is a, c, g, or t
  misc_feature (379)..(379): n is a, c, g, or t
  misc_feature (381)..(383): n is a, c, g, or t
  misc_feature (390)..(390): n is a, c, g, or t
  misc_feature (394)..(394): n is a, c, g, or t
  misc_feature (400)..(400): n is a, c, g, or t
  misc_feature (405)..(407): n is a, c, g, or t
  misc_feature (409)..(409): n is a, c, g, or t
  misc_feature (422)..(422): n is a, c, g, or t
  misc_feature (455)..(455): n is a, c, g, or t
  misc_feature (546)..(565): n is a, c, g, or t
  misc_feature (567)..(567): n is a, c, g, or t
  misc_feature (571)..(571): n is a, c, g, or t
  misc_feature (576)..(577): n is a, c, g, or t
  misc_feature (592)..(592): n is a, c, g, or t
  misc_feature (597)..(597): n is a, c, g, or t
  misc_feature (601)..(601): n is a, c, g, or t
  misc_feature (1423)..(1606): n is a, c, g, or t
attgtactgnncttngtcattctcttaattanctcccgtccaangnccccccccgcctttttattctnctttttcatagcnccncgtncaggcnacattnttcatgacacactcctagangacggaaaganattaaaanccttaggntanccttacnttcccgacccgtcgcggtattanancattagantcnncnncccncnccancccgccatccccttcctacncngnnnnnnnnnnnnnnnnnnnnnnnnnnnttgcnanacgccagaggcngttgttttgcttataatatgcatgttttacaganaactaatgtgttgnatatatctttattcttttggttanggnaaatattccttattttnnnggttttggngnnngtgtgcngttngggggnttttnnngntttctctgtgtcntggctgcgatgctagttcttccccccaactccngccaaatcctctcctattgttcttttcacttctctatctccactaggactttcttaataattagtgttctagtatttaacttgttattttnnnnnnnnnnnnnnnnnnnngngttntgttnntgatcaatgaaaaanaacanacangtgaacaaagaatgcacacaagaagctgactgagacacagcagtttgacacttaccaccactaatttcccatctttcaattttcttgttattgtgctttccttcccatcccactcctgatgctgaaccaatgcaccatctgtaaagttgcagacagtctgcaaaaaacaaagtaaacgttttaatcttccaagtacattacaagagtttccatgactcataacctccttaatcaacatttgtttcaccttctcctttctgagtctacttcattaacccatattgattttattcacaatagtttgtggttttcaacctagtagctaataaaagatgccaattctatgatgaagttgatacttttgctaatttgacaaaattcaattcataaaataactttttcattaagttcttgcctataaacagtaaaatgttattgatacagcctatcattctagaagcttctgtgatttcataacatggtcacgactggacctgagtttttctgccatcagctgtggtttcttcaaacttctctcccagggtacaagaaaactgtgttgttttcaaagtgctctcagtttttatggtgaggtttttaccatcacaagtgatgatacaatctggcttggccattgcgcccatttttcgcaaagctattcccactcctgtagaatgttaagtcatgttaaataacaggaagaccaaagttatcatttacatgataaaagcaataattccattgtaatcactttgtgcggcatattttcacttatttgcttattgataactattgtaaacatatatcccacggtatgagccnnnnnnnnnnnnnnnnnnnnnnnnnnnnnnnnnnnnnnnnnnnnnnnnnnnnnnnnnnnnnnnnnnnnnnnnnnnnnnnnnnnnnnnnnnnnnnnnnnnnnnnnnnnnnnnnnnnnnnnnnnnnnnnnnnnnnnnnnnnnnnnnnnnnnnnnnnnnnnnnnnnnnnnnnnnnnnnnnnnnnnnnggccaccatgctatgctggctttcagaaagttagggaagaaatgtggacttccaaattttatttactcaaagcagttgatagaaggtggagataaagcattcaaaattgcaaattcaggagtttgctcaatctttttctttttac

SEQ ID NO: 434540 - DNA, 1363 bp, Homo Sapiens
gaaagccccccctccataaaatccccaacccatccccttaagggcttggaaagcttccttcccaaaaagggatcccatgttatgctaacctccattctccacttcctagtggcctgtgacaaaggtccatttttgtttgcaatttatccagtgtctcaatcagcatgcaatctgtcactggcatagaaaaggacagtaatttataatgaagcactgttttgagtgagaaatgaatcttactactgagattcattctccctcggaacgcttcaagaagtcatctgccttctgcagggccacacccatcttgcatgcagttagccgcaggagggccaggcagtttctgttacggttttccagcaaagcccactgcctccttcctcctcaccctcaagtggcagaggccaggatggcaacacacggccacccccaggcctcattgcgctcctccccacaggccacccgccccactgcggcgccccggcccggcagtgccagcagcaggtcggcaccgccagcgccacgcttctcgggggccctggtgttccatgggtaccaatccaaagggttcggctcaactggtaagggcgagcagaggacctgggggagacggggctgacagaggaatgcaagctgaagctgtagcgccactcagacccctccacaggatttctgcgggaaactgcgcgccagcaccgcgtccccatgaagaaaacggagggtgacctgcgcgccacagggaacaaaagatgcgacagggagggaaagggaagtgggtgctgccacgatggggtaaatgggagagacagaatggtggcaggaaggggaaggatgagtaaagggggaaaaaagggaaatacagggtcgcctggagggggtcgaaagaagtgcagcgtgaggtgacgggtgcgcgcgctaaaggacaggaagcaatgcggaagggctgccgtttgggcgaagggaaagaagcagaggtaggtggaccacggggtggaccacctccggaatcttgcggcccgcgggcgggcaagaggcgcgcacgctccctgctcctcgccgcctgcccgcgtggtgtgcgcgcgctgcacccaacggccgcgtggtggggaagatgggaggggatgggggtaggccgccgagcatctcctgccccagaatctggcacgttgccggggacctagggacagacgaccgcacaacacgccacgttgcaggcgctgccaggccgggtgcctcacctagctccttcatgtattcatcaaagcctttgctgtccaccaggcgccatcttccttccagctgctgaactgtggccatggtgggtgcgggcgggctggcgtgcagagaggggtctgcgtcggcg

SEQ ID NO: 434541 - DNA, 1817 bp, Homo Sapiens
  misc_feature (94)..(103): n is a, c, g, or t
  misc_feature (1482)..(1482): n is a, c, g, or t
  misc_feature (1588)..(1600): n is a, c, g, or t
  misc_feature (1627)..(1636): n is a, c, g, or t
aaccaaagggaatgattcctaattaatccaacccccctttgaaataagctgcatgtaaaatgtttatgataaggataattgaacacagtaaggnnnnnnnnnngaaagaaacagtatggagatttgctcatggaactgagcttggtcattctcttaattaactcctgtccaaagtgatgatggaatttttattctactttttcatagatccgagtacaggtgacattgttcatgacacactccaccactaatttcccatctttcaattttcttgttattgtgctttccttcccatcccactcctgatgctgaaccaatgcaccatctgtaaagttgcagacagtctgagtttttctgccatcagctgtggtttcttcaaacttctctcccagggtacaagaaaactgtgttgttttcaaagtgctctcagtttttatggtgaggtttttaccatcacaagtgatgatacaatctggcttggccattgcgcccatttttcgcaaagctattcccactcctagctccttcatgtattcatcgaagcctttgctgtccaccaggcgccatcttccttccagctgctgaactgtggccatggtgggtgcgggcgggctggcgtgcagagaggggtctgcgtcggcgtggcagcgtgctgtgagtgcacccggctgccggcggctgctttataacggcggcccgcgctgggcggcgctatgcggccaatgggaggcgggcctcgcccggtccccgccccgcccgccgggcgccccctgggccttctcggggtcgggaggtgctaaccagctcctcttgccagggtacgcgacggcctctcgggcgcctcctgcaagcagggactcgcccggcgcgccccacgcctcatggacgccggcgcctgcacgtttcggcgcctctgcaggcccaggaagccagaggggtcacctggaggcctggccccgcctctcctgcacccctccgtttgacaacatatccaccgccgtttttcctttcaaaatacccggaccaatcgattagccctcgccggactcggactgcaggaagtgattgatcggctgtttggtttattgattcattaactacggtgcctccctgaccttctgctcctcgccagcgcacaagctcacaatccacaccctcctaagagaacctgctctcgccatccgcaggtctccctggcccaatagtggggatatacctgagttgagctagaggattttatccctgttgggatgggggacgtctcgggaagtgtggtttctaaactaaaagactgcaggaagtgtcaactttagtgactgtcattgccattcaagaatgtttgattagtttatattcccttcgtagtgcaccccttcaccgtttcttctcagacaccagcgggtttcttctcagacaccagcgggttcccctctttctcttgaactataataataccctacacatgtgcggtaaaccctgganaaacaccccccctcaaaccaccacctcatccaaaccatctgggcccacagtcctccaaccttttcccacaaccgtcggccgcacacggtcggcgtctctcccctannnnnnnnnnnnntgtggggcgcggcgccgcctaagaaannnnnnnnnngggggcgccctccctttgttatgcaccccttcactcttctttaaaaaaaggaggccgcccaccctttcccgcggtctccttacttaaccaccggggggcgctgtggagccttattcacacaaaaacgggaagggggcggaaagaaccattcacccctttctgtggcccgctttcaccggat

SEQ ID NO: 434542 - DNA, 834 bp, Homo Sapiens
  misc_feature (91)..(95): n is a, c, g, or t
  misc_feature (100)..(100): n is a, c, g, or t
  misc_feature (102)..(115): n is a, c, g, or t
gcactttacctttattggggccccggcgcgcgccaaaccgaaatggttttagaaaagcttttcgaggggccggaggccggcccgcacgggnnnnnttttntnnnnnnnnnnnnnnttattagcacaaacacatttatttattaaccaaagggatgatcctaattaatccaacacactttgaaatagctgcatgtaaaatgtttatgataaagataattgaacacagtaatgaaagaaagaagaaagaaacagtatggagatttgctcattgaactgagcttggtcattctcttaattaactcctgtccaaagtgatgatggaatttttattctactttttcatagatccgagtacaggtgacattgttcatgacacactccaccactaatttcccatctttcaattttcttgttattgtgctttccttcccatcccactcctgatgctgaaccaatgcaccatctgtaaagttgcagacagtctgagtttttctgccatcagctgtggtttcttcaaacttctctcccagggtacaagaaaactgtgttgttttcaaagtgctctcagtttttatggtgaggtttttaccatcacaagtgatgatacaatctggcttggccattgcgcccatttttcgcaaagctattcccactcctagctccttcatgtattcatcaaagcctttgctgtccaccaggcgccatcttccttccagctgctgaactgtggccatggtgggtgcgggcgggctggcgtgcagagaggggtctgcgtcggcgtggcagcgtgctgtccgctctcgacgaattcgagctcggccgatttggcctgat

SEQ ID NO: 434543 - DNA, 481 bp, Homo Sapiens
ctggttattccatacatagtattacttatatttgtatataaatacacacaaaaagtattttagtcaatgctggttaattaaacctttgctctaatttgaataataaagtttatgttgtagtcaccttttattgagaatggtctctgccagaaattcaagattcctgaattcatacaaagttcaaatagtatagggcaagcttaaataattggtacagtatttcctgtaagagtagctatctatataaattgctagagtgtcatctcaatatacgtaccctcaagactgccccaacctttactcaattaataattattaaaactcatcactaatttcctgtaaggtttaaagaatgcatacaagatatattagcacaaacacatttatttattaaccaaagggatgatcctaattaatccaacacactttgaaatagctgcatgtaaaatgtttatgataaagataattgaacacagtaatg

SEQ ID NO: 434544 - DNA, 835 bp, Homo Sapiens
gccttcaagtttccccaaggtcttttctggtctcccaattttggccataacagaaactgtgtgaaagaatgtgggtcaatctatatagttcaccccctcatttaagtcctgccgagtttcaaaagcatcctttggcgaaatggcagtcctctggtctattcttggttgaagtcgcactgtttcttggcacttgaaggcattgttttgtggactctcatgagctggtgttcctgctctcacctgacactctgactggctggataccacatgctctgtctcctgactttctccgtggctcctcccgctctccgctttgaagatggacttgggcttcctggacttgaagttgcccatgctgggtcgcaatacgctgtccaccagcacggtcgcctctacattctgctgctgcggctcccaagagggcggcgcgtgctcttctaccagagcccctgcgtcggggtagttctctttattgttttcatctctgagactggagcaatcagtctggtcttcatgtagagagactggatcttcgtcacactctgttacagtggtgctgctgaaggaattattctgaaggcttgggctgctgtctgcacatgctcgtaacgacacccccagcaggggcccagcggcacgggcgaaccacaaagcccggcagcccgcgaggctgcggggacagagctgggcggggcgcggcggcggggctgggaccccgggatccagcgaggagcacctggagagttaccacacgaccccgacctcgccagcccaggcgccgcgtttaatcttgggctctttgtgccagccaccccccgaggctggcaatgagaat

SEQ ID NO: 434545 - DNA, 1103 bp, Homo Sapiens
ctctgggagatgtcaccccttggaaaaaactttgggggatatgtgtttatgggggggattcccgtggcccattttgccccacaaggtggaaaggggggaaaagatctcccgggggccctcccaaaaaccttgttaaggttccggggtggagaatgggggtctgacctcggggttttaaagttgaatttttctggcttttgcctgaaagatggaagcatcggggggcgacaaccaggggggttttcccccttcaggtgatgggatagacccaccctgttggtcccccacagaagtggaggtttttctgggtccactgtcggcctcaattctgcccatcctttgtggattggtgaggggtctgcagaatctgtcccatcggcaagcacgctctgggttgatgctggcgccggttctttgactccatgcacctgagcagcttcttcctcatttaagtcctgccgagtttcaaaagcatcctttggcgaaatggcagtcctctggtctattcttggttgaagtcgcactgtttcttggcacttgaaggcattgttttgtggactctcatgagctggtgttcctgctctcacctgacactctgactggctggataccacatgctctgtctcctgactttctccgtggctcctcccgctctccgctttgaagatggacttgggcttcctggacttgaagttgcccatgctgggtcgcaatacgctgtccaccagcacggtcgcctctacattctgctgctgcggctcccaagagggcggcgcgtgctcttctaccagagcccctgcgtcggggtagttctctttattgttttcatctctgagactggagcaatcagtctggtcttcatgtagagagactggatcttcgtcacactctgttacagtggtgctgctgaaggaattatcctgaaggctgaaacagaaacaagaaaacatcagccaagtctggccggggagccgtctccctgattgctctccgggagttagagcacatacacaaacatggcattgcaaggcaagtctccgggctcgcccggcacgctcgctctaccttgggctgctgtctgcacatccggagaattccggacc

SEQ ID NO: 434546 - DNA, 640 bp, Homo Sapiens
atgttaagacacatctatttatttataatcaatccactgtgtataaaggaatactatcagaaggcaagtataagtcttaagtgctaccaacacttatgttggtacactttgtatatcacactttgatacaacactttgtatcggaatacagagaaagaagaacacatcccacagtgcataaataaccatatttaacacctctcaaagactttgtatagatcaggcaggttagcaagctgcaggatatttccatcttctgtgaaatgtttaggaggcagaatgtgtgagcgcaaggctttatagacaatgtgttccacagtccacttccaggagtttggaatggagccaggcacttcactctgctggcctgagagggtcgactcctcagatatgtactgcttccggatggaatagaacatagcgcattctttactgaggctttcaaaacattccttttcttcgtcccaattcacctcagtggctagtcgaagaatgaagataggcagtccctccaaagggggcacatagttgtcaatcagaaggggtaatccaatcaggttcccttcctcatcaatttccaaagagaaatagtctgcaagcatctcagccttcttcttcagaaactcaacaatgtattccc

SEQ ID NO: 434547 - DNA, 904 bp, Homo Sapiens
  misc_feature (44)..(44): n is a, c, g, or t
  misc_feature (219)..(219): n is a, c, g, or t
atggctgaatattatttccatcttttgtgcattaactgtatcanttcttaattctcagcaacaactctccctatagtagcatactcatttcttttcaaatgaaggggttctcgctcaacaactcacctatttaataattccttcgtcagattctagcatttaagacttggtcaagaatgctctcaggccaattacttctgtaggaattcatgaagaganagaaaatctgatggatttgtgtactgaaataaaatctgtggtttctttcccttccaggaccaattctctaatgtgcaataggatagtaacaagactgaaagcatttccacatagattcaatttgtacagcttatctccaggagttctccaatgcaaaataaagtcattgctctttgtgaaaaattcccatatttattagtaagcattttctctaatatgatttgtctggtatccaataaggttagaggtattaacaagcgctgtcccacattgattgcatgttaagaactgctctccagtgtgagctatttgatgaactataaatggagagttctggctgaagataatgccacattgattacatttataggtctcttctccaacatgaattctctggtgcttaatgaggtcattcttccggatgaaggctttcccacactgacagcattcatatggtttctctccagtgtgtatcctctgatgcacaataagggcagaactctggctgaaagattttccacaatcatgacactcatatggtttctctccagtgtgggttctttgatgtgaataaaggtgagagcttcgactaaaacattttccacaatccttacactcaaaaggttttagtccagtgtgattctatgatgcacacaggtgagatctttgctgtagactttcacat

SEQ ID NO: 434548 - DNA, 789 bp, Homo Sapiens
cttaggacgcaggtttcccctttccccttgcggggcccccgggccgccaaagcgaaatggttttagaaaagcttttggaggggccggagggcggcccgacaagggttttatttctgtttatttccttttggaaggggggctctctgtatcctttatctccggcaggtcagcggccctccagggcccggtctcgagcgatgactgcctcctcgaacttgatcatgagcgtggtgcccttgtgccagtgcgccgtgaccttggcagggaagccgctgtgtgtgagcaccgcctccacgatgcccgccgtgaagctggcgcagttgagcgtgctgttctccttgggcacggagatgtaggtgttgatgagcggctcgcgctcgatgatgtagaaggtgcgcgcgtcatcgttggcctgctccagcttgtccgcctccttgccgaagagcgccttccacacggcgcccttgacgaagagcaacgcgcctagcaccttggtctcacgccgggcacccttttcgcgcgccaccagcgcatccagcacgcgcgcgcccacctggcggcccagcgcggccaggcgcgactgcagctcggccacggagaagacgcggctctggcagtgctgtaccagctcggagaacagcagtgcgaaggcgctcaggctcacctcggtgcgcggccgcgccagcgcgcgctccagcagcgccgacttcccgcgcgtgaagcgcgcctccatgccgccgccacccaggaaccgcagcagtctgctcggccgagctgctttacggcccc

SEQ ID NO: 434549 - DNA, 575 bp, Homo Sapiens
tttttttaactctgaattcttttaattctgaaaccagagacatgtacaacacttacagcattcacacaacactattttcaaaataggtttttgacccctaaaaatgaaaattcttagtgacaagctttagatatgaaacttagcccagtgggtattcactttgtcacaaaaagcaactacagacaaatagtttttccctctccccgacacaaaaactgaaattacagacttttaaagcaggaaaaaattttctccaaaatgcaaatgattaaggtccaaggaacaaatgaacagaagatctcaattattcaattgagcgagtgatttggtttggcatattaactccttttcttactacttcctgatatctgattctggcaatatttatcttgtatctactgggcaagacactgggaacacaaagaaattttagacaaggtccagtggtatgctggtaaaggtttaacaactagctcttaagggaaaggtaggtcttcacttatagcatttctatggtgtaaatactccaattgccgcagatttcaagctagcaacaatttgacaactgtctcaca

SEQ ID NO: 434550 - DNA, 632 bp, Homo Sapiens
  misc_feature (482)..(490): n is a, c, g, or t
accaggtatttcttaaatttattgaagaactcttagctgggagaagaaagatcacaggcttaaacaattgtaagataaaagaacaattaattgcaaataattacaaaagtaatttctgaaattttttgagccactgctgaaacaaaactttagtgcatctcaaagttcgtattttgttaagtgaacatattaaattactgaaaagcaaaaaagagttactgttacacagtacaagatcttaatatagtaactgagcacagccaaataaacagctataattattccaagctgcttttgctatgtatctggtatattaaacaagaaagtggattacttttaacactgcacaagtaaccaaaggtagcaaatccagcaatattaaaaccggatattaaatagtattcaaacattacaacaaaaacaaaataagaacttctagaactagaactctaccctatgaaaggaatgtacacagatggttnnnnnnnnnccaataaataaataaagtgacaagagtgactaattctgtatccacatcttcagagcaggaatacagtaaatgagtaaatggttagaggagtcttgctgaaaatgagaaaaaatgcatctctctgtagtatactttttgtccc

SEQ ID NO: 434551 - DNA, 481 bp, Homo Sapiens
  misc_feature (294)..(294): n is a, c, g, or t
cagtttgcttgttaaccacttctgggatacactgggggtctcccactcaaggtggggtcccggcagccctactcacccggcaggtgtaacttcagcggccgcaggctgggcctggccacctgggcatccccacgctggtctgggacacctgtgtgagacccaggtcggctcctggactctgccctggggtttctaactttccgtctttggagttgagtctcaacagctaaggttgggagtgtggctgaaacccgtctccacattccacctagaagcctgagctggccggggggngggcgggtgtccagggtctcgggccggggggaatgggccggcagtatgcccagcgctggcattcttgtcctggcacctggggcttgggtgtgaatccaccatgtcgtgctgagcgccaggcacggagtggcaccctgagaaacctgagtgtgtagggtgggccacgctcacctgctggggatgacct

SEQ ID NO: 434552 - DNA, 518 bp, Homo Sapiens
  misc_feature (65)..(65): n is a, c, g, or t
cacctgggaccccagctgtacaggctggacccattcagggaccaggctgccagaacccagcttcncagggcccaaccaactcaaggacagcagctcccagacccgccggctgctggggttccagggccctgtccccccagccccaggcacagctcagaaggctctcacctgggctgagcagtgagtcttcagggtctgccccgctttgccagcgtccatgctggcctgatagccccagagcgacctaatctgggagcgagtggcttcagggggtggaggggagggctcatggttacacgttaacccaaggagcgtcctgtggattctgtgactgataacagggcccagggagatgttgtcctcaccctggggatggccctgcctggcgcccgctgataaagcactgttggcactgggggtccctctgccctagcctgctgggacatggcttcctcctcctatctgcctggggaggttaggcccacaaatgcctgtccccttgtcctgggccccaacaa

SEQ ID NO: 434553 - DNA, 984 bp, Homo Sapiens
ctggaatgggtaatccacagacaaatgtattgtgggaaactacaccaacggatacacgtggggtgttttcctggaaacaagaagtttcacttaagtaggccacgggtgtctccagtcgagaccccggtcggccccgtgttgttgtggaccaggttcttccgggacagttggttacatagtgggcgaactaatgggggccgcaacggcctagtctatccggccatggcattggtagtctaagggagcacatgccagggagcccacattccaatgggaggcgcagccacgttggatataatgtgatcgagcggtcgggcctatcgttgcttggctcaaatgttgtcttgcttgaagaagcttccattcatgcgctttgggttgaagctctggtgggcatcttggttctgtgttcacacagacacagaatttatttctggacgcattctgcaggctggaggtcccggcaggcacagggctcacaccttgggttttgcaaacacctcccagccctccagccggcccatcttgaccagggaggccgctatgccaaagtacacgcaggcggcggcgccaatcccgtagttgtgcgtgcgtgctcccagagtcaggcctccggcgcagccaccgaggaagtagttcagggggtcgtcgggcttctcgcggacatgggcgctgatgcaggtggtgaggccaaacacggccccgacagcagctgcagtgaacgtgtattgtccaaccttagccactccttcaaggaaggtgcccggaggattgagtgtgactctgtaggcagcggcggtcaggccagcgacgctggcaatactggtggtgctgtaggctttgcggtggcaatcggtgccatcggggatatcccagtactgacgaaaaaccttcggcgccatagcccgcaatctcgatcccgcaccacggaccccgccagctcgggaagcgcaagggcagccgcggctggctatcgcgagactt

SEQ ID NO: 434554 - DNA, 598 bp, Homo Sapiens
tttttttcacagacacagaatttatttctggacgcattctgcaggctggaggtcccggcagcacagggctcacaccttgggttttgcaaacacctcccagccctccagccggcccatcttgaccagggaggccgctatgccaaagtacacgcaggcggcggcgcaaatcccgtagttgtgcgtgcgtgctcccagagtcaggcctccggcgcagccaccgaaggaagtagttcagggggtcgtcgggcttctcgcggacatgggcgctgatgcaggtggtgaggccaaacacggccccgacagcagctgcagtgaacgtgtattgtccaaccttagccactccttcaaggaaggtgcccggaggattgagtgtgactctgtaggcagcggcggtcaggcctgatgggaacattccttgcttcagagacccctaggagcaggtcagccgacctggacttgcagcccagcttcaaatgaccctggagcagttaatatgcttctccaaccttcagtcccttacagcgacgctggcaatactggtggtgctgtaggcttttgcggtggcaatcggtgccatcggggatatcccagtactgac

SEQ ID NO: 434555 - DNA, 830 bp, Homo Sapiens
tacattatcgaaaccactggaagtttattcaaatttttgtgcaaaggatttattagcatcaatgccattcatgaaatatgtctctttactacaacagtgaaggaaggaaaaatatgagttcagcatgtattttaatgttgcaaaggaatgacaactcagcaagctgtagaaaatggcagaggagacggggtaataacagaagcaatgaagactcctggatgtacccaaggacaccctatggccagcagcttggtttctcccagaatcagtttacagacttgctcagcctgcgggagggcccagggatcatgcaggaagaaaacggaatacgcttgattctggaattggtcattttaagacgcttttagtaagatggtttcatgtctacacccaagtcttgccaaccaagaagcatcaacgtgaacagctcagagacattcctgcacaggagagcagggaggaggcagcggaaaggtacctatgagcagcagtgcccgggggcgctggccacctccctgtgcaccggataccctcccccgcacccacaggggttcacttacagtttccccaccttgcagcagcagtgaggctcagagtcacccacactccatacatccctctgctcataccctgcctgtagtgtggctccgtctacctacaaagccccacaaagtggacaacgctgggatgacaaaacctttcctcttagatattatatactttgcaaggcttggaaataagctactgcattggtcttaagctagtccggcatgtgaagaaacaagaatttgcccagaagaggactgtggagaaacctctgaggcctcctt

SEQ ID NO: 434556 - DNA, 1174 bp, Homo Sapiens
  misc_feature (16)..(16): n is a, c, g, or t
aagcccccccaaaaantggaacaacgctgggatgaaaaaaacctttccctcttagatattaataatactttgcaaggcttggaaattaagctacttgcaattggtctttaagcttagtccggcatgtgaagaaacaagaatttgcccagaagaggactgtggagaaacctctgaggcctccttccagagtaaggcccgctcacttgaccagattcctcatgatgttcagggaggatcctctgtaccccgatccaaaatgattccagtggttcaagtagtgaaagagctgatacaactgaaggcgcttctcgaatcctggggccttggggattttgccgtggtaggcggagtaaaaggagcttgctaaagcccccaaacatgccagctattgccagctcatattccgagtggccgtagaaagaagctgggtcaaaaatcaccggcccagaggaatcctctgctacgtttccaccccagaggtccccgtggagtaaggctgggatgatctccaggtcacggaacaggtcagggatctttaactgcagagcagaccaaagctggagggcctccctgtccccagactccttctccaccatgtccatctggggctgaatgcgctgccgggcatagaacacgacccagtcctcctgccagtcattcacctgggggaggtatccacagcacgtcaccacgtcaaatccaaaccgggccacaaagggccgttcctcctgcccacctcctctccccactgtgcccgcctccttcaggcgcatctctccaagcttcttgttatcaaggtgtaaatcggccagctgggctccaagctttgcagcatgactgctcagatgcctcatgtccatgtgctccatcaccagcacgctcccgccgcctggggcatccagaaccttgatgggcttgggcactttcaccgtgtttgttttcaggatggcagttaaacttgccatctcaccttcaaacattcttctggcctccgccttggggttcactttcacgaacactcgtccttgatccgtgtcgtagctccggccctggctgatgcacccgccccccgagtggcccgtggccctgacagagctgcagcccagctcgcgcctcagcagctcctccatgttcccgccgcggccgcggacccgccccggatctggcggagact

SEQ ID NO: 434557 - DNA, 929 bp, Homo Sapiens
  misc_feature (575)..(575): n is a, c, g, or t
  misc_feature (848)..(848): n is a, c, g, or t
ccaccgagctccacgcaatgcccggatgtctgcaccttcgcttggacgctttgtcccaaggcgtttcttgctgcctgagtacttgccttatgctgggatttttcatgaacgtggacagcctggcttggctactcactcttctgttaacagggtcctggcaggggcagtgatcggtgatggacagtctgctgtggccagtaacattgccaatactacctaccggctccagtggtgggacttcactaagtttgacctccctgaaatcagtaatgcttccgtgaatgtgctggtgcagaactgcaagatttacactgatgccagctgtgacatttctgcagatggccagctcctggcagctttcatccccagcagccagaggggctttcctgatgaaggcatcctggcagtgtactccctggtccccccataacctgggcgaaatgctcatacaccaagcgagtttggtctccaatgccatttcggtgagcctgtccccaatgggcagatatgtaatggtgggcttggcctcacgaaggatcctgctgcacccctccacagagcacatggtggcccangtcttcaggctgcaacgggcccatggtggagagacctccatgaggagagttttcaacgtcctttatcccatgcctgccgaccagcggagacatgtcagtatcaactctgcccgttggctgcctgagccagggcttggcttggcctatggtactaacaaaggagacctggtgatctgccgaccagaggccttaaactctggtgttgagtactactgggaccagctgaacgagacggtcttcactgtccattccaacagcaggagcagcgagcgnctggaccaggcagagcacatggaggacagcagagacatgggctgatgaatgcattgggcttcagccgacctgcactcagtg

SEQ ID NO: 434558 - DNA, 677 bp, Homo Sapiens
ggcaaacttactgactaggtagcgaggcctgggtgtgtgaattcggcacgaggcctggccccccataacctgggccagggagtacactgccaggatgccttcatcaggaaagcccctctggctgctggggatgaaagctgccaggagctggccatctgcagaaatgtcacagctggcatcattgtagatcttgcagttctgcaccagcacattcacggaagcattactgatttcagggaggtcaaacttagtgaagtcccaccactggagccggtaggtagtattggcaatgttactggccacagcagactgtccatcaccgatcactgcccctgccaggaccctgttaacagaagagtgagtagcccagccaggctgtccacgttcatgaaaaatcccagcataaggcaagtactccaggcagcaagaaacgccttgggacaaagcgtccaagcgaaggtgcagacatccgggcattgcgtggagctcggtgcctggatctgtcaccattgtcctcaaagtcctcaaattccaagtcggttccctctactgatggaccctggttgtctgaggacagaggaggaccgtggaagaacggagacggttctgttggtagcgcatggagcgctggcgaatactgtctctccgtgagagatactggtcatcctctgggcgta

SEQ ID NO: 434559 - DNA, 1491 bp, Homo Sapiens
  misc_feature (92)..(92): n is a, c, g, or t
cgtctcaaggttacaaggaaaaatctatcccgtgtggactcagtccccaggccataaaacacaagcaaagatagagaaatctgggtgtgggncctgggaaacgcctgttcctcactgtagaaacctgcatcagctctctctttctttccctgggacccagaaatcacccggtggatgatggggaaggctagcaccacagcaaactgggcaagtggtccgctgcacaagggggaagagagggctagtagggccgagggtagcaatgaacctcacagctagcgggcatgaggcagtctgcctttaggggcagaaccctcagggagacttgcatgtggggcactttcccgtgtaacctagggtcagagcacctctgatggaggaggggaaaggtcccatccccattggagtgtcctatgatctcagtggacatggaggccgcccccagccccagctcgttgccaactgctgcagatccttagcaccattcaggaactgtggagggggcagcgggggtagcaatgctccgccaagattgtgtcactgctccaggaggatacttcacagttggcagaaacctgcgcaactggccatatctggtctaagactcaggaaagcctgcaccttctgggggaaggcagagtgtcgtattagctccaagctcccatgttgcagccattttcctctgtttcctgccctgccccaggtttggcatgaaagttccaggttttgctggaaatgtctagggcccagagagatctctgctctttagttgcaagaactggcccaaaactgacctttagaggaaagacaggtggcaggggcctcagcacctaaggcccagaggggttgggaaatggggaaagccaccctccaaactaccaccccgcgagaccccgagtctctcaatacccttgcctcccctgtcatgacctacaggacccctgccaaaggggagcagcaggagtgaattagcccggaccaatgagaggctgtctgtggcccaatcctgcctcaggcccgtgtactttcctggtgagaacaacgagcaagagggagccaagggctgagcagtcacgggaagctggctcatggctggcccaatatgggatgctgggcagaatcacctctagtcttccaaggtggttgagtctttctgaatgggttgcctttgcattggaatctggcccagggatgatgccactgtttttggtgactggttcttgtgtttgaagccgctgacatgagcttggtactgttctatggagttcagcactatcttacatgttttgcaggggtagccctttccagcttcctctctacccaccggctgggcaccggacacggcttcccacaggcggcgcgccctctcgcggtcaaagcgcaccccgtccggctcctggccctccagcaactccgagctgctgtaaggcccggccgctccgccgtccgcggcctgcaccgtggccggcgcgggatactccatcttccccg

SEQ ID NO: 434560 - DNA, 908 bp, Homo Sapiens
tttcaataactcaacaatgacatgaggctttttcacctgatcagctcttcaaagccaagtctgacaaggtccattcctaatagtgcttcttcatcaccaaacttcttcctcttcccccatacagcttcatttcccaatgcaaactccatgctcattggctccccatttctgccccccacaaccacgctgggcgactcaggacaacagcatatgtttcaggaacttgatcaatttctatatatgtacacttaagacgttctcccaggttatcatgaactacagcaggaaaataaaccacctcttgtacttcatcatagagtctatctgaattttttccaaaaataatcctgttatcgactgttgctggaggtaatgccacgaaagtgtcacaggaaaaaggttccattttttttaacgtacagctgggtacaaaatagacagggcctccgttcttgcagagctgtctgtcattctatttcacgcgctcttagttcagccggcgctttcagaaacatcatattgttggattctcgcaagcatactacggttagggccggaattattatcttcataacatagatgagaaaaacagtgcagaaaagcttttgcagctcgagtcagagtccacagaaagtaatgggctcgagcttcaagcacctttggtcgaagggccgccgcggtccaccccgcaccccggccctgggcgctcaaaccgcagccggtgcagctgggctccggagcccctcggtcaagcagtgccgcgccacagttgggtcttccgggtttctgtctcaactatgcacgcccctcccccgtgcgcgcccctcacctggcctcccagctacccgaagtgacaggtggacggagggaggagtggccagtggaggcatcagttgccggaagctgtc

SEQ ID NO: 434561 - DNA, 1733 bp, Homo Sapiens
  misc_feature (1368)..(1368): n is a, c, g, or t
acaaaagggcattcaccacacacacaaaaaccgtatgcaccaatgggtacattccaaacctttttccttttacacatggttcaaggttacctacaagccaaacaactaacccactaaaatattttcaatcgcaaaaccaaaatcggctttcttcatgtcactaccaaaacgatttcagggccccccctatttataatcaatatccactccatgcgtcattttaatgtttcactctttatatataattgaatacttagttattgtgacaaaaagttactatggctaaagaaaataatgcaagtacatcacctgaaataacacctgtatcccacgatacatgaatccaattccaatgctgttttctttctatttcagcaacactatacgtagtttaatagtcaagataccacttgaatactatccaagaataatcagatctgctcaagttaggtttatataatttaccaaggtgatagattctgactttgaagattactgaccactgatcactaagaactaatattagctgaccatatgatcactaagaactaactttgactgataaatttgactgataaatttgaatttcatcttttgtacactgaggaaagagattaacaattttctccacatcaagatgcttgttttgaaggattgattccatctctctgaatagttctttctccagtttcctcatgttgtccaacattattttggctttttcctcattattatttactacttccaatgcctgttgatgtttttggtagagtgggtgtcttctgtcaggcttaaaatgtgatttctttttaactagatcttcaagttcaaatgttggtgaactggtatccaatagttgtgaaatatgtggcacaaatatgaaaggcttaaaaacagatctctcaggaatcaggagtccctgtaaagaagtgaatgcaaggaaggctggagtcttgaggtaaaatagaaaccatgcttgcagtggtcaggaattctccctccatattaatgccacttggtttatctcgaagaatttccatcattgtttcaaaagttatatttcctttgtgcttatttagaagcttgtagccctcacagtatctgcctgatgaagtcatcatcttggctgtgtcaagataggaatatgctgcagcaaaatcaaactcctttttaccatcccaccaacctttccgcttagcatagtttctcatgtctgggtgttcccgggcaatcttggttgttatggaaagttgattagaaatattacgaactccctcttgtactttttctgctgcccagtacttccctgcagtctccagaatccaggcttcattcctatcagctatcaggaaactgttgtgatagctnaataccattctaccctctgtgcaatttccaccctggccatatttttctagtaagtcaacaatgacattgagggctttttcagctgtatcagctctttcaaggccaagtctgacaaggtccattcctaatagtgcttcttcatcacaaacttcttctcttccccatacagcttcattcccaatgcaaactccatgctcattggctcccatttctgccccccacaaccacgctgggcgactcaggacaacagcatatgtttcaggaacttgatcaatttctatatatgtacactggcctcccagctacccgaagtgacaggtggacggagggaggagtggccagtggaggcatcagttgccggaagc

SEQ ID NO: 434562 - DNA, 1335 bp, Homo Sapiens
ccaaccttccttttccctcccctgggccttaaccaggtgttccccagaaaaatccccggggggccacaaggccctttccagggtgtttttccgggggcccgttctgggcttgccataaggtggcgaacacaagctcccgcatttttgaagggcggccaggggcctcaatttcagccccgcccgtggtggaagtcagccagtgcccacctggtagcagatctccttccaccgcctgcatcttcaggtcagccatggtggcccagcgggggtctttgccctgcagcctgcgtcgctgggggatctgataaaccctgcgagggggcctgcgcttgccactgctgggcagaccacagcgtttgacaatggtctggaccgtggtgggcggcagctgctcccgcaaggagggagatgagcctccagctctcttcacaagagcgcttgtcagagtcatccccgctgtccgagtctgcatacagtcgctgctgctccagcagaagatcggcttcgttccttttctttccggtactgattctccagatcctgcagcctcttctccatttccagctttatgtcgatgccttgctgctccagcagttccttctgggcaaagttccagtcgactggctcagagggcggtcctgggggtggggggacccctcgttcccgttccagccttgcctgctccgggtggttgaagcggaaaacgtggttcttgcccatcacaatcctattccctgacttcagcaccagcggctccgtcacaagcttcccattcacatatgtctcagctccttcacaaggctccagagtgaccaccacttctccatctggctgggggatgctccggaacagacagtgttgctcccgaatgaactgtccggtcagcttgatgtccatatctacttggccgaccctggtgacgccatctttgatgtggtagagcagacactcagacatcagagggtcttcgttcaggttcaccaggtggggagtcttctttggagagaagacgcccacagttcccccatcctcccggacggccacccccatctcagccagcaatgcttctctctccatcctcagggcttctgtcttgcgtagcttctcctcccatgtctcgttcagctcagctataatcttctctgtctcctgcagcctctccatggcttcctcaggcccaatctgggactccgtgttgggggagaatgacggctccagctccccattatgtgtggtgggtgatgagggtgaaactggagctgggggagatgacacagctggcagggcgcctctgacactcccctcgtgccaaattcgccacccaggcctcgctac

SEQ ID NO: 434563 - DNA, 2395 bp, Homo Sapiens
ttttttttctttactcaccattttaatactgccgccaactataacagattaaaaatgtacacatgacaaagtggaaaaaagtcccaaaatgcaacagtttcagcaaaagaacatactggctaaggattactacagttaacatcggtacagtaaaaacgatggcaaacagggatttggcaccacatttacaaagtaaaagcatgcactgttaatacactttagatgtttctcaacagaaaaggccatgaagatggaaaacaagaggcaccatgtacaaaactccctataactgagacaaacaagcaagaatcaaagtggtcaatttagtaaatatgtagcagcaaagtcactggttctgtttggaatttagcaatttgcatttctgattggcagctgccctgggtgtgtctgtatccaagaagctgactttatcatactacatcagcagtaatttggtaatctgcacaaacaaggttaaccttcaaccataagcttaaagaaaagagagaactagaatcttattgcagaactttccaatgtaattaccatatggaaaccataatggtactttgagcaggataataacataaatttcatttaaaaagttgtatttatagccccagtaaccggaaagaattataagtaattatggaagtattatattctgaccataccaagagttaaaaacaaagagttcctactaaagaggaatattttcaagatgatctggtcacatcatgtgcatagttaagattgtttgttttaataaagattcttttgcaaataaagaaataaaatttagtaaagttattcttctcttgatgaaaaaaccttaaaaatgaaccactggtggtttaagaaggggggaaaaaaagagtaagctacatattgaagttctagaatgcagcacctcaacttcacatcttccataagcatttaagattaagaaatccaagtgatgtcttgacgatcgaatcacactttatagttcttccaattccaatgtctgactttagcatctcatgtcaattaaaagttccctaatacaaaatattgtgctaaagagtgctaagattctgcatgctgctgccattccctggtcccgttcatgcttgtagctgccccatgagacagcaaaaggtgtctggtctcaacactccacactgtagtaactttcactaacatccatgcttctcaataaagtccacattcctttaagttgtttttaatgatgacatctgtaacagcatcaaaaacaaactgcacattcttcgtgtctgtggcacaggtgaagtgagtatagatctccttggtatcttttcttctgttcagatcttcaaactggcattgaatataggcagctgcctcttcatatgtattggaacctgtgtattctggataacagatagttaacggactcctctttattttttcctcaaaaaggtctttcttgttaaggaagagaatgattgaagtttctgtaaaccatttgttattacaaatgctgtcaaacagtttcatgctttcatgcattcggttcatctcctcgtcctcagccagaacaaggtcataatcactgagggccacacagaagataattgctgtcactccctcaaaacagtgaatccacttttttcgttctgatctttggccacctacatcaaacatcttgaagtataggtctttgaaggtgaaatgtgtttctacaatgcctgtggtcttcactctcgtccgaagaacatcttgctgagttggaatgtagttagactgggatattctatccagatcatttagataatatgaagcagaatcattgagctgatattccctggatctgctgaagcaagcttgtaccccaccatctcgccataaccgtttaatcactcctgctagttctggagtcatgactccttcttcagcactgccagctaaaacaaataattgccgggcatcatctgccctggcagcttccccaaagtcaatctttagccgtcccatggctcttatgattgcaatgatggactgtatagtattgctgtagacaactactttatattgtttacattcatcctctgaatagccatcctcatgaatgattttcatctgtttcacaatggtgcttttaccagattctccagcaccgagtagcagcagcttcacttctttggccgctttttccccgtcctcccgtaagttgcggtcgatcatcttgcttcgctccactgccgccttgtcttcggcgctcaacgtgcagcccatggcggcggcgggagaggggacacgggcccggactcactcacaccacggaaactgcggctcggcaggctgaggcaccgtctattgctgggcggtggccctctccgtcagctcccttagcgcccagaagaaccccgct

SEQ ID NO: 434564 - DNA, 947 bp, Homo Sapiens
acccgcccaggcttttttcattgccagccaggccaaggcctggtgttctttttggacccagattcaataagaagggtttattggaatattataggccagccaatgtccactggaaggtcaaaaggtaccaagaaaaaagtagggatcccaggtgtttgccagggcaaagggcgagtccccaaaatccccactgccccataatggcgttgcttagggttaaaaacagacatgcctaaggaggttgtacctggaatatactcatcacacttctttttttccaaatggctgtttgtgagacttcttctactttcacgatcagaaataaacttgctatttatctgaccattttctacttcggtgaaatcattggagtcattgctaatgttatcatcctcgggcactgtcatgttttgcaactcagttaattcgagtccacttttgaaatgcatcatgattagaaagtgtctgtagtttgaaaattagtccaaatttctcctgttctgagtgtatttagaagtagataccaaaatggaagcttgacacccctgttagctcagcaagcagagacgatcactctatatatattgttgtatggccttccagggtttttctatgcacatagatatagtgcctggcacacagtagacactcaataaatatatcgacatgcaccggcgctgagggtcacgaatcggagtcattctcctactgggggacgcgtggcccttccgcaaccatggcttgtgatggtttaacgcggacaggccattcctccccgtcccgcgcgcggtctcctcccctcctgtgcgcccgctctttaaccaaagctgcgtgtcagtgagccgtgccggtcacatggtgtcactgctggcggccgcaccttgctgcctccctcttgcagctctctgacgatgcagcgaccgcggctggcggagattgagcccgct

SEQ ID NO: 434565 - DNA, 1189 bp, Homo Sapiens
  misc_feature (1159)..(1159): n is a, c, g, or t
  misc_feature (1162)..(1162): n is a, c, g, or t
tttaaaattttggaaaagaaaaattgagaatgcaatcagtagtctcatttttgtcagtattctgtcagatattagctattcaataagcatatcttggattactatttttttagttgtcagtttttctagtttccccctttataggaaaaaataatacctatgtggttaaaaactgagacccatttaaaaaacaggacaggtacagttaagtactagaaatgccgtttttatcacttgaaaaatagattagaaatgtttttcttttcccagaattgtgtgagtttgttttgaagccttgaataccggtacatggttaacaggcagcttgtgcccaatcccaaagcgggaagaaaggcctggctttggctcactgatgataaagtctcctcccactgcctttcagcagctctgccgaagagctgatcaagatgctgcaaacctagcttccccagaccggccaagagggaagaatgatgagcgtgttttaaattacaaagagagagcagcgcaggcagtttctggtctgggtgattaattgaaatccataaatatagcagtgctaatttgaagttccgtaattgtttgtgccatgagaatgtgtacgtttgaaaggattttataaagcaattactagaaatgcctcccttgagagctgtatgactggaggtgttttcagtctgaggggggcagcataaacccaaacctcttctagatgaatggcagggtggcgggaggggtcatgaaatcatggggaagaggtgaaggatttgagagctactaacctgacatctacctgaatgcctaagaaattgcagggcaatttcaggaaataggaaaaataattttgaaaacattcaaagccttcagactttcggtgtgtgactgatcttttttctaatctctttaaacttctttccacctattgccttaatagcaggtgcttcctcttagggtccccccaaattatttacctcgagttccctaatgaaattactttgcattaatttgtcataaagggagaagtgctagaaataccgaggcattgataatttcatggagtagcaatgaatgtcagtcacagtttcctctccccgttgcccggggctgtgccttcaaagcaggtgacagactgcaaggtgttaacaagctttattaatgnccnataaatcaaaccggggttcattttacc

SEQ ID NO: 434566 - DNA, 1134 bp, Homo Sapiens
  misc_feature (813)..(857): n is a, c, g, or t
ctaccaaattctccgaggtctaaagtatatacattcagctgacataattcacagggacctaaaacctagtaatctagctgtgaatgaagactgtgagctgaagattctggattttggactggctcggcacacagatgatgaaatgacaggctacgtggccactaggtggtaccgggctcctgagatcatgctgaactggatgcattacaaccagacagttgatatttggtcagtgggatgcataatggccgagctgttgactggaagaacattgtttcctggtacagaccatattgatcagttgaagctcattttaagactcgttggaaccccaggggctgagcttttgaagaaaatctcctcagagtctgcaagaaactatattcagtctttgactcagatgccgaagatgaactttgcgaatgtatttattggtgccaatcccctggctgtcgacttgctggagaagatgcttgtattggactcagataagagaattacagcggcccaagcccttgcacatgcctactttgctcagtaccacgatcctgatgatgaaccagtggccgatccttatgatcagtcctttgaaagcagggacctccttatagatgagtggaaaagcctgacctatgatgaagtcatcagctttgtgccaccaccccttgaccaagaagagatggagtcctgagcacctggtttctgttctgttgatcccacttcactgtgaggggaaggccttttcatgggaactctccaaatattattcaagtgcctcttgttgcagagatttcctccatggtggaagggggnnnnnnnnnnnnnnnnnnnnnnnnnnnnnnnnnnnnnnnnnnnnnctgtctttgtggggagggtagacaatatgaacaaactatgatcacagtgactttacaggaggttgtggatgctccaaggcagcctcccccttgctcttctttctgagaagtggctccagcagaaaaaagctgctggcccttttaggatatgttccatggcaagtaaaaaatatgtatttgtccccaatccccggccatggcttttgccaccttgggcttcccccgggacccccaccttgaagggtggggggctaaacttgaaaccatcccacagggt

SEQ ID NO: 434567 - DNA, 681 bp, Homo Sapiens
  misc_feature (516)..(516): n is a, c, g, or t
  misc_feature (543)..(632): n is a, c, g, or t
ctaggacatttggaccaaccctcctgcagaaaatagccatttattttgatgcaatatatctggctatgactagagatttcaaatatttggagggctattatgtgaagaactaaacttactctttgtgacatagaggtcagaaattggtcgtttccatagagtatgagagagacagaattgtgctcatcataagtatcttttttaaaagttagacttaataaaatgggctgccttggtaggtggtgagttctctgtcacgaaagagattcagccacttgctctgagaaagcatggagaatatcaacattgtaagggtcgaccacctcatctctgaggccccctcctcacttaggttgccattgcaggtgggaacactgggctggagtgtcaaagaacctggggttccacaagctgtgcgaccatgggctggttgttttgggtcttcattcctaatatctgtttagtttaagctggacccgtcaatactgacccacttcacagagttatggaaggggnttaaattaggtattaccatgtaaatcnnnnnnnnnnnnnnnnnnnnnnnnnnnnnnnnnnnnnnnnnnnnnnnnnnnnnnnnnnnnnnnnnnnnnnnnnnnnnnnnnnnnnnnnnntttaaaaattgacatcatcattataaccacaaaataatttttaaaatgg

SEQ ID NO: 434568 - DNA, 1057 bp, Homo Sapiens
ttttttgaaaaggatttaaaagtctttatttcctctgaaaacttactggtaaagtatacaatttatgaataatcatatattcatgctttttgaaatatatctgaataaaagacaaattattcaatatcaatagcagtaaataacttatttgcaagaaaattattacaattcctactgtaaagaatcaccaaccactatttagcaattaaatttcaacacattttttttggaactctttaggactttagacaaaggctaccaaggctgacaatccaggtaactatggcagtgacagaagtcaatcattaatactgccattattttagacaaagggctgacaatctcagaaactagttctagaaattatcatcaatgtggccattttactatggacaaataaatatgggagatagggaacttgttactccattttcctatagaaaaatatataaattgaccttttatatatacacaggtatgtatacacatacagtatatgtttttctgagcaggcacaccaactaggaaaaaatacaatagcaacataggattaggtattgcttctcatactgatcactaaactaaatggtattatcattttcggttaataagaagcatgcataactaaacagtttaaatacttgaatcaaaattcttctaatcagcattttctgaaacttcttaaattagctactgaaaattttccactatgtacaatatctcttattaatatgatttcgagcttaaggttgtataacaagacttttcttttcgatttaaaactataagaacaacatatttatttgcagtaattaggatagcttataatcaacgctctaggacttaatttctgttacattttgaggcacagggaactatttcacagcttcttaacagtcttttatccagttgtatgatattttaatccatcatgactcctgttcaggaacttttacacttttcaacccttatttattcacttgaccctgtaaaagacaattctggaatcctaattggatgaaccaggctcacaaattgaaccccaaataattctctc

SEQ ID NO: 434569 - DNA, 1534 bp, Homo Sapiens
  misc_feature (42)..(50): n is a, c, g, or t
  misc_feature (74)..(82): n is a, c, g, or t
  misc_feature (1062)..(1113): n is a, c, g, or t
  misc_feature (1495)..(1495): n is a, c, g, or t
gggggcacttgggtaaatgcccccccaaggggaattaatttnnnnnnnnngtggaaaccccatgcttaacaacnnnnnnnnntaattattaaaaccccctgtttgttcccccaggaaacccatggttcataaccaccaactagtttggagttggtcaggcccccagggagttttgataggccaaattggttctcttcctgggatttttggatcttcaaaaaacgatttcaaaacattttggaaaaattcctgcccctaaatgatgtgatgttgctcccctggatagctcttccactagcagatataaatgcttctattgtagttgtatagtctcctcctgcaaatttttccttttccgtctttcttcctttaacaacaggaattgccaggagttcttcatatacctgagcatataagtcaagtatctgcaagacctcttccgctgcctcttccatggtagcaaaagcactgtgcccttcctgccaaagaaattcacgagtacgtaggaaaggctgaggatgcttgaattcccaacgcaccacattgcaccactgattgagcttgatgggcaggtctctgtgtgactgtacccattttgcatatgcaggatacattactgtttcactagtaggacgaatggcaattggttctgccagctcggttttgccagatcttgtaacccaagcaacctctggggcaaagtcagcaacagtgagtcttctcttgtctctaatgcacttgtgagacacaaacatggggaagtagcagttttcaacaccaagtttcttgatctcagcatcaaaaaagtccttgatggcttcccaaatggcataggcccagggacgaagaatataacagccacttatgtcatggtattcaatcatttctgattttgtgatgacctgagaataccaatcagcaagattttcttctttttttgcctcaagacccaacctggtctgtttcttaggcccctgcccttctcctgctccacttgatgagagcccacctccttggtttttagaagggtctttcctttggccatcattttgtttctgaggnnnnnnnnnnnnnnnnnnnnnnnnnnnnnnnnnnnnnnnnnnnnnnnnnnnntcctcagctccagtggccgacacaggcttatactctactcctatcaaagacttgtactgtgcctttagctgaaggagttcttgaacagctatatctacttgatccttaggggctttttcagttttaagtttccgaactacttccccttgagaagctactttgtcaaaaagtactttcgcttctggtgtttctaaaccagcaggttcagaatttctggttgggcttgaatccgaactttgagataatgggggctgaccaggtatgtactccttcccagttttttctttatactgagccttcagggacagtaagcattctacagcttcatttattttagccttaggggatttttcagcttttagcttacgaaccactccccctngtgcagcaccttatcatccagagatttactttccagaat

SEQ ID NO: 434570 - DNA, 1096 bp, Homo Sapiens
  misc_feature (148)..(148): n is a, c, g, or t
  misc_feature (212)..(212): n is a, c, g, or t
  misc_feature (263)..(263): n is a, c, g, or t
gcccaaaagggggctttaacattggggaaattttccgggaaaatccccctcttatttttaaaaatagggaaaatcccccgggggtttcttgtacccataaaaggatccggggtcccatgaaggagtaaaagggcctttatatcaaaanccaattgttgagtgggtggcaattcacccaactttccccattattagtagctgtcaatgaccanccacagggcccccagaattagtatgaggggcattcagcgacccatgaaagnaaactcttccacctgtgtttcatgaccagcaaatcaaaggcaatgggtaaaccaagagctgcactgaatggccagcctaagatagccccagctgctactcccagcacagcaatggaagtcttgtccatataccatccagtcatggctatcaacgtagtgtacatacagaagctactaggaaggaatgctgatgatgagcaaaacatgccagtgctgagaaccaagaaggctagcatcattcgactcacgtgcaacccaaacttcttgcacacagccttgtaaaagtaaagttcacaaatacagctcacaaaagccagaagacatcgcaaaaagtaaaacacaagaatcttattagtttgtagaattcttgcatgaaatgcagctggccaggcatgaagcaacaggtaagcataggagcgaatggcatatgctggggaatattcccaagtctgaaacccttccccatagatgaggtagtgtgttggctcccagtagttgaatgtttcatcacagtcagagatgttgctcaggagagcagcacataaccttgctgaaagcagacacttgaaagcagtagatccttcaggtgcccagacttgtcctgctttgttcccagataactcggtccggtgctccgcgccgcccgcctctcggctgcccagcagctcccgcagcttgtccgcagccggggccgtatccccactgctggccccgctgcccttcaggcgctgccgagcccctcgactagccatggcaagcctggggaaaaaagaattcggcaccctatgaagtcggtgagcgcgcagacatagctttggctggcaaacggtccc

SEQ ID NO: 434571 - DNA, 2749 bp, Homo Sapiens
tttacggagcaaatgttttatttaataagttataagatacaatttacagtcggcgtttgattccagtttggcttccgtgtcccagcttacaacacccgtggtcctttcacatcaggctccgggctgttccactttctgtagggtgggcttttacccccaacactcgccccagatactacacctgccacaagagtggccacttcctcaggactaagcagcaaaacctaaaggtctgcctgcccagaccacactacacatttgggctcaggcaacgtccctgacactttaacctcattccaaagccagctcaggtctgcaggaaggcaggcaaaattccctacacctcatttctggatttctgcaccacacagctctcactgtttctgccaatggtgaaaagaccaccaataagctgctgcccttctctcccccaaccattcccaactttcaggccaaagagccgcaggagtttcattctgtcctgtctgtacagatcattattttccagaaaaagtgacccatgaagttggctggggcgggtgtggagtgttatgtcatgggacggaccttgggatgagggcgttaatccatgggcccctctgagatcactttaaacattttggtaagactgcccaggctgatgaagggctggagcgtgtgttaaaaacaagggctagtgttggttaaaagggatctttggcaagtgggaaactgctcgccactgcagaatttcttcagaccaaggaagggactgaaacggacttggaaaactaaagcaaaaccatgactgccgggatggtctcgtgtggtgattctgcaagaaataatcaccagagcgaggggacaggtacttgagagacatgtgggcctggctgccactctgccctctgagtttctgtagggtgcccggctgccactctgccctctgagaagtgtaagaaggccacagagcatgggggtgttggcgatgaggagcggtaaagcagtgctagtgatctaatagccaaatacattaacacggacactggaagagattaagcggattttaagtcatctcctttgccaaatgacaaccaaactaggtgtcccctttttctctgcccatcttcccctagccttgtttcataaatgctgaagagtgaaccagcagctcaggctagccagttttgtttttttgaaatgtcagtctcattgtgttcctggtctgtctgctgcagtggctggtctgttccaccaagagttctggtttgcacctagtgtactcaggatcttctcagccccctgaacaagcttgcatttcttaagattctccaatatgtccctcaagagtccagtctaggacttatttctgaaggcattttacaacagcaatattttagggatggggtttcagccccacaaacaggctggagggctttgtataaaatgaattacaaacaagcaacaaaagcaaccacaagaactctctccaggatttgagaaaactgttttaaggcactgtgacatgaaaagggctgccagggatgtgttcctccccccacttcacagccagcacataatcgcccctctccttgacgacgtatgtgacgttgtattgctggttgcctacatgcttcatggagacctcctcgcagggggtggtgggcccatggaccccgatcagcagcatgttggagccagctttgctgcagtccaccaggaaggaactcttctggcccacaaaggcctttgagagccctgcccccttagaggtcaccttgctggcgtccgaggatgccttgggaatggcgctatagcaggtctctgtagacgacctggtcactgactccaccaggatggatgaggtctcgttggctgagccagggctaactagacgctggcctgtcaccttggccttgaagggactgcccacgatgtggttgggcccaccgtatttgacgctgatcaggtagttaccagggagccatgggggtgtacatgactttgtacccttcaggtgtttcctggcaatccattttaaccttggatgggccttcgatggtgacggataatgtccctggacctgctcgggtggtgttaataaagaattccgactggatacctgtggtgcccccttcgagtcccgtgccataggcggacaccagggcagggttccccgcttgtcccaggctccccaacgcgcactttgaaggggcttccaaccacgtggctcccattgaacttgacatcgatggtgtggacaccattctcatgagggatgaagcgaacagcatacttatctggctccagctcagacacgtggcactcctccacggctccagaggggctgtgcacctttgcatcaatcttgccttttgcgccattcaaccttatagcaaaggatgctggctggttaacttttaatcccgattcctgaaggctcataacagtgaggcggcgggcgtcgtcggagggtgcgatgaccggcaccaggtaggggctttccgggatgtgctcatcattgaacttgatggacacctcgtagttaccaggctcttgggcaatataagatacaccgcacgacccatttttatggtcatcgaatgtaatctcggccttactggggccctcaacagcgatggagaggcctccagcgcctgcttcccgggtccaaatgctgaactcagctgggactcccgcttctcctctctccaggccagggcctcctgcccgcaccttgtgggcgcctccttcaccaagtggccccacg

SEQ ID NO: 434572 - DNA, 2295 bp, Homo Sapiens
  misc_feature (2084)..(2084): n is a, c, g, or t
  misc_feature (2135)..(2135): n is a, c, g, or t
  misc_feature (2156)..(2156): n is a, c, g, or t
  misc_feature (2201)..(2201): n is a, c, g, or t
  misc_feature (2210)..(2210): n is a, c, g, or t
  misc_feature (2270)..(2271): n is a, c, g, or t
gccccaagcggttcccgagcccaggcccgcgccgagcccaggtcctagagcagctccagcaggatggcggctccagcgtctctaaggcctgcagggggtccagccccatggggggcgccctaggcctccgacagctccccatctgtgctcctgcctgccggccatcctcaggccactcgccatgggcggctgcttctccaaacccaaaccagtggagctcaagatcgaggtggtgctgcctgagaaggagcgaggcaaggaggagctgtcggccagtgggaagggcagcccccgggcctaccagggcaatggcacggcccgccacttccacacggaggagcgcctgtccacccctcacccctaccccagccctcaggattgcgtggaggctgctgtctgccacgtcaaggacctcgagaatggccagatgcgggaagtggagctgggctgggggaaggtgttgctggtgaaggacaatggggagttccacgccctgggccataagtgtccgcactacggcgcacccctggtgaaaggcgttctgtcccgtggtcgggtgcgctgcccctggcacggcgcctgcttcaacatcagcactgggggacctggaaggacttccctggccctggacagtctacacaagttccaggtgaagattgagaaggagcaaggtgtacgtccgggccagccaagcaggccctacagctgcagcgaagggaccaaggtgatggccaagtgtatctctccaagtgctgggtacagcagtagcaccaatgtgctcattgtgggtgcaggtgcagctggcctggtgtgtgcagagacactgcggcaggagggcttctccgaccggatcgtcctgtgcacgctagaccggcaccttccctacgaccgtcccaagctcagcaagtccctggacacacagcctgagcagctggccctgaggcccaaggagtttttccgagcctatggcatcgaggtgctcaccgaggctcaggtggtcacagtggacgtgagaactaagaaggtcgtgttcaaggatggcttcaagctggagtacagcaagctgctgctggcaccagggagcagccccaagactctgagctgcaaaggcaaagaagtggagaacgtgttcactatccggacgccagaggatgccaatcgcgtggtgaggctggcccgaggccgcaacgtggtcgtcgtgggagccggcttcctggggatggaggtggccgcttacctgacggagaaggcccactctgtgtctgtggtggagctggaggagacgcccttcaggaggttcctgggggagcgcgtgggtcgtgccctcatgaagatgtttgagaacaaccggttgaagttctacatgcagacggtggtgtctgagctgcggggccaggagggaaagctgaaggaggttgtgctgaagagcagcaaggtcgtgcgggctgacgtctgcgtggtgggcattggtgcagtgcccgccacaggcttcctgaggcaaagcggcatcggtttggattcccgaggcttcatccctgtcaacaagatgatgcagaccaatgtcccaggcgtgtttgcagcttgcgatgctgtcaccttcccccttgcctggaggaacaaccgcaaagtgaacattccacattggcagatggctcatgctcagggggcgcgtggcagcccagaacatgttggcgcaggaggcggagatgagcactgtgccctacctctggaccgccatgtttggcaagagccctgctacgcgggctacggagaaggcttcgacgacgtcatcatccagggggatctggaggagctgaagtttgtggctttttacactaaaggcgacgaggtgatcgccgtggccagcatgaactacgatcccattgtgtccaaggtcgctgaggtgctgcctcaggccgtgccatccggaagcgggaggtggagctgtttgtgctgcacagcaagactggcgacatgtcctggcttacggggaaaggatcctgagctcacatgcagtagacttgggcatggcaaagggggcaccaagggcacaggccaagccttggggggcaggtgccaatctnccagtcccaggatcccccagggcagaacctgagccctcccagtgcttgccntcagccgcctggctcccctcntgggaggcctctgctggatccagaagatgctcaaccctcaaggcntctgctgcnactgacggctggcactggaggcagacaagccctgcctcttctccctctattggactgtcnncctgaagaaccctgcaacatgtta

SEQ ID NO: 434573 - DNA, 985 bp, Homo Sapiens
  misc_feature (765)..(765): n is a, c, g, or t
  misc_feature (769)..(769): n is a, c, g, or t
  misc_feature (775)..(775): n is a, c, g, or t
  misc_feature (783)..(783): n is a, c, g, or t
  misc_feature (786)..(786): n is a, c, g, or t
  misc_feature (793)..(793): n is a, c, g, or t
  misc_feature (806)..(806): n is a, c, g, or t
  misc_feature (811)..(811): n is a, c, g, or t
  misc_feature (835)..(835): n is a, c, g, or t
  misc_feature (844)..(844): n is a, c, g, or t
  misc_feature (846)..(847): n is a, c, g, or t
  misc_feature (853)..(853): n is a, c, g, or t
  misc_feature (872)..(872): n is a, c, g, or t
  misc_feature (889)..(889): n is a, c, g, or t
  misc_feature (895)..(895): n is a, c, g, or t
  misc_feature (899)..(899): n is a, c, g, or t
  misc_feature (907)..(907): n is a, c, g, or t
  misc_feature (925)..(925): n is a, c, g, or t
  misc_feature (941)..(941): n is a, c, g, or t
  misc_feature (943)..(943): n is a, c, g, or t
  misc_feature (953)..(953): n is a, c, g, or t
  misc_feature (959)..(959): n is a, c, g, or t
agtccactgctgggcctggaacacggagcagtggctgccctgcgaggaggtcctagagcagctccagcaggatggcggctccagcgtctctaaggcctgcagggggtccagccccatggggggcgccctaggcctccgacagctccccatctgtgctcctgcctgccggccatcctcaggccactcgccatgggcggctgcttctccaaacccaaaccagtggagctcaagatcgaggtggtgctgcctgagaaggagcgaggcaaggaggagctgtcggccagtgggaagggcagcccccgggcctaccagggcaatggcacggcccgccacttccacacggaggagcgcctgtccacccctcacccctaccccagccctcaggattgcgtggaggctgctgtctgccacgtcaaggacctcgagaatggccagatgcgggaagtggagctgggctgggggaaggtgttgctggtgaaggacaatggggagttccacgccctgggccataagtgtccgcactacggcgcacccctggtgaaaggcgttctgtcccgtggtcgggtgcgctgcccctggcacggcgcctgcttcaacatcagcactggggacctggaggacttccctggcctggacagtctacacaagttccaggtgaagattgagaaggagaaggtgtacgtccgggccagcaagcaggccctacagctgcagcgaaggaccaaggtgagggccaagtggatctctccaagtgctggggacagnaggngcaccnatgtgcgnatngtgtggngcaggtgcagctngcctngtgtgtgcagatatactgcggcangtagggttntnngaccgnattgtcctgtgcactctanaccggcaccttccctangacgtnccancctagaantcctggacacacagctgngcgctggcctgagccnanggagttttcncagctntgcatcgagttctcacgaggtcaggt

SEQ ID NO: 434574 - DNA, 1580 bp, Homo Sapiens
tttattgtaatgtctaacatgttgcagggttcttcaggggaccagtcccaatagagggagaagaggcagggcttgtcctgcctccagtgccagctgtcagtggcagcagaggccttgagggttgagcatcttctggatccagcagaggcctcccaggaggggagccaggtggctgaaggcaagcactgggagggctcaggttctgccctgggggatcctgggactggagattggcacctgcccccaaggcttggcctgtgcccttggtgccccctttgcctgcccaagtctactgcatgtgagctcaggatcctttccccgtaagccaggacatgtcgccagtctccacctcccgcttccggatggcacggcctgaggccagcacctcagcgaccttggacacaatgggatcgtagttcatgctggccacggcgatcacctcgtcgcctttagtgtaaaaagccacaaacttcagctcctccagatccccctggatgatgacgtcgtcgaagccttctccgtagcccgcgtagcgcaggctcttgccaaacatggcggtccagaggtagggcacagtgctcatctccgcctcctgcgccaacatgttctgggctgccacgcgcccctgagcatgagccatctgccaatgtggaatgttcactttgcggttgttcctccaggcaagggggaaggtgacagcatcgccagctgcaaacacgcctgggacattggtctgcatcatcttgttgacagggatgaagcctcgggaatccaaaccgatgccgctttgcctcaggaagcctgtggcgggcactgcaccaatgcccaccacgcagacgtcagcccgcacgaccttgctgctcttcagcacaacctccttcagctttccctcctggccccgcagctcagacacctccgtctgcatgtagaacttcacccggttgttctcaaacatcttcatgagggcacgacccacgcgctcccccaggaacctcctgaagggcgtctcctccagctccaccacagacacagagtgggccttctccgtcaggtaagcggccacctccatccccaggaagccggctcccacgacgaccacgttgcggcctcgggccagcctcaccacgcgattggcatcctctggcgtccggatagtgaacacgttctccacttctttgcctttgcagctcagagtcttggggctgctccctggtgccagcagcagcttgctgtactccagcttgaagccatccttgaacacgaccttcttagttctcacgtccactgtgaccacctgagcctcggtgagcacctcgatgccataggctcggaaaaactccttgggcctcagggccagctgctcaggctgtgtgtccagggacttgctgagcttgggacggtcgtagggaaggtgccggtctagcgtgcacaggacgatccggtcggagaagccctcctgccgcagtgtctctgcacccacaatgagcacattggtgctactgctgtacccagcacttggagagatacacttggccatcaccttggtccttcgctgcagctgtagggcctgcttgctggca

SEQ ID NO: 434575 - DNA, 2258 bp, Homo Sapiens
ctaaaaaggagtgagtttggcagtaacaaagctcgtgacacactcaccagatgcacaggctaccctctcaggcacgcctccctttctctcctcagcgaggacacggtgcttcacccacccagtcgccctcaccagaaatgtgtatgcagcaaacagacttgtatgcctctgtctggcaatgactgtaagaaaagaaaatatgcctccaaataaaaatatacaattacatgacgaaatgaagccaagtcttagccacaggcaaaggggaatgattgcatgagtcagaaaaatgaaacatctattttagcagcaagaggctgtgagggatggggtagaaaaggcatcctgagagagttctagaccgacccaggtcctgtggcacactatacgggtcaggaggggtggaagacaggcctaagctctaggacggtgaatctcggggctatttgtggatttgttagaaacagacattcttttggccttttcctggcactggtgttgccggcaggtgggcagaagtgagccaccagtcactgttcagtcattgccaccacagatcttcagcagaatcttccggtaatcccctgaagtatctcccgagatgtcgtggtacagcgacttgccgtacatccgcttatactctgatctgatgtccaggaggtcggtctcgctgcgagacaccatgatgcgaatcagggtccggtcctttgttcctgcccccctcatggccttgttgagcctctccgcaaagaaggctggggtattcttgagacatttcaccacggccagcatgccctcctccaggtccccggacatctcccggcagatgctcttctcaatgtcccggcctgtcattctctggtactcattgaaaactgctaccaggtgggcccggctccgggagcacagaaccgcattgaacttggactcgtctgttcccaggcggttctccccggccgcatacagctcctgggcatctctctgggcgagtgacatgtccacgtttgtgctttcatcacggtttccctgagagagagagatgaggagccgctggaagtgccctgatgtgtcgcttcgaatggcctcttccagggtctttttgaattctgctttgtaggctctgtttaattctcggatgtgctcattgctgcgggaagcgaggatctcaatcaggcaggcttcatcagtgccaacccccttgatggcttcctttatctcataaatgtcaaagaggactggggtcttcatcagagccaagattgtcttctcaaagtttcctgacagttcagatttcagatctttgatcaaatccttgccgtaagccgtcttgaaggaaagtaggatctgctgccgctgcttgttggagcgactccccaggcagtcaatgatggcctgctcatccgtcccgaagcctttcatggccttccgcaggacctcggcatctcgcagggggtcaaagccgggagcatcagtgatggtgcctcggcttccaaactgggttgggggcacagcgggggtgacagtcccagaccccgggtatcctgggtagctcggcactggctgctgctgcccagggagtggcactggaggctgaccagggtaggtcactggtggctgcccagggtaggcccctgggggctgctgtccggggggtggcatgggctggcccggcacaggggcccctgggtatggcggatatgagggcatcctggagggtgggtttcctcctggggttggatacatcccatagggaggaacaggctgctgggcagaggggggctgcccaaagccgccagggggcactggtgggtagccagccccaggggccccagggtacaggttgggcatgttggctcctccaaatgtcccagacatgttggccgccattcccgagagatagtcctggttgaactgccccgcataggtggccacgttatccagcccgatggggggcatgctgggcggaggagggtaggcagcacctccccagggaccaccacctggtgcagctggtgggtagccacctgggggcgggggatagccagggtagctcatggttagatctggccacggggactccggacgcgaggggcgaaatgggacgtgggcgggagtggctctctccgcgggcgtcccgggcgcggcgcctgggttctgcctagggctgggtcccactcccgctcgcggggcccgcggggcactcggggcactggggagccgcgggcgcagcagccgtcagcgccgggcggaaaactccg

SEQ ID NO: 434576 - DNA, 1136 bp, Homo Sapiens
  misc_feature (404)..(404): n is a, c, g, or t
accggggtgcatatagggaggaaagacgcgcggcaaagagaggccggaaggtcttctaacagccagaaccgcggaggatttgttcttctccgaaaagattggggcaaggcccagttcacagattgtgcaaaatggttgggatcgagatgcccttacgcggtgagccctgtctggggaagggaaagtggggaatcctgcttggcccctgcgtttgttggaggcacgtccccaagggcaggtcagatgagggccatggttcatccgtccccggaaggcgtttcaatgcccttcccgcaggcgcctcggcatctcggcagggggtcaaagccggggagcatcagtgatggtgcctcggcttccaaaacggggttgggggcacagcgggggtgacagtcccagacccncgggtatcctgggtagctcggcactggctgctgctgcccagggagtggcactggaggctgaccagggtaggtctctggtggctgcccagggtaggcccctgggggctgctgtccggggggtggcatgggctggcccggcacaggggcccctgggtatggcggatatgagggcatcctggagggtgggtttcctcctgggggtggatacatcccatagggaggaacaggctgctgggcagatgggggctgcccaaaggctgccagggggcgctggtgggtagccagccccaggggccccagggtacaggttgggcatgttggctcctccaaatgtcccagacatgttggccgccattcccgagagatagtcctggttgaactgccccgcataggtggccacgttatccagcccgatggggggcatgctgggcggaggagggtaggcagcacctccccagggaccaccacctggtgcagctggtgggtagcctcctgggggcgggggatagccagggtagctcatggttagatctggccacggggactccggacgcgcggggcgaaatgggaggtgggcgggagtggctctctccgcgggcgtcccgggctcggcgcgtgtgttttgcctaggggtgggttccactcccgctcgcggggcccgcggggcactcggggcactggggagccgcgggcgcagcagccgtcagcgccgatcccgggaattccggaccc

SEQ ID NO: 434577 - DNA, 1028 bp, Homo Sapiens
  misc_feature (51)..(87): n is a, c, g, or t
aatactggaccctacattataggggactcgggctttacgcggtggcggcgnnnnnnnnnnnnnnnnnnnnnnnnnnnnnnnnnnnnnatcaggccaaatcggccgagctcgaattcgtcgagagcgggcggagttttccgcccggcgctgacggctgctgcgcccgcggctccccagtgccccgagtgccccgcgggccccgcgagcgggagtgggacccagccctaggcagaacccaggcgccgcgcccgggacgcccgcggagagagccactcccgcccacgtcccatttcgcccctcgcgtccggagtccccgtggccaggtgtgtgtctggggaagagacttacagaagtggagttgctgagtcaaagatctaaccatgagctaccctggctatcccccgcccccaggtggctacccaccagctgcaccaggtggtggtccctggggaggtgctgcctaccctcctccgcccagcatgccccccatcgggctggataacgtggccacctatgcggggcagttcaaccaggactatctctcgggaatggcggccaacatgtctgggacatttggaggagccaacatgcccaacctgtaccctggggcccctggggctggctacccaccagtgccccctggcggctttgggcagcccccctctgcccagcagcctgttcctccctatgggatgtatccacccccaggaggaaacccaccctccaggatgccctcatatccgccatacccaggggcccctgtgccgggccagcccatgccaccccccggacagcagcccccagggggcctaccctgggcagccaccagtgacctaccctggtcagcctccagtgccactccctgggcagcagcagcccgtgccgagctaccccaggatacccggggttctgggactgtcaccccccgctgtggcccccaccccagtttggaagccggagggaccatccctggatgctccccggctttggacccccttgcgaaatgcccaaggtcccggccggaaggc

SEQ ID NO: 434578 - DNA, 1045 bp, Homo Sapiens
ggcctgggtggcgaattcggcacgaggcgctgacggctgctgcgcccgcggctccccagtgccccgagtgccccgcgggccccgcgagcgggagtgggacccagccctaggcagaacccaggcgccgcgcccgggacgcccgcggagagagccactcccgcccacgtcccatttcgcccctcgcgtccggagtccccgtggccaggtgtgtgtctggggaagagacttacagaagtggagttgctgagtcaaagatctaaccatgagctaccctggctatcccccgcccccaggtggctacccaccagctgcaccaggtggtggtccctggggaggtgctgcctaccctcctccgcccagcatgccccccatcgggctggataacgtggccacctatgcggggcagttcaaccaggactatctctcgggaatggcggccaacatgtctgggacatttggaggagccaacatgcccaacctgtaccctggggcccctggggctggctacccaccagtgccccctggcggctttgggcagcccccctctgcccagcagcctgttcctccctatgggatgtatccacccccaggaggaaacccacctccaggatgccctcatatccgccatacccaggggcccctgtgccgggccagcccatgccaccccccggacagcagcccccaggggcctaccctgggcagccaccagtgacctaccctggtcagcctccagtggcactccctgggcagcagcagccagtgccgagctacccaggatacccggggtctgggactgtcacctccgctgtgcccccaaccccagtttggaagccgaggcaccatcactgatgctcccggctttgaccccctgccaagattgccgaggtccctgccggaaggccattgaaagggcttccgggaccgaatgggccagggccaatcatttgacgggccctggggggaggccgcctcccaacaaagccagacgggcaagcccagaatccctacttttttccctttccagaaacggggttttataggggct

SEQ ID NO: 434579 - DNA, 1892 bp, Homo Sapiens
  misc_feature (1419)..(1419): n is a, c, g, or t
  misc_feature (1426)..(1426): n is a, c, g, or t
  misc_feature (1434)..(1434): n is a, c, g, or t
  misc_feature (1507)..(1507): n is a, c, g, or t
  misc_feature (1603)..(1636): n is a, c, g, or t
  misc_feature (1652)..(1652): n is a, c, g, or t
  misc_feature (1665)..(1665): n is a, c, g, or t
  misc_feature (1700)..(1700): n is a, c, g, or t
  misc_feature (1744)..(1744): n is a, c, g, or t
  misc_feature (1747)..(1749): n is a, c, g, or t
  misc_feature (1757)..(1757): n is a, c, g, or t
  misc_feature (1771)..(1771): n is a, c, g, or t
  misc_feature (1774)..(1774): n is a, c, g, or t
  misc_feature (1780)..(1780): n is a, c, g, or t
  misc_feature (1794)..(1795): n is a, c, g, or t
  misc_feature (1815)..(1815): n is a, c, g, or t
  misc_feature (1822)..(1822): n is a, c, g, or t
  misc_feature (1825)..(1827): n is a, c, g, or t
  misc_feature (1837)..(1837): n is a, c, g, or t
  misc_feature (1848)..(1849): n is a, c, g, or t
  misc_feature (1853)..(1854): n is a, c, g, or t
  misc_feature (1858)..(1858): n is a, c, g, or t
  misc_feature (1864)..(1864): n is a, c, g, or t
  misc_feature (1870)..(1870): n is a, c, g, or t
  misc_feature (1873)..(1873): n is a, c, g, or t
  misc_feature (1876)..(1876): n is a, c, g, or t
  misc_feature (1889)..(1889): n is a, c, g, or t
tttccagcgtgaattgatttttaatagcaaaatggcattttacacagaagcagctacattcatggatgaaaacaaaaatccaagtgacgctcctttgttgaatccatgtaaaaatctgatttttaatctacagagaaatttctacccacacattcggtatcccctgggggtaatgacatggaaaacaaacatcttttctggtctgttaaagtaaaacaatgggtccctggatagactctcaagagggcctttgatggaatggaaccagtccccccaccccgaaagcatccccccagctcaatatgtcaccatttacaccagcacagccctcacattgggtccacagcacaacctattaagaaaggattataacacctgttcggattgggaggccaattcctcagctctaagatcctgctcatagcaagcttgatgttcagtagactccaaagcagactgaatgagggaggggtcgaagagaatgtgcctgcttgggctcagcctcctctaatattgtcaagatgcacacacactcttagaatctcacaaccatcgccaatctctatgttggcctagtcccaatccttctgcctctgggaacaaaaggttcattacccaccaaggcatatttttccctctctgggaccaggatcagctcttgcaagcttactccacacttgtatctgccccttgcagccatgcatgacaaatgggctccctccccaatggaattatcttatagacttgcagcctatgactgtgtttcccctgatcttctccagggacttcccaccaccatgggatgacatgttttcaagattgctccccttccgagcctttattttcaccttggtcctctttactttccagtcattgcagagatacttccaactggggtagacatgtatggattctgtttatcaaaagatggaccaaagggtcttcctagtttcaaaaagttctgctcagttgtctaaaatgtggccagaggccattgcaaactcctctgagttccacctgggctggaaaagccaaatggccagcctaaaactcaaatccactaactccctttctcagatcatatccgtcgctccccaaggcctaaggataaaatctaaacttcttggcaaccagacccggcaccatgtccatgtctcctatctcttgctacattccacatgaaccttccagaacctctttggatcctctctgatccccagaaactggtgtccaccactctcgctgcccggaactcatccccacccacactccacccagccacagctcagcttagatgcctccctctccagaaagcccccacagggtggattaggtgtctctctgtccccattccacccccctgcacccaacacactagaattaaagctcctgaagaccaaatggtgtttaaactaccantatatcnccaatgcntgggacacgcctgggacagagtaggtgcacatcaatcttgtctgtctccttggtgctcccacagacccctgancaatcataacacccatctcactgaatcactatctacttcaccaactctcccactaggctataaaagcaccatgacgaaaaagcccaggtgcaggtnnnnnnnnnnnnnnnnnnnnnnnnnnnnnnnnnnatccttagcagcatcnagtctttgcagtnaaacaaagaggagtttcaggaataggagatgtgancttcctgctttgagtgaaatggagcaaggaagccactagagggnggnnnggcaggcncttccgggtgtagnctncccatncaaggtcctgccannagcaagggatgttctcaaantcttttntannnatcttttttnttgtgcctctnngctnngctntgggtnacgctnacncgntgcaaataaattngtt

SEQ ID NO: 434580 - DNA, 1084 bp, Homo Sapiens
  misc_feature (907)..(907): n is a, c, g, or t
  misc_feature (913)..(913): n is a, c, g, or t
  misc_feature (918)..(918): n is a, c, g, or t
  misc_feature (923)..(923): n is a, c, g, or t
  misc_feature (926)..(927): n is a, c, g, or t
  misc_feature (936)..(936): n is a, c, g, or t
  misc_feature (953)..(953): n is a, c, g, or t
  misc_feature (958)..(959): n is a, c, g, or t
  misc_feature (983)..(983): n is a, c, g, or t
  misc_feature (985)..(985): n is a, c, g, or t
  misc_feature (994)..(994): n is a, c, g, or t
  misc_feature (996)..(996): n is a, c, g, or t
  misc_feature (998)..(998): n is a, c, g, or t
  misc_feature (1004)..(1004): n is a, c, g, or t
  misc_feature (1014)..(1014): n is a, c, g, or t
  misc_feature (1018)..(1018): n is a, c, g, or t
  misc_feature (1022)..(1022): n is a, c, g, or t
  misc_feature (1030)..(1030): n is a, c, g, or t
  misc_feature (1036)..(1036): n is a, c, g, or t
  misc_feature (1039)..(1040): n is a, c, g, or t
  misc_feature (1046)..(1047): n is a, c, g, or t
  misc_feature (1049)..(1049): n is a, c, g, or t
  misc_feature (1052)..(1052): n is a, c, g, or t
  misc_feature (1057)..(1057): n is a, c, g, or t
  misc_feature (1062)..(1063): n is a, c, g, or t
  misc_feature (1068)..(1068): n is a, c, g, or t
  misc_feature (1074)..(1074): n is a, c, g, or t
aacgagctttgtgaacatgccttggctgctggcagggaccttggatgggcgtagtctacacccggaagtgcctgcctgccatcctctagtggctgccttgctccatttcactcaaagcaggaagctcacatctcctattcctgaaactcctctttgtttaactgcaaagacttgatgctgctaaggatctactatgtgccaggcactgctctgggcgctgggacctgcacctgggctttttcgtcatggtgcttttatagcctagtgggagagttggtgaagtagatagtgattcagtgagatgggtgttatgattggtcaggggtctgtgggagcaccaaggagacagacaagattgatgtgcacctactctgtgccaggcgtgtgccaggcattggggatgtagtggtagttaaacaccatttggtcttcaggagctttaattctagtgtgttgggtgcaggggggtggaatggggacagagagacacctaatccaccctgtggtggctttctggagagggaggcatctaagctgagctgtggctgggtggagtgtgggtggggatgagttccgggcagcgagagtggtggacaccagtttctggggatcagagaggatccaaagaggttctggaaggttcatgtggaatgtagcaagagataggagacatggacatggtgccgggtctggttgccaagaagtttagattttatccttaggccttggggagcgacggatatgatctgagaaagggagttagtggatttgagttttaggctggccatttggcttttccagcccaggtggaactcagaggagtttgcaatggcctctggcacattttagacaactgagcagaactttttgaaactaggaagaccctttggtccatcttttgataaanagaatncatanatgtntanncagttggantatctctgcaatgactngaaannaagaggaccaagtgaaataaaggncngaggggagnancntgaaanatgtcatccnttgntgtnggaatccntgaganatnngggaanncngtntaggntgagnnataantattgnttgggggggg

SEQ ID NO: 434581 - DNA, 1365 bp, Homo Sapiens
  misc_feature (19)..(19): n is a, c, g, or t
  misc_feature (30)..(30): n is a, c, g, or t
  misc_feature (35)..(35): n is a, c, g, or t
  misc_feature (37)..(37): n is a, c, g, or t
  misc_feature (43)..(43): n is a, c, g, or t
  misc_feature (49)..(49): n is a, c, g, or t
  misc_feature (52)..(52): n is a, c, g, or t
  misc_feature (59)..(60): n is a, c, g, or t
  misc_feature (67)..(67): n is a, c, g, or t
  misc_feature (69)..(69): n is a, c, g, or t
  misc_feature (74)..(74): n is a, c, g, or t
  misc_feature (84)..(84): n is a, c, g, or t
  misc_feature (93)..(93): n is a, c, g, or t
  misc_feature (95)..(95): n is a, c, g, or t
  misc_feature (146)..(146): n is a, c, g, or t
aaagcccagtgcagtcccncgccagagcancctgnanatatanatcttngcncatcaanntttgcantnaacanagagagtttnagaataganantgagctcctgcttgagtgaaatgagcaagcagccactagagatggcaggangcacttccggtgtagactaccccatccaaggtccctgccagcagccaaggcatgttctcaaagctctttctaagacatcttttctctcttgtgccctctgcagctcaggcctctggatcacccttcacccccactgccaactacaattggttagctctgagtccacagttgccagagaaaagggctctcagcaccagactagcattcaacgacccaagcaacctgcctctaaggtctgtaagccagcctttgacctgtccctaaactgatccaatcctccaggccctgccttgaactgtcttctcctgcagactctgactaccagactgagtcagcaaaaccttgaactagtgccaccttttacctgcacctggaatcccttgcgtatgctccctgcccctctactcccaaaggacgttccctcagtctaaagagatcaaaagtcccttccagaaaaactcccgtttcctcggtgcagctaaattgcacagaagagtttattgctagaagagctaaaagttagaacagggaagctcagataatttatactactaacatgtaaatgactgacggagttataacccttctgaatactctgatctaaagctttatgtcctagaacttccaaaacacaaagtccccaaaatgaagactctaggccctggcctggggaagggtgactctatacaaaatggcatatgctctgtagacaccagacaggtattttaaggtttataagagctgcatctacttgtgcaaactactgtagctataaggctatatatttttaagaactgaaaccaaatgcagactatgaggagtgaagatatgcccaatggccaaaacctcgcaagactggctatacttctgaccccaccttggtgggtaccactgctccatcaggcctggtccacaccagagccctggcacctcctttagaaaactaccatctttaccgacttctgattgttctgactcagagcagccaccacgcccaaaattgttagctatgcttttccctgtgttagtcaagttcaaacctgtgttagccaagttcaaagctgtgttagccccttcccagccatgccgacatccaagctgttaacagtaacaaggaatgttagacctgttgttagtcagaaaaaaatccacaaaccattagtttctgctgaaaggaacagaccaggaaggcaggagtagatgttgtgtggggggggtt

SEQ ID NO: 434582 - DNA, 899 bp, Homo Sapiens
aagtttctcacctgggatgcggccatctgagttccagtttcggagcaccttttcctgataaagctggacaaatggactctgtaaattttcagccccaactccacaagaggtacatcgagttttaaataggctaccagggatctccagaaggttcttgtgccagccttgcggtgcagctcatcgatgttctgggtgatgaccacgactcgccggccctggcttgcgcagccgggtctcacactcggctatggcgcggtgcccggcgttgggctccttgctccccatgacctcccgccggtagtggtagaactcccacacccgggacgggttgtgggcaaaggccaggggagtcgccaggtcctgggcttgccattttctccaataacctccagctcctctgaaggtcggaacaccactttctgcactaacaccagctcctgagatgatgactatgtgctttgcttttgcaaaaaactttcgaaaatctgccatacttgaacttggccgagccattttcaggcaaatctggtttcgtgtggacgctggaggcttcaggccacaatatagctgggaaatcaatcgacttgggacaatctggagaggtcgcatcagggtttgtctgtagttctaatgcttgaggcgggctttagttatttctcccaaaatgaagatggttgtctccacggctgctttctaatatatttgaatctggagacatcaatataatacagacttctaatttgatccagaaaattattttcttcttctgtaggtttttatatgttagaaaacatttccatttactggggcagctcgcgcccccgaatacagtctcccacgccccgccccccggggtgcctccctcccagctctctgtacccacccaccatcccccacat

SEQ ID NO: 434583 - DNA, 911 bp, Homo Sapiens
agacaatctaatttacaaaatttttccctcccaataaccaaccatacacatcaaagatacctcacgtttcagttcaaaccaaataatatgaattaactttccagttctgtgacttttgaatgtgggtgctctttgctacttctaaacccccatcacttatcaacaggttggattccagcgagggaatcagaggctatttttagattgttcagtactcagctcaccacccataagaccatttctcctctgcgtgtggcctagttcttagatatactgtaatttctttcttccccaggacacttaagaaacagtttcattttcatgacaggcaagggcttcaggaagagtcgttccacagggtccctggaaatgaaacctgaatctgttcgtagctggggtggtctccgtgttaaattcagccactggcacgcccctggcagccacctggggggcaaacatggctgctgggtacaccacagaggaagtgcccaccggggaagtttctcaactgggatgctggcatcttgagttccaggttctggagcattgaacttggccgagccattttcaggcaaatctggtttcgtgtggacgctggaggcttcaggccacaatatagctgggaaatcaatcgacttgggacaatctggagaggtcgcatcagggtttgtctgtagttctaatgcttgaggcgggctttagttatttctcccaaaatgaagatggttgtctccacggctgctttctaatatatttgaatctggagacatcaatataatacagacttctaatttgatccagaaaattattttcttcttctgtaggtttttatatgttagaaaacatttccccttactggggcagctcgcgcccccgaatacagtctccccggacgcgtgggtcgacgatat

SEQ ID NO: 434584 - DNA, 1381 bp, Homo Sapiens
ctgttattgctgttgccttagtcccctcactactttttgtctccaatagtgcagtttgccaccacttttatcctgcccctttatttagttgcccacgctgttaccttagggttttttatgtctgggcctgtatttgtaatctgatcgcacatgtgcgtgacctggcgtcggaaatcctactcacgctgggtttgcgtccaggttgtctctcttggtatctcgtctgtctacgtgtacactgtacgcaccgtctccatgatggtggctttcaggtgttatccatttacatatgtttttacatctgttttatctggtatatgtgatgcctcagtgctggcataggatagatctattgttgtcaggttaagctgactgtatccacttgggagggcaatttggctatacactccgttaatgttaaattccgtttgcgtctaataagttctactgctaggaatttaccgtttcagatatatctttatgtgtaccgtagtattttgtatgattatgtccactgcagctactgaatataccagcaatatatctgtacactcaagtgtccatcagcagggactatgcagtgaaacagtggttcatacctcaccatcaccctgctgatgtaggacaccttcagctatggcctgcactactgaagcacctcccagctcacggctcacacctgctggggtcctcttctgatcacttctcctgtgcaaccagtgcaacctggactgcctttcacacccaccccatcacaattaagatccaccagggcgtcccaaaactcctaccaaactccatgtgctacgctccgtccaacctgggccatgcactgggccccagcctccaccgctggccttcctgctgccatctccctctgccacttctagccacagggtcttagctcagactgtttcctctgcctgccttactctatttctcctctcctcctcttgccctcagagaaggcctctggttttcttaacctggtcagggaagattctacctccccctaccctgcccctctcatacttctaacagctgccattttactttgtacattactgacatttgtcttcccccaccgaatcattgagttttacgatagcagaggctgtatctacaccgtcctggcaccttgtagtacctagtacataacagacacacagaaactactgggtgaagtgggggcacactgcacaggaaacaatgagacagatctgcacattctgacatgggaaggctcctaagtggaaacagaaggtacagggcggagtgaaagctttgctaccttttgcttaattaaagcaattatctcatcaaaacagctgctttatactgggccattatggctatgcaggacagtaaccccatcaaactg

SEQ ID NO: 434585 - DNA, 536 bp, Homo Sapiens
  misc_feature (498)..(498): n is a, c, g, or t
ctgcaagctgctttattttttattttcatttacattagaaaataatctctcccttgcttgattttacaagggtaagggtggtcacatgactgacagagacaaccatggtgacacagctcttttcagctgttcatcaccagcaacctggatttcctatgcccagaacagcaatgcactgaactcaagtacaaattaaatttaatcccaactttagtccagtctgagattagcgcattcaaagaatctgtcataacgtttactatagactcttgtcgcccacagaatcagtttccagttcgtgtgtgacatgttctattgttgaatcagtacagagttcttatgtgtgtgagttttctatggtgactacacaaaacctcaggcttacaattgtggaggtcagaggtcaaggtgctggcagggcaggatccttcctttcctccatcatgggggctgctggcaaaattcaatttcttgcagggctgggacggaggtccccantcccagctgcttaggggccaccacactcctcggccctc

SEQ ID NO: 434586 - DNA, 1413 bp, Homo Sapiens
  misc_feature (26)..(26): n is a, c, g, or t
  misc_feature (36)..(36): n is a, c, g, or t
  misc_feature (44)..(44): n is a, c, g, or t
  misc_feature (59)..(59): n is a, c, g, or t
  misc_feature (75)..(75): n is a, c, g, or t
  misc_feature (81)..(81): n is a, c, g, or t
  misc_feature (91)..(91): n is a, c, g, or t
  misc_feature (106)..(106): n is a, c, g, or t
  misc_feature (114)..(114): n is a, c, g, or t
  misc_feature (205)..(205): n is a, c, g, or t
  misc_feature (207)..(207): n is a, c, g, or t
  misc_feature (223)..(223): n is a, c, g, or t
  misc_feature (258)..(301): n is a, c, g, or t
  misc_feature (329)..(329): n is a, c, g, or t
  misc_feature (407)..(407): n is a, c, g, or t
aaattaaaattaatcccaactttagnccagtctganattagcgnattcaaagaatctgncataacgttactatanactctngcgcccacanaatcagtttccaggncgtgtgtnacatgttctattgttgaatcagtacagagttcttatgtgtgtgagttttctatggtgactacacaaaacctcaggcttacaattgtggagntnagaggtcaaggtgctngcagggcaggatccttcctttcctccatcatgggnnnnnnnnnnnnnnnnnnnnnnnnnnnnnnnnnnnnnnnnnnnnccccagtcccagctgcttaggggccacnacactcctcggccctcctctaaggccagcagcgcaggtgcggccctcctcgggttctaacctctcctgcttctggcantttctcagactcagcaggaaaggctctcaagctttaaaggggcatggggctgccctgggcctgcaagatgacctaggacaatctccccatgtgaggcactcacaaggtctgggggtcacaacacgggcatcttgggggccattatcctgcctacctcaccgtaattccagggtccttgacatttttcgtaataaaaagtttaaaagtggtaattacagaactataaaggtgcatcggatgccccagccccatcaccctccagggccattcccctcacacctgccctcccctgcagcactgagcgaatcccagacactgcagagccttttccagttcacgtctctggaagagcccataaaacagaaacagtataaaccatagtgccattcattatcttacccagaagtttaacggtcatattttaacatcaaatagggactcagtgttctgagttccctgctcgtctcagagtcttcaatccaccccccaccccaccggaacaagccgtttctcaagtgagctctttaaggccaaggcactgtgggctccaggacctccagcaatggccaggctgggcttgctgcagaggagcacgacgggcaccagcagatgtggccccgtgtgacccctcagccttgctgtcctgcctgcaaccaggggctctccacggagctctgatgaagacatcagtgagacccgccgcatctccaggcagcacccctgctttccggcaggacggggctgtcaggcacaccacgacctctctcgacccccacagaggctgagacctctcagtgcccactgctcctgggccggccacaatggccactttctaaagcttgagtctatggttctgtgcactggccacacctcttggtgttacctcattccagacgagggtgggtctgccttgcaggtctaacagtcccacagtggtgacggggaccggcagcaactcctgcaggcctccttccacttggtgtaatccttcacctgctcaaatcca

SEQ ID NO: 434587 - DNA, 1184 bp, Homo Sapiens
agcggagcgtggacagacagcggcccgcgggacggcggaaggacgcgcgcaccgaggctcagggggtccggccgcgcgccgaggagtcgcttgtaggcccagggccccggccagtgcccagccccgctgggagacccggccagcaccacggacggcgcccaggaagcccgagtccccctggacggggccttctggattccgaggcccccggcaggttcgcccaagggctgcttcgcttgcgtgtccaagccccctgccctgcaggctccggcggcccctgcccctgagccctcggcctctcccccgatggcgcccacactgttccccatggagtccaagagcagcaagaccgacagcgtgcgggctgccggcgcgccccctgcctgcaagcacctagccgagaagaagacgatgaccaaccccacgaccgtcatcgaggtctaacccggacaccaccgaggtgaacgactattacctgtggtccatcttcaacttcgtctacctcaacttctgctgcctgggcttcatcgccttggcctactccctcaaagtgcgagacaagaagcttctcaatgacctgaatggagccgtggaggatgcaaagacggcccaggctgttgcacatcaccagtttctgccctggcagcctcctgcaatcatcctcgtcttcatcttcctgcggtaccccctcaccgactactaaggacccgccaggcacggctgctggcggagacaagcactgagacatgtttattctcatggtccctgaaacgcaggatcccatgaggttggggcagggcagggcttcttgtcctggggcccccttgagctgtgaactgggcagcaaggccatcagaagctgagtacagcaagggggcagtgagcttggccctcagtccaccccctccgcctcctggcctccgccctgcctgtgtctggggcctgggggcttctcccctcgctgctgcaccctggcttccagcgtttgtgtccctgccctcacgtgccccttcccaggctcctggggccccttggacctgacacctagcaggaagggcttatgcaaaattgtcccaggttgggaggactcactctgtgctccccgaccctgccttcctccacggtgtgaccccgctcagagcccttgtgtctgtgaactttcaatgaaatacccatgcagctcc

SEQ ID NO: 434588 - DNA, 555 bp, Homo Sapiens
gtactgagtgcaattttagccaacgttaattttcttttgatttatttcttgttgattcctctagaaaacactgagcttttaactgttgagaaaactgtgaggcattcttctcagcgattccagtattgcctggttgaattgctaatcagtgcttctgtacattttgcatgattttgctagctttgccacaactgtccaaacataagtggggtggagatatcctgtctctcagcttggcaggttccttggtaggaaggggatgacttgccctaaccctccctgccaccagggggctcacctggggccctccacagctcatcccgctcatggggccacttcgccagtgagtgtcgcccatcatggcaatgaggaggttgagcatgagcagtgtggcgatgatggcaaaggcagcataggtgatgctgtacatgaagggcaggtccacgttgtagttggctgggccatcgatgatggtaaggaacagctcgaaggtgctgaacagggccatggggtagtcgtagaagtggcctagctcctcggggtcctctgtctgga

SEQ ID NO: 434589 - DNA, 1010 bp, Homo Sapiens
gggggatccttttcagcctttccccaccgggaacttgcaaattcctcaggcagtacttgctgccccagggtggcactgcagccatcctgatccagcttcctgcaggtccccagggatctgggccccagccccagggaggagagaggggtgaccagaccctggcacctcagtttggccttggtcagtctgtagtgttccacaggctcccggctttcgacagctgacaaggcgacgagcatctgggccacatagtaggtggacatgataagcgcccgagagtagggcacaggaaaacagaatttgttgagggcgatggtcaggtctgagatgataaagaagagtgcaccactgccagctgccagctctgtccagcgccagtctgccccggccagccgcagccctgccatagctcgccagcccatgaagccgataagggccacatagacccccaccaggtaggtgaaggcacctgagaggcatgggtagaggagggcatagcacaggcccgacagcgctgccatcaccagacctgtccgaagagccagtggctgcatgccaaaggccgaggcgtagaacatgtgggtcacagcaaacatcagcagaccatgcacgaagtatccttggtcctgccagatgaggaaggcgtcacctacagcagagaagacaagccccacaaagatgcgggtggcgctggggtgggccagcaggaatcccaggccatgggccagaaggaagagccagaggcagaagataggcaggcacttgatgagggtgctgaccccacgatgggctagatgagggcagccagagcacaaaatacacgcaggtggccttgaagaacgggcaccagtttgggtccttcactcttcaccacagtgaccggggacaccatggcggcggcggcggcggtctggcatccctgctccgggcctgcagcggccaggacgcgcccacggccaggtaagccggcgacgattctacaaagcccggagggacggacaatacccgct

SEQ ID NO: 434590 - DNA, 709 bp, Homo Sapiens
  misc_feature (598)..(598): n is a, c, g, or t
  misc_feature (659)..(659): n is a, c, g, or t
caccaggcgcacttctgcaggcctcaggacccacacgaactaacctcaaattaattcattggtctttctgctagacgatgccaagtgagattgagacttccctctaacctcttgctgtcactccatgtcatcctctgctctgagaagtgcgcctgggtgcgcacccaggcgcacttctggtggctcctgcacctgcgcggactcctgcaagtgcgagggatgcaaatgcacctcctgcaagaagagctgctgctcctgctgccctgcggagtgtgagaagtgtgccaaggactgtgtgtgcaaaggcggagaggcagctgaggcagaagcagagaagtgcagctgctgccagtgagaaggcacccctccgtgtggagcacgtggagatagtgccaggtggctcagtgccacctatgcctgtggagaagtgcgcctgggtgcgcacccaggcgcacttctgtagcatggcattctctcggaacagatcactatagccctcagcgccatcctctcctatcactcgcttgcccgccttatactccatcagctccatctgcagccgagcaatctcagcccgcagtgcactgatttgctggcnggtcttgtcctggttcactaccaccttgttcttgatgttgcgggcccgattggcatatttnagtgttttgagggtctccatgaaatctcggtctgagggggctcacacagg

SEQ ID NO: 434591 - DNA, 1621 bp, Homo Sapiens
agcgggggtgacagatgcagtgcgtgcgccggagcccaagcgcacaaacggtaagagcgggcgcggtgcgcaggggcgggcgcccagcgggcttggcatgcgcgcccccgcccgaggctataaaagcatcgccacctgctgccactagccaagccgcgcgtccagttgcttggagaagcccgttcaccgcctccagctgctgctctcctcgacatggaccctgagacctgcccctgcccttctggtgagcccccgcccccgctcgcatcctgcgcactgcgcgcccttgtacctgcaaagaaacccacgccctgcgccttcgctcaaggacacttgggggaagggcccctgattccctattcttcacctcgtgaagggcgggcatgcctgtgtcgcggagaacagggagacttggcaccccatctcctcgtgacaggcgtggggacccgagttcgtccacattaacccttcctgtggcgtcgccctctctaggtggctcctgcacctgcgcggactcctgcaagtgcgagggatgcaaatgcacctcctgcaagaagagtgagtgcggggacccttcccctctgccgccgcccctctgctctgcggagtcggtgtctcaccacgcaggatgtggagagacagccaggccccgatcccgtggtttctgactcttgcttggaatagaaccacccgggcagacattaaaatacagatgcccctgccccacacccaggaattgatgggctaggcgtgggacgagaggtttttgtaaatccccagaagactccagtggcagctgggattgaggactgccacactggtccaacctttcccgacccatccctcaaaaactccccaaaacctggggaagccattagtgaggctgcggctcagctctggagttccggtcccttggcctctctccggccttacggatcctctcagtttgatctcaaaatctccccagctcacggcagtgtaatatgcatagggagtaagaggtgggaggaaggctcccttcttccctaggtatgaaaccaggcacaggtccccaccgactccccacggctttcctgggccccttacatctgcaccatatctgcccctcccaagtttatcctttgaggcccctttcaaggtcgtttaccctgtgatgctttctccttaaggcctagtacccacctaagctgggcttaagcccaccagacccccaggacttcctggcatccacccaaggggctctggtcatttcctgggtacctcactcctgtggaggtgcaggatgccactgccgccgacatagatgctgagtcaaagcaggtgtgagactaatgaagggggctgcgactagccctggcttgaatgaaccaggatggactccccccaaccaggaccctttcccatcacccttatgatggggacgaatttgcgtaggacttgtgcactcaagagaggtggtcgatccttccattaaagtctggcaggccatgctgctcctgactgcccaggggaaggtgtgagaagtgtgccacggacacggggtgtgaaaaaggcggagacgcgcaggatccagcatgaatgcctcacatgtgcaactgctggcccgatgagacggagcccg

SEQ ID NO: 434592 - DNA, 1284 bp, Homo Sapiens
  misc_feature (389)..(397): n is a, c, g, or t
  misc_feature (547)..(555): n is a, c, g, or t
  misc_feature (600)..(723): n is a, c, g, or t
  misc_feature (1188)..(1224): n is a, c, g, or t
gtagacagcgtgatatatggctctcgttacaaaagggggtgtggaggggggtatttagttactttataaaaacgcggttctggaagggtagtagtgggcgcaataaggaaagaccacccggggggggttgggttttttagaaacacgccacccaccccgggagaagccgccctcggccccggggggaatatataagttttttggcgagagatgtgcgcccgcaagaaaaagaagggatttcttttgaaccggcaaaggaggattgttggggtgttgtgtttgaaaccagatggatggcaggaaaagaaaaaggtttttattttccccccccaagggggcgggaaagagttctgtgggggggagggatgggtttccgcccgaaggtgggnnnnnnnnngcccagaaaggagaggggtttgcttttcccgcaaaagttccccgaaggtgagaatgtttttcccaccaccgcggaggggtttaaaagaaagccgccccggccgcgcgtttatataaagagacgcccccgtaagaggggccctttttttcnnnnnnnnntgggtggggttaaaaattgggggccccccggggggaatttttaannnnnnnnnnnnnnnnnnnnnnnnnnnnnnnnnnnnnnnnnnnnnnnnnnnnnnnnnnnnnnnnnnnnnnnnnnnnnnnnnnnnnnnnnnnnnnnnnnnnnnnnnnnnnnnnnnnnnnnnnnnntttctttttttatttcatgctgttcatgggatttattgtcattcctccaaggtcagcaggggaaggggacaccagccacacttcaccacaggcataggtggcactgagccacctggcactatctccacgtgctccacacggaggggtgccttctcactggcagcagctgcacttctctgcttctgcctcagctgcctctccgcctttgcacacacagtccttggcacacttctcacactccgcagggcagcaggagcagcagctcttcttgcaggaggtgcatttgcatccctcgcacttgcaggagtccgcgcaggtgcaggagccaccagaagggcaggggcaggtctcagggtccatgtcgaggagagcagcagctggaggcggtgaacgggcttctccaagcaactggacgcgcggcttccgctctcgacgaattcgagctccggccgatttggcctgatnnnnnnnnnnnnnnnnnnnnnnnnnnnnnnnnnnnnncgccgccaccgcgttcactccggttcgccctatagtgatctatacattcagggggaggga

SEQ ID NO: 434593 - DNA, 733 bp, Homo Sapiens
cgccctggagagtttctctttctctcttttttcctgttcatgcgaatttattgtcattcctccaaggtcagcaggggaaggggacaccagccacacttcaccacaggcataggtggcactgagccacctggcactatctccacgtgctccacacggaggggtgccttctcactggcagcagctgcacttctctgcttctgcctcagctgcctctccgcctttgcacacacagtccttggcacacttctcacactccgcagggcagcaggagcagcagctcttcttgcaggaggtgcatttgcatccctcgcacttgcaggagtccgcgcaggtgcaggagccaccagaagggcaggggcaggtctcagggtccatgtcgaggagagcagcagctggaggcggtgaacgggcttctccaagcaactggacgcgcggcttggctagtggcagcaggtggcgatgcttttatagcctcgggcgggggcgcgcatgccaagcccgctgggcgcccgcccctgcgcaccgcgcccgctctttccgtttgtgcgcttgggctccggcgcacgcactgcatctgtcgcccgccctgccgtgtgtgtgcactgccggggcccgctcgcccacgcccgcgcgtgcgcccccactcccaccccgcatccgcgtgcacgacccactcgccgccgctatgcgcgcccgctctcgacgaattcgagctcggccgatttggcctgat

SEQ ID NO: 434594 - DNA, 690 bp, Homo Sapiens
tgagaattgtacctggcccctctaggagtacttttaattctgcggttggagcaataagagagaaggagaaactccaaaactgtcctaattgattctgagcctcccctctctagaaactggcctggactaagaatagaccgccctgccacaagcatccaccctaagtgtttctggtttacattgccctcttaggcgctctgagactctcctcaggttcggtgttttcatagcagagtgctgtctagcctgttcacatgtccgtcctgcattctgaagccccactctctgagccaggggagatcagggacattcttgagcagagccagtgcagggagtgcacagtcctggagcaggtaaagacctggagcagcaagtgaaagacccagagcagaggatgacatggagtgacagcaagaggttagagggaagtctcaatctcacttggcatcgtctagcagaaagaccaatgaattaatttgaggttagttcgtgtgggtcctgaggcctgcagacagtgtggggtaacaatactaatgatgagagtgatgagtgtctcccgtggccgtgtcctctctgaatctctgagcattttatctttcatctctgtgggagttgcggcttaataataataattagagtaccctgagcatcggtgctttgtagaacacagcattaagccctgtggaaaag

SEQ ID NO: 434595 - DNA, 416 bp, Homo Sapiens
ttccaattacccaggccctaccagagatctactcactcgggcacgtctgcccatcacttatcacagttatattcagccattacgtgctggctgcggcaacgctgtttatctgggacaataacgagtccctgaggaactggattgctctcaggtagccgcagctattctgggacactcacaagggtagagccctgcggtcaatgtacagagccgcctgcactagctgattaactctgagtctaattacaaatattggtaccaattcggcgcctgtatgcgcacccaggcgcacttctcacactccgcagggcagcaggagcagcagctcttcttgcaggaggtgcatttgcatccctcgcacttgcaggagtccgcgcaggtgcaggagccaccagaagtgcgcctgtatgcgggat

SEQ ID NO: 434596 - DNA, 2576 bp, Homo Sapiens
  misc_feature (164)..(254): n is a, c, g, or t
ggggggggagattcccaaagccctatggtcatggcccaggggtttttccttggggaacacaggtatgggcccaagttcccctttcccttttggggggccggcggccccaaaagagaatggtttatgaaaaattttttgaggggccgagagcgggccggacaagnnnnnnnnnnnnnnnnnnnnnnnnnnnnnnnnnnnnnnnnnnnnnnnnnnnnnnnnnnnnnnnnnnnnnnnnnnnnnnnnnnnnnnnnnnncacagcatattaggatgaactttatttttacattgttgtacaattcattggtaaacttaaaaaaatacaaatacatgatttgattgttgtcccagaaaagacttttgtcacattgccagctgtttccctcagcgtctcctgctcctgtcagcaattctgtatgtaactgcaataatttgtgtgacttgagaaaggtgtgccaagggcgtcctcacagtgagaagggaccaggcagacatcctggggccctcggcctcctcctgcctcccctcccaggggatgtgatgacaggaccccgaagctgtggctctgacaggtgggatctctaaaggggacagtcccatgaaagacacacggggacaccagctcactgggagcttttgctttcccaaacaagatgtgggcagcatgactccagcctctggaacccaacaatgtatcttccacaaacttttgataagcttgcaaataaaacagaatgaaacctcactagcctgaaggaacacactgagtgcggcgggaaaccccgggaagggctcagtgggttccagcagttccttacgcgaggccctgctgcccagcacagctccaggacacaccgaggacagtgccacaggctggcagcccgaggctgtggagcttgcaggatggcgatggagagggagagtttcctgaaagcccctcctggggttttctgtctgttcctattcattactgctacccttcagaaagagcaattctgtgccaaacggcctgaatcttttctggaacaacctaaaggttacagttagactctcctcccagcacagaagagggtgagaaaagctgacatactcaatatgtaatcgctttacttcaacgatgtgtttacagtcacgccaatacattttgcaaacgcacaacacgcagagcgcagcctcacagctgacgccagatgacatgcagcagtttaacgcttccaggtcggaacaacctcctcaaaattgcgagacaaagagtgctttggggagcctggcttttaaaaaagacccgagaattgatgagtcggagacaccagggcgcttccctgacagcccagcctggacccaatcacacggtcccatgctgtttctttctgagcagacaccaaagaaatgccacgccaatgggaggacacaggtgggcgggttaaagtcacatttttaaaaaggctaaactctagattgctgtatttgctctctctggagattaacaaagtgcttggtttgcagatttgctggtacggtgatctcaatgatatgaccgagggtgggagggatgtgaggagggaaatcggcaaaaccctggccagccagccagccaaggtgacacacagccagagggggctcccctctcctcctgccgtccggccacggctcaccacgctgtccactgggacgcggccccgcggcccgcagagtcaggcgtgagcttcgccctttctgaaagggcctccgcctgggcaggcgccggggggcagtcctcgggtcccatggcttaggagcacagcactgacggctgcagtggctcgaaaggctgaaactacaaagtatggcccgtgggtgactcgggcacagacctgccgcgtgcaggtctggccctggggagcgcatggtgtcaccacaacacagaagcgacaagagcacagctgagagtcatgtgatgccctggcagctcactggaccatgggaaggcagcggggactccgccgggcactcgtcggctggggtcacacgggccacggtgaggacacaggggttctgctagcacatggctacatggaattacggtgatcactgctaccactcagaaaacaaaacgggaaacacacacaccgccctgggttgctaaacgctaaagtcaaccttcaggttcgagagtggttcctgatgaaaacactctctgagggcttcggcctggtgtgggttggaggcgggatgaggacgttatggtgttggggagacgaggatgagagctggtcactttcatgttggagatgaacacttctgccgtgtatgggtgcccctctcggaggactctgaatgagtgtgcgtcaaatcatatgcgcataaaagaaacatggatcatggagagtcacagttatcgcagccattaaagtgtctaagaatccgtgtaaccatgtcctaagacaccagcttgtaaccagctgtcctgagttgctactgtagagtgtcccgcagtttagctatttgcttacctgaaataacagcgacgcgtgggtcgacgatatcccgggaatccggaccgtaccgcctgcttttttaccgctgtcatagtccatgc

SEQ ID NO: 434597 - DNA, 849 bp, Homo Sapiens
tcgcataatagttgctttctctttttccttccttccggatgagaggctaagccataatagaaagaatggagaattattgattgaccgtctttattctgtgggctctgattctccaatgggaataccaagggatggttttccatactggaacccaaaggtaaagacactcaaggacagacattttggcagagcatagatgaaaatggcaagttccctggctttccttctgctcaactttcatgtctccctcctcttggtccagctgctcactccttgctcagctcagttttctgtgcttggaccctctgggcccatcctggccatggtgggtgaagacgctgatctgccctgtcacctgttcccgaccatgagtgcagagaccatggagctgaagtgggtaagttccagcctaaggcaggtggtgaacgtgtatgcagatggaaaggaagtggaagacaggcagagtgcaccgtatcgagggagaacttcgattctgcgggatggcatcactgcagggaaggctgctctccgaatacacaacgtcacagcctctgacagtggaaagtacttgtgttatttccaagatggtgacttctatgaaaaagccctggtggagctgaaggttgcagcactgggttctaatcttcacgtcgaagtgaagggttatgaggatggagggatccatctggagtgcaggtccaccggctggtacccccaacccaaatacagtggagcaacgccaagggagagaacatcccggctgatggaagcacctgtggttgcagatggagtgggactgtatgcagtagcagcaatctgagatcatgagaggcagctcatggtgggggt

SEQ ID NO: 434598 - DNA, 1642 bp, Homo Sapiens
  misc_feature (300)..(364): n is a, c, g, or t
  misc_feature (1514)..(1514): n is a, c, g, or t
  misc_feature (1532)..(1532): n is a, c, g, or t
  misc_feature (1541)..(1541): n is a, c, g, or t
  misc_feature (1553)..(1553): n is a, c, g, or t
  misc_feature (1562)..(1562): n is a, c, g, or t
  misc_feature (1572)..(1572): n is a, c, g, or t
  misc_feature (1599)..(1599): n is a, c, g, or t
  misc_feature (1612)..(1612): n is a, c, g, or t
tcgtggggtggtgtgtacctttacgtctccccacccgaaggtgataggagctccacgagaagtgtgagcgagcgatgactgttgtttcctcagctaagcctgtgattataggggagcgcgtcgtcggggttttaatgatgcgtggtccactaaagtgtgggggcgcatctgtttatccgaatatctttggcgtgtggggcgcatgatttacgaggccgcctatactaggggatatgaatgacgagtggcctgcccgctcttttctttgtatcttttattgttgactatattatgattggnnnnnnnnnnnnnnnnnnnnnnnnnnnnnnnnnnnnnnnnnnnnnnnnnnnnnnnnnnnnnnnnnaaagtttcaaaggatttatttgatttccccacatgatcacaaccatggttttacattgatagagtctgttgccactgacaaacagaatgcagatgaaaacaaacgcactcctttcctctcaaaggtacacagtgggggtgccaggcttcttgtgagggaggtgtcccttgaagtctctgaacagtctggggattcaggacctgattctaattgcttaaaacaactcggaggcaaaagatattttccaagaggagatgcatgctgtgtgcagtctcgatgtgactgcacacagaagggcgatgcagatgcatctgaatggagggcaggcctcctccctcttgtcctgtgctcagcacccccacctcaccctgctcagtgttgcaatgctgccttgactattgttgttacataaaatacaaatgtactcgtttctcaggcaggaagggtgatgatattttacaaggagaactgtaagactgtgcgtgcttacctgcgggcacagagcttcccgtggcgctgagtcaacacccagcatcagctgtgaacatctgctgtcttttcagctcattaagaaaaacaagaggctcctgctgcatgcagtgtgtgagggaaagatcactgcactgggtgctgaagacatttttaagcaagatgtgcacagcatattaggatgaactttatttttacattgttgtacaattcattggtaaacttaaaaaaatacaaatacatgatttgattgttgtcccagaaaagacttttgtcacattgccagctgtttccctcagcgtctcctgctcctgtcagcaattctgtatgtaactgcaataatttgtgtgacttgagaaaggtgtgccaagggcgtcctcacagtgagaagggaccagggcagacatcctgggggccctcggcttcctcctgcctcccctcccaggggatgtgatgacaggaccccgaagctgtggctctgacaggtggggatctctaaaggggacagtcccatgaaaggacacacgggggacaccagcttcactggggagcttttgcttttcccaaacaagatgtggggcagcattgattccagcctttgggaacccaacattgtatttttccacaaattttttgataaggtttgcaaattaaaaccggnttggaaccttattaggcntgaaggggncacattgagttncggccgggnaaccccgggnagggttcagttgggtttccagcatttnctttacgggaggnctttttgcccaggaaagtttccggggaaaa

SEQ ID NO: 434599 - DNA, 690 bp, Homo Sapiens
agcggagtctctgctttctttttcctttcttccagaaggagatttaaccatagtagaaagaatggagaactattaactgcctttcttctgtgggctgtgattttcagaggggaatgctaagaggtgattttcaatgttgggactcaaaggtgaagacactgaaggacagaatttttggcagaggaaagatcttcttcggtcaccatacttgagttagctctagggaagtggaggtttccatttggaattctatagcttcttccaggtcatagtgtctgccccccaccttccagtatctcctgatatgcagcatgaatgaaaatggcaagtttcctggccttccttctgctcaactttcatgtctgcctccttttgcttcagctgctcatgcctcactcagctcagttttctgtgcttggaccctctgggcccatcctggccatggtgggtgaagacgctgatctggcctgtcacctgttcccgaccatgagtgcagagaccatggagctggagtgggtaagtttcaagcctaaggcaggtggtgaacgtgtttgcagattgaaaggaagtggaagacaggcagagtgcaccgtatcgagggagaacttcgattctgcgggatggcatcactggagggaaggctgctctccgaatacacaacgtcacagcctctgaccgtggaaagtacct

SEQ ID NO: 434600 - DNA, 506 bp, Homo Sapiens
  misc_feature (374)..(374): n is a, c, g, or t
  misc_feature (452)..(452): n is a, c, g, or t
aatccttattttattaacagaatactatcataaatagtattataatgctgttatttcaggtaagcaaatagctaaactgcagtacactctacagtagcaactcaggacagctggttacaagctggttgtcttaggacattggttacacggattcttagacactttaatggctgcgataactgtgactctccatgatccatgtttcttttatgcgcatatgatttgacgcacactcattcagagtcctccgagagggggcacccatacacggcagaagtgttcatctccaacatggaaagtgaccagctcttcatcctcgtctccccaacaccataacgtcctcatcccgcctcccaacccacaccaggggccgnaaggccttcaggaggagttgttttttcatcaggggaccactctttggaacctggagggttggattttaggcgtttagnaaacccggggcggtgttgtgtgttttcccgtttttgtttttctggagtgggttt

SEQ ID NO: 434601 - DNA, 1756 bp, Homo Sapiens
  misc_feature (59)..(89): n is a, c, g, or t
  misc_feature (1736)..(1736): n is a, c, g, or t
aaacattttttaaaagaatgaacatctttgcacccagagaaaaaaaactggtattttannnnnnnnnnnnnnnnnnnnnnnnnnnnnnngaatgtaattttaaagtaacattaaccccttttgtcctctggtttagaaatgttttaactcttccataaagtgaggaaaatagggaaaaatgtcaaccatctgcaccagtaaataataactattaatattacatatgttcattaatttaaaaaaaataataaaacctattggaggtgcaaggcaggagcatattgtttggcttcacaggcctcagcctcctcccagtgcacacttgaaccacacacacaaaggggaagaaaggctggtggtaaccagccataacaaaaatatattctttgtattctatcatccctcaggttcatcttgcatgtttgctttaaaccacaaaccggctactgcacagttcttatgtgttccaaggaaaattgtcttttaggctacgaaagattcaaaaaaattgttttcagtacaaaaagtcttgttaagagaaaataatttttttgctcccaaaatactacaaggtgtctctagtgtatgtctagtgtactctgtgagaggtttgaattcaagtctgagttatcggtgctgagtcccaggtccgtggcgcttgcaccatggaggtttgccatgcctggattgctagcaagctgagaaagcattgaattctggtccgggctggcaaaatgcccttgttccatggggttggcctgggcagctaccagtccaggatgtggggaacttgtctgtggggaaacgtggtgtggagaaggctgaggctgcatccttggggaaggactggagtgggggggctgggactgtggccgtggagaagggacaggctggggagagcgcacttgattggagagagaattagggatctgctggccttgtaggtgtggggactgggcctgatttgggagcatatgctgctgggggctcatggggttgggctgaacaggggaccccatctgttgctgaaggagtcgctgctgataggcctgtagactggcacctgcctctgctcccaaggcctggggaagctggcctatctgtcccatatttccttgttgcatctgttgcatgtgatgctgcatccgctgctgctgctgtggtgggtagccaactccttggggttgctggaactggttatggttggccattccagggcctattcctggccctgctccctgttgctgctgctgttgcatcatttgctgtcgtctcaagatgtctcggaattgtgaaggcatggtgttgtggttcatgttcatctgctgagcctgggggctcatccctcccatgggtggctggagttgctgctgtggttgctgctggggcaggccagccctctgaacgcccgcctgcattggattcatgttctgcatggctggattggagtggaccccctgctgacctggcatggtaggtggctgtagccctggctgcccctggggcatgccaggctgcccagggatgggttgtggattagagttggcatacttggcagcccgctgcttgatgaatgcagccaacagctgggggttggcgtgaaggatactaagcacctgttgctgctgcaggggagagctgggagacctgagagtccgcaaaaggttttgtaaggcttgaaagacacagtgcctggtttgagatcgtatgaattccggaccggtgccgtcgtgaangtggcgggcgtatctcttag

SEQ ID NO: 434602 - DNA, 1174 bp, Homo Sapiens
ttaacctgaaccttttcgaatggaaagcgattcactctgtccaagacttatgccaggaatctggggagtgactaaatttttcaaaagagtacaagaaattccagcatccccatctgctttagtgctcaggaggggtttctcaagggctcctataaaggctccagcttgtggtagagttcacaccccacctttagaaggattcccctttctacttatgcagccttgtttcagaacacaaagctcgtattaaaacattaaaagaggattaaaagcagtgttggtttttcacattcagaattcacagaggatctcattttctgtaatgtaaatggatctattttgtgttttttgctgcagaatcacattcatatggcagtcatatttcaggcacttttaaaacatgttcatctggaataaaaatctgcatgaaccacttctgcataattcaaaatgagtgttgagtgattctagttctcaaatagatagcaaatcaccacctggtgattcgctttcttcaacacaacatgacggtgactgctgagcttgagacatctttgaggtgcctttctggcttcagtaaaaagatgtgagccataaaaatccaaactactcagtttctacttaaaaaaatacaaaatggtgaaatatactaaatgtattatacagatggtttcagctactatcaaaataaataacataatctgactcagaagtctgactgagcttttggacgaaatctgatggaatgtcaaacgtggagactccctcctagggactagctgctggtaggcaaaagtaactcaacatcattaccatttgctacaacagtattggaagagcagctgctggcaaggtcttctgcagtggtcaaagaggctgcctgggaatgagttttggtcaatggagtggtagcagatggagaaggggtgaggccaggtttcttgggtgggatgggtggagggtttcctctctcagctctggggatggttggggacttgattcctggagacagggggctcaggggactggacactttccctggagtaggtgaatggcttgtgtcacctcttggattggcagtgttggctagatttcgatagtctgtgccaaagggagagctgttgggagagactggcttgattggcccttgttggctagtgaatctggagagcac

SEQ ID NO: 434603 - DNA, 1689 bp, Homo Sapiens
  misc_feature (3)..(3): n is a, c, g, or t
  misc_feature (5)..(5): n is a, c, g, or t
  misc_feature (35)..(35): n is a, c, g, or t
  misc_feature (37)..(37): n is a, c, g, or t
  misc_feature (41)..(43): n is a, c, g, or t
  misc_feature (47)..(47): n is a, c, g, or t
  misc_feature (50)..(50): n is a, c, g, or t
  misc_feature (54)..(54): n is a, c, g, or t
  misc_feature (57)..(57): n is a, c, g, or t
  misc_feature (74)..(74): n is a, c, g, or t
  misc_feature (76)..(76): n is a, c, g, or t
  misc_feature (102)..(102): n is a, c, g, or t
  misc_feature (448)..(448): n is a, c, g, or t
  misc_feature (455)..(455): n is a, c, g, or t
  misc_feature (459)..(459): n is a, c, g, or t
  misc_feature (504)..(504): n is a, c, g, or t
  misc_feature (523)..(523): n is a, c, g, or t
  misc_feature (530)..(531): n is a, c, g, or t
  misc_feature (534)..(534): n is a, c, g, or t
  misc_feature (538)..(538): n is a, c, g, or t
  misc_feature (557)..(558): n is a, c, g, or t
  misc_feature (560)..(563): n is a, c, g, or t
  misc_feature (569)..(569): n is a, c, g, or t
  misc_feature (571)..(572): n is a, c, g, or t
  misc_feature (580)..(580): n is a, c, g, or t
  misc_feature (598)..(598): n is a, c, g, or t
  misc_feature (612)..(613): n is a, c, g, or t
  misc_feature (631)..(631): n is a, c, g, or t
  misc_feature (650)..(650): n is a, c, g, or t
  misc_feature (667)..(668): n is a, c, g, or t
  misc_feature (670)..(670): n is a, c, g, or t
  misc_feature (674)..(674): n is a, c, g, or t
  misc_feature (682)..(682): n is a, c, g, or t
  misc_feature (693)..(693): n is a, c, g, or t
  misc_feature (716)..(716): n is a, c, g, or t
  misc_feature (719)..(719): n is a, c, g, or t
  misc_feature (725)..(725): n is a, c, g, or t
  misc_feature (730)..(730): n is a, c, g, or t
  misc_feature (759)..(759): n is a, c, g, or t
  misc_feature (796)..(796): n is a, c, g, or t
  misc_feature (853)..(853): n is a, c, g, or t
  misc_feature (1315)..(1460): n is a, c, g, or t
aanantgttgtagaaaatggtaaggatgttgagtnantttnnnaaanaanaagntanaccctaggagggagtcncnacgtttgacattccatcagatttcgnccaaaagctcagtcagacttctgagtcagattatgttatttattttgatagtagctgaaaccatctgtataatacatttagtatatttcaccattttgtatttttttaagtagaaactgagtagtttggatttttatggctcacatctttttactgaagccagaaaggcacctcaaagatgtctcaagctcagcagtcaccgtcatgttgtgatgaagaaagcgaatcaccaggtggtgatttgctatctatttgagaactagaatcactcaacactcattttgaattatgcagaagtggttcatgcagattttcatcccagatgaacatgtctcaaaagtgcccnaaatatnactnccatatgaatgtgattctgcagcaaaaaacacaaaacagaacacncaatcacagaaaatgaganccactgnnaancccnaatgtcaaaaaccaacacnncnnnnaacccncnnctaatgcnctaaaacaagccccgcgnaccgaaacaaggcnncacaagtagaatgggaanccccccaaaggtgggtgcnaacccaccacaagccanncncaanagagcccntgagaaacccncctgagcactaagcagttggggngcngattcncttgnacttttgaaaaattaagtcactcccagtntcccgcataagttcttgaacagaatgaaatcacatcnccattcaaaaaatgtctcaagcatctactgttgtgtaaggaacctctgattctgatngctgtaacttgaataggaaatggttactcattctgtataaaagttttgcaagagaatgaattttttattctgtaatcaaaaagcaataacttgaaattcactctgtaatattataggtcagaattatacaagttttaccaaattgttacacttattctccaagctgccagaacctggtatctgtatctgtaaaaccaaattaacttttgcttaaatgggaagtatacatatatctgtatagatacattacccctttacatgtttaacatacacacacttaaacacataaatactagtgtgattatatctttggagtttgcaatatagcataaaggacaagtagaactgcacattaagattacctaccgaagcaactagatgtggctgggacacaatcaaaggaggaatttgtccacaggaaggtgaggaaattccaaatgaagcctagatcttcagtatcannnnnnnnnnnnnnnnnnnnnnnnnnnnnnnnnnnnnnnnnnnnnnnnnnnnnnnnnnnnnnnnnnnnnnnnnnnnnnnnnnnnnnnnnnnnnnnnnnnnnnnnnnnnnnnnnnnnnnnnnnnnnnnnnnnnnnnnnnnnnnnnnntaggcagagctaaactaaccccagtgtcacaaaactcaactggtcatataaatgagtgaaacaggcctctcacacaagcgatgtaaaacagctgggagcagtgggagctgtggcaaactaaagtgcccaagccgcatttaaaaagggcatctgttcagctccatctgcttgctgcggtgcaagaatgctaaaccaggattacagttcttcacattttttgaaatccaaa

SEQ ID NO: 434604 - DNA, 850 bp, Homo Sapiens
ccataggtaattttgccccttttattcaaaaactttttaaagcctgtggggaggtggccacaattatatttcccattggtgatttattacacctgattttccatcccccggccttttttactttcaacctcttattagattaaaaagggaaatagactttaaattattgcaggaggtcagggctgctggatagatgttggctcagagaatgtatgtgaagacaccaaggcctctcctgtatggacacaaaatcatataaccactgtgtttgagctgggttgtggatagtcttatttggcagagggggatagccattatattctatgaaccttgccagctgtactggcctacacagttggaaagtttggaggcttttgtccgcatagacttgctatgatgaaaatgacagaagtttctagattgaaagaggttgcaacttggcagcttgcaagctaaatccagctgcagacgtgtttgtttaaccagcaccatttaaacattttaaaatcacttcttgatatttaaaaatgagaatgtttctcatgaaaatttggatttcaaaaaatgtgaagaactggtaatcctggtttagcattcttgcacctcagcaagcagatggagctgaacagatgccctttttaaatgcggcttgggcactttagtttgccacagctcccactgctcccagctgttttacatcgcttgtgtgagaggcctgtttcactcatttatatgaccagttgagttttgtgctcactggggttagtttagctctgcctatttatttttttaatagagatggggtctcactatgttgatgatccggaagaattccggaccccggtaccag

SEQ ID NO: 434605 - DNA, 763 bp, Homo Sapiens
  misc_feature (42)..(59): n is a, c, g, or t
  misc_feature (67)..(92): n is a, c, g, or t
  misc_feature (97)..(212): n is a, c, g, or t
  misc_feature (517)..(541): n is a, c, g, or t
gggggcccggccccccaaaaaaagtttttaaaaaattttttnnnnnnnnnnnnnnnnnncgaaaaannnnnnnnnnnnnnnnnnnnnnnnnnttttnnnnnnnnnnnnnnnnnnnnnnnnnnnnnnnnnnnnnnnnnnnnnnnnnnnnnnnnnnnnnnnnnnnnnnnnnnnnnnnnnnnnnnnnnnnnnnnnnnnnnnnnnnnnnnnnnnnntcagaaaatttacccattttattgatgcattgcaattgctctacattttaccatattatgtagaaaatactgaaaatacaagctactttgtaaaaccaaagacaaacattgaatccaaagataaactatgttttacacaatggacccttttcccatagttagtattaaattttaaatatctatttcttttgttaaaatgattattttacatactccctaagtacatctgcattacaaacatagctcagtaattctcagaaactatctgtttctagaggcttgttgtaaaagaaagcgcacaaccnnnnnnnnnnnnnnnnnnnnnnnnntttaaatcgcacacaataactagcatatcaaatacatttaataaagtaggaattccattgcaatatcaaggattcaaagcagaaatactaacattacatataatgtacatataatgtactgctacatgtagtgagattatttttcaagctgaattgaaaccacacattatataaagtttagcaacaaacaaccatgtagacatgctgcaccatctatcagtt

SEQ ID NO: 434606 - DNA, 979 bp, Homo Sapiens
  misc_feature (118)..(118): n is a, c, g, or t
aaaggcgcattttcccccccagaacggccgataatttcttcaacttttctaaggtcccacatccagccaatgaagcccccaggcccaggctgagcacagagaaggaggcgcagccccngagcccgtgtgcagagacagcaggtttcatgggtgacagcagccggcggcacagccatagcgtggcaagttggtcagggaggtcttcaattgggtgaccctgctcaatagccagcataatggttcaaggaagctgccagcgcgtttccagagccctgcttgggaggctacacagggggcttctggatggcggtctccccagtcaggcccgctccatgagcccgttcaccacctccgtgcatcagcccgtctccagacatgaccaccagagcgtcccagcggcccagctcctccgaccgcaccagctcccgcgcgtggttccgccgctcagtgagcatcagcgtgaaggagatttcagcctcagccaaaaggggctgcacgtgactccggaagagcctgcaaggccttgcccttgccagccgcgcgggttcagcagcaccagcacgcggcagggcacgcggggagcacgccccgggggccgcccgctggatccataacctcgacccgcggctcccagctgccagggggtccctggcgctgtgggggcgctgcccgtggcggcggctcctgccttcagctccttatcggtgctgcccaggcgggcgtcgcagggccggctgtggggctcgccttccccgcccggagccgtggctgtaggagcaccggcgtcattccctgcggcggctggacccagtcggtccggtttgctggggaggcgccaccgccgttccctacagtggcctggggcggaacgcagctcgtcccaagctcagcccacgtctgagggactggagcgccccgctggagcggactccccggcctcgctccctccggcctcaaacttttcgctcaactcgcatcc

SEQ ID NO: 434607 - DNA, 856 bp, Homo Sapiens
caggtcatggggacagcaaccgcggcacagccatagcgtgcagttggtcagggaggtcttcatggggacctgcttcatagccagcaataaggttccaggaagctgccagcgcgttgccagagcctgctggggaggcaacacagggcttctggatggcggtctcccagtcagccgctccatgagcccgttcaccacctcgtgcatcagccccgtctccagacatgaccaccagagcgtcccagcggcccagctcctccgaccgcaccagctcccgcgcgtggttccgccgctcagtgagcatcagcgtgaaggagatttcagcctcagccaaaaggggctgcacgtgactccggaagagctgcaaggccttgcccttgccgccgcgcgggttcagcagcaccagcacgcggcagggccgcgggagcacgccccggggccgcccgctggatccataacctcgacccgcggctcccgctgccagggggtccctggcgctgtgggggcgctgcccgtggcggcggctcctgccttcagctccttatcggtgctgcccaggcgggcgtcgcagggccggctgtggggctcgccttccccgcccggagccgtggctgtaggagcaccggcgtcattccctgcggcggctggacctgtgaacccagaccccacgctgagaagccaagtccagccagagctcccctctgggcctctctgtatcccaggctatttctccctgaagggcaggtatctggggatctggtgcctggtggattgcttgccgcagagctgtggcgtctccctgaggaggaggaagcagcaggccgggcgcagtggctcactcctgtaatcctagcacttg

SEQ ID NO: 434608 - DNA, 586 bp, Homo Sapiens
  misc_feature (307)..(307): n is a, c, g, or t
accaagtttgtaggacctgcccaagttctagtagtattcaaaacttcaaacggcagtcatttgttctcctcggctctgtggcaaggatagccctttggagggggactcttgacctcggctgttagggatctgaacttggttttcccgtcagaagaatcagcaggacagatcgtagtgccttattccattgtcctcccctggccaggcctcctggctcagctggaagtgcatggcttctttctccctatctgtgtcctctgtcacttgctctttcactctctctctcattcccagagagccacggggngagggatcaccctcacccccaacaccctcttcctgagggctgtagccaggtccgcatctccccaccaccaccagggcactcactcgcagctatagcccaggacagaaaaactgtgctttggacaggtgcacactctctgcctcttacctctagccaggaggatgcctcagtctgttcattcgagactggccccgtctgaaccttctctgggcactggggactaaggttgcaggccttagcctcgtctcgtcccagaggcattgggtcaggagaatggga

SEQ ID NO: 434609 - DNA, 2586 bp, Homo Sapiens
  misc_feature (157)..(191): n is a, c, g, or t
  misc_feature (368)..(477): n is a, c, g, or t
atttgggggggaattcccaagccctttgtttattggcccagggttttttctttgggaaaccaactttggcccatgttccatttccctaatgggcccccggcccccaaaacgaattgtttagaaaactttttgaaggccgaaggcggccgaccagggnnnnnnnnnnnnnnnnnnnnnnnnnnnnnnnnnnnccagaaatctcttttatttctttagatatataaaacactgttactttatattctctctgataattctagtatctgggtctagagtcaatctgttgcttctgctgggtctcatagtgtattgtttccttgtggtgtttatgaatttttaaacctggatctctcattttctttctttcnnnnnnnnnnnnnnnnnnnnnnnnnnnnnnnnnnnnnnnnnnnnnnnnnnnnnnnnnnnnnnnnnnnnnnnnnnnnnnnnnnnnnnnnnnnnnnnnnnnnnnnnnnnnnngatgttccttttccttggaacttgatcaacacaaaatcctgaggcctggtgtgggtgtgttcctctggggcagattctcaaccggggacacttctgcccccaaggacacatttcaacatcctgagacatttccgggtgtcatcacagtgtgcacgcacgtgtatgtacctgcacacgctactggcacctcgcggatagagcccagggacgctgctcacatcctgcacggagactgacccgcccagcgtcctagggcaggctccaggcagggtctgcatgtgcctctgccagccacctagaccctgccagccggggcctttaaattctcccctcgtggtctccagggccactcactagcctgatttcaagctgtaaactgggaggacctatttcttttcaccttgcacggaacaccaaggctgaaaggcagtttttccggaggtgccagcctgtctcacatttccgcttcagctgcggggtccagctctatgtgggcggtctcctgatgaagtcaccccgggacagacactgttctgtctcctgcttccagtccagtaaagatgccaggatcccccagggcatggcaggcaccctcaaaggcagacgtggggaggccctggtgggcagaccccagcctgctgacggggggcttctccctggctgccactggcccacccactgcgctgcagtccacctggtgctggggctgtggggcacaggccctcaggacctgcaccctttcctgcccaggaggtccaggcctgacatccttatgtcccctggaaagcccactcccatcttcagggtaggagggcagctgcatgctgggctgacttgggcctgtcctgggacacccctgcagaccaggtgcagcagggaatgtggctctgtggggttgctgtgggcaggttagcatggagctgggctccggaagggagttgccacgctgcctgccagggcccctcctctgagacaggtgccttgtgggacagtgtaccaaagtgccctggacacgagggggccctgcgccccccacgcactgaccccgcatcggaggccctgcgccccatacacactgaccccacatcggcatcgggggccctgcgccccccacgcactgaccccgcatcgggggccctgggctgcagaacccatcgatgctgttgccgtgcccctggttctggtgacactgggaccctccaggttgggctgagcagggcccccccaccagtgcgtactccagcaccagcgggagtgggcctgggcaggggctgagggagtgacacccaaggggacctgccccagcctcctcctgtaccctgggggttctcgttttccttggctgagggaggtggcctctcccagctgaaacctggggacaggctgggcgtgagagcaaaggggggtgagcaggaccccaggccttggaaatcctgagtcgggggaacaggctttgcctatgacgtgcctgggagctgtctgggggccctcctggggagccaggctcacaggatgttgtgtgggactcaacgtggggcaacgtcccggccaagagggggaaggccatcaccccagggtctgtgggaggcacatgcaggccaagctctcgcccacccggcgtgccgatccgctgcagccagggtccctcagccttggccagaacctgaagtccgaccgctatccctggggctccccagccaggcaggcaccccccgcttacaggccgtccccaccccctccatctacttccgtccgtccgagctacagccacctcgtcctggtgccctggttgagcgggaagctgcccttggacccgcgtcggagccgccccgcgccctctgctgcccgttgttggaagtgcagcctggcgtgggcagtgcctttccctgaagatgggacccagggcggcaccgctggaaacggggggacgctaactcatggaggggtaccccactgtccactgacagcggcagtagtagctgcggactatgcggactcaagagagccccagcccatgtcagcaccaggagccaaaacggagtcaagcgctcggtgcggggaccagccgggggcaggcctgggcctcgtgccgaattcgccacccaggcc

SEQ ID NO: 434610 - DNA, 768 bp, Homo Sapiens
  misc_feature (167)..(167): n is a, c, g, or t
  misc_feature (279)..(279): n is a, c, g, or t
caaaatattagaattttatagttctttcacagggggcttccatctaaggctggtccggtctttcttcataacaaactcttgcttttccctcaaatatttgcccctgatatagctggggtttaaattgaatttgctttgctgcagtcattgatggccatttctttctntgtcctgtttcatccttgctgcagctctatttgaaaatagaatcgaccctctcctttttgggaagcaggatgggcacatttcgagggctcgactataagaactttcagcttnctatataatctcctttcttaaactgttcatttccctcctcctttagtctagtgctctcttctcttcttttctgtttctcttcatccgacatgtttttttccagttctattaggtattcttcatctagttcagaggaattcacatcttcattagatttgttctcaaccttgtccgctcctggctcctcctcaaatgaggcactgcagtcatgaaaacactcctcttctccctggtcctcctggagatgggcctcatcatccctgagcagcttactctgggaatgctgatttttgggatcaggaactggagggccagcacactcggcttcctgagtatctgtaaccttcaaaccatttaacagatcctctggaaccccacagttctctgacttctcccccatgctgcccagtgagggaggtgacgctaaagaacctcacagcttctccggtctccaccttcttagcctctaagagctcctacttccgcccc

SEQ ID NO: 434611 - DNA, 1468 bp, Homo Sapiens
tttttaagcacagaaagcttttattaccacagaggaaatcaggaaatgctggaggcagcctcgttagctgtgtgatcagggaggggacagcaggcgggaacccgtcatcaatcatgtctgggcagtctcccaaccaacaggtttgtttggttcaggagaggcttttgctgggctgtgtgtgtgtatgatcaggaaggtcagcctcaacaaatgggcttcttcctggacataggacagccagaatcggggacaccagctgcacagacaccaccttaaaatggaaatcaaattaggttcattacatcaggaagtacatttcaccctgatcataaaagagggacaagggagcactgggctctactggatagcctttcttttagataagatgcttttaaaagttaaacattggcagggcctttcccctagctaacagcaagcagcacacaattccaagtcagcttgtaaagcttttgttatctttgttatctgttattatttggattttgaacgaaattgatggagtacgagccggtagaggaatcctgtttgatctggaaattttccgtggagagcccaaaaggtcggagaaccaagttcccaagatcttttaatttacctaacatctcttcttttagtctttcattacgttcttcaatttgcttaggtaatctcatacaagcttctcttgcttgatgtattgatggatcttttttctaatatagatttatagtcttccagggcttcatctagcttgtccgtcttctcatacaactctgctctcctcaatattgccctgatatagctggggtttaattgaattgctttgctgcagtcattgatggccatttctttcttgtcctgtttcatccttgctgcagctctatttgaaaatagaatcgacctctccttttggaagcaggatgggcacatttcgagggctcgactataagaactttcagcttctatataatctcctttcttaaactgttcatttccctcctcctttagtctagtgctctcttctcttcttttctgtttctcttcatccgacatgtttttttccagttctattaggtattcttcatctagttcagaggaattcacatcttcattagatttgttctcaaccttgtccgctcctggctcctcctcaaatgaggcactgcagtcatgaaaacactcctcttctccctggtcctcctggagatgggcctcatcatccctgagcagcttactctgggaatgctgatttttgggatcaggaactggagggccagcacactcggcttcctgagtatctgtaaccttcaaaccatttaacagatcctctggaaccccacagttctctgacttctcccccatgctgcccagtgagggaggtgacgctaaagaacctcacagcttctccggtctccaccttcttagcctctgagagctcctacttccgctcagtcaggtgcacttcccc

SEQ ID NO: 434612 - DNA, 1162 bp, Homo Sapiens
  misc_feature (744)..(801): n is a, c, g, or t
acagcgaccggctccgaaggatccaaaaagcccccaggcacatcccccgaaaccggtgcctgcgggacagtgtcccaaaggcccggacacgacgggggccggcgccccccaacgccctgcccccgcacgcggagccccgtgcgccccacacacactgaccccgcatcgggggctcttcgggcaagcagaaaccatctcgatgcctggtgtccgcccccctggttctggtgacacctgcggacccctcccaggttgggctgacccagggccacccccaccaggacgtactccagcaccacccgggagtgcagacctggccacgggcctgagagagtgacaccccaaggggacctgccccagcctccacctgtaacacacgggggtttatcgtccttccattggctgagggaggaggcctctcccagctgaaacctggggacaggctgggcgtgagagcaaacggcccgggtgagcaggacctggaagtaaccgaccgctataccaatggggctccccagacaggctggcctgggggcccacgcggccccacaaggactagatgaaggtggaatccagaggtcccccgtcctgctggatcagggcgcgggcctcaaacagactgcttaactgagcccgacttatcctgctccagctgcgtgatgcgctcactcttctcggtcacctcctgggtgaggagtcggttctgctccttcagcatgaggatggtctgctgctgccagaccnnnnnnnnnnnnnnnnnnnnnnnnnnnnnnnnnnnnnnnnnnnnnnnnnnnnnnnnnncccggctggcacaggtctgcagccagcagctcccccaggcaccgggccacctcttgtaccttgggcagtagccgccccagtgggcgggggctccctgcagccccaaagtcggcgctggctctgctctggcccaggcggcgctggcgctcctgcactcgttgcagctgctgctggtaccagtcgcggccccgcgccatcatctccaaaccctgcagcagcacctccttctcctgctccagctccttcatctgcttcagcaggccgcagtccacgccgctggcgatggtgtgcctccgacgttcccctcgggcacggggagcccgccgggcatcccctgagtccgcccctcgtccgaattgcc

SEQ ID NO: 434613 - DNA, 519 bp, Homo Sapiens
  misc_feature (169)..(322): n is a, c, g, or t
gtagagatggggtctctcactgcgttgcccaggctgctctggaactcctggcctcaagtgctgggattccaggcgtgaaccaccacgcccggctgagatgttccttttccttggaacttgatcaacacaaaatcctgaggcctggtgtgggtgtgttcctctggggcannnnnnnnnnnnnnnnnnnnnnnnnnnnnnnnnnnnnnnnnnnnnnnnnnnnnnnnnnnnnnnnnnnnnnnnnnnnnnnnnnnnnnnnnnnnnnnnnnnnnnnnnnnnnnnnnnnnnnnnnnnnnnnnnnnnnnnnnnnnnnnnnnnnnnnnnncggagactgacccgcccagcgtcctagggcaggctccaggcagggtctgcatgtgcctctgccagccacctagaccctgccagccggggcctttaaattctcccctcgtggtctccagggccactcactagcctgatttcaagctgtaaactgggaggacctatttcttttcaccttgcacggaacaccaaggctga

SEQ ID NO: 434614 - DNA, 366 bp, Homo Sapiens
  misc_feature (177)..(245): n is a, c, g, or t
  misc_feature (317)..(317): n is a, c, g, or t
ttttttttgtagagatggggtctctcactgcgttgcccaggctgctctggaactcctggcctcaagtgctgggattccaggcgtgaaccaccacgcccggctgagatgttccttttccttggaacttgatcaacacaaaatcctgaggcctggtgtgggtgtgttcctctggggcannnnnnnnnnnnnnnnnnnnnnnnnnnnnnnnnnnnnnnnnnnnnnnnnnnnnnnnnnnnnnnnnnnnntcacagtgtgcacgcacgtgtatgtacctgcacacgctactgggcacctcgcggatagagcccaggggacgntgctcacatcctgcacggagactgacccgcccagcgtcctaggggcagg

SEQ ID NO: 434615 - DNA, 1021 bp, Homo Sapiens
  misc_feature (9)..(9): n is a, c, g, or t
  misc_feature (11)..(11): n is a, c, g, or t
  misc_feature (16)..(16): n is a, c, g, or t
  misc_feature (19)..(19): n is a, c, g, or t
  misc_feature (33)..(33): n is a, c, g, or t
  misc_feature (35)..(35): n is a, c, g, or t
  misc_feature (37)..(37): n is a, c, g, or t
  misc_feature (40)..(40): n is a, c, g, or t
  misc_feature (43)..(43): n is a, c, g, or t
  misc_feature (51)..(51): n is a, c, g, or t
  misc_feature (54)..(54): n is a, c, g, or t
  misc_feature (83)..(87): n is a, c, g, or t
ggccatttncncctcnggntgtggggagggtgncngnggntgnctgcggtncancactgggtggggcccggaggagagggtgnnnnnagacccgaggagtgcgaatggtcagcacataagagcaggacaagggctcgtccacgcgatcgatgtagtccccagagatacctgcaccctcgtcacagaggaaccgaacctcggcctcccggggcctcccattaaggtcgcacttggacccattgccataggtctggctgtggtagcgtttaagacgatgctgcttggaggcctggagaagacatgaggcaggaatgggggacatgagaaagatagcaaagaggaaggatggcactgcgtccccaaagagacaaaagaatggcctgtgcccccaggccccaggaaactttgtcctaatggccaccaagccccaagaaacagatcagctaatcttgaccctccccttcttgtcagggctctcagccggtggccagaaccctttcttcctgaatcccacactcttgccaccttggctgtttcatcatcccagtcgaaggctgattggtagtagccgagatagaggacttcacctttgatctctgaatcttccatgtggtattgctggatgtggcgtccataacagaattcatatgtccaccagtcctttgtcttacagcaagcagggagcatctctcattgggctcaacaactcagggatcccaggcccttggtaagcaggtgtttcctcctccctttcacgctggaagtgaatagctccagctggcaggcgacactcatagcgctgtttgtacttagaggagacaatcaccacgtccgaagattggctctgccctcccatgacaggcaacggcaggatctcgatcccataacgcatctcactcagctcctccaggttcaggctcccgacaccgccggtcagacttgcgggtaacaggagtcccagaagcagcagtcctaacaaactggacagcagcgtttccgccgccatctttcgttccccatc

SEQ ID NO: 434616 - DNA, 1028 bp, Homo Sapiens
gcattcttagcgtgttacactctgcgtttttgggggctcctccctctgtctcctctcacttggggccttggtcttctgctcgctcatggttctattctcccagtcgcctttgtgtcgccttcccctctacctagtggccattgtttccttcggtctttaggatatggtttccatattgattgccttctgtgccgcccctgtgttgtgtcctgttacatgtttcgccaaaaacccaggagtcgaattgtccagcaccataagagcaggacaaggggctcgtccacgcgatcgatgtagtccccagagatacctgcaccctcgtcacagaggacccgaccctccggcctcccggggcctcccattaaggtcgcacttggacccattgccataggtctggctgtggtagcgtttaagacgatgctgcttggaggccttggctgtttcatcatcccagtcgaaggctgattggtagtagccgagatagaggacttcacctttgatctctgaatcttccatgtggtattgctggatgtggcgtccataacagaattcatatgtccaccagtcctttgtcttcagcaagcagggagcatctctcattgggctcaacaactcagggatcccaggcccttggtaagcaggtgtttcctcctccctttcacgctggaagtgaatagctccagctggcaggcgacactcatagcgctgtttgtacttagaggagacaatcaccacgtccgaagattggctctgccctcccatgacaggcaacggcaggatctcgatcccataacgcatctcactcagctcctccaggttcaggctcccgacaccgccggtcagacttgcgggtaacaggagtcccagaagcagcagtcctaacaaactggacagcagcgtttccgccgccatctttcgttccccttcttatgcagagaatctgtttccgccctaagccaggcagcggcctcaacacgcccacctcgtgccgaattcaaccacccagcctcgtacctagccgtatattt

SEQ ID NO: 434617 - DNA, 950 bp, Homo Sapiens
ccacccccagacctgggtctcactccacacttgggggggcctagatcttgcagctcttctatgattttatctccatactgctttgagtctacggcttgcttctgaacgtaggcccatgtactctccagcctgtagggaagggtgacagaggatggcctgcggtgcaggcactgggtgggggcccggaggagaggttgggggccagaaccgaggagtgcgaatggtcagcacataagagcaggacaagggctcgtccacgcgatcgatgtagtccccagagatacctgcaccctcgtcacagaggaaccgaacctcggcctcccggggcctcccattaaggtcgcacttggacccattgccataggtctggctgtggtagcgtttaagacgatgctgcttggaggccttggctgtttcatcatcccagtcgaaggctgattggtagtagccgagatagaggacttcacctttgatctctgaatcttccatgtggtattgctggatgtggcgtccataacagaattcatatgtccaccagtcctttgtcttcagcaagcagggagcatctctcattgggctcaacaactcagggatcccaggcccttggtaagcaggtgtttcctcctccctttcacgctggaagtgaatagctccagctggcaggcgacactcatagcgctgtttgtacttagaggagacaatcaccacgtccgaagattggctctgccctcccatgacaggcaacggcaggatctcgatcccataacgcatctcactcagctcctccaggttcaggctcccgacaccgccggtcagacttgcgggtaacaggagtcccagaagcagcagtcctaacaaactggacagcagcgtttccgccgccatctttcgcctcgtgccgaattcgccacccaggcctcgctacctaaaccccgggagtactgccgtca

SEQ ID NO: 434618 - DNA, 1150 bp, Homo Sapiens
  misc_feature (87)..(96): n is a, c, g, or t
  misc_feature (1062)..(1062): n is a, c, g, or t
  misc_feature (1071)..(1071): n is a, c, g, or t
  misc_feature (1080)..(1080): n is a, c, g, or t
  misc_feature (1086)..(1086): n is a, c, g, or t
  misc_feature (1092)..(1092): n is a, c, g, or t
  misc_feature (1098)..(1098): n is a, c, g, or t
  misc_feature (1130)..(1130): n is a, c, g, or t
gataagttgaaaacattttatttcaattctatccttgggaggcagcataaataatcacagaagaccacaaaggtcaatggggaaggnnnnnnnnnngctccagaaatgtgggaggaggagatgagtgctgacactgtctagctgtggggtacggggtgaggaggccctactgtagctggctgggaggatggaggttcataaaggaaaggcccagctcacctggaggggcttgggtagccctggcctctgtggatgggattttccgtagggcggccatgggaaaagcaggtatggagtataatgcatctagtagatcctagctaatgaaagaaaagagtggacacccatttcttgatttccagatctcaccccaaactgtgactcttctgagaacagtgtttataaactctttgtgcgtagtgggaaatgaaaggaggaaaaaagaaggaataaaagaaaatgtgtacaagatcaaatgaaatgtggcatctcagagttgcgtgaccttgggccacttctctcggtttcctcatctgcagaagggagtagacgtgaggctcgatgagatcctatgtgtcaaaggactgcagaaactttaaagtgctatacggatgcgagtggctgtggtcattctacgtgcataaggctgaaagtggctgagatagcggtgctgagacacacgcagagcatccctagaagccatcagaccctggtctgccttccccagggccaagctccacccttctcagcctcagcttccaggaggacgaggcctcatctcagatggagtcccctggggagggtggtggtgacagctgagggtggggacctgaaggatctaggggcacagagcgtgaggggcctcaactgggcagtgtggcacatcggcactactggtgctgggtagacggtagcagtggcttccagttctcattctccatagagacttgggcactggtgaagcccacaaagggattggcatcttgatgcagcgggaaagccctggccttggggtctgaacacccagggtcttggtcgtgggccattgttgacctgctgggngatttatantcattcccnttgcancctcantctgtnattgtcaaagggggactatcctacctgctggncaaattgatgggaaggggtg

SEQ ID NO: 434619 - DNA, 1050 bp, Homo Sapiens
  misc_feature (154)..(154): n is a, c, g, or t
  misc_feature (158)..(158): n is a, c, g, or t
  misc_feature (346)..(346): n is a, c, g, or t
  misc_feature (576)..(584): n is a, c, g, or t
tttttttccctctgtaaaggaggaaaattctcccttttccccccctccatttggttgtggtttttaggctcatcctttccccctcccttttttgggatgcccaaccaaccagccagaagcttttagtccagtatgagtagagtaggggagagcnccancccagcttttttccctgcccagggagaagggcaggtcctattagtcgggaggaaggcgaaacccagaaaatacctcctccccaatctgcttagaagggcaaatagtaaaaagtgccctgcatatccttgccatgatcagattttaagaaggaaggtattccagctaccatcctggattggcctaggcnccatatataaataaaaataacgtcccccaatgtagtttccaaaactgccttttggctagtttgagatgatttttctaccctgatggggaagaaacgtccaaccttgttagttacacatgattccaggtccaaaactgtcccaccaagccttacagatatcctatgggccagctaatagtcagtgcacccttggctgcccatcttgagtgctggccttattcacaaacagnnnnnnnnngtatccaaaaacactgctgcttagctaaataggaggccacagagaagctatctagcaggtgggcattaggagctttttagggaagtttcaaatttctaggtaccttcttcggctttatgttaagcctaagttcccagcaacagtagccccaggcttatccctggaggccagtgtagcacctcgatccctaatggatcaggttggactggataaacaatcaaagaacagtgctctcctttcccaccttttattcaaattctctccattctcttctcatcactctttttcctttatgtccatcccctaacactcaaacccaggatacccaaatagctcaaccctaagacaatctcagaaaagccaggccccaggtaaagagaaaaagaaccagatttagaaaaagcaatgagagaaaccagctccaaggagtggacaggtgtggaaaatgccagaaaccctcctgact

SEQ ID NO: 434620 - DNA, 866 bp, Homo Sapiens
  misc_feature (44)..(66): n is a, c, g, or t
ttagaaatagaagccactgttgtctttataaaacacagaattgnnnnnnnnnnnnnnnnnnnnnnnatgttgcttgcttcagaaggaactgtacattacagctgctgggataatttcacaatggactggacaaggtacagctcaaagcaggacacaaacacaaatctcaaagggaaacaaatgcaaacaagtacacagctgtggggatccagagacatttccccatccatgctggacttgagagggataaaaagtttagaaactaaagtgaaaaccagagtagtcacacatgcccaccacatggctgctaagtgcaacatcacataccaattaggctggactgtgtgcacaggaaagtaatttcatttttccttattgctactacaccaagggactcagtgcattcaacaaatgtctttacttgcacaattcttggagggtttcctattttcctctgtaaagaagaaaatctccctttcccacctcattctgttttgtttttagctcattccttcccctccctttcttggatgcccaaacagcagccagaggctctaagtcagtatgagtagagtaagggagagcaccaacccagcctctctccctgcccagggagaaggcaagtcctattaagtcggaggaaagcgaaaaccagaaaatacctccttcccaatctgcttagaaggccaaatagtaaaaagtgccctgcatatccctgccatgatcagattttaagaaggaaggtattccagctaccatcctggattggcctaggccccatatataaataaaaataacgtcccccaatgtagtttccaaaactgccttttggctagtttgagattgggcgtacggggagggtaccg

SEQ ID NO: 434621 - DNA, 1907 bp, Homo Sapiens
ggagcgaggcctgggtggcgattcggcacgaggccacgtggagaaggtggaatctttgtccagtgatggggaaggggtaggaggtggggcgtcagccctgaccagtggcattgcctcttcccctgactatgaattcaacgtgtggacccgaccagactgtgctgaaacggaatttgagaatgggaacaggtcatggttctacttcagcgtccggggaggaatgccaggaaaactcatcaagatcaacattatgaacatgaacaagcagagcaagctgtattcccagggcatggccccctttgtgcgcacactgcccacccggccacgctgggaacgcattcgagaccggcccacctttgagatgacagagacgcagtttgtgttatcctttgttcatcgtttcgtggagggccgtggggccaccaccttcttcgccttctgctaccccttctcctacagtgactgccaggaactgctaaaccagctagaccagcgctttccggagaaccaccctacccatagcagccccctggataccatctattaccatcgggagctcctttgctattctctggatggacttcgtgtagatctgctgacgatcacttcctgccatgggcttcgagaagatcgagagccccgtctagagcagctatttcctgataccagcacccctcgaccattccgtttcgcaggcaagaggatattcttcttaagcagtagagtacacccaggggagactccatctagctttgtcttcaatggctttctggacttcatcctccgacctgatgatccccgggcccaaaccctccgtcgcctcttcgtctttaagctgattcccatgttgaaccccgatggtgtggtccggggacactaccgcacagactcacgtggagtgaatctgaaccgtcagtacctgaagcctgatgccgtcctgcacccggccatctatggggccaaagctgtgcttctctaccaccatgtgcactctcgtctgaactcccagagttcctctgagcaccagcccagttcctgtctccctcctgatgctcctgtttctgacctggagaaagccaacaatctccaaaatgaagctcagtgtgggcactcagctgacaggcataacgctgaagcctggaaacaaacagagccagcagaacagaagctcaacagtgtgtggattatgccacaacagtctgcggggcttgaagagtcagcccctgataccatcccccccaaagagagtggcgttgcttactatgtggacctgcatggacatgcttccaaaaggggctgcttcatgtacggaaacagctttagtgatgagagcacccaggtggaaaacatgctatatccaaagctcatctccttgaattcagcccacttcgacttccagggctgcaatttctcagagaagaatatgtatgcccgagaccgtagagatggccagtctaaagagggaagcggccgtgttgcaatctacaaagcctcagggataatccacagctacacacttgaatgcaactacaacactggacgctcagtaaacagcatccctgctgcctgccatgaccaatggggcgtgccaggccccccatcaccaccgacacggcttttcccctccagatacactgtggaactattatgagcaggtgggacgaagctatgagcattgcaagacctggacaatggcggaattgtaatccgatggaccacgaatagtacacatgtcagagacacagaagaacataactaattctaagggcctggaatgatggaaacatgttaccgaaaaaagacagaaggactaaaagcagaactcatgaaaggtgaagtgtcacccaagaacgaggaggacattcgaaaatacaacaaaaaagataaaaagggaaggacaggttctg

SEQ ID NO: 434622 - DNA, 1175 bp, Homo Sapiens
  misc_feature (1050)..(1050): n is a, c, g, or t
atcaggccaaatcggccgagctcgaattcgtcgagagcggagagcggggtcccggcaccgcggcgctcgggtgtttttgggggcccgggtggagggcccgggtgccggggcccaaggtgcggcctcgctagcgggagagggagcgggatcaccggcccggagagagctctcagggccagagcggggcaggaggatgctttcccagccccaccatggagctgcgctgtgggggattgctgttcagttctcgctttgattcagggaatctagcccacgtggagaaggtggaatctttgtccagtgatggggaaggggtaggaggtggggcgtcagccctgaccagtggcattgcctcttcccctgactatgaattcaacgtgtggacccgaccagactgtgctgaaacggaatttgagaatgggaacaggtcatggttctacttcagcgtccggggaggaatgccaggaaaactcatcaagatcaacattatgaacatgaacaagcagagcaagctgtattcccagggcatggccccctttgtgcgcacactgcccacccggccacgctgggaacgcattcgagaccggcccacctttgagatgacagagacgcagtttgtgttatcctttgttcatcgtttcgtggagggccgtggggccaccaccttcttcgccttctgctaccccttctcctacagtgactgccaggaactgctaaaccagctagaccagcgctttccggagaaccaccctacccatagcagccccctggataccatctattaccatcgggagctcctttgctattctctggatggacttcgtgtagatctgctgacgatcacttcctgccatgggctttcgagaagatcgagagcccggtctagagcaggtatttcctgaatacaacaccccctcgaaccattcgttttcccaagcaagaggaaattcttcctaagcccgtagagttccccccaggggagaactccatctagcctttggcttcaaggcctttcgggaatttatcctccgaacctgaggatcccggggncccaacccttccgtggccctccttgggcttttaaacggattccctgggttgaacccccccagggggtggccccggggacactacccgccccaaattcccccgggagggaaattttaacccctcca

SEQ ID NO: 434623 - DNA, 793 bp, Homo Sapiens
gggagaagtggaaaacatggctaggtcgggccgggtggtgaatcggcacgagggtgcggcctcgctagcgggagagggagcgggatcaccggcccggagagagctctcagggccagagcggggcaggaggatgctttcccagccccaccatggagctgcgctgtgggggattgctgttcagttctcgctttgattcagggaatctagcccacgtggagaaggtggaatctttgtccagtgatggggaaggggtaggaggtggggcgtcagccctgaccagtggcattgcctcttcccctgactatgaattcaacgtgtggacccgaccagactgtgctgaaacggaatttgagaatgggaacaggtcatggttctacttcagcgtccggggaggaatgccaggaaaactcatcaagatcaacattatgaacatgaacaagcagagcaagctgtattcccaggcatggccccctttgtgcgcacactgcccacccggccacgctgggaacgcattcgagaccggcccacctttgagatgacagagacgcagtttgtgttatcctttgttcatcgttcgtggagggccgtggggccacgaccttcttcgccttctgctaccccttctcctacagtgactgccaggaactgctaaaccagtagagcagcgcttccggagaacagcctagccatagcagcccctggttacctctattccatcggagcgccttgcaatcccggatggcttcggggactcgggggatactctgcatggctcgaaatgagacggttaagg

SEQ ID NO: 434624 - DNA, 626 bp, Homo Sapiens
taactaatatttattgtgcagtcagtgtatggcagaagcttactatgtactatttcattttatacttaaaacaatattctatgcaaaatgctataatttccccatgcctccaatttggacgtgataaaactgggtctcgtaaagttttcaccccagagttctctgcttagtaagaagtagaagtaagtctaaacctaagttatctgatttcagagcccatatagttaaatgctctgaatgcagcttcccatggtggtggtttctatgagagcctgtcacatacgatgtaggacagtgcttctctgtaacgtgtgcaagattcctttgatgatggtgactgtgagagcctgtcacatatgatgtagggacagtgcttccctgtaacgtgtgcaagattcccctgatgatggtgactacgagagcctgtcagatacgatgtaggacaatgcttccctgtaacatgcacaagattcccatgatgatggtgacgatgagaacctgtcacatatgatgttggacagtgcttccctgtaacacgagcaagattcccatgactatggtcatgggaatggtgactatgacagcctgtcacatatgatgttcgacagtgcttccctgtacatgca

SEQ ID NO: 434625 - DNA, 1067 bp, Homo Sapiens
  misc_feature (732)..(744): n is a, c, g, or t
cagcttcaacatattgaaaaatcattgttacttctggttcagcgactcagtctaccttctcacttgccttgttaacataccaccatcttccgcctttcttctcaagaagaaaaaaatcagacctcactgacgcttcaccatcttcagcccctcattcccaatgtatctaaaaggagctgtgccactttttagaaaatcaaccctcatgcattcggcacctgttattatttctagaaactgtattaagcctgtggacaaacagggccctggttgtcatggaatttgaagccacccttttctgttttgattggatgcaggaacaatgagtacacaccacacccagagtccatcccttgtcatatcaagtccctctttcttcaaagacaacctcctacctgtatcttgcagattattgccaaaagaaatatcctaagtggcaattaattgctctactttatcttcatgaacctaaactaactctgtcataagcctagagttttcttatgctgagcttttgaaacttttcataatctgatatttactcttaactaattcccacattcccccaataattcccacttttccagccaagatatttggagctcactatccccttaacttttatttttatccccttaacttttgtttttattcctatagtgcttaccccagaatttaaatttgaatggaaccacacatattatttaacccaacctctacatagataaattnnnnnnnnnnnnnccctgaagttcacaggcttaaagtcagaaaactaattctaaaaatagtatttcctgatttttaaggttcttcacccaatatattgtcattttttcttgctgtgtatatgtccatgtggttagtatgttagcagctcctatcagaaaccaatcaacgttctcaaacaaaatggaattaagagagagcttttgttgagtaaactagggaagaggaaaaagggaaggaggcattgggctaaaagaactcatgtttgcagatttgagtatctgtgttccattcattcaaatttgccatctggatcattagaatataagatgcctaag

SEQ ID NO: 434626 - DNA, 550 bp, Homo Sapiens
cattcactcaacaaatatttattgggtgccaatgtaacaccaaacaagacagatacaatgcctgctctcagaaagctgataattcatattacttttgctgcatgtaccagaaaaagagggatacattttagcttggccttcagctatgcctagactttgggcaggtggacatctggggattgggatggcattcttaggtacaaggataacaggagaaaagtgaaaacactaaagcatgagaaaattagtaggacacgtatggggactttaaagcaagaaatatattttatcgacttcaaggttccatcaatttaattcaggatcattattttataaaccaaaagaaaaaatagtaattaaagttttactgaaatggttctcaactgggggcgattactgtcctctaaagggcatttggcaatatctggaaccatttttgttgtcacaactgatgagaaacgactagtctttagtagataacaggtcagggattattgctaatcatctaaaacgcacaagagacctcccacaaaaaaaattatttggccta

SEQ ID NO: 434627 - DNA, 1169 bp, Homo Sapiens
  misc_feature (988)..(1057): n is a, c, g, or t
  misc_feature (1102)..(1102): n is a, c, g, or t
  misc_feature (1115)..(1115): n is a, c, g, or t
  misc_feature (1126)..(1126): n is a, c, g, or t
  misc_feature (1138)..(1138): n is a, c, g, or t
tgatgcgtggtgcagctctgctgctaatgtctgctgacagcgtcgcccgatgttgctcagggcctctgggaagaggggacacctttgatgtgggcgtgctggcacccaagaggcaacgtggtcaggctcgatgcttgccagccctggaaggtcccgccagggttggggggtcgggtgagcactcagagatctggggaggaagcgaggagcctggtgtcctcaccaggtgcagaggggaaatgcgtactgctccagaaggttctgactcaagtctcggccctgaggactcagaactcacaagtcatggatcaagtacagagggagggagggccccagcccacccctgcgggggaggaggagggtctgaaggtgggagggcagctccatgagcagccactgttcctgaccagccgaagtgccaggcaggggggaggtttccttgtccaggagggagaggacctccaccctctgacctttcagttttccatagcagcccagtgtgaagctcggcagggggtgggcagggcatcaggacaagatgaagatgctggctctggaatgaggactccccttggcataaggggtagtggctggcagaggttgcccagctcttttggaggccacagggaatagaggtggggtggtgcttccgttcctgtgaggcccgcccccctgagccccctccgtctgcttcttgtttggcagaaatagatgtggggcacagcctaagaatgatgggaatctgcccaagctgtgtcctctggggaaatgaaatcttgctcctcgtgcagcttccccttttcccttgcggggtgggggctgggggtgccaaggctccacccttggagggggttgctgggggtgccaaggctccaccctttgctcgctgggcagagggaaggaagcacctccctgtatgctctgcaggggcccctgcaggccactttgcctcagaggaaggaggagaggtcccctggggaaaatgcgnnnnnnnnnnnnnnnnnnnnnnnnnnnnnnnnnnnnnnnnnnnnnnnnnnnnnnnnnnnnnnnnnnnnnnttttgttgtcaggggttgcagcttaagttcattgggagccagggnttggtttgcgcanttgggggcttngccctttttttnggaattccccagggattgagcttcaggttcc

SEQ ID NO: 434628 - DNA, 1594 bp, Homo Sapiens
  misc_feature (425)..(446): n is a, c, g, or t
  misc_feature (1060)..(1068): n is a, c, g, or t
  misc_feature (1496)..(1538): n is a, c, g, or t
cattttgcctgctagctctaagtcctcagtagatacaaattattaaccttccagtataaacttttctgaaagtctaatttcgtacaaattgacatacagcccaaatacatgtaaagtaatttccaagcacaatcttcaaattttgagagggaggtgcctcacaaaggaactgcccaagtctacatattatggaatcatttttaaactaggtaccagacatctctgcaacacctttctaagaaaaaaatccctgatataacttttgccttaaaatagaacaaactgcacatgcatctttactcattatcactatacacttctcctttgcagctgcaacaacccctctcaagacatatctggaaccttgatattttagcatgtgtgtgtcatttaattttctctcatcccacctttaatcataaggnnnnnnnnnnnnnnnnnnnnnngttagattcaataagtattcctgacctttctggtttttactgtctctcggctgtagtctttcattctcacacgctccccggcgatcttgaaggagtttttactttcggttatctagctttatgaagaccaatacactcatacagctagataaccaaagataacaactcgcttcccacacaggcctctgtcttcctcttgccagactccaggtcctgatcctttctggcagtaccgaagagtggtcgtccaggatacttgccgcgcttaagattcctccttttatgtaaatatgacctggtttctgtttgtgtgtgtgcgcggctaaaacatccaaacgagatctgttgccttcagagtttattccgaacttttctttttcctttcagcaagtaatctccggcagcgttagccaacaattcatctattaatatcagaaaataaaaccagctattaaggtgcagcaagctgttacgagtgagcagcagcatccgtcccttcacaggcctctatttgcattgtaaattgcttctttctcacgcaagactctttagcctctctctatagagatgtataaagccaacggcaatttccagcgcaggttaaggaggaaggnnnnnnnnntcccattctatagaagtgacagctgattcaaggatctgttcctgatcctttttggttaggcaccatgagctttttaccaagcggtggcagcttgattgcacatatcttgtgtgtatgtgttttagggggaagatcctcgatttcacagggcttctaggctgggaaggagaagatgccgtcttgctggcctgctgctgcccccggtctttggttggttggattgtctattcattttatgcttctttgcagtctcatttgatctctcctgcgccaggcaatgctgccccccaaatccagctgggcaggaaccgaggcgccggctcgagcgaggccctggcaaatggtggcccagaagcatcaagtttcctctcccagccgttgtgccagatttcccctcctgccttctgctcctctccgccagctcgttnnnnnnnnnnnnnnnnnnnnnnnnnnnnnnnnnnnnnnnnnnnttctgtcacacacgaggattacttgtgacttttagaggcaaaagcttgcttattca

SEQ ID NO: 434629 - DNA, 831 bp, Homo Sapiens
acggggatcccacttcactctccactccgaggctcaggacaagtgcctggcatgggggacgccgaaagaagcctgtttgtgtgctgcggccgtgctgtgactttggatcttgtctttcagccggcgcctcggttcctgcccagctggattgtggggggcagcattgcctggcgcagggagatcaaatgagactgcaaagaagcataaaatgaatagacaatccaaccaaccaaagaccgggggcagcagcaggccagcaagacggcatcttctccttcccagcctagaagccctgtgaaatcgaggatcttccccctaaaacacatacacacaagatatgtgcaatcaagctgccaccgcttggtaaaaagctcatggtgcctaaccaaaaaggatcaggaccagatccttgaatcagctgtcacttctatagaatgggattttttttcccttcctccttaacctgcgctggaaattgccgttggccttaatacatctctatagagagaggctaaagagtcttgcgtgagaaatgaagcaatttacaatgcaattagaggcctgtgaacgggacggatgctgctgcatcactcgtaacagctttgctgcacccttaatagctggtttaatcttcctgatattactagatgaattgtcggctaacgctgccggacatcacttgctgaaaggcaaaacagacaagttcggaataacccctgaaggcaaccagatctcgtgggatgttacacccgcgcacacaccacaaacaaaacccaggtcatattcacataaaaggaggatctaaagcgcggaaagtatccgtgaacgacc

SEQ ID NO: 434630 - DNA, 1950 bp, Homo Sapiens
  misc_feature (279)..(279): n is a, c, g, or t
  misc_feature (511)..(520): n is a, c, g, or t
ttttttttgtctggtaattttaagggattctcaatatacacacagattaagagttttttgccttggcaaaaataaaactgaagttgcaagacaatctgaattgaaaccatcttcactaatataacttgcaaaaaatattttggatgaaagattacaatacattattaacttactttttaaacacagagtaaagttactcttggtaaaattaactcacccacatggcacattatttttgaagtatgttcaacaataacaacttgtacacaaaataccatngggtgatttacctttgaggccttctctgcctttaaaatcagcaatactggattattctgtagaatgatatacatatcgatgttctgcagataaaaggctctaagacgttttaaagggctaaattttctagcactggaatgattccttcatacataacaggtgaagaattaataagaatgtgtttctcctaatcttcaagctctgagccatgcctgacaagttctgaagaggnnnnnnnnnnttgttttaatccagtttctgtctgctaggagcaaggcagcaaaacacattttcaaaccctttaatgaaaagataaagcagaacaaaagtgaaatatatcttcagattataaacaggattgtattttgtagtccaccatcctgataaggttaagggccccaacggtaaaagacctcagtctaaaggttgtgggtctgcaatcggcatggtatgaagtacttcgtctaggagctggagggcccggtgtaagtgaatttcaatccagcaaggtgtttctttgatgctctgtcttgggtaatccggtccccagcctttcacaaaactcatcctgagtatgcataagcgacgaaggtcatcaacaccaattccagcagcagctgacagactgatagctggagctattccacctactgatcctgggccagggatgtttcctgccacggctgctgcctgggcagctgctgcagcttgtgcagtagccgcctgctgctgcatctgtcgatgacactgacgcaaatcaaagacctttatatatgcacttgggtagatcttatgaacagcatctccaggtgcacgcccagcttctctgtctaagtagtaactctgtacaaagaccgcgtggtcactaaggcacctgacccaaacatcaccttcacctttacattccaactgcacacctttgcctatgtgcaaccttgctctctcaatggcttctgtcctgtggacattggagagttgacccaaacaaaagcgatctcctccagaagggtccacgtatccatcaacagtaacaatagggcagcttgaaggaaccttaaatgtctctcctacctgaacatccatttcaaagtaagcaatggaacaccaatactcaggagcaggatgattggaaatgggaggctggaatgcaagctcattgtgaacaggccagtaatgtccgggatggggcggcataggcgggtggtgctgaagatggccgttttggtggtgaggcaaattaggtgtgtatggtgcagtcctacttccagtccaggtggtagtgctgttatgatggtaagtagctggctgaccagtaaatccattctgctgctgtcctggctgaggccctgatgctatctgcaacagtccttcactatggctgccccccagtatactggcaggctgacttgtggaagccacaggaatgttgggaaagttggcagtgctggtagcattagactcagatggggctaacagagctggggtgctgtatgtctctgtcgatgcacgattacttggtggatgctggatggtttgaattgaatgtccttcagtggacaacgatggctgtccctcaaagtcatgcacatattcatccttcaccatcatacttgatggagcattactctgcagtgttaatcctgagagatcaattccaggtgatacaactcg

SEQ ID NO: 434631 - DNA, 1031 bp, Homo Sapiens
  misc_feature (26)..(26): n is a, c, g, or t
  misc_feature (71)..(107): n is a, c, g, or t
gggaatgtaatacgactcactaattnaagggcgaaatcccgggagttttatacccggcggggtggcggcgnnnnnnnnnnnnnnnnnnnnnnnnnnnnnnnnnnnnnatcaggccaaatcggccgagctcgaattcgtcgagagcggggcttgccttcctcctcgtcctttagccgggagcctgtctttgcttgcctttgcctttgaggctctgtggctgtggggctgagtggcatcatggcggctcagaaagatctctgggacgccattgtgattggggcggggatccagggctgcttcactgcataccacctggccaaacacaggaagaggatcctcctgctggagcagttctttctaccacactcccgaggaagctcccatggacaaagccggataatccgaaaggcgtacctggaagacttttacacccggatgatgcatgagtgctatcagatatgggcccagctggagcacgaggctggaacccaattgcacaggcagactggattactgctgctgggaatgaaagagaatcaagaattaaagacaatccaggccaatctgtcgaggcagagggtagaacaccagtgtctttcatctgaggaactgaagcaacgtttcccaaatattcggttgcccaggggagaagtggggctcttggacaattccggaggagttatctatgcatataaggccctcagagccctgcaggatgcaattcgacagctaggaggcatagtgcgtgacggagagaaggtggtggagataaacccagggctactggtcacggtgaaaaccacctccaggagctaccaagctaagagcttggtcatcacagcaggtccttggaccaaccagctcctccgtccctgggcattgagatgcctctcaagaacctgcggatccacgtgtgttactggccgagagatggttcccggggagctaatggtgtgtcccaggcccttccggcttcctgtgggctgggcttgtgtccccccccactctacggactggcccccgcggagtcc

SEQ ID NO: 434632 - DNA, 653 bp, Homo Sapiens
ttctttttgtttgctgatgagggatacatgaaacaataatttccttgtctgtaagttactccctgatctgcagtgattctttatgctataatgtggttatcattactgacatttatttgtgtagtgactagaggtaatctcagttttggacatggatgagttcttattctctagaaaataatccatccacttgtttccactttaaagaaaattaggtaactgtgatataggggtaaagataaagctaaatagggcctgctttgcttgaccaccaaaatattagctcagctgccttttgagagaatttgtgtaagtctacgtaatcttactaggcaaggaaaattcctcacagctggcttctgaacttctttgaatttcatgtattctatgatggcattcaagaagtttaaaatagtgttattcagaatcctaagtattcatcataactgatgctgtgtctgctgagtgacagaaacgtcactgccttaattctagcccccactaccacttacctgcataactgtattagcctcacatcccaaccctttaagtgttttagcttggggtattaggtgttctactgtacgtatctagtagtctttgctattcagcaccttgctgctcaactggctttccttatgtacggttctgat

SEQ ID NO: 434633 - DNA, 977 bp, Homo Sapiens
attcaagatcaattttatttgttgtaaaaacaaacatgggttatgttccagacaaacagatataagtgagtagacttatgccctggtgcctccttggctcttcacaggatgcaaaaacaaatcctgccagcaggaggtggcagattgcagaggtggctggttgctctttcagccagcttggccttgtctggcatgcacaggtcccagcacagcaaaacattcagggagttagagtgttgcacaaaggattttaccaacctctcacattaagcagcattcaaggatttgctgaccaccacttatgcaaattttgtgttatgctatagcaatgaacttacttgttctatttctaaacaaaacattgggttcacacacaggcctggacaaagcttcccacttctgaactatttactgatcttcttattctcaaagaatgcaagatgaatgatgtgcaataccatggctatggcatgtgacttttcttgacctggatggttagtgtcccaatatttaactgacttttgtgggggtgaaaatatgccataagttcttccttctatcatccccatcactaccatacatgtaatgacataatcatgtcacagtgtgccctcagaatcactattcctagctgagtatactaaggctttctatctaggtcagttcattgtgtctgtgtctcctctaaaccctccttcatcatgcctaccttgaggaattcagcaagtgatcattcgacgcaagctaaaggattttagctttctctgccataaagattattgctaaaatacataccatacaacaaaccaacccatttcccacaaatcttactgtctgacttctcacagaatacataatgacttttattgtgtctcttccttctgtgtttctctttcctaactgaactttgttctttatccatgccttcttccaatcctgacatattttaaaacctttagcatttctgcctataatac

SEQ ID NO: 434634 - DNA, 1154 bp, Homo Sapiens
  misc_feature (485)..(505): n is a, c, g, or t
  misc_feature (1053)..(1053): n is a, c, g, or t
  misc_feature (1062)..(1062): n is a, c, g, or t
  misc_feature (1070)..(1070): n is a, c, g, or t
  misc_feature (1091)..(1091): n is a, c, g, or t
  misc_feature (1098)..(1098): n is a, c, g, or t
  misc_feature (1101)..(1101): n is a, c, g, or t
  misc_feature (1146)..(1147): n is a, c, g, or t
  misc_feature (1149)..(1149): n is a, c, g, or t
ggtacgaaatcacttttattcacaatcacagcgacccaagtgcacaagggaagcagcagccacccctgcactgacagaggtaatgagatgatggcttcctctccccaaccctcagcctctgggatccctggctggggggcccgctagccagcccccgctccctcccacacagaaggggtctcccagggtcagtgactgggtagtggagacccatagtgggacagtgacttccccacacacccactgcaaggccagcacaaaggcccagcctgaggtcctggcacaccaccccctggcagccctcatggaagaactcccgagtcacacagaaagcctgcccctctctcccgaaacaaccattttatagaaatggaagctgggctccagggggctacgactcggccagggccacacagctggtcagtggccaggactaaaacccatgccctgcctgccacacagaggtgcagtctctgatggatgcnnnnnnnnnnnnnnnnnnnnngccatctgagggggcagagggctgggaggctgggagagcccaggccagggcaggcagggctgagaggaccgacctcagcaggtggggcgctccctccccagaacttacagaacctggaggtgtgagaggcagcccttgcctcctcatcttccctacgaacaggctccctgccccgccatcacaaggtctccctgtcctgttcctggcccacactaggaacactggccctcatggaagtttgacgtccttatggaggggggacctcctgggccacctgaggtacctaagccaaccatgataacccagctctggcccaggaggaagggtgctctatggctctgggtgaccatcagccccagggcactaaggaggcttggtttgcctctctgtaaaatagacactgtttgccaaaaggtctcccaatttggcccctccttatggagttccaattcatgattggtagggctgggtatgagctttgtggctggagttaggggaagatactgcattatgactgcctcagccaccacctttcccaggtaccccanacacaaggnagcatttntaggggccagaggatggggantcactanaanaaacaacaaaaaaaccaaaccacaaccaataaataattattaaanngnggaaa

SEQ ID NO: 434635 - DNA, 1323 bp, Homo Sapiens
  misc_feature (390)..(457): n is a, c, g, or t
  misc_feature (1115)..(1200): n is a, c, g, or t
ggctggtggttgcctcccgtcctgggcaggctgcagcctcatgccatgtctctctcccactacctgatgggcacatggacaggctgcagagggctccaggttctgggcccctggctgagaaagggaggatcctgtcctggctgtagccttcctgccccaatcatctcgctggatgccattgcccaggggtagcccttcggtatgggctggggagaagggttggtcttctgccagggtccctaagaacaggtttgcagctaccctctctgaccttttccccatatcttgttctgtccagggcctaggctgatagtcagagcctgtggcacacctgggatgggccagggccctgggtggggaggtgtgggttccctgggccaagaccagccnnnnnnnnnnnnnnnnnnnnnnnnnnnnnnnnnnnnnnnnnnnnnnnnnnnnnnnnnnnnnnnnnnnntaggtgagttcccatcctctgggcccctagaaatgctgcctttgtgtgtggggtacctgggaaagggtgtggctgaggcagtcataatgcagtatcttcccctgactccagccacaaagctcatacccagccctaccaatcatgaattggaactccataaggaggggccaaattgggaggccttttggcaaacagtgtctattttacagagaggcaaaccaagcctccttagtgccctggggctgatggtcacccagagccatagagcacccttcctcctgggccagagctgggttatcatggttggcttaggtacctcaggtggcccaggaggtcccccctccataaggacgtcaaacttccaggagggccagtgttcctagtgtgggccaggaacaggacagggagaccttgtgatggcggggcagggagcctgttcgtagggaagatgaggaggcaagggctgcctctcacacctccaggttctctaagttctggggagggagcgccccacctgctgaggtcggtcctctcagccctgcctgccctggcctgggctctcccagcctcccagccctctgccccctcagatggcttttggtctaggttttattggcatccatcagagactgcacctctgtgtggcaggcagggcatnnnnnnnnnnnnnnnnnnnnnnnnnnnnnnnnnnnnnnnnnnnnnnnnnnnnnnnnnnnnnnnnnnnnnnnnnnnnnnnnnnnnnntggtttcgggagagaggggcaggctttctgtgtgactcgggagttcttccgtgagggctgccagggggtggtgtgccaggacctcaggctgggccttggtgctggccttgcagtgggtgtgtg

SEQ ID NO: 434636 - DNA, 888 bp, Homo Sapiens
  misc_feature (865)..(865): n is a, c, g, or t
gaattcccgggatcacggtcatctacacatgtggccacatgtgcctctgctacgcctgtggcctgcgcctcaagaaggctctgcacgcctgctgccccatctgccgccgccccatcaaggacatcatcaagacctaccgcagctcctagcccgttgcggtggcccatcccgcatacccatcttctcgggcttcagcccagtcccagctgaggaacaagccagtggggccccttctcttcctcattttggaaacttttcctcctctattaaacatgggaaactgaagcccttgaaggtttggggagaggggggtatcaggcagggagggggcagaggcaaatcaccgggcagagggaggggaggagaggaggccgcactctccctgtctctcccgtctctgcacccagctcctctctgcatgctgagggctaaattgggatctcagcctgccctaatctttccccatctgaggcaggtttctaggaggtgtctgtagtccatgtggcacctttgtgagaattagaaaacatgtaccttcctctgggcagctgcagccctgagccaggacatgtggcctggctagtgcagcatggagtggattttaggctcatttgccctctcagccaactgcccttgagcagtgtacagcctgctcaacaaccgccctgggcaggccgctcctgagctgctgtctccctctctgacctatgcctaccttctctttcttcgttccctgcccactgggcatgggcagctgggggtgagaggctggtggttgcctcccgtcctggggcaggctgcagcttcatggccatgtctctttcccactacctgatggggcacatgggacagggttgcagagggntccaggttcttgggccctgggtt

SEQ ID NO: 434637 - DNA, 629 bp, Homo Sapiens
  misc_feature (327)..(376): n is a, c, g, or t
  misc_feature (474)..(474): n is a, c, g, or t
  misc_feature (614)..(614): n is a, c, g, or t
ctgcagagggctccaggttctgggcccctggctgagaaggggaggatcctgtcctggctgtagccttcctgccccaatcatctcgctggatgccattgcccaggggtagcccttcggtatgggctggggagaagggttggtcttctgccagggtccctaagaacaggtttgcagctaccctctctaaccttttccccatatcttgttctgtccagggcctaggctgatagtcagagcctgtggcacacctgggaatgggccagggccctgggtggggaggtgtgggttccctgggccaagaccagcctttttcctcagtttaattannnnnnnnnnnnnnnnnnnnnnnnnnnnnnnnnnnnnnnnnnnnnnnnnnaggtgagttcccatcctctgggcccctagaaatgctgcctttgtgtgtggggtacctgggaaagggtgtggctgaggcagtcataatgcagtatcttnccctgactccagccacaaagctcatacccagccctaccaatgatgaattggaactccataaggaggggccaaattgggagaccttttggcaaacagtgtctattttacagagaggcaaaccaagcctccttagtgccccnggggcttgatggtca

SEQ ID NO: 434638 - DNA, 909 bp, Homo Sapiens
aagagagaaggagggggctccagtgaacccatggccgggctgcccatgaaatgacaggaatcattggcatacatttcaaatagctctctcaatcctattaaagcattgcagtcctgctttaaaatagacaagtatgaaacaactttgatagatagagactaaaatggcttattgatttttttaagtctgagggaaattacccaaaatgtgtcattccttaacatttaaaaatatgttacataaaaatgagcaactgtgataacaaataaaacttggagagaaaaaagttggctatttccttattcaaggagacagagctaccagaatacatcaagatagcgcacaaattttttaaatccactgccacttctgctgaaacaaaagtcaactgataagaaaattcccattcaaaacaattttaattgtactgttaactcttcctccattttttaatttcatgaagtcataatccaatctgagttggtctgttggcattagcagacatagtcactggagaggagtgagatgatgtcagagcatggggcacagtatttataaatgtctcctttaagaaagtgtaagtagtatcaagttcagctttcaatggtaagaaatccccaataccagttgtgtcagcaggaagaggagctcttgaaggaatggagagatttgaatggtctcgtgatcctattgattgtaaacttgcattttcacgtaaacaagctgtgtgaagttctgatttcaaggctgcaatgtgacttcgatgagatgtcatttccttctctaatgtcatgattctagtgcttgcaagctggtagacatccatgaaacttttaatcatagccccattttaagagcctgcggtagagaggtctcagagttgctataatgggccatcccgggaattcc

SEQ ID NO: 434639 - DNA, 763 bp, Homo Sapiens
ttttttttgaacatgggaataggttttattttcatctcaagaacatttaagttgggtgaagaaattcagcttttgttgttagaatctgacaggcttcaaacacttgtgatggaggggttgttgtcatatcaaagtccacctagtaaagttttaggtgaccagtgactttgtcaattaggtctgctggtcctggcccaatccctaggacagtttgagagcctggtgcaatctgagtacgtccagcatcttgaattaaacttacagtcagtcccagcatttttgcatgggccaataatgcaatcagggtttcttcatcaggagctttgaccaccaccttgggctggccacagtattcccattgtttgagcatttcaggatttcttctttgaatctgcttgtaggctgaaacagcagcatgagagcactgggcagccactttcccttttcccatctttaagtcatttcgaaccacaagaatcatcttgtactccccgctgtctcccaagatgcttgcttcactttcagtatctgtgtgtgtcttgctcgtcttgcttttggggagcatcccaaagcatactcgaaggctccagcccaggcacatgccacaagcaactccaacagccaagccgagtgtactgggatgagccaaatattccataaccaaggatttggagggcatctacagtacctcctttcctcactcgcgccttcccttcttctgggcagcgaacacgtttctatcgcgtgagctacctcttccccc

SEQ ID NO: 434640 - DNA, 1602 bp, Homo Sapiens
ggggggtctgtttcgaacacaacactgactttaatggggcagccctgagccgtaaccttcaaaccttccgcctcagtaccccgtgcgcgaggagggaggggcgactgctacgggcacatcgtcgatgtcctccctactcctggcgatcccacgcctcaccccttcctctccagctgctgcggtctccgtcgccgaggtgggtcccaggtaagctcccaggaggggcaggggagcccctcagcggcccgggacagattcccccatggctgagggcatggggaactagcgtggatggagacgccgccgtcctcggagctgggcggggacctgattctgggggtgtggacagagccaagggaccgccccccaaggcccagcgccgggagatgcaaggccgggcccaaggtgttggacactgctttgggggacaggctaggtctctgcacgtggcttctgggctctggaaagcggtccattctcctgacccggatctccggagtggtaggaggcggctcagtcccgggcctgcgctcctagagttcctgtcccatctacctcccacgctcacccatcccaaggaaggagggcactcgggccccagcaggctcgtgagagcagcgggctccgccctcccaatggtctatccatcggtgggtgggtccggcgcggtcgtcggggctctggcgggtacccgggcgtcccctgcgcggcccgggccgccgctcaccgctgcttacgctccgcctgctggagccgccgggagaggtcttcgatccgcacattcttgagctggagcaggtgctccaggcgccttacccttcatctgcaggacctgcacggtctcttgagagcccacagctcctgctccttttcagcgatctggaggacgaagctggggtcgccctgcaaacgccccggttatacgctggaggccgaggcgccgtcggccggtcccagctgagctgaccccctccctgggggtccgggacaccttcacctcgggccttctgggatacacccacatccatgtagccactgccatcctggggagccagctcctgtaaggagccggcgccctgcttcctgcgcctctgcctctcctccaggcgctgcctcagcgggatgagcaccagctccaccacgcctggggcgcactgcgcgatcttgcgcatcacgtcatccggtactgaaaagttcagcctcttcagtaccttcctgttcagatgaccccagttgctgagcttctgctggagagagttggcggggacataattgtgcatctccaccatcttggggaagtaaaacttgatgacctctgcaacaaggactccatcgctaaagtcccgggagaggtttcgcttgggccgggacagagggatgttgtctacccacaggtacagctggtgcagcgcctcctcgtccacgctgctcgccattggcgtcctcacggcctggccgccccagcggtgccgggtcccgccccagcctcacgacccttcaggcgcttcctttctcgccactgcagaagcccataactgcctctgcctgcctaatccagagactcacgtcccagctgggagcggccatattgttttccgaaac

SEQ ID NO: 434641 - DNA, 508 bp, Homo Sapiens
ccagtggaaacacggtattcatttctgaggactgtgctaggttttaaggcaattgtcacatgtacaaaacagtcagatgagcagtatctgaacagatttaccacaacatgttagaaagagaacagcaggggaaatgttttcagacaaggagatgtgagattttccccagtcacgtaacccctggtctaccgactctgtggactgaaaaccaggaagatagacagcacattctctcttctcgcctccaaggggaagggccacctgcacactctcggaagcacccttctccagacccagacacgcttcttactgcagggccaggccaggacacaggatggtcggccaatgagtcttaagtccagctctaaatttcacgctttatgggctttgtgaaatttcatctttaggaatggggaaaatcaagataccacagacatacaacttgtagttaatagttaagttcccctctatccaaacacaaacttgcttggcttggagctaaaactat

SEQ ID NO: 434642 - DNA, 1887 bp, Homo Sapiens
  misc_feature (24)..(24): n is a, c, g, or t
  misc_feature (128)..(128): n is a, c, g, or t
  misc_feature (775)..(775): n is a, c, g, or t
  misc_feature (1683)..(1693): n is a, c, g, or t
  misc_feature (1707)..(1707): n is a, c, g, or t
  misc_feature (1740)..(1740): n is a, c, g, or t
  misc_feature (1753)..(1753): n is a, c, g, or t
  misc_feature (1762)..(1762): n is a, c, g, or t
  misc_feature (1845)..(1845): n is a, c, g, or t
  misc_feature (1872)..(1872): n is a, c, g, or t
agagggtccaggcagggattctgnttggttgtgttttgggtaagttagtgagaactcaagtcttgtgcctaaggagccttggagaacagagttttgtggagctggttccgcgtggggagaatcgggangcccacgcgggaccagctctcccctgcgcaggccctccgcgggggacaggaacacccagccccagcgagtctggagaccaggactctgccttccaggcgtagggccagggctctggcaggtggccagggctccacgggggcctagtggcttcagccctggggtacttctgtgttgtgattccccggagctgggaaggtcccgaatggagtccagacctgggccctggttcccccaggaccctgagggtttccaccttggcgcgcagccggggagatccgccctgggctctgggttcgggaagaaggacttcctgctacagtagctgtggggagctggtgggggcatccttgaggacctccacctgggagatgctgggaccctcggggcaggaagtccctgagaagcctcatgggagtcagggagccctggggtttccacacaggcccatgccctccgtcctggcagggcaggcagagctcagcacagcctcacccctgcaggcggtatccagaggtgagggaggcctgaaatgtttccaggcatgaccctggagcccggcagtgcaccccctaaaagatgggcgcacccggcagccccccagtgtccccagggggcacacttcccctttgggatggggcacaggctngccccacccttccatgattccaagggcccagaggggcggggccaggatggcgtgtcccctgcctgtgagtgacatcggttcaggaggagacagtcaggaagcctcctgctgagtggtccacattctgctgcccccagaccccatccagccaggggtggggatggggttgggctctgcgtcccactgagtctcattcctctgtccccgagccgagctctcctgggccagggtctcgtcaggaggtgcctgagagcagaatgaataattgaggttaggaacccggcatgccgagtgccccagaaatgccgctgtgtccccgcgggcagtgacgtgagtggggaggagactcaggcccacattgcccacacctgcctctgaactgctgctggtcacccccacccccgggtgcctgtgaccggggtcctgaggctggggcttttgtgccaggagtgggtggaacacagagacccccgtgccaaatcctgggcatccccagccccctggcccctcccacatcccccgtgtattcaggaccccatctgctgagctctgacctgcccccgctccgccatcagcccctgctgctcctcggccagagctcccaggacgcagggagaccctgggagagtgaggtcatcccggggccatggaagctggcaggagacactggtctcagaggagggatagagacgcagatttcagatgtaagaagcccgatccacattgcataagtggacccagctgccagatgtgtgggcagctgcagggagtggcccggggtgctgggcccagctgtggttgttcttttctgggtcaggagtgactgcggagtggctgggacgttcctgccgggggaccctcctgccgggggtggccgcttgcctgggggaagacccctttccctttcnnnnnnnnnnngaggctcaaaaaanaaatccaaataaagcaccatattcccaccacgncaaattaaccttnacaacaatnttggcgtatttgcgtccagtgctgtttttattaattaaggtaaaatttacatatggtgagatgcatgctcttcagtgggaganccagcccctagaaggtccctccagccnttcctgtcggcgtcc

SEQ ID NO: 434643 - DNA, 916 bp, Homo Sapiens
  misc_feature (713)..(735): n is a, c, g, or t
  misc_feature (869)..(869): n is a, c, g, or t
  misc_feature (903)..(903): n is a, c, g, or t
cccaccacaaacgtagaatccacttctgttccccaaaaagcgagaaggggggttcaggaggaagccatcgcaggggacctgggagacgccccgaggtgtttgtgcttcacccccagacgtcagcctcgaaggcaggactgtggggtgttcgtgctgtgttccccccgctccccctttctgtccccttttttggttctgacgtgaagaggtcttagcgcccgcttctgtccacggggtctctccttcctcctccctagctcagggatgggccttccagccggagcaccccgatccccatccggcaccccccaatcccccaacacgcctgtccctcccgcatggccaccaaggagctggaccttggatgcgcctaccctgctgaggtgggtgacaggggccccccacctccagggccttagaaccaccgcccctctccccaccccaggcacccctctttttactcaaaggcactgactgtaatccagggggactgggacctgcctccccccaacctctggctcccacaaggcccggtgttgaccgagccacaggccacggacaggggccggggttggggagactatgtcgccagatgccaggacgccctcaccccgtttgcatatgcaatgctagcatgggaccccgaaaatagacgctctgctgcactgagacttcttgtcaatgcccaaccggcgggggggtgtctccctggnnnnnnnnnnnnnnnnnnnnnnnttctctgtgacacacacatcttctcgtctctttttctttcattgttaaagggaagctttttaagaaggcaattttcatattgtttctacgggatggttttggtttcctttcccttcccacccccctttaaggcngttagccccttccaaatgtttcagggttcccccnttttcctgggggt

SEQ ID NO: 434644 - DNA, 423 bp, Homo Sapiens
gaccccaggcacccctctttttactcaaaggcactgactgtaatccagggggactgggacctgcctccccccaacctctggctcccacaaggcccggtgttgaccgagccacaggccacggacaggggcggggttggggagactatgtcgccagatgccaggacgccctcaccccgtttgcatatgcaatgctagcatgggaccccgaaaatagacgctctgctgcactgagacttcttgtcaatgcccaaccggcgggggggtgtctccctgcccccgacccccccatacccccttctctgtgacacacacatgttcttcgtctctttttctttcattgttaaagggaagctttttaaagaagggcaattttcatattgttttttaccggatggttttggttccttccttcccacccgcctt

SEQ ID NO: 434645 - DNA, 660 bp, Homo Sapiens
acataccctgctgccttggccagccaggaccagggtctgccagtgtccgagcctgcccagagctctcgtccttacaggccacagtggacctgctttccctgtaaagggccaagcagtctttttcacactgctcaactctgccactgcgacaccaggcagccaggtggtgtgtaaggagaaccatcaatggacactgaaataggcatttcacctgtcacatcttttgattttaaaatgtaagaacaggccagttagccaattattacactcctccatgcaagagatgatggggcattgaaatagattgaagatggagagagatgaatggatacaagatacattttggaggtagaatgaacaggacttggaaatgtatgtggagaaggcaaaggagttaaagatgatatctggagcagcacaactcacaattgcaaagatgtggaaccaacctaactgcccatcaagcaatgagtggataaagaaaatgtggtatatatacaccatggaatactactcagccacaaaaaggaacgaaataataccttttgcagcaacttggacggagctggaggccattatcctaagtaaagtaattcaggaatggataccaaatatcatatgttctcacttatgagtagatgccaagctatgatgatgcaa

SEQ ID NO: 434646 - DNA, 534 bp, Homo Sapiens
aaatttcaattgttttaggggtacaagtggtttttggttacatggattaattgtatagttgaaagtctgagagtttaatgtacctgtcacctgagtagtggacactgtacccaatatgcagttttttatcccttatcctcatttcacccctcccccttgtcagtctccaatgtccattctaccactctgtatgcctttgcatacccatagcttagctcccatttataagtgagaaaatacggtatttgttccattcctgagttacttcacttagaataatggcctccagctccatccaagttgctgcaaaagacattatttcatttttttgtggctgagtagttttcgatggtgtatatataccatgttttctttatccattcattggttgatgggcacttaggttggttccatatctttgcaattgtgaattgtgctgcaataaacctgtgtgtgcaggtgtctttttttgagataatgacttcttttcctttgggtagataccctgtagtgggattgctggatcgaatagtg

SEQ ID NO: 434647 - DNA, 724 bp, Homo Sapiens
  misc_feature (634)..(634): n is a, c, g, or t
gaaaagcagaaaaaagtggggaagattttctatcttgaacttgtgagctggagaattaccattagtagcccactaataggttatggccgatgagtcccttcataacacactgagagccacttttgacactcccagaaaaggcaggttaacaaaaccccttgatggaaggttagaccctcattgcccagtgtacccaagcctctttgaaccttgcttagactgaactgcaaatgtcttgactgctctgggctccttagtgcaactccttcccacagaagccatcaggagcctggtccaggaagctcctctcctacacctgccttaaaaggcccagctctgctggggagtaaggttcatgggggccgtcccaatgcaaaagggaatctctgccatcacccactgcaaccacatggtagccactctgcagccggcaggcgtgaggcatgctgcgctaacatgggagggcggaggctctgcctgacttcccagaagcccagtgagaagtccaggacaatcagcaggtgctatgggaaccttggctggcaggcaccatgtcgtcctgtatgatcggcaggaccagctccttcctgaagacaccaattcttggcggctcctgacaaggattgagaggatntgtgggggacagccctgaagccctgagccctcaactcaatgaagagattgtgctggtgtagacccacagccatccagctctgtcactgat

SEQ ID NO: 434648 - DNA, 1917 bp, Homo Sapiens
gctggaccggtccgtgattcttgccatacgaaggctgaagttcgcctacccacaatgaaaagtaggctttacagtcaaaagtacttctgttgattgctaaataacttcattttcttgaaatagagcaactttgagtgaaatctgcaacatggataccatgtatgtaagatactgctgtacagaagagttaaggcttacagtgcaaatgaggcgtcagctttgggtgctaaaattaacaagtctaatattattaccatcaatcaggaagagaataataaatgtttaaacaaacacagcagtctgtataaaaataccgtgtatcatttactctttctgcagctctatacgataggcaggagaggcttatgtggcagcacaagccaggtggggattttgtaaagaagtgataaaacatttgtaagtaatccaagtaggtgtattaaggcaccaaaagtaacatggcacccaacacccaaaaataaaaatatgaaatatgagtgtgaactctgagtagagtatgaaacaccacagaaagtcttagaaatagctctggagtggctctcccaggacagtttccagttgctgaatagtcttttggcactgatgttctacttcttcacattcatcttccatcaactctgctaagaaagggaatggattctggtagcaagacaatataattctcctttagtttttgagccagtgctaccacagtaatcaaagcagcaaatcgaaccttaggcgaggagtctctcgtctttagcagaatctggtagttcagtgtttccaaagagagtcatccgccatggccactgaaaactgtgcgatgcatggtatcaggtgctttgtcacccgttcctggaatttctcttctcccccaagcctgttttccagctgatccaccagaggcatcatcaaggctcctgctctctctttacttataaaatgctgggtatccaaaaggaagattttgtataaacagttcaaaataaactgcaacagcaagcagcacttttcagggtcattttcagagtcaaaaaatgcttcatctgttttggagatgttcacctggttcaaggtgtcagcaaaaggcttcactaagtggccggccaacagagtaaaaagccctttcagcttttcagcaatgcaatctgccaagttgtaaaatgtcaacaacctgtcctttggggcatcttctgttttagcccaatcaaacagcttgaagaacaggggcctgaatgtgacctcggaaagtttgacaaccatggctactagacagtcaatgatacaattttccgtttttccaacttcctccagatcgttctcagagtgctgggctcggaagtccagggcctccaggaaaaaggcggttagctgagactgatgggaggtgagctcttccttcttcatcaccccaatatgctcttgcaagatgctcataaacggacccatgtgattcttccagttcttctcaatctgcttgtaagtttttttgatggcgggcaacaggactcggggtgcaagtgtggtagccagtgtctttttaagagatgtgagacggatattagcctgtgacgcagaacccatttcactagtgattttctccagatgaatcacctggaagagaatgccttccagataggggctgatgaagtgcgggagagtctccacaaccttctgcagagcagccaaggcactgagcaggtagacctcgctggagaccagctcgctggtgttcttcattgttgtcagcaacgatggcatcaggctgggaagctgggggatggccagcgcctccagggtggaggtcacctctgctatgcacagcagcgcgcttcccaagacattcttctcctcctttctctctggagcaatcagtttcacagcagtgctcagcactgggacaaaaggatctgg

SEQ ID NO: 434649 - DNA, 1390 bp, Homo Sapiens
  misc_feature (53)..(53): n is a, c, g, or t
  misc_feature (256)..(274): n is a, c, g, or t
  misc_feature (346)..(346): n is a, c, g, or t
  misc_feature (1032)..(1032): n is a, c, g, or t
  misc_feature (1054)..(1054): n is a, c, g, or t
cacaagccagggtggggattttgtaaagaagtgataaaacatttgtaagtaanccaagtaggtgtattaaggcaccaaaagtaacatggcacccaacacccaaaaataaaaatatgaaatatgagtgtgaactctgagtagagtatgaaacaccacagaaagtcttagaaatagctctggagtggctctcccaggacagtttccagttgctgaatagtctttgggcactgatgttctacttcttcacattcatctnnnnnnnnnnnnnnnnnnntcaaaattaaaatctgagtcagtccgcctgcctcggttctcattagtttaattcttaatggccttgcacttntccggcaatcattcaatcaaaagagtgaaatgatgcacatttaacaaagcaggaggcgccacggaccgcctccctccacaccgctccttccgccttcattccttgcccacaggcttgcactggaagctgaataagaatccccaaaactcaaacttcctagggatgccacccctttagtagctcacacctcccccctccaagagctaagaaacaaaggagaatgtacttttgtagcttagataagcaatgaatcagtaaaggactgatctacttgctccaccacccctcccttaataataacatttactgttatttcctgggcctaagactctatgttccagaactgtcacagctccccatgtcacactcactagcttgtgatctttgtcaaataactgaaatcttttaagcctctagtttcttcctttgtaaaacagagataaaatgttgtggtttttaagtgagataatccaagtaaagcacctaacatggagtagtgaatgaacatcggttgctactaaaagtggacatcctactgcatccttaatgccactaggcatttccatacaatctggggaccaaaacttcaatcatataaatgtatgaggttaattaaaaacactactgtaatctgcttgtatgatcacaaaccaccacaaaagaaaagatcgtgaaagattacactngtaaacggactctcaaatgatncaggaggtggtcacttcgcaacttgctcccttcacccaactcaaaacaggagctcgagcctgcctgtatttgagactggagctgcctgtatgaggactggatcaactgctagtcacgttatatccaaatctgcattatcattgggcacattttcacagaattttactgaattattccttaattgtttaatggtgggaatagttggggaacttaccttccatcaactctgctaagaaaggaatggattctggtagcaagaccatcatattctcctttcactttttcagccagtgctaacacagtaatcaaagcagcaatcgaacctgaacaggatca

SEQ ID NO: 434650 - DNA, 461 bp, Homo Sapiens
  misc_feature (56)..(56): n is a, c, g, or t
  misc_feature (72)..(72): n is a, c, g, or t
taaacacccacttttaattcccttggccccctttaatcccccttccgggttccganttgcctgcccttggantaactgtggttaagccactggcctgaaaaaactaaaaggagaattaatattgtccttgcctacccagaatcccattccctttccttagccagaagttgaatggaaggtaattccccaaactattccccaaccattaaacaattaaggaataattcagtaaaattctgtgaaaatgtgcccaatgataatgcagatttggatataacgtgactagcagttgatccagtcctcatacaggcagctccagtctcaaatacaggcaggctcgagctcctgttttgagttgggtggagggagcaagttgcgaagtgaccacctcctgatcatttgagagtccgtttacagtgtaatcttcacgatcttttcttttgtggtggtttgtgatcata

SEQ ID NO: 434651 - DNA, 1414 bp, Homo Sapiens
  misc_feature (84)..(84): n is a, c, g, or t
  misc_feature (134)..(134): n is a, c, g, or t
ggttggggaaattctaaagaaccccggccaaaaaaacctctgtcttgaaactgctcttaaatgtccttttcccaagaaacaagncctttgccccgggcaatgacccacctcaccaaggctgttcctaaagctgnggggcccctgggcccctgggggaagcaagccccagcccaaggtgcctgctccagcagcaaggccttgggcacctgggggtctgggctggggaagaggggcactgggcagggaaggggagagcggttctgggtctgggttgtggggggtgaacccaggcagggtctcggaccggaggtctcggagtccctgggagctgcagttggccactcagaggtcagctttggcccttcgttgctcagccaaccgaggctggctcagaaacctgctcagggaggagctactctgaagtttgttgagttggcggtggaggctgttgctgttttgtgggggagtcactgagagctgggtaagagccacttatctgtgtgtgagaggcgcagacaggcacaaaactcctgggaagctgtctttcattttcatttttaaatttaactttttaattctagcagaaacacgcaaacctccaagactcttgtgcccgtcctggctccgtctgctgggaggagaccagctctgcctgtccccatggggtcccctgagcctccacctcctggtccagctccccagggttcgggggcggaggggccttgataacggccgggcctgagacgcggctcccacctcccagcccgccccccacagtcggattcggatctggaattccacaccaggcccgagctcggctactggaatgtagccttcatcctccgtagcttgtcctgaatcttccgtgagtgcttctcgctggagacctggtggaagttggccctgctatctgcggcgagtgtggaaatgtcggcaccgctgaagcgggcaatcctctgcttgaggtacgactggaagcttggggtcggggctgaaggtgtaagggttctcctggaacgcgtgcacctggctcaccacctttgcgatgttcctgagcttgctccacctgtgggccccgttggtcatggtgaagccgcctgtctccagctgctggatgtgcatggccaggaggtgggccgagggcagggtgggctgcgcccggaagcgccgcccttccatcagacaccggctgtcgctcttcaggaagacctccacggctttcagctcctccatgacctctgctatctttgcaggcagaattctccaggcaggggactgcctcacggccaggtgctccagcccgctcaggatctgcatggctgtcgcgaagtttctctgctcatagcaagattttgcaatcagcaaaaatttggacagcaagttcacctgcagcttggaggtgtggctggtcaca

SEQ ID NO: 434652 - DNA, 884 bp, Homo Sapiens
caacttcagcattcaattttattatagtcccatctccctcaacaaacaagatcagcagccagtgtgggatggtgctcaatggggctccacttcccactagagtgtaagctgcttccacgcatgctactgcgtgctccgagccatcgcagcggagtctcttctcacccagctttgatggtggggcgactcccgtgtctgcagctgtggtccaaagggtgtctgtgctggatacagaagttgccgtgacattgggcacataccatctgcagcatctctttcttcttgcagccctcttttgagcaacggtatgtaaaaatcttctctttcttcttcccagggtgagagtcacagtctctgtcaatgtgatcaccaaccaccacgtctggtatctggcccttttttactgggatgggggtattacagagtgggcatactgggacgtgaacatccttctggaatgcaaacggacacttatgtgcagcgtatggaaaatgatctttacagaaatcttgtttacatgcatcacattttactggaagaaaatctagctgcttgcaagtcttttctgaacaatgcttccccaaatcaggaaactccattatgagaacagtgctcaaaacgcagatggcggagttaagtgtcacctggctctcgtcggggacccaggcagctgaggcgagcagcagatggaagagacgtaaactcaggtgtcctcctccgtagtcggctccgggtagctaagcagaaagaacctcgacactggcaccgagacgccgtcggaggcacacccacacccacaccggaacgcaacatctcgctgcccgcggcctaaggccatttatccccgctctcgacgaattcgagctcggccgatttggcctgat

SEQ ID NO: 434653 - DNA, 1803 bp, Homo Sapiens
  misc_feature (56)..(64): n is a, c, g, or t
  misc_feature (482)..(789): n is a, c, g, or t
tggattcattttgaaatttaataattctaatagtaataagaaacatagtttatgcnnnnnnnnnaatgaaaacaaacaagtaattttgtaaaagtcagaaaacaccagtatccttctgatctcatcctggatttttctgtcagctggaggatgcatttctgaccccatcccagacacgtgaaagcagaagacatgatgcatctataataatgaaagcacaatctaaagagtattatcacaccgtgaacagcttcttcctgacccagagcaaatattaagagaaagacaatatatttacaaacaagatttaataatgctcacaagaatagagtttgcccccaaatggaaaattacacattattttgtttcaaaaagttataaatttagtgcttgaaaaatccagcaggtaagtagaaggactaacagggtctgtttctggaactgtccgccagcaaatgagcatgctctgtcctggaagccannnnnnnnnnnnnnnnnnnnnnnnnnnnnnnnnnnnnnnnnnnnnnnnnnnnnnnnnnnnnnnnnnnnnnnnnnnnnnnnnnnnnnnnnnnnnnnnnnnnnnnnnnnnnnnnnnnnnnnnnnnnnnnnnnnnnnnnnnnnnnnnnnnnnnnnnnnnnnnnnnnnnnnnnnnnnnnnnnnnnnnnnnnnnnnnnnnnnnnnnnnnnnnnnnnnnnnnnnnnnnnnnnnnnnnnnnnnnnnnnnnnnnnnnnnnnnnnnnnnnnnnnnnnnnnnnnnnnnnnnnnnnnnnnnnnnnnnnnnnnnnnnnnnaccacgcccggccaggaagccatttttcatgggagggatatagggagaggaaggcgatatttacatcccactctgcacaactcagtaccgcctattcattttcttgaacttctcataatgatagtcatcagttgccttctcgttagcaggacgcttgcggttaggaggggaccgctcaggctctggcttctccgtgtcacctactctcaagggccgggccttgggctcttctttgtttctccgtatgggcgcgttgagctcctcatgataaaatctgttgtgctgcacataattcacagccatgttggtaggcacgaaggaggtctcgctgtctttcttcttgttctgctgctctgccagcagacgggccttggcatcctccgtggaaatgatattttttattttagcatcgatgcccaggtccacctcaggaatgccactcagcatctggttggaaagcatctcctcggtcttctttgctgaggaaacacggatgttttctggaagttcataaagacagtcctctgcattctttggcttaactttctgttcctcatgttccacgatccctttcctcttctttagctctgtctcaatgtacttcatcatgtctgcatcctcatcccttcggttggtttctgcagaaaacgatgtccccaggtgcaggtcctcctcctcactgatcttatctttgcccctttccttcagtttcttcatatccaccataccacctgtcttcatctgaaagggatcatccactagagtggtctcctcttgtaccttctctcccaccagcaaggccacagcactcaccccgttgggcctcttcctcaagttctgtacctctctggtctcttccagttttaatcgaacctcctctgagtcctgctcatcttcctctgactccgagtcgccccggcggcgacggaaaatcttccggacgaccggcatggtgacaacggccgagttgtacagccgccgcgcctctgcgcagcggcccaggctgcttccccc

SEQ ID NO: 434654 - DNA, 2736 bp, Homo Sapiens
  misc_feature (389)..(450): n is a, c, g, or t
gtgggtgcgtgtgacttttgctggtggtcacttgtggtgtttcgtcatgaagtgccacgcctgcgttcacattgttttcttgctgtggctctcctcggtggttgtttcttacctgtgtatgatgttttcgttttttctttcttatgcttttatggtcgcgtggggtctggtggtgggttgggtaggtagttgttgctccttgtgtttgtgctacctggcgttttcttgctccaggtgggtggccgttgattggccgtgggggttgaattcgtggtgttttgttgtcctctggtggttttttccggtgatggtgttgtgcccaggctggtggctctttgttgtgttgtttctcttggtgcggttctccgcctcttgtgtgtgtttcctcnnnnnnnnnnnnnnnnnnnnnnnnnnnnnnnnnnnnnnnnnnnnnnnnnnnnnnnnnnnnnngtcgcgactggttagtggtttgggcggcggagaagtgttggcgacgcgagtggtggcgcgagtcgtgggcagcagttggtggggagggccgggcgtgcgctggcaggcggggaggggggagggttggagacgctgcgggagcgagggagtcgtgggaaaggagggcacgagggaggcgagagacatggcggagccggatgcgaaggacgcgacagcagagagagcgggggcgatagatgagtgatctgagagaggcagcctgctgtgtaaagatgaacatggactttaaagtcagatctgcactttaataccgggtctgctacttgagaatttcggagttttctgctctgtagataggatagaacatctgctttgtaggtagttgtaagaagttttaaaattatttactgtggaaaccaatgtctaagagcttcaatttctctaaaaaaggaaacagggtcacctgatgagggtggggtatgggattaaggacagcagtagaggtgtaaaataactgccatggtaattagagaaggaaatggaccaggaacccataaaggtgtgtgttggtgtgactgcgtgttggtgtgaggacttggctgaggttggaggccttgaatatttagtggcattcattacacaactgtttttctctagcagtttgaatgaaggaatggaaaagacagaataagtggaatgatacaaaaagatggccaatggtggcaagaaaatggggtgatggaatgatatgctatccaggctgctgaatacagaagtatattacacaaagttggggggcgggggaggcaataatgagaaaagaatggagaggctggaattagaaatcacagaatgtactcaatgggaccaatgtggggcagatgatagaaagctggatttaggagtttctagacgagcagtgaaacattaacgtagcattaaagaagtcccgaagatttagttttatccctttttatcataaccattgccatctacttctcccttcagtttctcttcctcggatttggctgcattgcagaatatggtccccagctctctcccttcctgattgcccgtgaagacaaccacacagacctttgttcaaaggttttactgctcatcctgagaagactgtacatactaagaaagtaacaacctggggaaatggctgaagttccaaaagactccagacttcttacaggtttcatctctcttctgtggccactaacttcccaaggaggcagtgcccaaaagccctgtggttttttgatccgttgtacttcgatagctcctcctttccctagatccagcagaactctagacatgtaagacatagttcacaaaacaacagttatgaaccaacaaatacttggctcacggttatgagccactgaagtcagtcagacttaaggacaactagacagagctcccattttctgtcatctgggcaggaaccaatctcctgttgtataaaatgaccttctggtactttctggaatcttgcttcctcatctgttaagtgaggttaatagcgcttattcatagttttgttgtggagatgagctaggagcatgacatattacccgttttaaaattgtacacacagaccctgctttaaccagatgcctgcaaatgctcaggttttccttctacatatagaaaacaatttctcagctgccagggctgaagccagcagatatgcactaaacgacagaacaccggattgtgccaataaagtaggcaaagcttccttgcccagaatataaatcaaactgagtaaaaactgggtatattggctccaggaaaaggagcaaggacacccagctttcaggcaacctcgaattctctctgtttaggattcaccaaccccaaggtccaccgggtccttcaatctgagggtccatccaaggccttccttcctggggttgggtatggctagctgcctgatggagagaccccaggctgttcagcagcaacgcctggcacagccgaggcagcctcgtagtctgcgatgcggcgctgtaccagggcaggcatgagctgcacgtaagcggccatgaggcggtggttggaatggatcagcttcccagcacagctgtgcagacaggcctcctcctcagcgtccagagctcggtggtgcaagctgggcacacagcgctggaagcagagttctgtcatccgattgtagaccaacaggaagtcacgcaggtttcgcagttgctgttgctgctgctgctgccgctccatcacgccaccggcgcatgccgtacgccacttccgtttccc

SEQ ID NO: 434655 - DNA, 1068 bp, Homo Sapiens
caaaaagcccctggggggttttttgaacccggttggacctttggataagttccctcccttttcccctaggaatcccagcagaacttctaggccaatgttaagccatagttcccccaaacccacccggtttatgaccccaacaaatatcttgggctcccggtttatgagcccactgaagtccagtcagacttaagggacaactaggccaggagctcccattttctgtcatctgggcagggaaccaatctccttgttgtataaaatgaccttctggtactttctggaatcttgcttcctcatctgttaagtgaggctaataccgcttactcatagttttgttgtgaagatgaactaagagcatgacatattacccgttttaaaattgtacacacagaccctgctttaaccagatgcctgcaaatgctcaggttttccttctacatatagaaaacaatttctcagctgccagggctgaagccagcagatatgcactaaacgacagaacaacggattgtgccaataaagtaggcaaagcttccttgcccagaatataaatcaaactgagtaaaaactgggtatattggctccaggaaaaggagcaaggacacccagctttcaggcaacctcgaattctctctgtttaggattcaccaaccccaaggtccaccgggtccttcaatctgagggtccatccaaggccttccttcctggggttgggtatggctagctgcctgatggagagaccccaggctgttcagcagcaacgcctggcacagccgaggcagcctcgtagtctgcgatgcggcgctgtaccagggcaggcatgagctgcacgtaagcggccatgaggcggtggttggaatggatcagcttcccagcacagctgtgcagacaggcctcctcctcagcgtccagagctcggtggtgcaagctgggcacacagcgctggaagcagagttctgtcatccgattgtagaccaacaggaagtcacgcaggtttcgcagttgctgttgctgctgctgctgccgctccatcctcgtgccgaattcgccacccaggcctcgctc

SEQ ID NO: 434656 - DNA, 470 bp, Homo Sapiens
  misc_feature (362)..(362): n is a, c, g, or t
tctttattgctaatttcacaaaggcaggaagtactaagagagtaaattggggaaatggtcaacattcctgaattcttagaggcttgtctttgttctgttgtcactgacctcctaggaagcagtggctaaagcctaagggggtagagttttcttcctgcttttgttgtttggttttaccttcttcccctaggttcacagcaattctttttgacagctggcgcggccgaggcagcctcgtagttcgcgatgcggcgcttggaccagggcgggcatgaggtgcacgtaagcggccatgaggcggtggttagaatggatgagtttcccagcacagctgtgcaggcaggcctcctcctcagcgtccnagagctccggtggtgcaggctgggcacacagcgctggaaacacagttctgtcatccgattgtagaccaacaggaagtctcgcaagtttcctcgtgccgaatcctgcag

SEQ ID NO: 434657 - DNA, 1745 bp, Homo Sapiens
gtttatatttgtaggcacaatttattttaaaatccacacaagaaacccagaaatgcagcattatcttcagacatcacattctagctctgtttaaataccacatatgctaaaaaccgacgccaggacattctctaaatgagttacaaatcagtttctggaaaggaagtgctccatgaaaagcttatagcaagataactcaggctttcaggtggagtatggcacgtgaattagccttacagtaattgtgtacatagtatgtttagtcattattgaatcaaaagtttcaggaagtaccttttttaatgcatacgctgagagaaccgtcaatatgcctttgttcctgctgagggatctgccattctggaggtacaaatactgcagatagaatatcaccgcaggactacgtcaagttcagagtgttcaggatcatttctatataaaactacaattagctgaactatggcaaaggtccttgaacataaagcctttcttcatttcattgcatcttaataagtagaatgccactaccgtaaatgctgcttatatgtattttattcacatataagttatgatttttctaactaccctctgtagctataaatttttcccttcctgaaaatctctcttccacacctgttctgcttgtccctttgttccctaaagcctgtattttttctttaaggggatctattttcctttgaaacaattgctggaaagccagcctcagaaaggtaataggaatgtttttcctgtattttgaaacaaaaaattttccataggaatatccattcaatcatagaacagaaatcaataggaaattagggcatggtcaacaggggtttgcttgaaaacctgtattctatgaaatgtggaatcctgccatggtgccacgcaggtgtaacaaggtgaggacaatgcattcctaggagttttccagcttcttgcagggtgaggaccatccacactggcacttgctctggcttttactcctcagacacctgtggccctgcaggagcatcctgtaagccttccaactcacttcgctttcaagagattctttctttccttccccggaatcttcaggattggaatccttttgagagatacctacttcagcctctggttgctcttcatttaacacagttagaattgacatcaagtttgccgtggttttcctcttgtctcttttctttggcagcctcctaactgttgcttttcgtaaatgtccttcagattcttacagattttcttatgagtaaatccagtgtgttttctggcaggtttgatcacaatatattaccattttgcaaactgaacatcttttacttgctcccttttctccacaggtagtgcaaaattccacatccacaaaacccacctggccagtgatggcttgggtaaggacggagaatgcagtgggatcagaaccaatttcaacaggagcaatgcttcgaaccagctgctggaggagtgtagcttcacagtaaggaaattttctgatactttctctaatgatcttttcttgatacactggaaagccatcagaagctcggccttttaacaagcttttgatcaaggtgtccagtttattctctccatcttttaagaagttaatgcatttctgaaagatacagcttatgtaatgcatcttcatagccaatacttcattcatgtctctttgcttcatacatttctcacaaatcaaatccatcactctgtagcatttattcagggctgcttcttct

SEQ ID NO: 434658 - DNA, 976 bp, Homo Sapiens
aaaacaaattgagggggcctccagccccattttctgtgggggaacctgtagggtttttcccctggggtagaaaatttttttcccccagtgccaaaatttctcaaaagccccattttccccaggggaaataagggtttaaacccgtgaggaaattttccaactccagggtggtcccccccagtcccaggaggtaatttaaaaggcccaagcttcttccccaaagccaggatgttcccccggtccctttaacagccagtgaaaagggagaaaatgtgtgggagaaaaatccttcctttccctttccgttttccgctaactgtaaggaaccccgaagtttcatagagtgtgtcgcctccaaacattgcaccgataaacactccatctggttttaaaatataatgaatctgctcaagtgctctaggaaggtcattcacccaatgcaaacttaaactgctaaccaccaggtcaaatgtattttctttgaagggaaggaattcttcatcagctaaaacgctgacagtaggtatttctgtttctgaggaatttttcaaagcattttctgcaatgtcagcttggaaaaactttccaatagtttcctgcaatggaataactgaagcttattcaaatattgtgcaatgtaacctcttccacaaccaagatccaaagcaagggggaaatttctgggtatgtcatatacacggtctgcgatccgacttccaacctcctccttcaggtagtcaaatttggtcggctcgggctgccgggctgcccagttcttctgtttccttttcaaatcccggtcgaaaatattcagggttctgggcgaggtgctaccgcggggagagacaccagaggtgacttccctacggccaagattctccgctgggaccctcgccgcccaaggtcgccgacataagcgccagagccctgccggccgcagcatctccagctgcgaccccaattgccggcgcttttt

SEQ ID NO: 434659 - DNA, 456 bp, Homo Sapiens
ggcaatgttgatcatccctttattttggggggctttacttttcagcaatggcaggtaagggaaaacagggtggctgcaaaagctttctgggcctgccagagtaaagccaaaaccccaagcaaataaaaagatcacagcaagcaagtgaggtctggacctgtctgagttcttggaggtcacaggtgggcgcagagaaggcagttccatgagtacctttagttcccagcacacggtggctctgcagtagtgaatgaagtctagcacagccaccgcccccatgcccaggctcaggagcacactgaggtcgtccaccaacagcaccgggtacgtccaccgagcctctccactgtctactggcttcagggccctccgtacaaactcaaacaatggttcaagttcccagcattagcctccctgagaaactgcaaggggtgggctccttttgagccctgaaga

SEQ ID NO: 434660 - DNA, 958 bp, Homo Sapiens
cccaccatcacatctttggtgcctagaagcaggatggaaccggtccggaattcccgggatgcgcgagccgggctgtcgggtgtgttttgctctccatcctccgtcgtctctgcagcactccgggttctcctccagagcgctagtcccaggagctcggaatgttcgtggaacttaataacctgcttaacaccacccccgacagggcggagcaggggaaactgactctactctgtgatgccaagacagatgggagtttccttgtacaccactttctctccttctatctcaaagctaattgtaaagtctgctttgtggcactcatccagtccttcagccactacagtatcgtgggacagaagctgggtgtcagcctgaccatggcgcgggagcgtgggcagcttgtgttccttgagggactcaagtctgcagtggacgtcgtcttccaggctcaaaaggagccacaccccctgcagtttctcagggaggctaatgctgggaacttgaaaccattgtttgagtttgtacgggaggccctgaagccagtagacagtggagaggctcggtggacgtacccggtgctgttggtggacgacctcagtgtgctcctgagcctgggcctgggggacggtggcatgtgcatagaacttcattccactactgcagagctaccgtgtgctgggaactaaagggaaacatggtggtccttgtgcacgacagtggaagatgcggaggatgaggagaatgacatcctgctgaatggctcagtcatcagagccatctgatactggggctgagggcctgcgcatggcttctgcagggatgtgcacgggcacgctgaggacatctgtgcaggagaccattgaggcccgcgccaccggggatccgagcttcactttccagtcatagacaccgggaccacagcgtgtcctttaggcaaggactgctctgcgtcctgggc

SEQ ID NO: 434661 - DNA, 1253 bp, Homo Sapiens
ccagtgtggaaacttactttattccagccatgattatcctagttgtcaccttgcacacctgccatccggtgccatctcctggctggcacatctatacccactctggctctgaaaggcttgtcaaccaaaaatgggcagctggggctaaggcatatttaaacaaaggctccaaaggacccctttcacttgggtctagcatccagcctctctctcagcaaaggcaggattgtggtcccttgtgttttctgaacagggcccagggcagccaaggcatgccatcactgcagcactcaaccctctggtcacagtggagtcgccggtccagcctgaaatattactacagaggagaaagacccattcttgctatgttgctctatcttccacgtccaaaaacagtcctatgtagcttcagctgctccgaaatcaggtcacagaacagcaggagacattcctttggcaaaaaaggacacgcttttgtcctgtatcttatactggtaagtgaagctctgatcccggtggactgcgggctgcgatggtctcctccacaggatcctcagctgcccgtgcacatccctgcagaagccagtggccaggccctcagcccgcagtatcagatggctctgatgactgaggccattcagcaggatgtcattctcctcatcctccgcatctccactgtcgtgcacaaggaccaccatgtttccctttagttcccagcacacggtggctctgcagtagtgaatgaagtctagcacagccaccgcccccatgcccaggctcaggagcacactgaggtcgtccaccaacagcaccgggtacgtccaccgagcctctccactgtctactggcttcagggcctcccgtacaaactcaaacaatggtttcaagttcccagcattagcctccctgagaaactgcagggggtgtggctccttttgagcctggaagacgacgtccactgcagacttgagtccctcaaggaacacaagctgcccacgctcccgcgccatggtcaggctgacacccagcttctgtcccacgatactgtagtggctgaaggactggatgagtgccacaaagcagactttacaattagctttgagatagaaggagagaaagtggtgtacaaggaaactcccatctgtcttggcatcacagagtagagtcagtttcccagccgttgagaatatgcgagatggcccagaagcccactttcggcgggcccaagcctccagtccaatccccgggtcgat

SEQ ID NO: 434662 - DNA, 895 bp, Homo Sapiens
  misc_feature (143)..(143): n is a, c, g, or t
agccctttacttccccaagaaactcgaatgaccaggggaaggtgaaagttgggtggagctgatggtgatcccagacactctggttcttgcgcatggtgtcctccatgcagtgaggtgtgtcccagctgtgttggcagtgtgcncagggcagctctttctggaaggactggaacaggtagtatgtggcccaggccaggatgacgatgtagtagacattcaggagggacacaattacaacggaggcatagccgataccagagaacaaggggcagatcttttcccagcaggtgatgcccccttcagaggtgtactggcctatgatgatctccaagaaaaacacaggcaggccgctcccaaacaggaaaataaaatacggtatgagaaacgcacctccaccattcttgtagcagaggtacgggaagcgccagacgttgcccaagcccacgaagccgccagccacagagagcacaaagtcgatcttgctagaccacttctccctctgcggaggttttccctcagcctcgtcctcaggccgcgtgcctgggctcttccctggtgagggcttcaggatgtccttgtggaaatctttcagacactgcagcttctccttggtggccatctccttgctttgtttgggagctcctcagaagggctgtggttctggttctggatctggggtggctgcggcgccgcccgcgctctgctcggctgtgccgggttccgccggccgggggctgcctgcccgctcgctctctgacccgctgggtgaacgctccgcactccctcttggcgcagcttgtcctctgggcttgcggtcctcggggctcggcgttggcggcggcgcgaaggaagcggtaatttataagcggcttcttcctgacctcgcgtgtctgtt

SEQ ID NO: 434663 - DNA, 824 bp, Homo Sapiens
tcgggaagacgtcaaactgatcaatgcctcctcgagagaaccctcagccctttgccagcaaactctgtttttcagggcttccacgaacttctcccggatcttctctttcttgtccagttcggagaactcgatcctctcctccagggtgcagctccggccgatgggcgagatgttcagcatgccatttcggaactcgatgaaggttccactggtggtgagggagggcgggggagccagagagaaccagaacggccctgaattcaaatctagccccacctgggaccccagcctcctaggacttcaaaggggacaagaatccacactccccgcaaaaaatcaggggcccaagtatctccaggttccctctgagggacccacacttctcctccctcaggccccaggttctggagaccaggctggtgggacctcaccgcttcttgggcagcctgagcagggccatgtagctgaggcagaagttgatcaagtcctgcagcagctcctcccccaggtggttctggatggtctgcttggagagcagtcgtccgtgcttatactgcaccgtcccgttctcggcaaacacataatcaaacttctcaatgacttcatccccgtcacccagctgctcagcgatcttacagtagtcagagccgcccaccacaccgatctgcactctacttcgtagcttctgcaggaaggcggccacctcagggtcaattttctggcgagccggcgtgagggtcccgtccacgtcaaacaggcagaggacgcgctccttcctgcgggctgcctgggcggtgactgccatggctgcaggtccgcgcgcg

SEQ ID NO: 434664 - DNA, 1948 bp, Homo Sapiens
  misc_feature (500)..(503): n is a, c, g, or t
  misc_feature (506)..(576): n is a, c, g, or t
  misc_feature (578)..(580): n is a, c, g, or t
  misc_feature (1864)..(1900): n is a, c, g, or t
gccccccccgggttttccaccccaaggggccaacaaattataaaacgcaaaggggcgcccaagggggccggaattccccgttgggcgaattcgggggtttctaccaaggcccgtcttggggaggggccgttcccaaatttgggccaggggaaggcccctaaaggaaattcccccacacgttccttccaatgaaattggcagaggccggggggggtaaatttgatatatcgaggcttcgcgtggggctttctcgttggaaaggattcacagtaaagcgccctcaggaactctcactttggggattgtttcaagaaccgcttgcggttcctcccggggcggttttttaatggtgggagatccacagccctcagttcctttccacgggtttctctagggaacacgggtaaggccacagtttcccctatcctactggggcccgccgggcccaaagaaatggtttagagaagctttttgagggtgccgagggcggccggcaaggnnnnaannnnnnnnnnnnnnnnnnnnnnnnnnnnnnnnnnnnnnnnnnnnnnnnnnnnnnnnnnnnnnnnnnnnnnntnnnttgttctgggaactttaatactgtgacaaagttctctaaaataggcaccttccccaccgtacctcatcgcccagggcaggcaggcagggcaggctagatctcgtaccgatacttgagcacgcctcctcctggtgcagaaagaaacctcttctgtaccgaaatacaagcagcagctgtggcctgggccaccaggtggagcatggggaacactctgggccctgggaggacgaagccagtgccactaggagcagactggctggggacggttgtccacacagactctggccccatctgggtgggcttgcagcaggcgtcctgggccagaggaggggccctggcatctatccaacaccaggacctctctttaggcctaggccaaactcttcagaagtcacgacacacagatgtgggccccggtcacgcctcatgagctgtctctgggaagaaaatctcccggcatcgctgcaccgtgtcctgaggagacaccacgctgtggccaacagtccgggggtcggcaaagatctcaaagtcgttcccaccagggctagtctcgttcccaaagaagtggatggtgtcgaagctgtcctggtccaggctatccaggcagtagcgcttgtcccagccctcggggaagacgtcaaagctgatcatgcctcctcgagagaacctcagccctttgccagcaaactctgttttcagggcttccacgaacttctcccggatcttctctttcttgtccagttcggagaactcgatcctctcctccagggtgcagctccggccgatgggcgagatgttcagcatgccattccggaactcgatgaaggttccacgcttcttgggcagcctgagcagggccatgtagctgaggcagaagttgatcaagtcctgcagcagctcctcccccaggtggttctggatggtctgcttggagagcagtcgtccgtgcttatactgcaccgtcccgttctcggcaaacacataatcaaacttctcaatgacttcatccccgtcacccagctgctcagcgatcttacagtagtcagagccgcccaccacaccgatctgcactctacttcgtagcttctgcaggaaggcggccacctcagggtcaattttctggcgagccggcgtgagggtcccgtccacgtcaaacaggcagaggacgcgctccttcctgcgggctgcctgggcggtgactgccatggctgcaggtccgcgcgcggggcggagtcccgaagaaccgctctcgacgaattcgagctcggccgatttggcctgatnnnnnnnnnnnnnnnnnnnnnnnnnnnnnnnnnnnnncggccgccaccgcggtagagctccattcgcccatagtgagtctatcat

SEQ ID NO: 434665 - DNA, 1234 bp, Homo Sapiens
  misc_feature (82)..(83): n is a, c, g, or t
  misc_feature (141)..(141): n is a, c, g, or t
  misc_feature (262)..(262): n is a, c, g, or t
  misc_feature (308)..(308): n is a, c, g, or t
  misc_feature (324)..(324): n is a, c, g, or t
  misc_feature (340)..(340): n is a, c, g, or t
cggcccccttagtttcagtccaaaaccccatttttggtaaatatggaaggaaaccagaacccgtggacttggatcccccgtnngaacccaaaaatttccatctggaaatggcaatggaatactctgacgcccgaccggaanccttggtgaagcccttgggcgattggtgatcaccttctagatccgtgaaagctggctgcccccccatcccggcaagcagggccaaggtggcatctcacatttcctggacccaccccagtancagcagcaggtatttcttctggtaaatgagagcctttcgaaaactntctgccctcaagtatntaccataaattctctntaaagtgacatgttcagaatcagggctcagagtttgaagtaaagagtcatttcttagttcagctttcagtttgtatacttcagcctctgcccttttcaaagatttctggagagtcaatttttctctgttccatacttctttttcagaggcaatgatggcttcaatgttggcaccaccattcaatgaaaacctggaagaattatctctaccagctcctgtctgtcgataccacctgatctgctcttccagcttcataaccatgttccttaagtcattcttctcttcagtcagttgactgatatgccctgtcagctcagcattttgtctcagtagtctttcagtcaatgagccacaagaagtacttggggacaccaagctgggctcttcaccttgctggccagttaatttctgtagttgtaaaataatttcatcaatattttcctgaacccaaatgaaatcttcatcatctgctgtttcaaactgtagtctctcagaggctttctggggtagaacctgtagttttgaagctacacattgaagcttttgtctgatcatttctaattcatgattacagccggttcctcctccattcatttcaatcaatttagcgtagtttgattcttttgtttctccttctattttctgttgaagaacccaatttctagttctatcactggttaagctccacgtggttggctcattaaggttctgatacagaattcttctactttctcgtttttcttctcgttctagttcttgcttctggaattcctgcatgattccttgtagtcgctgtccttcaaggtctaacttataaacttgttgtcttttctcttccagctggcgctgaagatcttccactttggactggagctcatgcatttttttctgtcc

SEQ ID NO: 434666 - DNA, 1216 bp, Homo Sapiens
  misc_feature (103)..(103): n is a, c, g, or t
gaaaagctggaaggaggaagagctgagctggtggttaccccatgcccaggagggccaaggcaaagaagcctgcagccccagagatactgaccctgtctccctncctcccgggcacaactgaactaacggaatggctttaatcagatagctcgaagaactgccactaccactccctccctgcccactcctcccaaagtccacctgttcccgcaagagtcccacctcacaagcaaccaccagaggctgatacaaatggccgctgtatttttgctaaagtgacagtgacacagataaggcaaagagctgaggggcaggacacatcagatgggaagggggagaccgtgcaaaatggcagtctaacagaaaatcatccttgtaccaacagccccttccctcccaagttaggtgagcccttgggccagtgtatgggcagaaaagcagatttgtgtccttcagaagggaaatgtaaaaaggtgaaagctctagttgaagggcagtgagaggggctggagtgggagagaaggtctctcctggccggtggtctgggtgcagcaagggcactctgagaaggcagaatggaaacgcagggctggaggggcatgggcacaggtttgggggctctttccagcctctactatgttgcccccttccccaaagcccttacaggggcagaagcacattccccgtgaccctgagtctggcctcatttgggaagtcttctggggtgtatggatgcctgtgtgtgtgagtgagatgggtggggggccacggctatctggctctagcacactcatgggagaccagctctgggaacaacaggatggggtgctgggatgggggtttaagaggtctctgctagatatttctgaactgacctccccaggtgcccaacctggccttgggaagagagtgcctagggcagcggggatggaaacccttgcctgcagcataggtccaggcctcatggccctacaccttgacctcttgactttgttgcctggccttaagtacaaagattcctcactgcgtgctaagaaatacagatccaggccgggcacagtggctcatgcctatcatcccagcactttgggaggctgagatagcgaggatagcttgaggccaggagttcaagactggcattggcaatatagtgagacctccactccatacgatacccaaagtagtctgggcatagctcgtgcccccctaggcacag

SEQ ID NO: 434667 - DNA, 777 bp, Homo Sapiens
  misc_feature (231)..(261): n is a, c, g, or t
  misc_feature (429)..(429): n is a, c, g, or t
aaaaaggggggccgtttttttcacccagaaaaggtccctcccctgtgtgagcgaaaaaagggcccctttttccctttctcccaaattttagggtgaagccccttgtgggcccaggtgtttttgcgccagaaaaaagccaaggttttggtgttccttccagggagggggaaaattgtaaaaagagggtgaaaaacctcttagttgaaagggccattgaaagaaggggcctgnnnnnnnnnnnnnnnnnnnnnnnnnnnnnnngcccggtgggtcctggggtgcagccaaagggcattctggagaaagggcagaaatgggaaccgcaggggctggagggggcatgggccacaggttttgggggctctttcccagcctctactatgttgcccctttccccaaagcccctacagggggcagaagcacatttcnccgtgaccctgagtctggcctcatttgggaagtcttctggggtgtatggatgcctgtgtgtgtgagtgagatgggtggggggccacggctatctggctctagcacactcatgggagaccagctctgggagcatcaggatggggtgctgggatgggggtttaagaggtctctgctagatatttctgaactgacctccccaggtgcccaacctggccttgggaagagagtgcctagggcagcggggatggaaacccttgcctgcagcataggtccaggcctcatggccctacaccttgacctcttgactttgttgccctggccttaagtacaaagattcctcactgcgtg

SEQ ID NO: 434668 - DNA, 548 bp, Homo Sapiens
  misc_feature (442)..(442): n is a, c, g, or t
  misc_feature (525)..(525): n is a, c, g, or t
caaacctgtacccatgcccctccagccctgcgttttccattctgccttctcagagtgcccttgctgcacccagaccaccggccaggagagaccttctctcccactccagcccctctcactgcccttcaactagagctttcacctttttacatttcccttctgaaggacacaaatctgcttttctgcccatacactggcccaagggttcacctaacttgggagggaaggggctgttggtacaaggatgattttctgttagactgccattttgcacggtctcccccttcccatctgatgtgtcctgcccctcagctctttggccttatctgtgttcactgttcactttaggcaaaaattacagcgggccatttgttattcagcctctgggtgggttgcttgtggaggtggggattttagcggggaacaggttggatttggggangatggggcagggaggggagttggtagttggcagttttttggagctatctgattaaggccattccgttagttcagttgttgccngggagaagggggacagagtcagt

SEQ ID NO: 434669 - DNA, 676 bp, Homo Sapiens
  misc_feature (566)..(566): n is a, c, g, or t
ccttcccaaatgagctgataaaaaactgacgtgaggctgctttgccttcaataatacctagttttcagctgttccaactcgtttccaaatagaaattagctggaacacactacagtaatctcaaggaagggaaaattaggccttaaaagataccaagaagtcagcatggtacccaattgaaaccttttgaccttagtgggaattcattctatttgcactaaaagccttaacttgctgtattcaaagtccctcttaactgtgagtttctatagaactttactttttccactagtgcacagagagagaaaggttatcttaatagtcggtttcatggagatgaaggatgggagattaagaggggggaaatgatttttactggcagctatattccctctctgttctatttgctttaacaaagggataaaacctggcaaagtgtacattattggaggactcaaatctgtatgtgacatgtcccaactactgtccgctaactagttatccaaattgtaaagctacagaagcccagttgaggggtaagtgtgcctggctcacacagcctgcanccctgtcaccttcggcaatgagccagtgtggggcactggggacttctaacccttggattgctctttttgacctgtgcataccttctttgttatatttcagaccgtgagtc

SEQ ID NO: 434670 - DNA, 1778 bp, Homo Sapiens
  misc_feature (701)..(711): n is a, c, g, or t
  misc_feature (1469)..(1469): n is a, c, g, or t
  misc_feature (1471)..(1471): n is a, c, g, or t
  misc_feature (1479)..(1495): n is a, c, g, or t
  misc_feature (1528)..(1528): n is a, c, g, or t
  misc_feature (1531)..(1531): n is a, c, g, or t
  misc_feature (1583)..(1595): n is a, c, g, or t
ttttttttatggggaaattttcttcatttttaatttacagcagaaagaatataaagcattcagaaaacattttccatattttaagggcaattcaaaacattttgcatggtttccagcagctgagttcttcaacagatccattgattcaatgatgctttacatgcacaattacaaaaataaaacttacaaaaaaagaagacatctagactagttttacatgcaagtctcagggaccccccattgggcgccaactactgtgtggaactgccataagcgaccgtgcagccagagaggggttcgtattattgtctttatttcgttcacacagtacagctgatttcgaatggggtaacaatagcaattaaatcttcaggggataggataagattagctattaattttataatgaaatcctactcctggcacttgggaattcagattatccaagaagctgcgcttacctatcatcttatattcgaaattaagattcataaccaagaaaaagcggtcagaaatgcttcgtttcagtggaagtgcatttttgcctcgcctaggattcacagttgtactggtaggttacactggtaggctttaaacctacttcctatcccctccatgagaaccctcttaattctatggaagtctctaccatctgtcattttctaacgtattcagctaataatgtaacatgtgaaacattnnnnnnnnnnntgtgagggttaaagcaaatccactgaggtcattactctggttaaaacatcagttatttgtaccataataaatggaataaagatatctaaattcagtattaatagaggatattctgaaagagctggctttcacgttctattcccatttatgaatgcagttgtgtttgtaaattactcagtgtcctcctataggtcaaattgtgtaaaataataggtatctgggggactgcaacagctgcaacataacccacacatttaaaaacaaaatggagtcaggtcagtttacaaatgtacaggtggctactagttgtggggctgtcactgttgtcaaagctgatcacaagcagaaagacatatactgtacagtaattcgaggttggcagtgaaaggaagtaattaaaaaacaagtacaattatagaaaaggcaccaagagcactgaccccagtttttaccacaatctttttgtatctaccttccttccaaagacaccagtttaaaagcttatttgtgaatatttttaggcttcacaacaagccttgagttttaactcacagttggcagccagaaccaagaaaaaacatctcagctttacaccaactgatcctcagacgtaacctgggaattttaaactggcatcagcaaatacgaactttattctctcaatttaacattagcagtttaattgttaaaaacatcagatttctttggctcctcattatgtggaaatagtaatataccatgccgtctctaaaagaccngnccgcatcnnnnnnnnnnnnnnnnngtgcaattttattatattttctgatttccagcnggngatatggaaacgtgacatttttctacttttcatactatttcttttgtcaggnnnnnnnnnnnnnatcattctaagtgttctttgttggagtgagtggatggtgttaagctacatactgattcatcttatgattatctgttttgcaaaagtaacttaattttcttaagcagtattagcattcacattacttggcaccattggcaaaaaaattttaaataaaataaactaaactcctggtagccaaaat

SEQ ID NO: 434671 - DNA, 1311 bp, Homo Sapiens
ggtacaacagataaaagtctactcctggggagagctaatcagtcttaacaagtaccgtgggggacacttgccgaacaagagaaatcaagagatagggttaaaattaggggagaaaccgatggcagtcatctatgccagctaggttcatctgtacagtcttcagatttcttatagatgaatcatcaaattctataatgttactacttctctctcagtttatagtaaactttcctttgaaaaagccaaccttgcctgagaagaatggtctaccactaggtcagcaaaggtatggaactctcttttgactagtggtatggcggtattagctttgtaaacaaccagtctaactgatgcaaataaagataaatgaacagtgggattggagaggggaaaatcacaatttttgcttcctcagcattcatgacttctttggcttgcatagattttgtttttctttattttacaaatgagtttccttttaatgttgttccactttgcatttcaaatttcccttaagcatctaaaaatgttacaaaatagtgtcattacctttcaaattaaacatcaaattagccagagaagttgagttgtgagtactccaccaagcaaaatattaaaaaatgaatttcaacttggtgatcccacctagtgaactaatgggatataaggaacctcttacgtcccagacaccatgcttagcattatgcacagttatccatttaatctcacagccttgcaagggggtattatatccactgtttgagggcggagaaaacaggctcacacaaagtagtagcttccaggggtctcacagttaatattaatgaaaggcttgggcttatacataggtgtttcaggttccacattgcaaagcattatctcagggacgatctatggcatgcgcatcccgataaaaacgtaccaaatttattggctatcaactacagttccatctggaaatactcagcaaataatggcagtaaggcatcccgccacttcctgcatgattagttgaaaaagaaacacctgcgcacacacatttgaacaatgtgatacagctaaggacctggacagtcagctagcaggaagaaacatttgaacgaagggtagaccacggcctaggaggtggatgaagacacccgtccgtttgcctactgaagcaagatggggctgaggcgctcaagggcctattggctgcccagaagcctttgcagcgccgcctgaatacagcgaggatgacccagggttcaccttcagcgttgaaggcaagtcctggtataagggacgcacatagggccgctcccacttcag

SEQ ID NO: 434672 - DNA, 2268 bp, Homo Sapiens
  misc_feature (1855)..(1867): n is a, c, g, or t
  misc_feature (1936)..(1953): n is a, c, g, or t
  misc_feature (1955)..(2027): n is a, c, g, or t
  misc_feature (2095)..(2215): n is a, c, g, or t
agcggggggatgcccgttcgctcgggatcaggaacggtgagctcctgggaccgcaatgccctgagaacgcagccgggtgctgagcctccggagtccggtagctgaatgaaatacgcagggatcaccagccggacccaaatcttgcgtccctgccagcatcctggagtcctaagaggcagggattggagcggacaggatctcagaactctggtcccgggcgcacaaacggcggagtcgctgttcctggtgctgaaactctcagtcctggaagaacgtggccgcctgcccgcctggtaccgcgccgcggccgctgcggggaactgtccagtgctgaaaacggatgcggcccggcccgcagagctcagacccaagcctgccgcacccagcggagctcgaaccgagctcctggaagcgctgacgcagagcgcagggagagccggagcggcgagctccaagcctggcatggacctgcagagacccgattcctaccagggaggagctggccctgacttcaacgaccacgtcctgcataagaccatcctggtgggtgacagtggtgtgggaaagacgtctctgctggttcagttcgatcagggcaagttcatccccggctccttctcggcacctgtgggcatcggattcaggaacaaggtggtgactgtggatgggcgtgagagtgaagctgcagatcttgggacaccgctgggcaggaacggttccgaaggcgtcacccatgcttattacagagatgctcaggccttgcttctgctgtttgacatcaccaacaaatcttctttcgaccaacatcaggggctggctcactgagattcatgagtattgcccagagggacgtggtgatcatgctgctaggcaacaaggcggatatgagcagcgaaagagtgatccgttccgaagacggagagaccttggccagggagtacggtgttcccttcctggagaccagcgccaagactggcatgaatgtggagttagcctttctggccatcgccaaggaactgaaataccgggccgggcatcaggcggatgagcccagcttccagatccgagactatgtagagtcccagaagaagcgctccagctgctgctccttcatgtgaatcccagggggcagagaggaggctctggaggcacacaggatgcagccttccccctcccaggcctggcttattccaagaggctgagccaatgtgggagaaagatggaggactcactgcacagccgcttcctagcagggagctatactccaactcctacttgagtttctgcgggtctccccgcattccaccgggaagggtaaaacacttagcttttattttaatagtacctaattttataccaaaaaagggcgcctggatccccaaaaaaccgaggctgggagctagtggcccttttgctttctaggacttggggggccggccctccctcctaagcataacaaaggtggtgttgctccagctcagccccaggggacacagatgcactttgggggtgagggcaggtaatgactccatcgcaccctcagttcagctggacagaggctcaggtgaccccagccttcactgtctcccgctctccaggagcttatcttcgccccatctcccaaataagtgggcccttgtgctgtgaggaagaccaaagcctcagggaagataagagatatggagatgggagggggaggacaaggggcagagagtagggtctagctggctatctctggccttactaacacccccctggaggcatgccccttttctccagcacacaagcacattggggcacctggaaatattggttccaggctcctgttctctggacttcagatccctgggggagnnnnnnnnnnnnntgaatccctggcttagctaccttcctgcctgtgcacctaaaaacctcaggtcagaactaggaaaagagnnnnnnnnnnnnnnnnnngnnnnnnnnnnnnnnnnnnnnnnnnnnnnnnnnnnnnnnnnnnnnnnnnnnnnnnnnnnnnnnnnnnnnnnnnntggggctcaagcgatcctcccacctcagcccccgaagtagctgggactataggtgtgtaccatcacannnnnnnnnnnnnnnnnnnnnnnnnnnnnnnnnnnnnnnnnnnnnnnnnnnnnnnnnnnnnnnnnnnnnnnnnnnnnnnnnnnnnnnnnnnnnnnnnnnnnnnnnnnnnnnnnnnnnnnnncggcagaaagcaccctgccccagggctagaaggtggtctttatccccaatccc

SEQ ID NO: 434673 - DNA, 1162 bp, Homo Sapiens
  misc_feature (83)..(83): n is a, c, g, or t
  misc_feature (88)..(88): n is a, c, g, or t
  misc_feature (90)..(90): n is a, c, g, or t
  misc_feature (138)..(138): n is a, c, g, or t
  misc_feature (148)..(148): n is a, c, g, or t
  misc_feature (179)..(179): n is a, c, g, or t
  misc_feature (190)..(190): n is a, c, g, or t
  misc_feature (206)..(206): n is a, c, g, or t
  misc_feature (267)..(360): n is a, c, g, or t
  misc_feature (388)..(388): n is a, c, g, or t
  misc_feature (397)..(573): n is a, c, g, or t
cagggggaaagaaatctggccccccttgggaccccccaaaaggggccggggttttttcgcccccttgggcggggaaggttggnatggntnggtttctaacccaactcgaaggctctgctggggggctgtggtgccggnctggtggtgnctgtgtgtgatgccatttgctgccagcctgntttgggcagancctgggaggggcgganggctgtggctgctgcatcggtgggctgctgaaattgtggctgggccctgcaaagcctggcnnnnnnnnnnnnnnnnnnnnnnnnnnnnnnnnnnnnnnnnnnnnnnnnnnnnnnnnnnnnnnnnnnnnnnnnnnnnnnnnnnnnnnnnnnnnnnatctgttgctgattttgatgatgcaatntaattagannnnnnnnnnnnnnnnnnnnnnnnnnnnnnnnnnnnnnnnnnnnnnnnnnnnnnnnnnnnnnnnnnnnnnnnnnnnnnnnnnnnnnnnnnnnnnnnnnnnnnnnnnnnnnnnnnnnnnnnnnnnnnnnnnnnnnnnnnnnnnnnnnnnnnnnnnnnnnnnnnnnnnnnnnnnnnnnnagcgccacctgctggagctgcagctgggtctgtggagttgccgtagacacgacagccatgctgtgaggggccatccccgaggtcccaggaggcggctgccctgagagagacattggctgtcccatggcaccaaggctacccatcccgcccagagactgtcccgggccccgaggaggcatgccaattccagcggctcccgcagcaggtccgccagtcaggctctggagtgcattcataggatcactgacggaagcttgagatttcttgttatgaatgtctcgaaaatggataatgagcctggccacgagagaaaggtattcgtcccgggtcttggccttcaggaaaacatggctctccatatccttgctggatttactgtgtgccacaccagctttcctcatggcatcctcgatttgactgaccagcttctgccggaaggcggtgctccgccagtcggtctcttgcccggaaacgtccatgcctgttccccagctcccgccgcccgtatcccgcttggccgccaccgccgccgcctcagtcacagagccaggcccaaacccggcctcgtgccgagtacgccacccaggcc

SEQ ID NO: 434674 - DNA, 920 bp, Homo Sapiens
cccttccatcttcaggggggctcggcgtgctctagcccgtctttgttgctgcgttagcgtccgctggttgctgcttccctgggtcctacccctgtccctgttgggtcaaccagccttgccccgctgcaccagccactcctccgggcccatagccatagggcagtttccctgtggtgtagggcagtccatagccaccaggcagcttggggccttgatgggataccccagtgggactccagttgcggtcccccaaagggtccaactcctgggattccagcaaaagctccacctacacctggagccttgggcttaactcctgctccagtgggaactccagggagcacccccacaccggggaaccgagctcctgggagcacgccacctgggtatacacctggcagccccacacccggcactttcccaggcttcactccggctccaggctgaggaaccaccgcacctgcagacactcctaagccaccaactcctgggacaccaccaagcccagcgccagccttagcagctttataggctgcagcagcgtcagccactccaccaggcaccagagcccccggaaaggtaactgcggggaaggcgccgagccctgccccaaggccagcacccgcaagccctccgggaactggcttaagaggtttgcctccaggccccagcgctcctcctccaagggctccgagaccagcccctggataaaagactcctccaggaactccaccaggaatggccccagggacccctccaggccgagaggggtggaggatggacagcaggagcaggaggactccgggccgcggggccgccgccgtcagacccgccatctcggggagaaatgccccagcccgctctccgcacctcgttttatccccaaagcctaattgttgcctcgtcggctgtgagggaaa

SEQ ID NO: 434675 - DNA, 1038 bp, Homo Sapiens
  misc_feature (956)..(978): n is a, c, g, or t
tttggcgcccctttttattttagggccggccggttggttttccggtcgggggccccccccggttggttccgtgggcctttcagaggtattgtgaggagaatccaggcgggcacaagggagtttccgctttggttcccaactggttccagaaagggggcgaatgcagcagggccttagtaatgcacgggccacggccaggtggctagctgaaaaggccggcctcctctttcttcttgtggttctaaagcaagtctctataatcttccttcagcctccgatcctgaccggccaatgtggttcccacggttttctacccccgatcagccggagctagttcgccctcctccctcaggcgagcacccggggagagctgtcctaggagagtctgtagagtccctcgattaccggtcgcaaacgcctttgggagcgcagtctgctgcgagcgccgaagggtgagacgcacggcgttcccgagtccccggcgagggtgtctgggacgcgcccctccctgcggctgcggcggcgcacagacctcggtcgagcgaggcgacgtgaggagaggtggctacaggcttaagccatggcgcagaggaggggccgggcggtgtggccgcagggtccgcggaccgggctcgagtctccttcctgccggcgtcctagtgcagccggccacctagcagggctgggaggccatcacctccagcggagaccgagcattgctgcctccgccgctgcccgcgaggatgccgcagccgccgccgccaccgcctcttctcctgggaagcgaccccacccttttctgcagctctcggtctccgccgctgcccgcgaatgatgctgcagccgctgccgccgccgcctctgcctctgctgcagggaagcggccccacccttttatgctgctcagcagtgagaaaaaaatccaggaacgatgctgactgaaagagtgctgcagnnnnnnnnnnnnnnnnnnnnnnncacctgctgtcgtcagcttgcgctgctgggagcttgcctatccgcaggaattccggaccg

SEQ ID NO: 434676 - DNA, 449 bp, Homo Sapiens
tttaatttagacaatgtttatttcatatgtttactgctacattccatcaagaaatttcttgttttgatgttatgacaatttagcaagtaaaaaacacatttctttgaaaaaaatacttctaagctcaggctcttaacatataaatataatgcacaaaataaatatactgcaaaaaaccacccacctacaaattgctgtatgcatcatttctgaaacatgaaatacttataaaagcgtaactctacattgcttttattttcagctctaagtaacagaaaaacttactttgtaaagtgctagatcttaggctcaagggcatgtggtgtctgctacaactactcaactctgctggggtagtgcaaagacagccacaggtcaaacataaataggtgttttttgtttgtattcatgttttcaaaactttatttatggacactgaaatttgaata

SEQ ID NO: 434677 - DNA, 423 bp, Homo Sapiens
  misc_feature (13)..(13): n is a, c, g, or t
  misc_feature (29)..(29): n is a, c, g, or t
ggtggaagggganccagcccgcgctgtcnccagccggagctgccctggctggtgattggaggtttaacgtccggaattcaggcgcttctgcagctcagatttggccgccaaggggcctcagttgcaacttttcaaaatggtgtttctggctcttgtcatctcgctcatcttgaagtgacccgtggacaatgctgctccctgccgcagtccgccggtcactcaggcagaacggggtatgcaaatggcctggagagccgaggccgaacactggcccattgtccccggctcaaagcgccgagcactgcgcagactttctgggctcggaccctcgggcgccacgctaatgtcatcattgcaaaacatcagattttgagaactatgcagtctgaattcattagcagccttctcggcgaaggttctttt

SEQ ID NO: 434678 - DNA, 1117 bp, Homo Sapiens
  misc_feature (1045)..(1045): n is a, c, g, or t
  misc_feature (1049)..(1049): n is a, c, g, or t
  misc_feature (1116)..(1116): n is a, c, g, or t
cctggcgtgggcttgggcctcggcttcacaggatggggctgcagtgtctgggcccctcctgccctctgggttctagggtgctgcgccctgctcctctcgctgtgggcgctgtgcacagcctgccgcaggcccgaggacgctgtagcccccaggaagagggcgcggaggcagcgggcgaggctgcagggcagtgcgacggcggcggaagcggtgagtgccaggctgtcccggggaccaggtggggtccgcaggggaccgaccagccttcctcgcccccagtccctactgaggcggacccacctctgctccctcagcaagtcggacaccagactgcacgagctgcaccggggcccgcgcagcagcagggccctgcggcctgccagcatggatctcctgcgcccacactggctggaggtgtccagggacatcaccggaccgcaggcagccccctctgccttcccacaccaggagctgccccgggctctgccggcagctgcagccaccgcagggtgcgctggcctcgaggccacctattccaacgtggggctggcggcccttcccggggtcagcctggcggccagccctgtggtggccgagtatgcccgcgtccagaagcgcaaagggacccatcgcagtccccaagagccacagcaggggaagactgaggtgaccccggccgctcaggtggacgtcctgtactccagggtctgcaagcctaaaaggagggacccaggacccaccacagacccgctggaccccaagggccagggagcgattctgggcctggcgggtgacctggcctaccagaccctcccgctcagggccctggatgtggacagcggccccctggaaaacgtgtatgagagcatccgggagctgggggaccctgctggcaggagcagcacgtgcggggctgggacgccccctgcttccagctgccccagcctagggaggggctggagaccccttcctgcctccctgccctgaacactcaaggacctgtgctccttcctccagagtaaggcccgtcccccgccccgccccncctnacagctgacagcgccagtcccaggtccccgggccgccagcccgtgaggtccgtgaggtcctggccgnt

SEQ ID NO: 434679 - DNA, 671 bp, Homo Sapiens
cggctttcttttttggaggaggggaggtcaggtttaatgtcccagtcctcgggcgctgtccagcgcctgccaggccccacggccgtgtcgctcactcgggtggcggccgacccgcctcatcagggccttccgcggaggccgtcccgtcgtcctcgggcaccagctccacgtccagctccagctgccccatgtagaggcccacggcgcacgcccagagcaggctggcggccagcacggcgcccgcgcccacggccgcgccccccagcgtcagctgcatgggtcctcgcagcgccgccaggcccacggcgtacgaggcgctgccccacaccacgcacaggccgcccagcaggaagaagccatatgctgcttcccgacccatgtcactctgcatgaaggagatgaccccgatgcccgatgccaggaggccattgcggaaccaggagaggaaggctgtctcgtgcgcttttcggaggagccaggcgtccgcacgatccagctcggacactgggggcggcgaagccccggcgcggggaccgtggccgggggcgaaggacccccgggcgcccccgctccggggccgctgaggcggcagtagcgacctccggaagcgaagacgggcaaggcgagcggcccgagcccaccaccagccgcctcccatgattcgcactccc

SEQ ID NO: 434680 - DNA, 1345 bp, Homo Sapiens
agttttccaaaagcaggtttcagtgcagagttttcctacacttttcctgcgctagagcagcgagcagcctggaacagacccaggcggaggacacctgtgggggagggagcgcctggaggagcttagagaccccagccgggcgtgatctcaccatgtgcggatttgcgaggcgcgccctggagctgctagagatccggaagcacagccccgaggtgtgcgaagccaccaaacatcccagttaccagtgtccttgaattgatagtggcttctgtttgtcagtctcatataagaactacagctcatcaggaggagatcgcagcagggtaagagacaccaacaccatgttctgcacgaagctcaaggatctcaagatcacaggagagtgtcctttctccttactggcaccaggtcaagttcctaacgagtcttcagaggaggcagcaggaagctcagagagctgcaaagcaaccgtgcccatctgtcaagacattcctgagaagaacatacaagaaagtcttcctcaaagaaaaaccagtcggagccgagtctatcttcacactttggcagagagtatttgcaaactgattttcccagagtttgaacggctgaatgttgcacttcagagaacattggcaaagcacaaaataaaagaaagcaggaaatctttggaaagagaagactttgaaaaaacaattgcagagcaagcagttgcagcaggagttccagtggaggttatcaaagaatctcttggtgaaagaggtttttaaaatatgttacgaggaagatgaaaacatccttgggggggttggaggcacccttaaagatttttttaaacaggcttcagtaacccttctgaaacagagcagccattgcccaagaagcaggaaaaaaggggccggcttgaagaacccctccattctatggctgggaataaggaagcatgatttttccccctggtgtaataacttcctttccctaagaagagcccccctccccggattccttcccggggattataaaaggcacggtgcctcccggatttatatggaaaccgggaactggcgaaaggtcccgttaaaggcccctccccggactttccaaaaattggatcgggcggccgcagtctttcgtgagatcccggccccagactccgggttgaacaacacgtcgccccccgcgacccgagcccaccggggctcgcgcgtggtcctcaccgaccgagccccatacgccccccgccgtccgccacattcccgagagcccgggtgtgtgtttatacggagggcgcctcgtaacgcgagtgccaggcctttcgccatttactccactcagacaatcctttact

SEQ ID NO: 434681 - DNA, 722 bp, Homo Sapiens
ttctcttccaagatttcctgctttcttgtattttgtgctttgccaatgttctctgaagtgcaacattcagccgttcaacttctgggaaaatcagtttgcaaatactctctgccaaagtgtgaagatagactcggctccgactggtttttctttgaggaagactttcttgtatgttcttctcaggaatgtcttgacagatgggcatggttgctttgcagctctctgagcttcctgctgcctcctctgaagactcgttaggaacttgacctggtgccagtaaggagaaaggacactctcctgtgatcttgagatccttgagcttcgtgcagaacatggtgtgggtgtctcttaccctgctgcgatctcctcctgatgagctgtagttcttatatgagactgacaaacagaagccactatcaattcaaggacactggtaactgggatgtccacgccgcagccggccgggtgaagttgccctgaagcccgccaccgcctccagccctgctgcctccggggtccaggcatcccccagctgcgcccgctcgcttgccttccggcgcgccggaggccgcagcgctgcacgcggctgatgggttctggggcccaggcgccctggccgtgggagaccagcggccccggcgcgccccgcgcgttctcacggcccggccccgcgagctcagcagccggcgcggcgctgctcggcgcccacccccacctccgct

SEQ ID NO: 434682 - DNA, 574 bp, Homo Sapiens
tgggtggcgaattcggcacgaggagcagcagcggcggcagcggcgggcggccgcgcgggtgtttatgtcgggtcgcggggtctcgcggcagcatggcggactacctgatcagcggcggcaccggctacgtgcccgaggatgggctcaccgcgcagcagctcttcgccagcgccgacggcctcacctacaacgacttcctgattctcccaggattcatagacttcatagctgatgaggtggacctgacctcagccctgacccggaagatcacgctgaagacgccactgatctcctcccccatggacactgtgacagaggctgacatggccattgccatggctctgatgggaggtattggtttcattcaccacaactgcaccccagagttccaggccaacgaggtgcggaaggtcacgaagtttgaccaggtcttcatcacgggaccctgtggtgctgagcccctcgcacactgtgggcgatgtgctggaggccaagatgcggcatggcttctctggcatccccatcactgagacgggcaccatgggcagcaagctggtgggcatcgtcacctccc

SEQ ID NO: 434683 - DNA, 2497 bp, Homo Sapiens
  misc_feature (2311)..(2311): n is a, c, g, or t
  misc_feature (2410)..(2410): n is a, c, g, or t
  misc_feature (2458)..(2458): n is a, c, g, or t
  misc_feature (2466)..(2466): n is a, c, g, or t
ggcgttgagacctgcttgatttattccaagtatttaatacacaatgacgcaactgtgatcccaagtgtgcaaagttaaagccttcgactgcagctgaggagaagggaggaatggttcacctggggacggtggtgagtcaggaatgacaggcaggcggccatgaccagggcagtctcctacccatggccagggacaggggagcggcctgaggagcaggacccaagggtagcccagggccggggaagggggcagagacctccccttggcctaggtcaggagctcagaagtgccacatggctgaggggcagcggcccgggaagggccagaggcagggccaggagagcaccatttcctgggaggctaggggcagggaggtgccctacaggagaagccaggaggggccgcctgcccctggggtgggggccaggctggagcaggctgcagcaagaaagacctgaggcaggcgcagggcctgagaacctgtctggctgggctcggaggggggctcccagggcagcctggtcccgggagcagtcctgactcttcaggggatgccgagtgaggggcagcagtcccctcaggacctcccctcctctctgcctggaaaggagctggagaacccgtagtgcaaatctgtggaccactcagttatggagggaggctgtgcccaaaagtggacactggggtgcatcccctccaccacctcggcctccaccgctgtcctcagtacagccgcttttcgtaagagtgcaggccatggacaccaccctcaatctgggccgacatggtccgcttctcgaacttgagctctcctgagtacatcatggaccgaaggacagacaggctgcgggccccgatatcctggcagccgtgttggatgcctgctatgaggtagggcacgaacttctgaatggatcctttgtcctggatggagcgcgagacaccctgtgcgatcttcactttatccccctcgctgaagtatcgtttctggctgctgctgctcttctccatggcatccagtgagcccatgccccggtatttcttgagccgcaccccgtctgagaagaagtactcgccgggggcctccgtagtggcggccagcagggagcccatcatcactgtggaggctccaagggccagggccttgaccacgtgtcccacggtctggatgccgccatcggctatgatgggcacaccaaagcgccgggcatactcagccaccttgtacacagcagtgccctggggccgaccacaggccatcacttcctgggtgatgcagatggagccgcagcccatgcccacgcgcagcccgtccacaccagcatcaatcaggttcttggcctgggctgctgtcaccacgttccccccaatcacctggaggtgggggtacttctgtttgatgtaatgcaccatggcgatctgatacaccgaattcccttgggacgagtccaagactatgacgtcgacgcccgcctgggtgagcaggtccagacggtatttgtcatcctcacgggtgcccacagctgccccacagaggagctgcttctgggaatccttggaggccagagggtagtctcggttcttcttcaggtcggtgcgggcgatgatggccaccagctcatcgcaatcattgacgataggcagcttcccttttcttgctacgctgcaggatctcatttgcctctttcaacgtcacacctgctggagccaccaccagttcaatccttggcgtcatcacctcactgaggagggtggtgtggtccttctcagcaagaaagtcgatgtctcgggaggtgacgatgcccaccagcttgctgcccatggtgcccgtctcagtgatggggatgccagagaagccatgccgcatcttggcctccagcacatcgcccacagtgtgcgaggggctcagcaccacagggtccgtgatgaagccctgttcaaacttcttgaccttccgcacctcgttggcctggaactctggggtgcagttgtggtgaatgaaaccaatacctcccatcagagccatggcaatggccatgtcagcctctgtcacagtgtccatgggggaggagatcagtggcgtcttcagcgtgatcttccgggtcagggctgaggtcaggtccacctcatcagctatgaagtctatgaatcctgggagaatcaggaagtcgttgtaggtgaggccgtcggcgctggcgaagagctgctgcgcggtgagcccatcctcgggcacgtagccggtgccgccgctgatcaggtagtccgccatgctctcgggctcgtagccggcctgcagcagtcgggcgctgtnaccctgcgccgccgtctcgtttcccgggtgttgccgggctccgggctccggaacagcgcgcgctccgcctccctgcagcggtggtggagtgagtggccncctccatgcggaggcctcagctacagggcggtgcgggagcctggaggntcccgggnccccggctgggcagtgagcgcagcccgttcg

SEQ ID NO: 434684 - DNA, 876 bp, Homo Sapiens
  misc_feature (19)..(19): n is a, c, g, or t
  misc_feature (100)..(100): n is a, c, g, or t
  misc_feature (121)..(121): n is a, c, g, or t
  misc_feature (137)..(137): n is a, c, g, or t
  misc_feature (140)..(140): n is a, c, g, or t
  misc_feature (145)..(145): n is a, c, g, or t
  misc_feature (148)..(148): n is a, c, g, or t
  misc_feature (159)..(159): n is a, c, g, or t
  misc_feature (779)..(779): n is a, c, g, or t
  misc_feature (822)..(822): n is a, c, g, or t
ccctatttgcaggacatcngagtccccagctgggcccgtcctgctatgtggcctatgtggctacctgctcaacctgtagcctggcttgggacaaccccantactgatccctctacataacncaaccattgcagaccnaanacagnggnccaagggagcngaaaggatcccaggaggagcaggcacattgaggggtactcagatgggaaggccacccgcccaggaactgctgaactgcctgggtgcaagacctccctgtgtctcagtggagacatccctctggctgtttctctgactctatttggagggagtttgagggtgatgagaaggatgggaagggggcttggtaaaaacgtgttactttgtatttattttatatagttattacaaaaaagaaaatacgcgctgttagagaatacagtaaatctttaatttgtataaatatttaaataaacttcatatttttcatgacatacttgagcatcttctatgaatatgcattttatataaggttttatgctggaaacagctatacacaatttctgatcaagactttttactcatgatctcttcaaattcttgactattaatgagaaatgattgttgttcacacaggtggtggtaagtggaaaaggagaatttacctatgtttctacccattaccaggatttccatttcattcctgaaatcatttaaatcccattaaacaatttaatagttttaaaagaacaattctttcctccagttattggcagatattactctactccttttgctacnaaaccgaatggttggtcccgcttcccccaaattcacaggctgnaatccaatcccccatacgatgggatcggcaggtagggccccggggagatggata

SEQ ID NO: 434685 - DNA, 1013 bp, Homo Sapiens
  misc_feature (6)..(7): n is a, c, g, or t
  misc_feature (11)..(11): n is a, c, g, or t
  misc_feature (18)..(18): n is a, c, g, or t
  misc_feature (22)..(22): n is a, c, g, or t
  misc_feature (26)..(27): n is a, c, g, or t
  misc_feature (35)..(36): n is a, c, g, or t
  misc_feature (48)..(48): n is a, c, g, or t
  misc_feature (54)..(54): n is a, c, g, or t
  misc_feature (67)..(67): n is a, c, g, or t
  misc_feature (70)..(70): n is a, c, g, or t
  misc_feature (78)..(78): n is a, c, g, or t
  misc_feature (80)..(80): n is a, c, g, or t
  misc_feature (83)..(84): n is a, c, g, or t
  misc_feature (86)..(86): n is a, c, g, or t
aaaccnngttnacagccntggntggnngacaaaannggaacacggtgntataanccccaaagtcccnccnacccgatnanagnntnttcaggtcatagcccgtgttgtccttcctcagggaggtcaggcagtcccaggacagtgccgtcggccagcaccacttccaggcccaggacagtcccatgcagtgagccatatcgaagaaaccgcaggcctccagcgttggttgccacgtttcccccgatgtggcagctgcccttggctcctaagtccagcggcatgatgaagtcccgttcctccacataccggctcagctcctccaggacgcagcccgcctggcaaaccagaattccagacacgctgtggaagctgaggacccggttcatgcgggcagtggagaggatgatctcgtcaaagacggggacgctgccacccaccatgcctgtgttgcccccctgtgggttcacggccaggttcctctcgtggcagtgcctgaggatgtgggacacctcctccgacgtccgtggcctcagcagcaccttgctacagcctcgcagcgtccgcaaccagtccacgttgggagcctgcagcgcttccgggtccgtgacgaccccgccgggcacgatgcgctcaaaggcggccaggtcctgcttagacaccgtggagaacggcaagcgccgcacggggtagcgctcccgggtcagcggcacctcgggggtccccggggcggagcagcagcctctgcgggccagggggccaaccggccgaccccaagaacccgcggctcccggagcaccccccaacagccacgcgggccacgccagaggccgacggggcagcatcgccgccgggacggagacctcgggctcctccttggtggggggccggtactcagggcccggaggggaagggcagggagccgctggctgcgcgcccacgaccacgtcccgagctccaacccgcagcgcccgccgcaggcccagagccgccgagccggagtgggcggggcgacg

SEQ ID NO: 434686 - DNA, 692 bp, Homo Sapiens
tggaattagtatccatctagcaaaaataagcacaccataaacacagatgcataaaactacacactttaaaaagcaataatcttttaagattaaggttgtatctgttcacctcttgaaagagtgaaacacgaatcatttattcatctagctgttcttgtctattcaaccaccaactgttgaagtgtttggcaaccttagaatatacttgccagattatttttttcctcacatgtccagtgcagggattactgtacccttgtagtgacacaatgctaaactctctcacagcattgttctctctgggaagcgtagggataacaggtacctgtaaagtgtaatcagtgctcttcagaggatctacattctatgctgatctaaataagttatatattacagtaaagtgctacaacgacactagtctcaaacagtagtaagacacatttttctctgaaaaagtcagcagctatgtgagtcacatcatgatgaggatacttgtcagtcttcgttcgagtgtacaaccagcaactggcatgaccgtgagcaatttgtctcctcctgtgacttttaaaattataatctttaggagcaattattaacaattccagtttcccattaagtgtttaaaaatctttttttagaagttgcacctgaaagtttcatgagcatttaatttgctgatatccatttttatt

SEQ ID NO: 434687 - DNA, 810 bp, Homo Sapiens
tatatatggagaatccagtaaggtgtgcgttacgttgttatgcagtaatccctcatacaagtcacttactatctctcccacattcaacgttttggccttaattgatttgccttcataccatggaaaaattgccaaattggttctggctgactaggttttcttttcatttcaaataattatataagccatttaaattgtataaacccactaaaccatacctcaaatgctgaatattcaaaaaatatattttatgacaagtttgttgagaatttatttgcataaaaatgccagtatttttctgctgtgtctctagagatataccaccccccagctaagagtgggtggtaggcaaatgtgctacgggctcctgggaaatggatcatgaagaatgtggtgtgctcagtggccagaggggcagtggggcctgagtctgtgtctctgagtttgtgtgtttcgagaacaagagcagagggcattcagatgtagaattcctccatgtcgttatccccggggccagccgaccctgggggtggtggcatgtctccatcagtctgcttgactttgggggtatcgcatgggagctgtggggaggagtctgtgagggtggaggtgctgggagctgggggagcagcacgagctgtcgctgaggagctggaagaccttttggtgaagaaagggagggaagcccaggaggcctctgtggtcaccctgctgacagtgggcagtggtccctccctggaatccttgtgagctgcccagtggctgctgcatctttcggaggggaggggtgtctccactgtgctgcagaac

SEQ ID NO: 434688 - DNA, 1084 bp, Homo Sapiens
  misc_feature (975)..(1004): n is a, c, g, or t
tggtttgccaagttcctttattgtgtaatctttaacatctagtatatttgttctacatggttctaatgctggaaatctgctgtacaaaaataaagggatttgatgtttacctaaactgcacaatttcacaatctaaaactaatacacttaacatacagtctccgctaagccaatacaattatttggatagataactagatacaatagaaataaacactgatgataaattgaatcaatagtttcaggtctaaaaaacattaccttgaatcatctatatttgatgtatcttacatctcttttgttaaaatataaattaggatattttaactgtgaagaaaattacaggaaaacaaattcttgtaaaaaaataatgtaagctttaaaaacagttaatatctcctgttccacgtgggacaacgcatttaaactacctgaccattcatactatactagccttgcttctgtctgctttcaaaaaagaaaaataaatgaattttaagaaatattcctttaatttctgttgacctatacgttttacttagaattgtaaaaagactgaacgctttttctaaagaatatttatatatagaagatccatgtttcacatacatatacacaaacacattctgctcctttccactcccctccaccaagtttcagggattctatcagtcatctccaaattagcaactttaaagctaaggtagtcagtagcaaagattttgaaaatatatacacaaaagtataattttaaattggcttagaaggaccacaaaattaatagtagtataaattatgagctgaatcttttcacacccccagagagtcaagtatttagaagggaacaaataagagaaaaggagagctggaaggcctttgtccttttctatggtgtggacagagaagccaaaaatgttccaagcaaataaaatgaggtttagtaggtcacagcaatctagtgaaggcatgtatttnnnnnnnnnnnnnnnnnnnnnnnnnnnnnngcattcaggtgcctgctttggaagctgaaggcagtatttttcactgaggacacacaacttttacaatacaaacagttacc

SEQ ID NO: 434689 - DNA, 1370 bp, Homo Sapiens
  misc_feature (224)..(224): n is a, c, g, or t
  misc_feature (254)..(254): n is a, c, g, or t
  misc_feature (258)..(258): n is a, c, g, or t
  misc_feature (381)..(381): n is a, c, g, or t
  misc_feature (400)..(400): n is a, c, g, or t
  misc_feature (484)..(484): n is a, c, g, or t
  misc_feature (616)..(616): n is a, c, g, or t
ctagggcccattctttttatttgcatgtggttacaatataaatacacttgccattttcctccccttccaaaactcttccccatacctaggaatcctacccaaccccctagttgttaatgactccctttcctctcctctaggaggggagggaaggagcgtcctccctataatttcatcttcatgcagggtctacctcagtccacgtgaagtgtggaaccccaaanggtctctgaagcttggggatgagcaccacnaatnctttaaagggtgtggcaccacagtgctctgtctccgctaggtgccaagccttgccatcttcctggtggggtgtaaagagcccgggagggccagggtccccctcttcgggaatggggtatgagngttcgggggtagctggaangtctccaggacccggtggtccccccagtactggtccattgtagatgtatatgttgccagtgatagtcatagacccgccggtgancatgaatgccattggtaccgtgggccacctggttctgctcccccgggttcccaactgcggctccctggtcaggtccagaggactctgctgttgcgggcacccctgcctcccaaaactggtgctgcgggagcnccagtggatactggggaaacatctccagaaaaatggtagcagtggctgtaccaagtcagggaagtatggatgggccttcggaggctcccagcttccagctacaggattgggtccctctcccctgccggacgcctcttgagcagcgatcccagtttcctgcagagagaagggtggctcttccagatgcaggagaagacggtggcaaggagcagaaagaaggccagtggcagcagaacggccagcatcagcatggttcctgtgggggtgtttacaggggtgagagagtagggaaacttgcttcggaactgcctgtggccgcctggtagagcagggcttgcaagttctccacccccttgctcagggcaggttctgacatctctgggggcagtggctctaatggatttttgcaggttgtgtcggactgggcagtgcctggagctgcctccaccagaccttggttctcacacctggtgtggggctggcagcgggcgctgggggaggaggtattctggaagtgccctgccttgcaggggacgcagtggttgttacccttcccaacttcatctttgagctcggcttcagtgccaggcgggcagtcagaaagtagctcgcagtgtgtacactcgagggcccaggcagcacagaacattcccggctggcagcggcactgggtcttccgtttgcttgtgcagggggcaatctcctcgaggcccatcactgggtcacaggggcggcacagctggcagatggtcag

SEQ ID NO: 434690 - DNA, 2143 bp, Homo Sapiens
atctaggtcccattctttttatttgcatgtggttacaatataaatacacttgccattttcctccctttccaaaactcttccccatacctaggaatcctacccaaccccctagttgttaatgactccctttcctctcctctaggaggggagggaaggagcgtcctccctataatttcatcttcatgcagggtctacctcagtccacgtgaagtgtggaaccccaaagggtctctgaagcttggggatgagcaccacgaatcctttagaggggcccgtgacgtccttgcaggtgaccgtgtggcggctccctcggtgccgtgctccggtgcggcgtgccgtagtgggcagcagttggtatcatgtgccctgtccgtgcctgaggctgagcagccccagggggtgggtgggtctgccgggaggcctcaggtttgctcaggcagtagggagagtcctgtggagggcaccgtacccagccagtgcccacctgctctcagaggtgtctgagccttaatcccttagggctctgcttccccgggccctactcaggcccctgtgaatcccacgtgggcagggcagcctcaagggagaaggtgcccttgtgccccccttcttctgccttttctcagactccgtcagtcatgggtgataaattggttccttgggcccctgttagagggtgtggcaccacagtgctctgtctccgctaggtgccaagccttgccatcttcctggtggggtgtagagagcccgggagggccagggtccccctcttcgggaatggggtatggaggttcgggggtagctgggaggtctccaggacccggtggtccccccagtactggtccattgtagatgtagatgttgccagtgatagtcatagacccgccggtgacatgaatgccattggtaccgtgggccacctggctctgctccccgggttccaactgcggctccctggtcaggtccagaggactctgctgttgcggcacccctgcctccaaaactggggctgcggggagcccagtggatactggggaaacatctccagaaatgggtagcagtggctgtaccaagtcagggaagtatggatgggccttcggaggctcccagcttccagctacaggattgggtccctctccctgcggacgcctcttgagcagcgatcccagtttcctgcagagagaagggtggctcttccagatgcaggagaagacggtggcaaggagcagaaagaaggccagtggcagcagaacggccagcatcagcatggttcctgacatctctgggggcagtggctctaatggatttttgcaggttgtgtcggactgggcagtgcctggagctgcctccaccagaccttggttctcacacctggtgtggggctggcagcgggcgctgggggaggaggtattctggaagtgccctgccttgcaggggacgcagtggttgttacccttcccaacttcatctttgagctcggcttcagtgccaggcgggcagtcagaaagtagctcgcagtgtgtacactcgagggcccaggcagcacagaacattcccggctggcagcggcactgggtcttccgtttgcttgtgcagggggcaatctcctcgaggcccatcactgggtcacaggggcggcacagctggcagatggtcaggtagttccagtgctcgttgtaggaattctcggcacatgtggcacaaactgtgtcccggatgcggctacatttagctgagacataggtgcctggcgggcagcgggagcagcagatgcggtgctggggctcatagtattccttttcctggtccctgcaggtctggttctccgacgcatatggaggcaccgcctggggctgcgatgctgccaggagcccgaagaggcccagcaccagaggcccccaggccaggccgggggcagaggtggcccaaggcaggagcatggcggccactcggccaggcggccagcaacgtgggggcctgggaggaaggcaggaggcccgacgtcctgggcagcggtggcggcggctgcccgagcccagagcctgggacgggactcagggccgatgtgcaccccagggccgggagcggccaggccgggcctccagggctcccacggcatcccgggaattccggaccggtccac

SEQ ID NO: 434691 - DNA, 577 bp, Homo Sapiens
tctgcctttcccaagggccctggcagagggtggggcactgcaccttaccccacccatccatgccagcacttctgcactacggccattctcctcttgggcgctcctcagcctcactgtgacctttctgccagagctcccagccaggcctactctgctgaggtggcgcttcctgctaagggcccttctctgccctttctgccctccttcccatcccacatgctgagccgccacaaagacccaaagaagtgatggcttttctctggtcccctgctgctctgaggggagaggggtgggtctcctgagcccactcagatgggaaagtcccttactcggcccactccctccccagcagccccaagctttacaactggatgcaggcgatcaacccaccacatcaccaggcctctcctcccctcttgcccccggctcattagctcctaagctgctccaggtagattggttcatccttccccctctctccctccctgcttccccttcacgtgcttacttgcgtccagccctccagcgtgcagccctggggaaaagcagcctcccttctcctctccctccactacct

SEQ ID NO: 434692 - DNA, 1619 bp, Homo Sapiens
gagacagtacactttgtgattcacaggataacttgcatcagacgcaatttaatgaaagctctcaaataagcgattttattcctatccatgattgcagacatttacaaaaccataacatctgagttcaccttaaaaaataacttatataaagcagtgatatacacagcacaaaatagttcagggagggggcaggagcaacttgtaataattaaaatgtaaacgtgaaaaaaaggatggaataaaagtccctacttatttctacttaagatgtcatgtgataatattttacaatgtcctgtgggtcaatgtatgtatgtgtatatgtctgtataacatacacatatacagtacattctctttcccacacatatacatacacacataattatttgcagttcagtttagggcaattctaatatgccactccgtacagttgtttgaatcacatttggacccgctttcttcacaaaagaggggagagagcaggaaataaaaaggttggtttggtgtgactgagattcctttgtttaactgtacactgtgatgaataattttcttccgtagtagttctgtgaagggctgactcactgtggttttcatgaggagacttggtaatggatcacacgctcattgtcatgctaggggagtaactctcactctgaaaaggatttaagaaatttccccccatttcgccatcatcccttggagtgcccggttgattactcaggctcatattattgggagaattcttggaaatactgtccatatctcctgagcctaaagagccattcatgtgatgtgactccattcctcctaatccacccatgggaccatctgacccaggacccattggaaaattaggtctgttaggtccaggaggtactgcattcattaaagtatacatgttatcaccagagttggttgaatctgctggactaggcatgatgggtgttcctggtggccctccacctcctggaggacctacataattcccaggagatgctgaggagtatggtattgaattggcatttgttgggtttggccaaggtctaccaccacctggacccatgttcattccaggcattccagggccacctaaagcattcagtgggggtctcattgcacctccatagttctgtggtcctaagggcaccattcctcttggaggagtcattctctgcattggcccacccatatttggatgtccttgttgtcgagttggatccattccactggggagtaatggctgacttcctgggacacctccaagtgcctgattaggtatcctcaatgggggccttggacctccagggtaccgaggtgacataaaaggctgaaagaaccctggtggtacaggacctactggcatgccatctcctgggggaatgtttcctagcactggactgggagctgctgcagcactcaccaccaagaatgtaagaatcctggtggttcccccaatgtgatgtttttttcccatcttatctctgataaaaatgtttgagctgatttctgagctcctacatggagcagatattcatatacgtagagtgctaacttctcccgggcctggctgtcggacgggacggcgctgctgttactcttgcctttgccgtaca

SEQ ID NO: 434693 - DNA, 993 bp, Homo Sapiens
  misc_feature (198)..(198): n is a, c, g, or t
  misc_feature (981)..(981): n is a, c, g, or t
  misc_feature (988)..(988): n is a, c, g, or t
caggtgcgtgacagtgggagctgctctcggcacaagcatgtacggcaaaggcaagagtaacagcagcgccgtcccgtccgagcagccaggcccgggagaagttagcactctacgtatatgaatatctgctccatgtaggagctcagaaatcagctcaaacatttttatcagagataagatgggaaaaaaacatcacantgggggaaccaccaggattcttacattcttggtggtgtgtattgtgggatctctactgtgcagctccagagagacgtgaaacatgtgaacactcaagtgaagcaaaagccttccatgattacagtgctgcagcagctcccagtccagtgctaggaaacattcccccaggagatggcatgccagtaggtcctgtaccaccagggttctttcagccttttatgtcacctcggtaccctggaggtccaaggcccccattgaggatacctaatcaggcacttggaggtgtcccaggaagtcagccattactccccagtggaatggatccaactcgacaacaaggacatccaaatatgggtgggccaatgcagagaatgactcctccaagaggaatggtgcccttaggaccacagtctgacccttggttatcattacagaactatggaggtgcaatgagacccccactgaatgctttaggtggccctggaatgcctggaatgaacatgggtccaggtggtggtagaccttggccaaacccaacaaatgccaattcaataccatactcctcagcatctcctgggaattatgtaggtcctccaggaggtggagggccaccaggaacacccatcatgcctagtccagcagattcaaccaactctggtgataacatgtatactttaatgaatgcagtacctcctggacctaacagacctaattttccaatgggtcctgggtcagatggtccatgggtggattaggaggaatggagtacatcacatgaatggnctttagntcagg

SEQ ID NO: 434694 - DNA, 1128 bp, Homo Sapiens
  misc_feature (183)..(183): n is a, c, g, or t
  misc_feature (320)..(320): n is a, c, g, or t
  misc_feature (393)..(393): n is a, c, g, or t
gaggtgccccggtggaattaactccggggctccttaattattggggaggaattccttgggaaattacctgtcccatattctcctggaggcttaaaagagcccatttaatggggatgggatttccattccctcctaaatccagcccatgggaaccatctgaccccagggacccattggaaaaancaggtctgttagggtcccaggaggttcctgcattcattaaaggtatcacatgttatcccccagagttggttgaaatctgctgggactagggcatgatgggtgttccctggtggccctccaccctcctgggaggaccntacataattccccaggagatgctgaggagtatggtattgaattggcatttgttgggtttggcccaaggtctanccaccacctggacccatgttcattccaggcattccagggccacctaaagcattcagtgggggtctcattgcacctccatagttctgtggtcctaagggcaccattcctcttggaggagtcattctctgcattggcccacccatatttggatgtccttgttgtcgagttggatccattccactggggagtaatggctgacttcctgggacacctccaagtgcctgattaggtatcctcaatgggggccttggacctccagggtaccgaggtgacataaaaggctgaaagaaccctggtggtacaggacctactggcatgccatctcctgggggaatgtttcctagcactggactgggagctgctgcagcactgtaatcatggaaggcttttgcttcacttgagtgttcacatgtttcacgtctctctggagctgcacagtagagatcccaaaatacacaccaccaagaatgtaagaatcctggtggttcccccaatgtgatgtttttttcccatcttatctctgataaaaatgtttgagctgatttctgagctcctacatggagcagatattcatatacgtagagtgctaacttctcccgggcctggctgtcggacgggacggcgctgctgttactcttgcctttgccgtacatgcttgtgccgagagcagctcccactgtcacgcacctgtcaacccatcacagcctccccatcacgggattccggaccggtcca

SEQ ID NO: 434695 - DNA, 847 bp, Homo Sapiens
tgttggactaggccatgatgggtgttcctggtggccttccacctcctggagggacctacataattcccaggagatgctgaggagtatggtattgaattggcattgttggggtttggccaaggtctaccaccacctggacccatgttcattccaggcattccagggccacctaaagcattcagtgggggtctcattgcacctccatagttctgtggtcctaagggcaccattcctcttggaggagtcattctctgcattggcccacccatatttggatgtccttgttgtcgagttggatccattccactggggagtaatggctgacttcctgggacacctccaagtgcctgattaggtatcctcaatgggggccttggacctccagggtaccgaggtgacataaaaggctgaaagaaccctggtggtacaggacctactggcatgccatctcctgggggaatgtttcctagcactggactgggagctgctgcagcactgtactcatggaaggcttttgcttcacttgagtgttcacatgtttcacgtctctctggagctgcacagtagagatcccaaaatacacaccaccaagaatgtaagaatcctggtggttcccccaatgtgatgtttttttcccatcttatctctgataaaaatgtttgagctgatttctgagctcctacatggagcagatattcatatacgtagagtgctaacgattgatttttgcggtcctcagccctactccctggggtgtcgcccccgccctgttcccagagggccggctggcgagggacacccgcgcggttccctcgaccttctggctgagcgaccgacagcgactcgc

SEQ ID NO: 434696 - DNA, 925 bp, Homo Sapiens
  misc_feature (843)..(879): n is a, c, g, or t
aggggaccatctgacgcaggacccattggaaattaggttcttttaggtcacaggaggtactgcattcaattaaagtatacatgttatcaccagagttggttgaatctgctgaactaggcatgatgggtgttcctggtggcccctccacgctcctggaggacctacataattcccaggagatgctgaaggagtatggtattgaattggcatttgttgggtttggccaaggtctaccaccacctggacccatgttcattccaggcattccagggccacctaaagcattcagtgggggtctcattgcacctccatagttctgtggtcctaagggcaccattcctcttggaggagtcattctctgcattggcccacccatatttggatgtccttgttgtcgagttggatccattccactggggagtaatggctgacttcctgggacacctccaagtgcctgattaggtatcctcaatgggggccttggacctccagggtaccgaggtgacataaaagggtaatcatggaaggcttttgcttcacttgagtgttcacatgtttcacgtctctctggagctgcacagtagagatcccaaaatacacaccaccaagaatgtaagaatcctggtggttcccccaatgtgatgtttttttcccatcttatctctgataaaaatgtttgagctgatttctgagctcctacatggagcagatattcatatacgtagagtgctaacttctcccgggcctggctgtcggacgggacggcgctgctgttactcttgcctttgccgtacatgctcgtccgctctcgacgaattcgagctcggccgatttggcctgatnnnnnnnnnnnnnnnnnnnnnnnnnnnnnnnnnnnnncgccgccaccgcgtgcacgtccggtcgccctatagtgagttatcca

SEQ ID NO: 434697 - DNA, 2451 bp, Homo Sapiens
  misc_feature (576)..(576): n is a, c, g, or t
  misc_feature (606)..(606): n is a, c, g, or t
  misc_feature (680)..(689): n is a, c, g, or t
  misc_feature (778)..(792): n is a, c, g, or t
ccagcccaagcgaagcgggctgtgtgtcaccgctcaccgcgtacacaactaaaagggggggtgggtgttggccaatgagcagcgaatctccaggggcgaaggagggcttttctaccataggtggccggccaaggaggaagaggccgggtaagacataattatttgaccgtgcagcccgtggtctataggggggtgggattggagatgtgggcccaagcggggggtgggggcggcggggctcttaaaagttctccgacgctatgttccgtgagcgcgttctcccccccgattgtggggccaccgcccccgcgtaggtttgcgatacgtaggacaagtacctccccgactcgtataaagaggcgcccgtgtctcacgggggaaagtgcgggctcgcgtttcgcggggaagagatctcgggctgactccaagcggggaacccggggtcttaccgagagatgtccatataccccgcgccgccgggaaagagagaggggggaaatgtcgggcgaagcttcaagtgggggagagaggaggtgtcccgcaacaggccggcctttaaggctccagatgtgggcnccacgggattatttgtcggcggaggggganaaccacagcgctatgtgggggcccgacggttgggccccgtgaagcctgggggtggggggcccgacggggttgcnnnnnnnnnnttgggttttaggacaaacgtttttttcggaggggccggaggggcgggccgaaacaaagggtgtcatgtcgtggggtggcgcattcggcnnnnnnnnnnnnnnnaaagcgggccttttagtttaaatcaccggatctcgttccttcctgttgttgaaggtaccttgctccacatcattagatattatgttcactgtttcacatgaataacaagtttctacgtgaattgtaaatgcctataagccgagggtactttaaaattcttttggatgccattatacagtagtagactcataactgatgcccagttaacggtgaaagataaatgtgaatatccaactaaaagaagagcccataacgtaagctagataaatgagaatggactatttcatagatggagagattaaatgtctggcccatagttcttaccaatcagctgtaggttacaactatgacttaggttccccatacccagtctacttctctatggccactgctaggtttctcaaggagcttctacccatcatctcctagtgtctaaggccacacctttcaagcaacacacctttcacactctatcaagccccaaacacaaggcacagtgtgggcagggccatctttattgaggtttttaattaaaatgctttgcagaggagaccacagcctgccaagggagcagctgcccaaatgtttcctgacccgtgacctagagatgaagtaatttgatttattccctatttcctttagtctcaatggctaaggggtaatggatggaaatggggagaatgaccgagtagaggcaaggacgaagctcattcttaaagaaaaacctcaaagttcaacttcaaacagctgaaatttgtttcatagctgttggtcacccagttctagccaaccaggaataaattatagttttgccacctcagcagatggcaaaaggagctttccagaactttggcctggtctgcaccaggtaccaacatcacagctgctaaaatcaccagaagggattttggaaccgctgtactagtgtcctttcattcgatgggatgtccaggcttcaccccaaagaggcttcatttatgcttcttctcctgtgtgctggtgaaccaagagtctaggagcttcttgctgtagtacaactgccaggcatgcacttgcactgccaacaccaacaccaggtacatgatggaaacggcagaaaaaccaaagaggaaacggtaggccttgccatggcggtagagctgctgtgcagcagggaacatctccatgctgccataaatgagtggagcgatggaaaagagtcccatgctgatcatggagagcaccaggtagctaatgttgttgcggggaaaggagagaaggcccaagagagagggcaaaatgctcagcaaatacgggtattcccactgatagggcatggccacctgatcatgtgacaagagcctcaggtgtcccacgctcatcttagcaaccagcagcagccatatgaccagatgtacgtagatcagcttcttgatttcatacttgagggtcacactcatctggtagtgcatggcgacgcgctcccggtgctgaaagtcgctgccgtcggtgccggccgctcgcgggcctgctcgagacgccattgtgcctgcccagaacccccgaacccctcacgcggacctggtaccgcaacgacaccgccaagcggcccagtgaccctatttgcgcccccgcagccgcgcggctccgtgaagagaacttccggcccctctgtctctg

SEQ ID NO: 434698 - DNA, 349 bp, Homo Sapiens
gtctggacttctgtaatggttttctcgtacatggttttctcgtacatggttttctcgtacatggtcatatggctgctgctggttgctaagatgagcgtgggacacctgaggctcttgtcacatgatcaggtggccatgccctatcagtgggaatacccgtatttgctgagcattttgccctctctcttgggccttctctcctttccccgcaacaacattagctacctggtgctctccatgatcagcatgggactcttttccatcgctccactcatttatggcagcatggagatgttccctgctgcacagcagctctaccgccatggcaaggcctaccgtttcctctttg

SEQ ID NO: 434699 - DNA, 2389 bp, Homo Sapiens
  misc_feature (20)..(20): n is a, c, g, or t
  misc_feature (45)..(54): n is a, c, g, or t
  misc_feature (1926)..(1975): n is a, c, g, or t
cccccgcccccgcccaggangagggtgagaaagaggaagatgcannnnnnnnnnacgccaaggcggcaccactaaacccacaaacccacaaatatgatgggccaacacccagctggcaccggtccggaattatacggatcgggcgcgggatgcccctgcgctgaccgccaggggcaggtgcccgcccgcgtagacgcacccggcctgaccccgcgccaccatgtaaacggcgccagcaggcggacgctggcttctccgcctgggacccctccgccccgacccgggccccgcggccctcgatgaggacacaccatgctgaccggggtgaccgacggtatcttctgttgcctgctgggcacgccccccaacgccgtggggccactggagagcgtcgagtccagcgatggctacacctttgtagaggtcaagcccggccgcgtgctgcgggtgaagcatgcaggacccgccccagccgctgccccacctccaccatcatccgcatcctcggatgcagcccagggggacctctccggcttggtccgctgtcagcgccggatcaccgtgtaccgcaatgggcggttgctggtggaaaacctgggccgagcccctcgagccgacctcctacacgggcagaatggctctggggagccgccggccgccctggaggtggagctggcagatccggcgggcagcgatggccgcttggcccccggcagcgcaggcagcggcagcggcagtggcagtggtgggcggcgggcggcgagccaggcgccccaagaggaccatccatattgactgtgagaagcgcatcactagctgcaaaggcgcccaggccgacgtggtgctctttttcatccatggtgtcggcggttccctggccatctggaaggagcagctggacttctttgtgcgcctaggctatgaggtggtggctcctgacctggccggccacggggccagctctgcgccccaggtggccgcagcctacaccttctatgcgctggctgaggacatgcgagcaatcttcaagcgctatgccaagaagcgaaatgtgctcattggccattcctacggtgtctctttctgcacattcctggcacatgagtacccagacctagtgcacaaggtgatcatgatcaatggcgggggccctacggcgctggagcccagcttctgctcaatcttcaacatgcccacctgcgtcctgcactgcttgtcgccctgcctggcctggagcttcctcaaggccggcttcgcccgccaaggagccaaggagaagcagctgttaaaggagggcaacgctttcaacgtgtcatccttcgtactccgggccatgatgagcggccagtactggcccgagggcgacgaggtctaccacgccgagctcaccgtgcccgtcctgcttgtccacggcatgcacgataagtttgtgccggtggaggaagaccagcgcatggccgagatcctgctcctggcattcctgaagctcatcgacgagggcagccacatggtgatgctggaatgccctgagacggtcaacacgctgctccacgaattcctgctctgggagcccgagccctcgccccaaggctctaccggagccactgccgtgcgcctccagaagacaagaagtagccgctgggccggcggggcatcgcttggtgagcacagccgcagcaggaggaggcccgagcctgcgccaggtctgcagcgcagaccagctgggcgggccgttcgctccggtgggtcggggccagtgtcagggagacgcccccaggctgcctgggctggggccgtggcatccgaggtgagcccatgcggacattccgctctccgctttccgtcccgcggggcccatcgggcgttttggggccgcagccggggaccctcaccggaagatgacctttgtacagaagcttctccctnnnnnnnnnnnnnnnnnnnnnnnnnnnnnnnnnnnnnnnnnnnnnnnnnnggctgtcttcccgtggtccacgccgggacttggattcctggggaaacccccgaagacccctaatgggggaaccctttgagggccccctttccccagatatccccaaggactccttttcgtgacccccccattttcctatggaggcgtttgggcccttattctctcgcgtcccaagtgttgtcccgacgacatcccgtgtctgctcagagctcgctgggcccatgcgttcctcggcggatactgatttagcctgcgtgccagttgtccacatgcacgccgttgcgcgagatctcggacttatcctctgggatgttagtcgcgggcagcggatctacggcaaatgtcgcgcaccttgcatgcgatctactctcatagcgcggtctgtcgacctcaatcagctctgatctgtcgatg

SEQ ID NO: 434700 - DNA, 476 bp, Homo Sapiens
tttgcgtatttcaagtgttttatttgctttctgtggtgtcaaatttggggtctcctagagcccagccccaggcagaatccggcatatccttctccgcctggggggcccgggacacaggagtttcagaaaaggcactggcaaaagttctagggcaggggtcagggagaagccacactgagcctggagggaccgggccctccttcggcggcagaaaacacagtcacctttggcagggaagggttttttcctagaaagaaatttaagacaagataaaaacctgagatgttagaggagcccccagaaccaagccggtgctcccctgggcaggcagagagtgaactcggcttccaaaggttcaggggaggcttgcccgggccctcagccagggttcagattgccacaggcttttggcaagcagaaagcctatttcaaatccctatgtgggattttcctttgagacaaattttcacgacact

SEQ ID NO: 434701 - DNA, 511 bp, Homo Sapiens
  misc_feature (458)..(458): n is a, c, g, or t
  misc_feature (464)..(464): n is a, c, g, or t
  misc_feature (499)..(499): n is a, c, g, or t
aagcttggcacgagggaattccctgctctgcttttctgctcgttgctggcatagaaacatctagaacagaaagtatccactctggggcagatgggagagctggaaaagtagattcaagatgccttttagtcttggaagtttcttccaggaagcaagaccagctggtatgtttacacctgcactccagtgccctggggaggtgaccaggtggagggggatggctcatggaaatctgtcccgcacagctggcccccttttggctgccactgtctagactgttggcctttgacctctctgcctcttgtggcgtcttgaacctaggacgtccctttttggagacagctggacaaagccctattctccgcagccccagcctctatcctgagggcttttggggagcttgcgttgacggccagcattggggttgcttgattcatgggttcaagggagggcaggtntttttnccaaggtttgcccccattgcagccacccattcctnaagcatccttaa

SEQ ID NO: 434702 - DNA, 920 bp, Homo Sapiens
  misc_feature (652)..(661): n is a, c, g, or t
  misc_feature (668)..(668): n is a, c, g, or t
aagtttcttccaggaagcaagaccagctggtatgtttacacctgcactccagtgccctggggaggtgaccaggtggagggggatggctcatggaaatctgtcccgcacagctggcccccttttggctgccactgtctagactgttggcctttgacctctctgcctcttgtggcgtctgaacctagacgtcccttttggagacagctggacaaagccctattctccgcagccccagcctctattctgaggcctctgggagctgcgtgacggccagcatggggtgctgatcatggtcaaggaggcaggtctttgccaggttgccccatgcagccacccatcctcagcatcctaacttgagggggcaggagagggctttgtttttataatccggattaaatttcccttccctgggcacaagtgcttcatgagggcccggggctgctggttgggagggaaagcatccccgtttttgcagtgaggaggccggccgagggctgggggttccacttagacccttgggcagaatggctgtttgaggggcaggcgttgcccagttgcccacgtctggaaagctaattcccgggtggacgctgaacatacctgctgagagactctgtcccctggtttccaggacagttgtcacaactgagtnnnnnnnnnnactcccnagacttgagggacccagtcccaccccaaactgctcccccctccccaaattcccctttctcctcctgctctttctccccgctgtgcctcccccagttacccacagaagtgcctgccctctccagcgctcacagaacacacaaaaagggacaggaaattgggtcacttgggtagtgggccgtggctttctggacgattccaaaccaacggtctgggccccaacccatttcaaaggttgggggtctgggggccct

SEQ ID NO: 434703 - DNA, 504 bp, Homo Sapiens
  misc_feature (327)..(327): n is a, c, g, or t
  misc_feature (410)..(410): n is a, c, g, or t
  misc_feature (432)..(432): n is a, c, g, or t
tttaattaaaatagagtttattagcttttaatataaacatgagaaataaaaaccacataaattgtagcattcttttcaaaataaaactgcaatcaatacttgaatctccaaactctgaattccataaacaatatttgtttttttgaggtggtagattgtaatatttgtataccattatttatcatttatgtctctgtcctttaaaaatgatggaaactgcagcacaatatgatgtgaagcattgctataatagaggaagtactcctgtcccagaaatgctttgtttataagcaagattcctaggattagatttgaggaaagtagggnggaaacagatttcacataggttgaggaacacttaacctcttcttaggtatttccaaatttagggtgacattatcgggtctccntaaatttatttgctccttgccnttttaaagccctgaggagttcctaagggttatgtaagtattttcttaaatagcaggacttaatgggacaccc

SEQ ID NO: 434704 - DNA, 498 bp, Homo Sapiens
aagcttggcacgagggaaagatttctttgtagcatgtgtgctgtttgacaacattttccctacagtacgatgtctttcaaaattggactcaatcctctcaaatcctgttgctgctttgttaacaaaatttatatattattctaaaacctttgttgtcaatgtcaacaatgttcacagcagactccatctcaagatggagtagattccatgttaagaaaccactctctttgtttattcataagaagcaactccttatccactcaagttttatcatgagataaaacttgggaatattttgaaaggaatctttttttctgagcagtaggtctcaaaagtcggcttaaaatattcagtaaaccatgctgaaagcaggatatgctgtccatgtaggttttgttattccatttgtaggaggagcagggcaaagtaggatttaggcataattcttaaggggccccggggtttttgggcacggttaggtgaggcactggctttcaa

SEQ ID NO: 434705 - DNA, 389 bp, Homo Sapiens
  misc_feature (307)..(307): n is a, c, g, or t
  misc_feature (377)..(377): n is a, c, g, or t
aaagatttctttgtagcatgtgtgctgtttgacaacattttccctacagtacgatgtctttcaaaattggactcaatcctctcaaatcctgttgctgctttgttaacaaaatttatatattattctaaaacctttgttgtcaatgtcaacaatgttcacagcagactccatctcaagatggagtagattccatgttaaggaaaccactctctttgtttattcataaggaaggcaactccttatccactcaagttttatcatgaggataaaacttgggggaatatttttggaagggaatctttttttnctgaggcaggtaggggtcttcaaaagtcgggctttaaaatatttcagttaaaccctggctggaagcgggntatggctggtcc

SEQ ID NO: 434706 - DNA, 193 bp, Homo Sapiens
tttatgctcaaactaaggcattttattagctggctttacaacttaaataatatcttggctttcaaaggaacagcttccactaattccaaattaaactttcacaagtttacttgtttggggagggacattcttatggtcaccacaaaatacttttattataaccttccccaaatcttttcttagcattaactgg

SEQ ID NO: 434707 - DNA, 440 bp, Homo Sapiens
  misc_feature (388)..(400): n is a, c, g, or t
  misc_feature (403)..(403): n is a, c, g, or t
  misc_feature (424)..(424): n is a, c, g, or t
tttcttgaagtcagttttaccaagaaatttcctgaagtaaagacgacgagtgattccttcgttttgggatgactgcccctagtgtatagcataatgcagagtgatggaattattagtgaggagtcctaaacgtgggattaggagtcattgaggtagaaaaaccaggctggctcatttcacatcttttgaatttggaaagctatagccacctcgcattcagctataatttttttaaggatagaaatgttttctcctagttatttcatcaggtgatttgcacaccgggatcccggggttccagcatccttatcctggggccaggccagtgtctccatcactttgattgatgtgtgatggggtgttttgacccagactgggggaagagggnnnnnnnnnnnnnccnccctgtccccccacaggcaanttcccagagttacaag

SEQ ID NO: 434708 - DNA, 468 bp, Homo Sapiens
  misc_feature (403)..(403): n is a, c, g, or t
  misc_feature (450)..(450): n is a, c, g, or t
aagcttggcacgaggacattttttaagtaccttaaataaaagaataaaggcatcattataaaactttaatttttttaaaccaaaccaaagggatttaaagttacatatttttaatgtgtattttaatagactgttagtggcactgtccttcatctgagatattaattcaaggccttttcagcttttctccctaaactttctgagtgggcacagaggatccagagtgtttatgtaagcagtaaaagaaagtcctgggtatttccaccagaatcccctgcttaacagaaatatgtcccaggcatccttatcctggaaactccctggacttagctgccacaaaaagaccctccatgttcctcaaaagccaccacccccatcatgttaactcagggcctgaggaaantgtggtcctattcaagggggagggtgttgtggccaaattaaagtccnttttgtggctggtggcac

SEQ ID NO: 434709 - DNA, 405 bp, Homo Sapiens
  misc_feature (185)..(185): n is a, c, g, or t
  misc_feature (197)..(197): n is a, c, g, or t
  misc_feature (346)..(346): n is a, c, g, or t
gcatttaactccagggaacacttccacttgctgacgcttcttgccagcaacaaggcagcagtaaagctcaaatagtttataaatgtcagcaaaatcctatgaacaaattactgcctgagtcatttttttagtgtcttctatttcgaaaaatatatactttttaatggagaaggagaaaaagatgnccatttgattgnctgatatacactaccatttcccactaaattgttgttaacaaattcttaatcaaattgaagcctgcggatttaagttgtgcattcaaccaatttactgaaaatgttagggtggcattaaaatcaaagacaaatttaaaaagcaaacatancatgtagttggagggatgaatgagaacaacctgtttggttcacacctcgtgccaagctt

SEQ ID NO: 434710 - DNA, 417 bp, Homo Sapiens
  misc_feature (376)..(376): n is a, c, g, or t
  misc_feature (388)..(388): n is a, c, g, or t
  misc_feature (391)..(391): n is a, c, g, or t
tttttttacaacataaagaactttttattggatatgtaaatttaaagtgcagatttagttctaccttcaagtgatacttgatccagcagctccaaaagatatttccaaagaccaagactcttcctcttctctctgccttcttattagctttctcttcaggcttcatggagtcagttcagatgtcccaggtttcccatggtggcaaaatggctgcagctgttccagacctcacatccttatagagaaagagagaataaatcctgaaattcactctcattggtcacagatgggtcatgtgtccattcctaaacagatcaccgtggtggggaaggggaggtgagtaagaaaggttggattatattaagtctttgggggnagggagctgggnganggtaggtcccatacccaggtaactag

SEQ ID NO: 434711 - DNA, 442 bp, Homo Sapiens
aagcttggcacgaggaatatgtataactttagggctgaacttttacttgataaagtgagaccttctagaattctttttttctgtctgccatgataactagctatgtttcttcaggtggttactaaatgaatgcatgtggagcaatgttccagctgacctgcaatgaacatgtggtttcagtgagaaatatacctctgtcatttaagccgttattgtctgggagttgcttgttatcttagcataatacagcctaacctgactgttaacacagcttaatcttacatcttctttaggtcttgacttacctctaatgttttcctcaaggccttaaggattgcacccatacccaccccatcactctatccccttctctactttatattcctctacaatacctatcttaatataacatcacataggttgcttgtttattttattattc

SEQ ID NO: 434712 - DNA, 1291 bp, Homo Sapiens
ctctaatgagataaataacaaacgatattttatttttattttataaaacatgcagtttacaacaaatttttaaaaaatggaacaaaacttgggacaggcaagtgggatggaagacagatgcttctcagccatcagcaggaataaatgaagccggcagccaagctttgtccaggatccaaaggcccttttggcaatggtattggcaacactggtttgcttgggccaccaacactctacttgctggcccctccaggtatccctgaagcagttggtgacttgtgctaagtcttgaactactgtggtatcctctgtcactgtccaggacttcaatccctagccagctaggaacttacagttatggttccaggagcttctctgcctggatattagtcacccaggatattaagaataccaattactttccatctgggtcaattctagactccatgtctgtaccactgttttgcaaagaatgaagaaggaatgaatctggctcctagaacctttgcaacaattctgctgtgttccagttcaattaatagcaccatctgtgaccctagaccctgagcacgtccagtactggaagtggacaaggtatagccaacttaggaagccatctcccagttctggggctatagaacagtaaagggagagggccgtggttctttgggaagggtagtcagagcgccagcactgaggagaagacagctgcattcttgggacttgtttggccctcaggctcaggcaccttccagtccatctttctgcccttctcataaagacccttgagcaccttgtggaaagactcaggctcagtgccatttttgcttagctccagatactttcggtacagctgaagggctgtgcgggcatcctcaatactgtcatgggtttccccttgaatcttcaggtccagaaagtaccaagcaaggaatcgcagggaaatcattcgttttcggggcatatggaacaggtagacagtgtcaaggacttggtccttgggcacctggcaaggataaaagagggggagacttaaggtaggggacctataattccccattctctaaaggcacaatgtataccctgaggggcccactctcacaagaagactcttaaaagagccctgccaaaccatcaggttgatgacccggaagtccttctgcaggccatgacccacaaacttgactccaatgtcaatgagaaaacgaagctttaagtaggtagacttgagagttgttaggtgcttggaggaaattttggcatcgaggtcaccaggctttatacccgaccc

SEQ ID NO: 434713 - DNA, 488 bp, Homo Sapiens
cacgcacagggcggcagcctggtggctcacatcaaagttggagagacctaccaccagcgcaaggagggcgttactcaccagcagtggtatctgttcaatgactttcttattgaacctattgataagcatgaagctgtgcagtttgacatgaattggaaagtacctgcaatcctttattatgtcaaacggaatctcaattccagatacaacctgaacatcaagaaccctattgaggcaagtgtcttgctggctgaagcctcgctggcacggaagcagcggaaaacacatactacctttattccactgatgctgaatgagatgccacagattggggacctgggtgggtctggatgctgagtttgtcacccttaatgaggaggaagcagagttacgcagtgatgggtacccaagtctacccttaaaaccaagccagatgtcagtagccaggattacctgtgttcgggggcagggacccaatgaggggtatc

SEQ ID NO: 434714 - DNA, 462 bp, Homo Sapiens
tttcaggaggaagtaacatttatatgagcaactcatttaattttcctaacaatacgccaaggtaagcaaagccctagttttttatctaaggaggctctgggaaattatgtcatttgtccaaagccacacgtctaataaattacagacccaggatgaggacccagctatatcttcctgcaacacctgtgttgccagtttattggcagcctctgcagttcaggaggacctagcttgtcccttgggaccacctgaccaggtggcctgggatgaggaactgggaggccttggaactaggcatccttcacttgaattatcaggtcagcctttgagcctgggagaccaacaggagacaggggccctatggaatcacaacccaggtgagtgccaggtctctgctggcatttgtgccttggtgatggtgccagctgccactccaagactttggcataattggcaggtgcc

SEQ ID NO: 434715 - DNA, 591 bp, Homo Sapiens
  misc_feature (200)..(200): n is a, c, g, or t
  misc_feature (380)..(380): n is a, c, g, or t
tttacataggaaaatacagtctttattggtcttctgaaacaacaaaccagaaatataattttgcctttaaaaatcttctgtctcaggctaaagataccaccattgacaatgccctcccctccccccagtccctttagaaaatccccagatctggtaccagcccacacgccaaaagaaggaagactgtggccatggcaggngccgcctggggtcccagtaagcagcccatgccaggcgtcctctgtccacctgccaggactgacctcctcaaaggcactcctccaggggccccagcccacctcacccacccactgccgcatgagcagggagggtcggagtgggggcacaggagctagggcctgccaactccctctgctcanacccttggcttcagggttcttgctggcctcttcctgagcccccatcgagattccatcccagagccagggacgagcctgatgcctcctgagcctgtgagcatgacacctaggtacccaccatcttcacactctgaggaggggcagagctagggagggggacaggtaacctggaaaacttgcactgccttggcagcaggtggctctgtcccag

SEQ ID NO: 434716 - DNA, 825 bp, Homo Sapiens
ctgaatatattgtcagtttcagtggtaaatcttcaacttttacaaaatcttcttcatcagacttttgacttatattaccagattctgcttcatagtcattcactaacactggagattcagtatcaggacttccagccagagagctttcaggagtttcctgagcagatttaacttctttgactctaggcactaagggttccatttcaggtaaacgtaacggcaaaagggttaggctgttgagttgaatcaacagtaggaggtgactccttatgggcagcactatttaaaggttgctcatcttccaagatattgaggtaacagggtttcacaggacagttattttggtcatttttactagtggcttctcgttccaatgggacatttttgctttctgctgtctttttaaagtcacgttgtaggacctgttcatcatgttcattttcttcagtagcttcagtgttagcctggagggaagtctggacatccacagggccttcttcaaattcttccatttcttcatcctcattttcatcttctccacttccataattagttaaagcctgagtttcagctttagacaaattaatagacactggacatccttcactttcttcatcttcctcttgatcagaaatatcagatcttacatttttgggaccatcatacacctcagatgtttgagtctgcttaactgtttcagtttcatccttgtctttgtcttcatcatcaatctctccagcaggtgagccatgatcttcaagaatccttttagcctctttggcacaagattgtatcactccagttgcttctattttccttttgcac

SEQ ID NO: 434717 - DNA, 498 bp, Homo Sapiens
gttgttctcaaacatgtttatttgtaacagttttacatggtgtgttacagaaattaatggaaaatttctaaaaattttgctgttctgttgaatgcattgtacataaagttaaaaataatgtgtccatatatgttaacaaactgtcatctgaggtaaagttaaagtaggtctagaaaggtactgcaacagtcattttctctttctcatctttattaaaaaaatatgtgtcagaacgcagaaattgaaatgaaccaaacccacagagtaaacatttgtttaaaagaagggtgcccagtacattacatgatggggtttcaggagacactgggatgagtacgggctatcaaaaaagtcttgcggcatgtaaagattgaagagctatggagaatggggacagattgacaggtggtgtttccctggtttcaaaatttaaagtgacaaatttagtgctagtggaggatgaggaattaacagttgtacacatggattttctattga

SEQ ID NO: 434718 - DNA, 909 bp, Homo Sapiens
  misc_feature (550)..(558): n is a, c, g, or t
  misc_feature (739)..(739): n is a, c, g, or t
  misc_feature (867)..(867): n is a, c, g, or t
  misc_feature (880)..(880): n is a, c, g, or t
  misc_feature (893)..(893): n is a, c, g, or t
ggattctgaagaattcagattctgaaactctcccacctccccactcccacctacccccgatataaatcactggactgtttgtacgtgaaacagaagaggctaagcttcctttttttacacttatgagacaaaaagtgcagtgtttggttcgtatgtttagcacatgattttcataaagaatctatatatttttgccctacagagaattgttatacaggtcaagtgtgttttcctgatgttcctatgcagttacagtatgttgaaagtgttttaacactaagaagaaaactttaaagattcatgtgattaattggatttgaggataattattattatttggtttttagatttgaaaagtagaatttccattgagacaattgatttgaataggcctgcatttgattcttcatatcaatagaaactaaaatgatttgggagattcatttgaaaaatgattgtatacttgttcacaaagcgaaaagtgatacatgaaggtaatggttatcatttaaagcccacattttacactatcaggtcacaggagtctaannnnnnnnncagttagataaactgaccaaacgtctattcaagaatatatgtcaatatcatcctaatgtggaaggtccgaagaaccagaaaagtgagaagggccgtttacctccctctgtagctatcacctgttggtccacagagtttcttgagaaatgagcaaacattttatgattagggtaaccctttncacatggaacggggaaggatggggaaaggtgggaatggacccttaaggagttgggccttgaggaccagttttgtttttctggggggtttgggtaaggttgggcagtttccctggggaattggcttaantggcttgttgccnatggtttggattntaaacagtggtgccat

SEQ ID NO: 434719 - DNA, 1226 bp, Homo Sapiens
  misc_feature (213)..(244): n is a, c, g, or t
  misc_feature (308)..(326): n is a, c, g, or t
tttatctgtaataattgccagtttattcctctggctaagagatccagaggtaatttgaggtttacatttctttttaaagttctttcatcaagagtttaggtgcccccattgccctcataagctggttgcaaattatttgactcttacttgtaaaaaaaatccttaattctttttgtgtgtgagacacgtgttcattaaaaagtacatataagnnnnnnnnnnnnnnnnnnnnnnnnnnnnnnnntttcacaccacacagaaataagcttggttaagtttgtgatatatgttatatggatgtatgtatnnnnnnnnnnnnnnnnnnnaagtttggaattttatcctacatatgtgagctgatattaaatatgctgctttgccataacctgttatgttttactttacaacatggaatgaacatattcccatgcaaatgtgtgaaagtttccaattgaaaaatagacctggaaaatgggtcaaaatccaaaatccaatgagatgctggtaccaaggaaattacctaaaacaaaatttcatcagatgattaaaagtaaaatggaggtcaaagatacatcagaaaatgctaacagaaagaaagctggggccagattttaatattaggcaaaaatgaattcaaggcctaaagcacacaggataaggacggctgcgtgaatgtctttgcttccaatgcatcatcacaaacttgtttcttactcttcttatctcttccctaagcctttcaagctcatctactcctcttatcatttcttcagggtccaaatgcctaacgggtgtgtcctctttaaatccctggccaggctgattcggccctcctctggggtttccttctgcttcctggcttacgccttcttcggaaggttgaggatttccttctgcctcctgtggtacatcctccaaagggcgatcttcctcggcctttggcatgttctgtggttttccctcattttcttcacaagacttttgcatattgagtattttttatttcctttttgaataaattaatcctgcagggattcaggggattttcctctctcttccctcacctcgatttgtgtcgcgcccaaaaaaccaaatatcctgaaaggatcttgggcacttttctccttctccagcaataaggagctgctacagggaaacaggccctggactataaggacttctgcacacgtcgactcctggtcacgtgagagtcgcgtcatcactcc

SEQ ID NO: 434720 - DNA, 1104 bp, Homo Sapiens
ggctgtacggcccggagattttgggagtccggaactggtgtcgtgtggtcgcatcgtgattgtgtccgcccggtcagccggttcggccttacggattatcgaggatgcagtgacctaggctttccagcgtgattgccagaactcgacgatcacatacagcatggatccccaaaatcaacatggcaggtggcagttcgttagtggtgatccagcagcctatctattggatagccgtcagagcattagactatgagagagagattcagcctactgctatctggtccttagaccagagtcaaggccataagaggcagcaatgaatacacagaagggccttcggtggtgaaaagacctgctcctcggacagcaccaagacaagaacagcctgaccggactcatgaacatcataccaattactgtgaataataactacgagcacaagacacacaagccacctgggacatgcagtactcccaagtaatgccaggggccccattttgagcagatcaaccagcactggaagtgcagccagctctgggagcaacagcagtgcctcttctgaacagggactgttaggaaggtcaccaccaaccagaccagtccctggtcataggtctgaaagggcaatccggacccagcccaagcaactgattgtggatgacttgaagggttccttgaaagaggacctgacacagcacaagttcatttgtgaacagtgtgggaagtgcaagtgtggagaatgcactgctcccaggaccctaccatcctgtttggcctgtaaccggcagtgcctttgctctgctgagagcatggtggaatatggaacctgcatgtgcttagtcaagggcatcttctaccactgctccaatgacgacgaaggggattcctattcagataatccttgctcctgttcacaatcacactgctgctctagatacctgtgtatgggagccatgtctttatttttaccttgcttactctgttatcctcctgctaaaggatgcctgaagctgtgcaggaggtgctatgactggatccatcgcccagggtgcagatgtaagaactccaacacttgtctattgtaagctggagagctgtccttcc

SEQ ID NO: 434721 - DNA, 485 bp, Homo Sapiens
tttttttgacagtttcattaattaatatattttctgcattatagttaacatatgtactttcttcgtgtcaccttattttccgttaagtattgatattttgttatattcaaacatgagtacatttcaacagtcttttgcaataaataccataaaataatagagattcgcataataaatattctttacaataaaaaagtttaacagacttttgtcttaaaaatagtcagaattcaactttgtgatttatacataaaatatacaaaaagcaccacaatttgtggttaaggcaaggaaaacacagaagagattagaattactcagctgttaactatccaaggggccaaaaggaccattaaggagccaagatcactttaggcagcatagttctgtgacacatatagattgatcagctataaatatcaacttgagttatccaagtgccctcaatgacaacaaaaatttggtgagaagcatggggtgaagaa

SEQ ID NO: 434722 - DNA, 921 bp, Homo Sapiens
  misc_feature (490)..(511): n is a, c, g, or t
ttttttttctcaaggtatttcttttgtaaaggagccagatttggcaactagactgaaaatcttccaaaattctgtacaaatgtgtaatatacaaatatacacaaggcttttgccaagaaaagacatcacaacaaatgacagaggtggctttggtgtcacataccacctacagcatctcaaacccctaggaatgtgaggggctgatggaccacaacataggctacacatgtaaacacgctacattacactatgtacactggagtataaacaatccactgtcctctccggtctgttcacaagccctctggcgggaaggaaggccattcaccaggcaacccacataaggggaacttctttaaggtgggagggagaaccctgcagaatgaagtggttcaccctaagatctattaacagcacaaggcatgcccttaaagagacaggcggtaacagcgaattcgggagatggaccacttcttgtgctccttgtcannnnnnnnnnnnnnnnnnnnnnactccatctcagtgaaccgggcaaacatggctttccggacagcatctttgtaggaatcggcgcccgacaaaccatatgcgctgcctttggctcctaggccagctccctttagccgaactttgagcctcaatgggagcccgtatgcccttgacacttttcgaccaaagccagaagcttcccggccagcccatgggcctgcagcattcttgtttgccaatggttcctgatggcaaatgcccatctttgggggggttggttctgaatttccttgccaaggggcaaaccaccacggttatcttaaaaaaggccagggcccccagtttaaccaactgggaaaatggggccatttcaaaacccaggggcccgcgcatcaaattggttttttggcgcttgggacttctgagggttct

SEQ ID NO: 434723 - DNA, 2701 bp, Homo Sapiens
  misc_feature (279)..(279): n is a, c, g, or t
cccatccatacaagtaccgggaaaacagtgtttttcggacagcaattttgtaagaatgggcgcccgacaacccaatatcgtgctttggctcataggccagttccctttagcggaccttaaccctcaatggaccgtaaatgccttacacttttggtccaagcagagcctttcccgccagcccatggcttgcagcatcttgttgccaatgttactgtggtcaatgccatcttggggggttgctcgtaattcctgccagtgccaacccccccagttcttaanacagcagggccccagcttacgaacttgaaaaagtgcacatcaccatacacagtgccggcatcaaactgcttcttgcgcttgggctctggaggttctggaatgccgtactttctcccgtctttctgcagctcggtctcggtatttcatctctctctcccttagctccaaggcttccagctcctgctcgctcagcctggatcgtcgatagatgtccatgttttgcttgtgaaggtctgagagttgctggtgcctgactagggcatctttgttcgggaactggcgccggcagagcagacaggccatcttcttccagtcagctagcttctcttcctcactctcaagtctctccaccagctcctcctcattgtcactgtcaccactgtaagcagcaaccagaccccttttgaggggattctcctcatctccatttcgcaccaattctgggatgagctgctgcctttcagctaaggctcccttcttctcaaagagagcaaagccagcgtctgctgcagcagattctctcctttcttcttccctcaaggaattgacaggctgaaagctatttttaaagttttctttctgcttattcaaactcttagcccagcgttccatgtctttggcaatctgctgggctgttttgctcttgggtttctccttcttctctttcccctcttttgcaggaggcaggcccgactgctggtgggagctagactctgcagctggcacgtaggtctctttttccccatcccagtaaaggtactgctgggtcaaggaattatagtagtattgcgagttggggtcataatagagccctgttgtcggatcatagtaatatcctgaagattcatcatactggtaagtggacgtgtcaggtactgcatatttggtaccaggaactacaccagtaggggaagcggctggggcctgtgtacttgtgctagtgctaggctgtgcttcctcagtcggagagccaggtggattggaggtttgattatacagctgaggactctgggacactacagccgctgaggtggtggtcactgctgtgcctgatgcagatgatgcatcagattccaatcctccagcttgttgttgataaaactgctgataatcctgtgaatactgagcatattgggcatagccatcttgacctggttgcagataactgtagtcaacactgcctccttcaccactttgagactgggtggatgaccactgagcagcagcaatagccgtactagctacagagaaggcgctgacgcggttaccatctgagaggaccaagtcttttctggcactttttgcaaaatcaaccccaatagttttgccatcaattttcaaaggaggatggagactctgtaatatctgaagcagctgagaagcatccattgcagaggacagctgcacaaatgcgaagcctctgttctgctgggtctgtttgtcttttatgaggcggatgttattgacagctaaagacgcgtaaggagacagtgctgtcatgatggaatccaccacagtgtgcggagctatgttccgaagaatgatcgtatcacagtagtaatccacagactgaaccgactctgtggttccaggaggcacttcctgttcagagtcaaacttgtctgctccacatcggaagcattttagtcttttcctgaaattgttaaggcagcacttgttacaaagccaatcttcaaacttaggtctgggattgctataatgcattgcaatgtgctttccttgaatcaccaactttttctgattggcttccatccagctggtagcatcttgcaagtgataaaactccacgaaggcgaaaccacggcttacacctgttttcctcttcatcagcctcacatccgcaggctgagggccttcgaaggactccatcatttctcgaatatcgctctctgtgatggtgatgggaaggccgcgcagcatgatggtcttgctctccctctcgtcactgatgtcatgcctatagtcgtgctcaccatagtcaccatctgaatggtagccatcttcggatcggtcactgttccttctttcacgctctctctctggactgtcatagtctcggtagtcatcatatctatcacccctccgatcatcactagatcttttgtaatctgagtccctccgcctgcttcgggattcacgctcatcacggtcatccctgtctatgatggaaccgtatcttccactacgctctgttctactcactcttttgtctgaacccattgtcccactgaagatttagcacacagctccaaaaggttcaaattttattttttcccaaggagagaccgaagcagcagtagcggttctgcgccccagaacctccaacaaggttcggcggctacacaaaatggcgcctccgccgacggcccctcgtgccgaattcgccacccaggcctcgctc

SEQ ID NO: 434724 - DNA, 1122 bp, Homo Sapiens
  misc_feature (641)..(641): n is a, c, g, or t
tcggacgaggggccgtcggcggaggcgccattttgtgtagccgccgaaccttgttggaggttctggggcgcagaaccgctactgctgcttcggtctctccttgggaaaaaataaaatttgaaccttttggagctgtgtgctaaatcttcagtgggacaatgggttcagacaaaagagtgagtagaacagagcgtagtggaagatacggttccatcatagacagggatgaccgtgatgagcgtgaatcccgaagcaggcggagggactcagattacaaaagatctagtgatgatcggaggggtgatagatatgatgactaccgagactatgacagtccagagagagagcgtgaaagaaggaacagtgaccgatccgaagatggctaccattcagatggtgactatggtgagcacgactataggcatgacatcagtgacgagagggagagcaagaccatcatgctgcgcggccttcccatcaccatcacagagagcgatattcgagaaatgatggagtccttcgaaggccctcagcctgcggatgtgaggctgatgaagaggaaaacaggtgtaagccgtggtttcgccttcgtggagttttatcacttgcaagatgctaccagctggatggaagccaatcanaaaaagttggtgattccaggaaagcacattgcaatgcattatagcaatcccagaacctagttttgaaaattggctttggaaaccagggctgccttaaacatttcagggaaaagactaacatggcttccgatggggaaccaaaaaagtttgacttctcaacgggaaaggccttctggaaacacacgagcagggctaagcgcggggaaatacccccggggatccgatttttcttatgaaaacaactctcccaccctgggggcggtattcgccttcggcaacccccgtggcctccctacacccgccttcctactggacacaaacttccgcccctctttcgaagcaccacccgagacccgcggccaagagacggagcccccgacattttgagccgcccgccgtcgccgaccgcagggacgaccgccactccacctcgtgctataaacgactgacagacacccgctcacacactcccacttgtcac

SEQ ID NO: 434725 - DNA, 461 bp, Homo Sapiens
ttttttttggaaaacagagagaaattgtaataatgaaaaaaggacagagtttagtgaccaatcacttattttctttaaaaacacataaccacattaactttttgctttatacaaccatctagaaactataaaacagtaccacattgtgcatttaacctacttatcaagaagggaacttcataagtcataagaattctacccatataggaaggaaaaaggagacagctaatagcatagtcacagatacaacatgagtccaagcaagcatcaattcttcgacatcaccttttccatttaccagagtggagactgagaaagagagtgagggagaaaaaagagggaaggaagcacccacagaggactaatcacaatccatagttacttttgacaactatagctcagggtttcatagaatagtatcatttggaccaacacagtgtggtggagggagaggggtgaag

SEQ ID NO: 434726 - DNA, 471 bp, Homo Sapiens
  misc_feature (376)..(376): n is a, c, g, or t
  misc_feature (393)..(393): n is a, c, g, or t
  misc_feature (431)..(431): n is a, c, g, or t
  misc_feature (436)..(436): n is a, c, g, or t
  misc_feature (454)..(454): n is a, c, g, or t
ttttttttggaaaacagagagaacttgtaataatggaaaaaaggacagagtttagtgaccaatcacttattttctttaaaaacacataaccacattaactttttgctttatacaaccatctagaaactataaaacagtaccacattgtgcatttaacctacttatcaagaagggaacttcataagtcataaggaattctacccatatagggaaggaaaaaggagacagctaatagcatagtcacagatacaacatgaggtccaaggcaaggcatcaattcttcggacatcaccttttccatttaccagagtgggagactgaggaaagaggagtgaggggaggaaaaagggggggaagggaggcacccacagagggncttattcacattccatngtttacttttggacacttttggctccggggttttcatnggttnggtttcctttttgaccancacgtttgggtgggagg

SEQ ID NO: 434727 - DNA, 823 bp, Homo Sapiens
  misc_feature (805)..(805): n is a, c, g, or t
tatcatcttttccccattactttgcattattcaggaaataattatttattcccaaatgcagttttctaagcagtgaccacaaaaatttcttattctaaggaaaataattaagaaaataaccctatctgtggcattgttttaaaatgtgggatacaaatctggtaagcagatttcaggtcattattgttttcttttaatggtttacatgaaattttcctctcaaaaaacaagtacctcttactgtataacatttgagtttttaaaattgagatagcttctgagagaaaaaaagaaagttgaatttgtagctctctcaactacaaaatcaccacacttttctcaaatctaataggaattcagtgtcattacagatacggtctctagtgaccaggtgaagacaattgaagctttggtagaacttctgcaaaagttaggtaaagaagaataaatccaatttatcagctttgttcatattctttttctgagtgatctaaatttttcttgcttgtgatcattagctaagacaaggagtgttaaaggttttctaaatgcaaacacatacgtttctgcatttcagaagtcagtcttgatagtaaatcctacaaactctcaactttctgcattgtattttaagtctatacaatgttagagcacatggtaatgtggggacagagttgattatatgatagcatgaggaaatttgcactggttggtgttacaaaccaatggatctaacccggcatacttctcccaaatttggaaaaaggttaaaaaccatctcatttagggtttgggaaggaggccntaagggtaggtcccatac

SEQ ID NO: 434728 - DNA, 704 bp, Homo Sapiens
  misc_feature (682)..(682): n is a, c, g, or t
agaagaataaatccaatttatcagctttgttcatattctttttctgagtgatctaaatttttcttgcttgtgatcattagctaagacaaggagtgttaaaggttttctaaatgcaaacacatacgtttctgcatttcagaagtcagtcttgatagtaaatcctacaaactctcaactttctgcattgtattttaagtctatacaatgttagagcacatggtaatgtggggacagagttgattatatgatagcatgagaaatttgcactggttggtgttacaaaccaatgatctaaccagcatactctccaaatatgaaaaagtaaaaacatctcattaggtttggaagagcctaaggtagtccatacaggaagtttgcctgagaacagagaggagcctgttgattggcatggctcatgatgcctttcttgtatgaattatcaaaactgatactgagttgcccctagaaaacagccttccagaatatgtttgcttatttatgggtgggaagaggaagtgagaacaagatgagagtttcccttaaagtgagggagaatcatttatacaacttttgcaactggaagtatgtttccttgtaggccaaacctttggggttatttttatccgtccaaatccaaagccacccttcagttttttttgtaattggggtgcccatccaaccntaaggggggggccattccaatt

SEQ ID NO: 434729 - DNA, 537 bp, Homo Sapiens
  misc_feature (376)..(376): n is a, c, g, or t
  misc_feature (500)..(500): n is a, c, g, or t
ttttccaggtaacacatttttattgtaaaatatccacttgagttgaaaaagttgtcaaatacaagtttaaggatacgttatatattttgcttagttgtgaaaataatgtacatttagaatttaaatcacttaaattcattccattgtaccaatattatttatgcatccttatacttaagaatagcatctactaagacaattatgcagaaaagatcccagggataatgcaacacctaaatataatggtgggggagataagagtaaatgtactaatgagttgtctaactaaagaatagttcaattttattttttcaaagggcattttattcttgactttaacattaaaagtactcaagggattggggcataagtcagngagaaggcttattaagttttctacattaaggtatgaagagtttttaagtcttacgggctttaagactttttttaaagaaaatcactgactacatgagctaaaagtagaaaagcatattttaagngttaatctgaataccttaaatatagggattttaatgc

SEQ ID NO: 434730 - DNA, 444 bp, Homo Sapiens
  misc_feature (251)..(251): n is a, c, g, or t
  misc_feature (279)..(279): n is a, c, g, or t
  misc_feature (290)..(290): n is a, c, g, or t
  misc_feature (311)..(311): n is a, c, g, or t
  misc_feature (323)..(323): n is a, c, g, or t
  misc_feature (348)..(348): n is a, c, g, or t
  misc_feature (358)..(358): n is a, c, g, or t
  misc_feature (368)..(368): n is a, c, g, or t
  misc_feature (374)..(374): n is a, c, g, or t
  misc_feature (394)..(394): n is a, c, g, or t
  misc_feature (403)..(403): n is a, c, g, or t
  misc_feature (425)..(425): n is a, c, g, or t
agccaggagacacttgataagtaatatcctgttcttctattcagatacatacctgtctgtttcattttcactgctgtcactttacctgctcttgggctcttgattcctaatagaccctatccacaagctccagaggcatgagggacactggccaagtgcaaaactttatttctgggataaagcgcttgtgtcctatcctgggtgaacccaattacacttcaacatttattgaccatccacaacgtgcaggntacaacagcccgggggaaggtgcagagnctatgaggggnacaaggcaagtagtctagagncttgggcaactnggaaggaacctcttgtcactggatncccttacctnggggccaggnaggtgncaacctcctcttttctttantatttcctncccaacttgggccaattttccngggaattcaagtttttttt

SEQ ID NO: 434731 - DNA, 452 bp, Homo Sapiens
aacttggtatgaattgtgccaaggcctccccagttgtcatcctgcctcttgttgccctccctgtccttgccccccaccccacacccatgcccctgtttccttacagattttgatattgttctaatgtgtaatagaaccagccgagtccccttttatcagaagggtctgaaaagcagcagcacagagtaggtgaacacaggcctgcaagtgcgaccacctcagacccagtacgtgtgcccacagtggacacacttcacacctccaacacacccacgcgcaggcatgtgttacacggcatgttcacacggcatgcatgcacagccaggatgggcactcaggcacagatgtggcagagggaatggtctgatcctgctgaaagccattaaggagaaacgaatttcccagtgcccgggctgcaagagagccttataggggcctgtttcctggggatg

SEQ ID NO: 434732 - DNA, 421 bp, Homo Sapiens
  misc_feature (70)..(78): n is a, c, g, or t
ttttttgttttaaacactttatttataaaaaagtacatttttaatcctcagtacattttcaacccatcannnnnnnnnaatacaagtaaaagggggtgatgcaaacaccccccaggtcagaaccaggaggatctgctgggctgtccctggaccaaaggcggaaagggcgacaagacgccgaagcaaggtagcgcatcacgctgggaggggagggtggcagcttctcctggattcttttcatttatacaaaaaaggaaaaccaattttttcgaccaagaatcccattcctcacagcaggggtcagaagagcagcagtggcagcagcagaggggcctgcctcctggcatccccggtactgggcagtgtgtgaagcctccctgtgggtgtggggacctggggcacacccacctgcccctcacta

SEQ ID NO: 434733 - DNA, 533 bp, Homo Sapiens
  misc_feature (64)..(72): n is a, c, g, or t
gttttaaacactttatttataaaaaagtacatttttaatcctcagtacattttcaacccatcannnnnnnnnaatacaagtaaaagggggtgatgcaaacaccccccaggtcagaaccaggaggatctgctgggctgtccctggaccaaaggcggaaagggcgacaagacgccgaagcaaggtagcgcatcacgctgggaggggagggtggcagcttctcctggattcttttcatttatacaaaaaaggaaaaccaattttttcgaccaagaatcccattcctcacagcaggggtcagaagagcagcagcaccgagtgggacaggggctcctcctggcctcacaagctgggcagtgttggcagcagtggcagcagcagaggggcctgcctcctggcatccccggtactgggcagtgtgtgaagcctccctgtgggtgtggggacctggggcacacccacctgcccctcactaggagagggtttctgttggcagtcaggctttgggggtctctgtctggactcctgaggcctgg

SEQ ID NO: 434734 - DNA, 483 bp, Homo Sapiens
ttttccataaaatatcctaaatactaactatttcatttaaactgtcttcccttcccactgcaggggaagacaagcacgctagccatttgtgggcatcaagaccagagtcaagcagtactcaagacaatcactataccaaaagcgttattacatccatgcagactgtaaaagcatgctatcaagaaacagaccactggaaggactcctagactggaaagccctaaccatgaccctaaatatacaacttcttgcaaagaaatgggtttgagactggtttccaacttgagaatttcaagatattatttaccagccttaagcaggaactactggtacttgtttttgatctgagaagctaagctgcttgtcctccctggtcatgtcagcaataatactacgagaactgctggctttatatagctattctgtccaaacctagctcctttcctaaaaccatcattttaacagaggccaagtacacccttg

SEQ ID NO: 434735 - DNA, 423 bp, Homo Sapiens
  misc_feature (29)..(29): n is a, c, g, or t
  misc_feature (61)..(61): n is a, c, g, or t
tgccctcctcaacacccttgcaacgctgnaaacaacaaaggcccagatgtcctcggcgtanggcttcaggctgtcaaggcttgggcgccccagggcctccttgagtgagtgcagcagcaggtactgtcgtcggggctcagcctcgatctgctccagcaggaagggcaggaagtcgggcaggctgccagcacccacacggcccagtgcatacgaggctgcagccctcacatcctcactgggtgaccccaaagcttccaggagcaccgccttcagctcccgctgggggcctggcccagccacctgacccacctcagccagcgacaagaattgccaggaccttgacccccgtgctggagtggggcgacctggcatcgcagaccaggcgactggctgtgctttccgcctctttggggacaggcagct

SEQ ID NO: 434736 - DNA, 766 bp, Homo Sapiens
aagcttggcacgaggctactttagtaggccacctctattccttctgaatgtcatgcccatgttcaactatcagtaattccatgttggagcaaagctgtgaggcaggacatgaatacaaaggcttaggtcctcccactgtcttatctcattcacgcatcttcaccggtagctctgttccatgtcaaacccaggctatttcttctgtgatcagatcatatcttgacctgcttctttggtcaggatgatggcaccagaaatactaacagcaaatatcattgggaaaatgccactgtttttaaattgggggggaaaaaaggatcaaacttttcaaagtaacctcctgggcacagtttttggtggctaataagaaacgaacttctctccagtgtctagttgattagaaaagggacaagggaaacacatactctaattggacgtagccattgacttctgagctgagattgacatggaattgggtatgtgtttattttgaggcataactattctatgaattgcacttatgtatgttcttctatctctgatatcaaaggacatagagtgtcattgcctgctctgcagtgtacttacccaccagtgcttattaacaggctagctgtcatctgcttggctgatgtttgctgtcagttttgctgttggactatatctatctttctggagccaatcttcgcagcttggaactgggtggtcagagagctgggtgggaagatgcactcatccttcccttatttgatctcatttcttgtag

SEQ ID NO: 434737 - DNA, 455 bp, Homo Sapiens
  misc_feature (25)..(25): n is a, c, g, or t
  misc_feature (35)..(35): n is a, c, g, or t
  misc_feature (69)..(69): n is a, c, g, or t
tccccctaatggatcctccatcaangatgcctaangaaaaggccgtctgagccccacaataagacagantcccctacccatagctatgaaatgcctgcaaattttaacagatcccaaaccctatgacctgccctgagatagagaaaaaaacttgaattctgtcccagcttcaggaaggtatgaaagaaacgcggtgatgcagattagtaagacagtagaatcttttccaactttcttcaacgacgcaaaagggtctgcttgtttccaagaaatctgagctccccaggaaaccggtctcattttctcaggcagagattctggaacagccactaagatgaagcagatgtccagaagagcgaccactgtggccaccagcacaacgaggctgtctccgtaactggcagaaagatatgctccaatggccgggctgctgacaagaccctcgtgccaagctt

SEQ ID NO: 434738 - DNA, 548 bp, Homo Sapiens
  misc_feature (462)..(462): n is a, c, g, or t
  misc_feature (502)..(502): n is a, c, g, or t
tttcaatgtccatcactgacatgttttaataagagatgaacgcacaaattggcttccttgcaatgtttacttcaagcagtaggtctgtctgctctggcctttgatgggatctgccagcttcctccctccttgtctatgtcccctgccttcaccatgggaaaaaaggctccagtaaaccaaatcccagaagtgatgttgcctgcggagaccaactcaaaaccaactggcctcccactgcttcctttgaaaacatatacatttcacacacctgagtcctcccacccctctccactccacggcaggctccatgaatggaactccaggggctgcctttgtgtaatgatcaagacgtccctgggcagaggagcagcttcgcatcagggaatcctggtcccctgatccccatgggatgagatggtgggtgtagcatccttctggtttctctgcccattcagctgtctncccatgcacaaaacccaaagccctggattttggattttgnacctgcaaacctgagtaaactttttcccctcaagagtcatcattca

SEQ ID NO: 434739 - DNA, 988 bp, Homo Sapiens
  misc_feature (129)..(129): n is a, c, g, or t
  misc_feature (861)..(861): n is a, c, g, or t
  misc_feature (865)..(865): n is a, c, g, or t
ccgggtgactctgggtggtgcctgattggttgctggcattaccagaccctcctaatatgggtagtcttcccatgtagatccacaggttatgaacaaagctttcaccacatatacagagaaccccctagngcaaacatctccccatccctgggtggacctcaatgaagatgagcaaactgagtcaagacacaaaaccctgttggtccaggtcatactcttgggtgagttcttgatgtcggcagtgacaatcagtgccccagttggggcctgccagccccctcaagctctgcagcctcaaagaccagctcagtcccccatcggtcactattcctgagagccagagttcgacctggtaacacctgcaccgtgcattcctcggccgaccatctcctggccccactcccggtggctggactcctgcagtcctcggcctttggtctcaatgggcaaaaagcaggaggccagggcagccaggaggcagcagccactgtaaactgccagagtcaggtacacagaggattccagcatcacctgggcgatgaacggagtgatgagagcacccactcttgccatgccgctgcaggtgcccaggccgagggcccgtgttgccgtggggtagacctcagttttgtaaacatatgccgcttgaaagcctccagaaataaacgctgttgcaatgaagagtaacagagtgagcacatttcttccaacacagataaacagcaggaggctgctagaaggagaagatgacaaagcacagggccatggtcttcttgcgccccaggcggtcattaatccacagagtcacaaggacacctggaaactcagagagggtggtccacagcaagtccatgtaatccncctnactcaggtactcgcaggccaggctgcattttgcctctacagccttcttccgactggagatgccgcagacatctcctgcctggaagagttctgtggtgagtagaactaacccgtagtaagagaa

SEQ ID NO: 434740 - DNA, 525 bp, Homo Sapiens
tttttttgcacacttagaatgggttttctttatataaattattcatcagaaaattaaaagggaaaaaaggctaggggtaacaacaaaaatacccttttagatgaatataaaataatccttagagaaccatcgtctccttatccttggcaagcatcccctcagggagagctgctgttctctttccacccctctgatgtcagccccagttcctgggagcccagatccacagcgttgtcagcctaagagagaggttctctagaagaatagatgttagcttgagaacagaacattacaaggagagtacacacgccatagtaaaccatatgcctattcagggaggtcaaggaagacaaaggtctttaaaggaaaagcgagcaggatcacagtggttttgagataattctccttggctacaaacatcaataacaaaggtcattccagtctgaggttggacaggcaattgctgggcagttgtccttgcagaaatattttttgtgtaagggtgtgatggcctctgtgccgggt

SEQ ID NO: 434741 - DNA, 455 bp, Homo Sapiens
  misc_feature (218)..(218): n is a, c, g, or t
  misc_feature (392)..(392): n is a, c, g, or t
gcacacttagaatgggttttctttatataaattattcatcagaaaattaaaagggaaaaaaggctaggggtaacaacaaaaatacccttttagatgaatataaaataatccttagagaaccatcgtctccttatccttggcaagcatcccctcagggagtagctgctgttctctttccacccctctggatgtcagccccagttcctggggagcccagnatccacagcgttgtcagcctaagagagaggttctctaggaaggaataggatgttaggcttgaggaacaggaacattacaagggagagttacacacggccataggtaaaccatatgtcctattcaggggtggttcaagggaaggacaaagggttttttaaagggaaaagcgagcngggttcacagtgggtttttgaggataatttctccttgggcttacaaacatccattaaccaaag

SEQ ID NO: 434742 - DNA, 463 bp, Homo Sapiens
  misc_feature (357)..(357): n is a, c, g, or t
  misc_feature (373)..(389): n is a, c, g, or t
  misc_feature (433)..(433): n is a, c, g, or t
cgaggagtttattaaaaaagtgttagagcaggaacgaaaggaaataaagtacacttggaggagggccaggtgggcatcttgagagagcaagtacacggttttgacctttgacttggggtttatatcttggcatgcttctgggggctgcgtcccttctcccctgattcttcccttggggtgggctgtccgcatgcgcagtggcctgccgacacttgggagggccgcgtgcacagtgtgtttactggagttgtgcggtgccctcttgaggcagtcttcccttaccagttcctaggggaaggtcacacgctggttaaactttgccactttgcctcgtagtgtgcatgcttgacctcactncaccaactcctgagannnnnnnnnnnnnnnnnaatttaaagttctaggggtacatgttacacaacgtgcaggtttnttaacataggtatggcatgttgccatgttg

SEQ ID NO: 434743 - DNA, 450 bp, Homo Sapiens
  misc_feature (380)..(380): n is a, c, g, or t
  misc_feature (388)..(388): n is a, c, g, or t
tttcatgtgaataaaatttaatgttgtcataaattttataacaaagttaatctgacacatttaatgacatgcataatcattagtatgcagcactgtaatcagacattgataataagcagttcacaccagtgactgtaagagtctttacttgtgttcagccaagccaactgcttggtatatttttctcccttcttagtcgttagttttccatacctacaataactatcagtgggtgatggggcttctctgacccatgtgaataatttaatcctcaatgcacaggatacaggaaacccttgctggaggacagtgtgggaggcaggaggaagggctgttctccacttccttccacctggaaacacctctggcagatgggattngggggagnctctggcctaacaggcccttggggacctaaaccactttcagtgttgtttccagtggagtgtt

SEQ ID NO: 434744 - DNA, 551 bp, Homo Sapiens
gaatgataatgccattgcttagaaaaggctgctccagatgccatatctacagaaattgtacagcccaaacatctctgagcaataggtctctggtagtcttgatgtctagaccaacaattcccagttcattcttctccgggaaggaccccggatagtcccagagactctcattctgctgttagattgaaagggttaggcacaacagccttggcaaagtcacaagggcaaattcacactaaagtgtaaatgaccccacaactcctcttctatttttaggttggggaggtgctttagaacataaggaggaactaaagaatattcctgttacatacaaggcagagaaaagggaaactagtggtgacaagacaaatcatccctttgacatttggctggctctacctattacagctctgggggtgaggtgggaacaaaaagatgctgtgtaaagaagtatcttatgccatccctactgtagtgaggtgcagtttagaggggacactgatcaagcagagacccagagtgtttccctcgtgccacctcgtgccaagctt

SEQ ID NO: 434745 - DNA, 1471 bp, Homo Sapiens
ccaaaattttcccacggggcgggggttttgctaaaaacccgttggggaaaagcgaaaaggccagtttttttggggtttgcccccccctggaagttgggaacgccccgggaaggcctgggggttttctggaaaattcccaaaaaccccagggccccttgcccattccccccagggcttgccgtgggagaaatgaagggccaggggagcccaggccagaacggtttttcttccggtgcattccatcttaaagatgccagcccatgggaagggaaaactgactggggatggggagttgtgttccctcccccaaaaactcatttctttggttgcccgatgtcaactcctgccttagacaccccatccccaaaccctccttctccttcatttttatcccttcatgttacaatgacgcagtgaatgctgcttcattgtcttaaaactgaaacagaaacggggaggtaggtagcatggatgggggagtgcacgaactctataggtacaggatgaggatgccccgcactagctgctatgaaacctgagtcctctgttcactctgcacacacatcacagagggctgctggccggtggccaaggcatttggtgagggccccatctcatggaccctcccagatgccccttcatcctctctgagcttgaacactggggcttgaaaggtggccaaagagctggcgaggacacaaatatggggcattcaaactcctaggaaagatcacaattttgctcccacttccaaggggactaggagtggggtgaaagagcccatcgtactagagcgaatgtgaatccttatccccagaggtagaatcattttacccagtaccggaaacacgagcttccagttcttgtttttacagtaactcctgatagcagaccttgcctcctcccacttccagtaccctctgccccttgcaaaggggccacaaagtgcatgcacggctaaccgtgtggatgctgcccacagccacggccactcacccctcgctcgtgtgcacagcctccccacatatacacgggtacacgtaacgcatggtggccagagagacatttacagtgtgagtgtgaaggcccggcttaggcctgcatccttgggcagggtctgcccttggtcccagggtcccttaaacgctctgcagccagccccgtgccttagtgtttgatctcgaggatggagggattgtggtccaggatggcgaggataatcttgtccatgtactgcctcagccggaagttgatctcctcctgctccttcagggcttccattagctcatcgcgcgaggcggtgtctatctccgcagccagagactgggctttagtctgggcagcaaagaggttttttgcttcgtagaggctgaggctcaaaatctgcccattcaagtcgtcgttctgatcccgcagcttataattctcctgcttgagccgcttgacctcgtgctcgcctcgtgccaagctt

SEQ ID NO: 434746 - DNA, 437 bp, Homo Sapiens
  misc_feature (418)..(418): n is a, c, g, or t
tttataatgaatgaatatatttattcaggtcactgctttttaagctattttctaagtatatattgatgaattattgttaaattgatattctttaatagaaactacaattactgacattaaatataaaacaaatattttcattagaatcatgcaaaatctaaacaaatttttgaaaataccacccaaaatattttttttctgtatatgacaagacacacatcagatcataagcaacaagaaaacaaaaaagatatgaaaaagatataaagccctccccctcaccacatttggattcatcatatctattatggattgtaccattaatcacaaagggtaaggtgatatttctgttaggaggaggcagtgtgccctaaaaagcattgacaatctcattgtcatatacccaagaaagaacccngaacctggaagggggaaaa

SEQ ID NO: 434747 - DNA, 461 bp, Homo Sapiens
  misc_feature (335)..(335): n is a, c, g, or t
  misc_feature (364)..(364): n is a, c, g, or t
  misc_feature (406)..(406): n is a, c, g, or t
  misc_feature (430)..(430): n is a, c, g, or t
  misc_feature (440)..(440): n is a, c, g, or t
aagcttggcacgagggtagtattctctttcactggctttcctatgcttttaatgattttctcttatcctagtttgcattttctttttacttttatgtctgatttttgtcttctataagatcagtgctttgatctcttgtggtgtatttctcttacattctctcatctcagtctgatctgttctatggcattctttcaatagatacttattatttactgagtattggacaccattgtagggcactagggagttataaatctttgcctcttttttaaaaaagttaaatgttaaacccccaggattaaggcaatgcacaggatacttttcttgtcggnggattcacctaatccggggtaggttctgnaatcttgtttcctaaggattgggagggttttgtttaatttcnggatgctttaggtaatgctgggcnttcaaggganggggaatgttggccggtaccc

SEQ ID NO: 434748 - DNA, 110 bp, Homo Sapiens
tttccttccaaatattttatttaaatattaaattaaaaaacatacatcaactaatcatttggcatacatttctcatgttaacataagagataaaataattcagttatggt

SEQ ID NO: 434749 - DNA, 1342 bp, Homo Sapiens
  misc_feature (536)..(558): n is a, c, g, or t
  misc_feature (1112)..(1136): n is a, c, g, or t
  misc_feature (1194)..(1211): n is a, c, g, or t
  misc_feature (1323)..(1323): n is a, c, g, or t
ggtagttcacataagagataaaataattcacttatggctaaaaaataaaaactatgtacatctcaatcagatcacgtagtgtctttaaataggctattgcattgccgtctgtattacagcactgtcaagaaatctacaaaacacacatcacacactcttaaaaaaacaagtaaaacacgcctttaacgtcctccaaaagaggttccacagcaataagaaaaaacaaaaaccaccgtgaaagtaaagtgcttgtcattgcttcaaagaggaaacacacaatggtttctgaggcctttgatctatggcattagaacagaaatcattttaaaaaggggaaggagttttgtgttggaatcaattgtgctacctctgtaaaaatgaaggcaagggcctggctgccccaagatggtctggattctctcccatcccaaaaacttctttatgagcgaacaggagactttggtgttttctctgcggcaaggcacctggtctgccctccggacagcctttcgcccagtctttgaaacagccacagnnnnnnnnnnnnnnnnnnnnnnngaatgggggcagccagcttccctgcggcccggcacaggcacagcccccggtgggcaccagcaggccagggatgcagcctcctgcactgggcccgcctccctaccctcaagtaactgggtcaatctttggcttttaaaaatacccgcctttcccctttctcaatgcctctgtttaacactgcagggtttaagaagccgaagtagctgaaggcacctgggctgggtttgggggcggggactggactcagggagcagcattgccttcgttgccttccaaaggcttctggctggtggagccccacggagtccacctgctaaaggtgcgcccagacctgccaggtaagggccgccccttcctgccgcctccaccccagtgctgagggagcgaaggccctggggccccttcctcaatgcacacctgtgctgacagggacgcttcttaacaacaggagcgagggaagctgaaacctggaacacaaacgtgtagtacaaaatgtaacaaataagtagtgtctacctgtctcccatgtagatacatatacaggatttgctttnnnnnnnnnnnnnnnnnnnnnnnnncacctgacctaaacctctcactttaccttccttgaacaaaacccaaaaagcctaggtnnnnnnnnnnnnnnnnnntcccggcccagggcaggcaccgccctgagccatgagccatgagccatgagcctgtctcccagctgcccagccctacagtcagcctccaatattgcacaacttcacccaagtncaggtgttcttgttggacc

SEQ ID NO: 434750 - DNA, 1105 bp, Homo Sapiens
  misc_feature (112)..(139): n is a, c, g, or t
  misc_feature (682)..(699): n is a, c, g, or t
  misc_feature (748)..(748): n is a, c, g, or t
  misc_feature (756)..(779): n is a, c, g, or t
  misc_feature (1012)..(1053): n is a, c, g, or t
ggcctgggtggcgaattcggcacgaggctcggcccctctctctgggttcgtcgtggttgagatgattacctcggacgtctacggaaacgagcgggcgcattgttgtccgctnnnnnnnnnnnnnnnnnnnnnnnnnnnncgcgtacattgattactatccatttctttagtcaacgctctccacttcctgatttctgctttaaggaaaactgtgaactttctgcttcatgtatcagttttaaagcagcccaggcaaagatcatctacagattctaggaattctctcccctgaaatcaaaacctggaagacttttttttcttattttagttgagaagtttcataaactgctcaaggattagttttccaggactctgcggaggaacggcaggaagaacctcagagagggcagaggtgacttcaaagtgctggggactccgtcctgagggtcacttggccctgagcccctgcgtgcccttgcggaagcccagaagcttcttcctgctgcacctcccgtttccgctgctgctgacgtttatgcatttcatgatggggtccaacaagaacacctgacttgggtgaagttgtgcaatattggaggctgactgtagggctgggcagctgggagacaggctcatggctcatggctcatggctcagggcggtgcctgccctgggccgggannnnnnnnnnnnnnnnnnacctaggctttttgggttttgttcaaggaaggtaaagtgagaggtttangtcagtgnnnnnnnnnnnnnnnnnnnnnnnnaaagcaaatcctgtatatgtatctacatgggagacaggtagacactacttatttggtacattttgaactacaccgttgtgttccaggtttcagcttccctcgctcctggttgtaagagcgtccctgtcagcacagtgtgcgcattgagggaggggcccccagggtcttccctcctttccaaactgggggggaaggcggcaaggaaaggggcggccccttacctgggcaaggtnnnnnnnnnnnnnnnnnnnnnnnnnnnnnnnnnnnnnnnnnnttccaaccacccccaaaaacccccttttggaacggccaccccatagtctctc

SEQ ID NO: 434751 - DNA, 1158 bp, Homo Sapiens
  misc_feature (107)..(107): n is a, c, g, or t
  misc_feature (380)..(404): n is a, c, g, or t
  misc_feature (461)..(477): n is a, c, g, or t
  misc_feature (1021)..(1048): n is a, c, g, or t
gttggtcctttgttttgttgtgggcggggctttttcttcgtagggaaagacgaattccccctcggttcggctcttaaaaaagccttttctgctggggtgacgccccnaggagagtcccctctgttaaaaggtgtcgcccctagcctccccaggtaaaggggcggccctttctttgccgcctccccccccagtttttgagggagggaaagggccctggggcccctttcctcaaattcaccacctgtgctgaaagggacgttttttacacaccaggaggcgagggaagctgaaacctggaacacaaacgtgtagtacaaaatgtaacaaataagtagtgtctactcgtctcccatgtagatacatatacaggatttgctttnnnnnnnnnnnnnnnnnnnnnnnnncactgacttaaacctctcactttaccttccttgaacaaaacccaaaaagcctaggtnnnnnnnnnnnnnnnnntcccggcccagggcaggccaccgccctgagccatgagccatgagccatgagcctgtctcccagctgcccagccctacagtcagcctccaatattgcacaacttcacccaagtcaggtgttcttgttggaccccatcatgaaatgcataaacgtcagcagcagcggaaacgggaggtgcagcaggaagaagcttctgggcttccgcaagggcacgcaggggctcagggccaagtgaccctcaggacggagtccccagcactttgaagtcacctctgccctctctgaggttcttcctgccgttcctccgcagagtcctggaaaactaatccttgagcagtttatgaaacttctcaactaaaataagaaaaaaaagtcttccaggttttgatttcaggggagagaattcctagaatctgtagatgatctttgcctgggctgctttaaaactgatacatgaagcagaaagttcacagttttccttaaagcagaaatcaggaagtggagagcgttgactaaagaaatggatagtaatcaatgtacgcgnnnnnnnnnnnnnnnnnnnnnnnnnnnnagcggacaacaatgcgcccgctcgtttccgtagacgtccgaggtaatttctcaaccacgacgaacccagagagaggggccgagcctcgtgccgaattcgccacccaggcc

SEQ ID NO: 434752 - DNA, 515 bp, Homo Sapiens
  misc_feature (24)..(24): n is a, c, g, or t
  misc_feature (50)..(50): n is a, c, g, or t
  misc_feature (65)..(65): n is a, c, g, or t
  misc_feature (73)..(73): n is a, c, g, or t
  misc_feature (78)..(93): n is a, c, g, or t
  misc_feature (109)..(109): n is a, c, g, or t
  misc_feature (315)..(315): n is a, c, g, or t
  misc_feature (323)..(323): n is a, c, g, or t
  misc_feature (325)..(325): n is a, c, g, or t
  misc_feature (328)..(328): n is a, c, g, or t
ggaggttgccagcagtgagcccangatcacacccactgcactcccacccngggtgacagagtganaactcccncctcnnnnnnnnnnnnnnnngtgattcctaattttnatacacccaaaacgtttccctgccagcaagttacccctgcccttcctgtgaaaggtaaacctaagacaaacatgtgaagtgaagatccccataagactctggctgatggagggtctcagttcatccacatttggggagaatcaatctaaataatttttaaacatttttaaagaagagtatccagctgcagatagcagcagttaaanaaaaaaananaanaggcgggggatggggagcttctcaacaattcatggaaagtgtcctggaaatggtaatgctcaagctgagcttattaaagcattctgaacagtatttttaaaaaatcaagtatcaaagaggatagaatttgaagtgaaaaaacatttctgtgtgcagtgttctatctgccaaacctcgtgccaagctt

SEQ ID NO: 434753 - DNA, 546 bp, Homo Sapiens
  misc_feature (330)..(367): n is a, c, g, or t
tgtgttttatattttttaataaagtttgtaatccaatggacacacaaaacaaaactgcgctgagaaaaacagtttcataaattaataagtgttaggaagttgggggaagagatcaaggtaataggaagaggggttagccagtctttttgtacaggtgccgtgtgacacttccacatcgcgggagcaggacccgtgctgtaccgaagcgcacttatacaaatgagtgggcaatacaaagtctgaatatgaaaataagatttcctctgaaaacacatttttggcacagattaaaaaaaacgtatgtcgggggatttgattttttaagtcagnnnnnnnnnnnnnnnnnnnnnnnnnnnnnnnnnnnnnncacacatcccaagttctgcatatcccaccaagagaaaacctttctgtttgctcttcaactgtaaactgtacatcccggtgaatcaaagacggtggcagcaggagaattaaggtgacgcatccaaatgagcaagggagatgggggtgggggcagctttggcatctggtgtcttggcagcc

SEQ ID NO: 434754 - DNA, 424 bp, Homo Sapiens
  misc_feature (25)..(25): n is a, c, g, or t
  misc_feature (28)..(28): n is a, c, g, or t
atggcccaggacgttgttgccaganacnaagtggctactgcacagcagctgtgtcattcttggaggccagcaggccctgccacacgatggggtacttcttcagaagttgaaccatatccacgggtctctgggaagtcaggtgtggagaggaatcttgtttgggggctggctggaattcagtgtgtggcagaaccagtcctggtggggtgctggggccagaggttgttgggacaaacaacggctgttttggggcagtctgagtgggaagagagactggaaggtcaggcttcatggagacagacacaggggaggggaaggaagtcgggcctgtttctgcttgtgccctctgaacctgggtgtgaggctcaggtggcctgtttgcaggtccagctgggcctcgtgccaagcttggcgtaatcatgaa

SEQ ID NO: 434755 - DNA, 1579 bp, Homo Sapiens
ttttttttgtcactacaaagtcctttattaacaagtcaataaaaacagaagagagagagatgtcaaaatactttccttggaggccccaggagggagaggcactgtcaggactcacctggccagggaaggcaaccccaccagaggcagaacggaggtcaggggggcagctggcccaggaagcctttggggaatggctcaggcctcaggcagggactgtgcaaacgccgaggctgcgcagggagtgatgggttgggggcttaagccccgagcaccgtgttcccctgcatgggcagacacgcagtcaggctagcacctgcccactccacctgtgagtgtacacaggtgtccgcgtaaaagccggtgcctgcacgcagcttacatacagagagcggaacgagggtccccagcagaacagggggctcgttccagagcttaaggaaatagcttagagaagtctttggaagcctgggttgagggggagagcagggaggcttgttctgttggcccttgggcctcaggaagcccaggccttcctgccgccgctggaggacctcgatgacgctgccgataccgtcctcgggcaccagggcgtggtcgaagttgaaggtgctgatgtagtaggcagagatgtcagcggcagccaggggacctgcaatctgtgccacgatgccacattcatcaaagcccaggggctgtccaccgatgcgcaccatcctccacagctcccccgaggagctggtcagcaggaggtcactggggaactttttctgtgtttcagcatccatgacaatggagatataaccctcgatgagggagaaggcaaagaacgtgatggagctgggttcaggactgctagaggctgcctccttgggggtgctgtgcgagtagaagaggacatctatgagggtggtggcgatggctggaagcgtctcagggtccagtgtgaggacacagaagcggttctgtgggctctggatgggatgcaccgtggggctgggcccatgctgagtgcggggaaagccattgctggaatcatccctcgtcacaggcacaggctctccgcccacctcgcggtaaatgtcgaactcctgggccagcgtgtggatcaccacggacaggtcctgctcccgcaccaggatgaagtccgtctggtaagtggacagcatcagcacagacacgtggtgctcggccagtggcgcgatgaccgaacgggcgatcttggtgaccccagcagcctgcactgccgcaccgctgtgagacgacacgttcagcaccagccatgtggcctcagctacttgcaggaactcagatgggggcagctctttaaagccctcctcgtccaccataagcgtgtaatcctcaggggtctccgtcaggctgaagaacttgcaccggctgcggcggggcaggaagagcagcttgatgagcgggtgggtgtagagccagagaccgggacgggcgacgctcagcacccgcacccggtgttctaggatgtgcagctccatcgcggctcgcgcggacccgaccccgccgccaactagacccaggccgcgaattcttccagcctcgtgccaagctt

SEQ ID NO: 434756 - DNA, 1733 bp, Homo Sapiens
  misc_feature (318)..(326): n is a, c, g, or t
  misc_feature (360)..(361): n is a, c, g, or t
  misc_feature (380)..(380): n is a, c, g, or t
  misc_feature (382)..(382): n is a, c, g, or t
  misc_feature (385)..(385): n is a, c, g, or t
  misc_feature (387)..(387): n is a, c, g, or t
  misc_feature (396)..(396): n is a, c, g, or t
  misc_feature (404)..(404): n is a, c, g, or t
  misc_feature (426)..(426): n is a, c, g, or t
  misc_feature (433)..(433): n is a, c, g, or t
  misc_feature (476)..(476): n is a, c, g, or t
  misc_feature (479)..(479): n is a, c, g, or t
  misc_feature (485)..(486): n is a, c, g, or t
  misc_feature (491)..(491): n is a, c, g, or t
  misc_feature (498)..(498): n is a, c, g, or t
  misc_feature (549)..(549): n is a, c, g, or t
  misc_feature (558)..(558): n is a, c, g, or t
  misc_feature (569)..(619): n is a, c, g, or t
  misc_feature (636)..(636): n is a, c, g, or t
tttggggaggcaggccatttattgaagaactgtttggagacatggacacacacagccatggtaaccagacgccaccctgggggcagggaggacccagaaacagccctgggttgtcagcccaggcctggacatttggccaccacgggtggagggcctctcttggcatcaaccatccacgacctcctacgggaccatctctcctgccaagttggccatgggggtctccaggaagaaaaccagccttgggggattccaaggcccagggagggtgggaagttgcccacgccctcaggttgtgcccagtctcatgctcaccannnnnnnnnatggccaaagggaagttgctggacgagggaggtnnctttgctgggatgagtagnanagnanggttggggntccaggtnaaagaaatgggtgcagggattntgggacntgggctggatgggcacccgctttgggattttttttgctttagnttntgtatnnttcanggaacantttaggaaggggcgtggcatggggtggggctgccatgttcggggtttttgngtagccagnaaagatgctannnnnnnnnnnnnnnnnnnnnnnnnnnnnnnnnnnnnnnnnnnnnnnnnnnatggggctgcagttaangccttgctcattgcagggggtgtgggaggccaggcagggtcacctctggccctgcagaaagagggacggaagtaggcgggctcaggcctgcgcctccagggcacacacgtgcacactgggcaggcagaaccaagagggtggcagctccttgctggtgctgtcctcgtggaaccggatgtggaggaagaagtctcccgtgtagaggaagaggagggccccgaggcaggccgactggccggacggctgcaccgcgtcgaggtagaaggtgctggagcccacgaaggagacggtgtcgtgcaggtcgtagttgtgcacgccgttctggtggtcctggaaggggaccacagtgagggcgaagggccctacgctgcgcgggctccggttggtcagccgcacctccaggcgcacggggtcgcccacctggcaggccgccacagcctcgcggtcacatggctgtccgtccaccagcacatcccactgcagaggcgccagctgcaggtgctccaggacgagctggttcaggagtccttccacactcgcctcgccactgcgcttcagggaggggattctccagcagatgcccagcttgctgtggatctccaggcctcgggcttcccgccgctcttcctccagctgcttggggtttgcaaattgccccttctccccaggggactccgggaaactctcaaagttgaacttgtccacttgaatagccattcgctggcactcgccggcgtgcaggatgagtgcctcgctgctcctggtgctgacggtcagctcatgctcggtggagttgaagacatccaggagcaggtgacactgccgggtactggttgctgggagggtgctgactcgggtgaaaaatacagacggctcgacttctacatgcagccccagggagagattcctgtaatatccttcagtgtggcccgggcctccagagtatttgaaattcaggacagcttccagggtcttcacgtggctgtagtcgcctgctttgttgctctcgggtgggttcacaggtttgccctccactcggggccgaacgacctgccgaaaaggactggacaggggaaagccactcacactgattccat

SEQ ID NO: 434757 - DNA, 884 bp, Homo Sapiens
tacgagcgccatacaatttttctttagtggtgagaactttcgaggtgacctccggtttctccaatggttccattccaatattttccaatttaatgattagttgctgactttctccaattgtaaagctggacagatacattagtggatatttcatcaccagaagaaggttgcaatgaatgtgcagatctgggcagagaggtgctgatctgcagtcttggcaacgcgggaatgacttccactgtggagccactggtttttattcccggcaggttatccagcaaacagtcactgaacacaccgaagaccgtggtatggtaaccgttcacagtaatcgttccagtcgtctgcgggaccccgacgagcgtcactgggtacagaccagattcagccggaagagaaagcgccgcagggagagactcgaactccactccgctggtgagcagccccatgttttcaactcgaagttcaaacggcattgggttatataccatcagctgaacttcacacacatctccttgaacccactggaaatctattttcttgttccgctcttctccacggttgtgtgcgataattggtgaatagatgaaaggacttttggttgacacattctgacccagcaagcttttcattttgtgtggccggaggctagcaggaaggttcaatagtttcacatgcctgacgatgggaagcttggtgaagggcaccggtggcagggtgaggccgccagggagggcgatgggctccatggtcccaggacacttggacgtatagttctctaggctttgggccacatctttcttttcctgatccgacaagaagtccagcatggtctgtagaaggaaggacaggtgtctgacagagagggcagggttccccatcct

SEQ ID NO: 434758 - DNA, 558 bp, Homo Sapiens
  misc_feature (534)..(534): n is a, c, g, or t
  misc_feature (539)..(539): n is a, c, g, or t
aagcttggcacgagggttaggtaaaatttttttcacttatccatttaaacaccttgttacttgaatattgtgttgactggtctgcaacagtgatccattctgtaatatagctcttttaactgggaaggaaccacaccccagttgtgccgattacattagtgttggcacacagtcgggtgctagtgtaacacaaatgccgcgttgtctgggtgtacagtgtttgtggagacgccacttcctcaaaatggttttttattgtttttaacctataagacgttctgatgctcacaaacctctattcaacacacaaaacaaacatgaaaaggtagttagttgggttgtaacagcttactggggtgggactcataaaacagtgggctttctgttcatcttaaagtttcctcaggataccacaggaccactgtttaagtgtggctccattgttcacttttaaatttccaacggatacccctattttttgtccattcttaaatatccggatgttactattgggtataattggcacaccaaaantaggnccaaacagtggcttagggt

SEQ ID NO: 434759 - DNA, 479 bp, Homo Sapiens
gttaggtaaaatttttttcacttatccatttaaacaccttgttacttgaatattgtgttgactggtctgcaacagtgatccattctgtaatatagctcttttaactgggaaggaaccacaccccagttgtgccgattacattagtgttggcacacagtcgggtgctagtgtaacacaaatgccgcgttgtctgggtgtacagtgtttgtgggagacgccacttcctcaaaatggttttttattgtttttaacctataaggacgttctggatgctcacaaacctctattcaacacacaaaacaaacatggaaagggtagttaggttggggttgtaacaggcttactgggggtgggacttcattaaaacagtgggcttttcttgtttcattttaaagttttccttcaggatacccaccaggacccactggtttaaggtggttgcttccatttgttcactttttaaatttttcaacgggtac

SEQ ID NO: 434760 - DNA, 2647 bp, Homo Sapiens
gaatttttaacagaaaattttatttcaataaatattttgccctccaagtgacaactacaatttcagggaggtaaaagtataacctagaagtaatttagaattattccacttttcaattttgcctgagtgaagaatacagtttgggcctgaagtctgctaagagactgcaccgcgtggacacgtgcagaaagtcaaaaggacacatggaaagcagtccatctttggtgcacgcacacagccatgtgcacgcacacgtgtgggtagaacgtatctgcacatacatgcgtaaaataatgggactcacgcaagtttcatttctctttcaacccttctgggctcccagaattctagcattaccaaggatttacacataaacttcatcatacattgaatcatttggtttacactttctttacaaagttatatcctaaatgggtagagcagcttgtcttaaataacaaggttagaattctgagacacaacgaaagttgtgcaagctttccgctgaaagaaatttgcaacgagacacaaataccactgcaggggctttgaatataggagacattgataaacagagttataagtcagtgttatcaactgcaaaatcatgactttaccaccacccaagccagaaaggcccaaaagcaccaccacgaaaattaatcctgtgtctgaaacttttcaagactaattaaaagggttgctgtgtccaagcatgaagaacgcagggacgcttctgtcaatcattaggcgaacactggcctggggacttgggacatcaggaatgtccatgccacattagtgcttactcgcaacgaacagtgaaaactacacgcttaaggacaagtttcaggatgttccacacactgactcattccatggagaaaatccagaattgattcagacgtcccatgggaatgcaattttccagctctatgccagatattttctagctcttcattaaaaagaatccaattccactgacttcgatagggccatggtaaagaacaatgtgaaactcctataaagcaaggagttggtgtcgcctggtcagcgaaatgagccacagcaacctcacacatacgattcaatgtaaagcaaattagttcatcactttattacatcttagtgctttcttaaaataaatacagtaatatcatatcaaacatacagtgagaaataaagcccacgtgtgaaagtatggtaacagaaagctcactcaggactgtgtaactcagcacttgagaaatcatacagcctttagttccctatttacaggacagagagcggctgtgtcgaacacgatatatacaaaatcgcaagagactgtacttctcttcaaaggactgaggaaaggggaataagacctataattccttctagccttctgtaccatgttccctccttatgtacacgactcactcatgttttttgtctatctaaaattatgtaacagttaaatttgtctctttttctcccaattattgatcttttgattttttctgcagtttgagatagattcaagtaacactcccaagaaaatatgtgcaaaactaatgttagtggctccagaatcttccggcagctggtcagttgcagcagtgtctggcagccatggctggcacgcacctgctcctgggaatgtccgcgctccacagaagcatcaacaccattgggaccaaggcagaaagaacccaaagccatccacttacttggagttctgaaataactgcaaataaccacttaattgtttttaaataggcaacaaaacaaaagtatccatctacaggggaaacggcacgctcctctgagagcatgcagcgcttccagatgcagaatccagacaggacaagccgtgacctaacaaaaccactgaagggactgtcagcttaagtgcatcaccttttgggacaaacatgctcagaatgaaaaatattctactttaccaaaatctgtctttattaaagtgaacaaaccattagagcactacccaaaacttaatgaatgatggctgcagttggctcggcttgcctactttaaatgaggcaaacatcagctcctagtgccattccccaccctcatgaccgcgtgccagaagtcatcatcttcacatttgtagacgttgttctagcggaagacaggctttgcagatttcggtgcttttagtgaactggtgttttccgtaaactttttctgagcagcaagggataagaattttttttcagaaatcttagaattggatataaatgttggcagtagacacaaccaataaatatcatacaattcctcaaatgaaaaagatttcccattatgaattcctttgctatagacattcaaacaccccaagccaagattgagcctcagtcccatagtcacgagattacagctggccaatatgagggtgtcaggcaatgtgcaagggggcgaggtgagaagcaagaaagcaaagtggatcacgtctaatctatgctgaaggagaacttcgagtaagggagcttcgtggcccgggatctggctgtgaacaccttccgctgggagcctcagtggtcaggagtggccacagcagtgcgagccactgcataagcggtatctactcccccatcctcaccctgcctggcatcctctgcgtgagcctcgtgccaagctt

SEQ ID NO: 434761 - DNA, 1677 bp, Homo Sapiens
agttcatcactttattacatcttagtgctttcttaaaataaatacagtaatatcatatcaaacatacagtgagaaataaagcccacgtgtgaaagtatggtaacagaaagctcactcaggactgtgtaactcagcacttgagaaatcatacagcctttagttccctatttacaggacagagagcggctgtgtcgaacacgatatatacaaaatcgcaagagactgtacttctcttcaaaggactgaggaaaggggaataagacctataattccttctagccttctgtaccatgttccctccttatgtacacgactcactcatgttttttgtctatctaaaattatgtaacagttaaatttgtctctttttctcccaattattgatcttttgattttttctgcagtttgagatagattcaagtaacactcccaagaaaatatgtgcaaaactaatgttagtggctccagaatcttccggcagctggtcagttgcagcagtgtctggcaggccgcttgggctgccacaggtggttgtggattgtgagtgcgtccacactgacagacatggttttggctgggatcaagttaaactgttttcggtctgagctgtatttatacagtttgtcgatcattttcttggtgatgttctttggccccgtgccagtgagtttgtagatttcctcagtatcaggatagtagcagtaaagcgccctgaactggcagccagcatcacgaaacagtatgatgtagtgattggcatcacacttctccagctcctccaatatggaattcttgtggggttcgttcacttttccagccaggcagcaatgggatatggcattgtgaataatcggcttgtttgatttactactgggctccttaaagagcttgggacctgtgtactcggccactgaggccagggaagatgccgccgacgcggtctcccagtctcggtctgtgctcctgcttgggttacggctcagtatgggcagggcttccatcgattccactcgctgagagggtgtgcccccggaatgaacgctctcgggttctgtcgtcgccgcagaggccaaggacaggctggagcctgactgagtccggctcaagttatcaggggtggaggagcacttggtgccggagtcgctgcacgactcttcccggtgcaccgacttcggccgcggcttcttcggctttgacttgggcttgccgagcccctgctcctctaggatctgctgctgcttcctccgcaggtactcctgcttgatgagctcgcgccgcgccttctcctcctccttccgcacccggtcttcctcagctttgcgccgggcttcgtcacgcttgagctccacctccgcttccagctgctgcttgcgcacgcgggcctcctcggccttgcgctgctgcttcaggaggaaggccgcccgcttcttggcgagctcatcttccgctttctgttcatccttgaagaagaagccgacccccggcttctggtcgccttcgctgacaaggtccgccgagccatcgaggcttaccagctccccatcctcgtcgggggccttcaggtcggagaggtccacttcaatgaggctggccctgctcctcagaggctcctccacggggacgctctcttttcccgagacatctgaggagctggaccccacctccttcacactcgca

SEQ ID NO: 434762 - DNA, 426 bp, Homo Sapiens
  misc_feature (411)..(411): n is a, c, g, or t
tattttcttgggagtgttacttgaatctatctcaaactgcagaaaaaatcaaaagatcaataattgggagaaaaagagacaaatttaactgttacataattttagatagacaaaaaacatgagtgagtcgtgtacataaggagggaacatggtacagaaggctagaaggaattataggtcttattcccctttcctcagtcctttgaagagaagtacagtctcttgcgattttgtatatatcgtgttcgacacagccgctctctgtcctgtaaataggggaactaaagggctgtatgatttctccaagtgctgagttacacagtcctgagtgaggctttctgttaccatactttcacacgtggggctttatttcttcactgtatggtttggatatggatattcccgtatttnatttttaaggaaagc

SEQ ID NO: 434763 - DNA, 486 bp, Homo Sapiens
  misc_feature (452)..(452): n is a, c, g, or t
  misc_feature (456)..(457): n is a, c, g, or t
gctcggccggcatactggactctctaagcaagaactaattagtttcatttttaagtgttagctgtggcatggtttacacttaaatgttaacaatacataagctgtgtaacagaagttataccttagttatcatggaatatacaaacactaggtaattcaaatttcctttgtaatggcatggaagtctgctgagaagcagaaaagaagcaccatttaacaattatctgggctagtcaactggtagtgggtataaatgtactggtaaggtcaaggccacacctaacctcaaatatgagccaattagtttcacagaaataaaattaccttctaggctacaaataatcctaacccttaatccagggccattggctcttgcaaatggatggccaatagtcatcaggtgggggatagctcagtttaaccacttactacattcttgtgaagaacagagncatnnatttccacagtgatgctagtcacatgcag

SEQ ID NO: 434764 - DNA, 922 bp, Homo Sapiens
tagaaaacgcccctttaaaagatttctttattttcccactttggaaataaaagaattttttctgaggtgatatattccgggaataattcaaggtgggttacaaagaaatacctttttctaacccctctttttctacacacttttttcccaaaaacctctcttttaatccaaaaaggccactttcaaagaaatttcaccacattccctaaaatcccatttttgggttgtccaagcaaaggctgtttggtaatatatgcccccccttgtaaagcaggtatgcaggtatgtgggtgaaagtgcctatgaaaagacttaatgaattctgggatttgtaatggtatttgatgggtatctcttgtattgtatatcaagagtgggcagaaatgtttggctggtgatggcaaatgactggctttctcttgtggatggactataggaagcactttctgaattatgtaatgatttggaccaaaaagtattttgctgaaatactcaggtaattgagatagcaatggttttatggcatgaattatccaaaaaaatatcagaattacttattattctgtgatttcattagctcattaatgtttaactcacagattgggcatcaccatctagaatttcagtttaagggaggcctgcgcaaagctagttttatttcttaaaggataacagtcatacatagaatactaggaaagccaatattctatttaaaaataaacttctgatgcattttcattcttagcagaaaggtaaatgcttgagaaagcttgagtcaaatttgttaaaagaattttgagttctataaatccaaaaatctgaaacctgaatttatttaaatttataatcctttattttttaataccgtgccattttccacaaaggatttgggttggtatatattctttaagatcctggatca

SEQ ID NO: 434765 - DNA, 515 bp, Homo Sapiens
  misc_feature (303)..(303): n is a, c, g, or t
ttttttttagaacacaaatacataaatttttaatctgcgaaaaatacaaaatgaaaccatgtacaagttatgtacaaaccctttttacaagacaagagagttatcactggttgttacagatgacagagttgggtagatcatttcagagcaccagcatatagtctcttcttcaattcctgtcaggtcagagtaattaatcataatcataatcataatgccaacaatcaaaagattgaaagatgaataagccacgctctttttcctcaatgaacatgtaggctgaactctgcatgtgtgtacttntttttcctttgtcccctaaagaaaccttgaagtgcaggttttggtgttaagcagagaaaggtttcttttcaacatctgggtggtgggatgtgggccagaagttttaggcaggatgtgattgtgccacctgggaatggaacgtttttaattaggatttcccaacagatctgggtttgtgtttgaaatgttgcagttctggtcaaaggcgtgtc

SEQ ID NO: 434766 - DNA, 420 bp, Homo Sapiens
  misc_feature (232)..(232): n is a, c, g, or t
  misc_feature (319)..(319): n is a, c, g, or t
  misc_feature (390)..(390): n is a, c, g, or t
  misc_feature (396)..(396): n is a, c, g, or t
  misc_feature (406)..(406): n is a, c, g, or t
ttttttttagaacacaaatacataaatttttaatctgcgaaaaatacaaaatgaaaccatgtacaagttatgtacaaaccctttttacaagacaagagagttatcactggttgttacagatgacagagttgggtagatcatttcagagcaccagcatatagtctcttcttcaattcctgtcaggtcagagtaattaatcataatcataatcataatgccaacaatcaaaagnattggaaggatggaataaggccacgctctttttcctcaatggaacatgtagggctggaacttctggcatgtgtgttacttttttttncctttgtcccctaaaggaaaccttggaggtgcgggttttgggtgtttagggcggaggaagggttttctttntcaacntctgggggtnggtgggggatgtgg

SEQ ID NO: 434767 - DNA, 678 bp, Homo Sapiens
  misc_feature (23)..(23): n is a, c, g, or t
tccctcaaggggaataagccaanggaaaacctttcctaaaactgaaaaaacctaccctaaaaatcaaagtcccactttcaccctggcccagaacatctccttcctcacaatgccctgttccagaaaagcccaccaaagcaaggtggtcgtagcatttgttttcagacccctgaaactaaggatgcagtgtgtgtgctgttccagggagggaagaaagaacagtgccagtgacatgcacaggaaggtgaaaggagatgcccaccctgagacccctccctggtgagtcctccagaaagactgccgatcaccacaggtcctgtccagcctccatccaccatggcagccacagtgatacatagtggccgagtgaactgcccacgtgggccagacctcatgacaaactctgggaatatggacaaataagcagagttcctgcccttcgagtgagtcttttgacttgtgcctcaccatctccaacacctttcatctccaacctcatagatgatcttccctctctttcttaaaattcccctcttgtttctcatttccctggttctggagtaccctagatctcctgtcccaagaagttctacttatttttctccttcttagtcctgaaaaacttggctgtagcccacaaacacatctgccagctgatctaaacctcgtgccaagctt

SEQ ID NO: 434768 - DNA, 984 bp, Homo Sapiens
  misc_feature (34)..(34): n is a, c, g, or t
  misc_feature (39)..(39): n is a, c, g, or t
  misc_feature (132)..(132): n is a, c, g, or t
ccccaggggaagaaacccggccggcctaaaacanggttncgggtgccctaggggcaaaagcgcccggaaaagtcctcctcctcaaaatacctacatttaatatttaatgccacattttcaaatatcttgcangggtccctgtaagaatccctacttaggccctcccaaaagaagggctgcccttatggatagcgataaacaatatcttcggtctgctgaaacatctcatccagggctgcagactgaaccatttctacagcacaattatagatgagtttctctgcagtcacactgttgatttcatcaataaacctctgtttgtcagagaagaatcgattcagcttttctgtaagtttcttgcacatggtgatgcagaatttatatcgttcgttcagattcttgacaacttgtttcacagctgtggatgggctcagtttcccggacttgatctgggctttggcaagatgcagagaagccgcaagcagctgtgctgctttcatgtacaacaccagctgctccacccgcccccagtctttgctcagctgactgatctggtccaccaccacactctcctggatctggtacaaggacacagcagatgtgcacagctcagggtttcctcccctcatggctgtcaggtccagcacacactcagtgaacatcagcatcacattcagatggcgtaaggtgtctgtgtgttcccgctccatcagcgtctcctccggcagttcaggggcttcaaaggtgatgagcccctctaggctggggggtgaagcaccgtaaggcacgtatctcaggctgggagctgcctctgctcctggaggggaagagccgaagcctgggccaggcggggaccccacgcacacgcggccactcatggcacaaagagagcccccggagttgctgggccccactgaggttgttcttgttcgaaggaacatgtgggtacaagtgggggctgccgcactgtgggaggagatcgca

SEQ ID NO: 434769 - DNA, 2514 bp, Homo Sapiens
ttttttcagggaaacataaagcatttgtttattattgctatactcaaggcaaaatctcttaattagccttgataatggaagtataaccagaaccattattcatgaatttacattttgttcttttctgctgttgagacttcactgtttcacacacaccatctaccccaagacctttaatatacaagaacaagaagaattaacttgaaagtcacaaagcatggcttgaccacttgcctagttcctgactttaggccaatcacttcccctctctgaacctgtttcatcctgtgttaaaaaagaaatgggagaggaagaggagaggatagaataaacctacaactgagataacacaggtgataactgaaagaacatgaatgaaatttcactgtgaataaaaaatattatataaaataaagtatcactaataacaaatagggttgtggaggtaaaacagtctatgttcctggaagcctgcatgacagtagccaagatctaaatcctggggcaggacaaaggatattcatggccaagtctctaaactcactaaggaagtacctggctcaacaagccacttaatatgtacccagctacaccctagaaacactttgtcagttttattttaccttaatatacatttgtacaggcaataataaaaaggctattacacaacaattcagtgagttttacctagtttcaagaataatgcatgcagttacaaatgagaggtagaaacactgtattaaagacctaaaaatacaaacgtcatataaataaatgttcaaattaactactggaatttcatacagataaataaggtaaaaattacattactttgtcaaagtaaaggacaaccatgtttgtttttatcagtacattaaaattagattaatgccaaagagctctgtgcaatttgtcaaagagttcagattattttatgtaaaaggattaaaataaaaggattaaaattggtgaatggtttattcaagtattcaagcaggtaagtaaaagaaaccaaataatacacaacgtaggaaccattcctggagggatattaagttaactgcctgcattctccatgactagctatttggtgaactgtcagaattaacatgaaaaatacacattaggcagaagacagctgcccattttcctaagagaaaacgaacttcattttccactcactgcatgtaggaactccacatcactaacaagcctttaggtcaccaactttgttttggccctattcaaattatcaagagtatctcttgatccatgattttgtttctaatactgcccaaataaacctagcctttaataaacctaaggtcacaggcatcaatgtacattctgcatgcacaataaaaaatggaaccaaaagctaacaaaaacattactgagaaaatctgtaggtgtagataaagaagttaaaaataaaaaatgtgcaaaggttcacatgaatacaagttttaaccacttaaaagttcactggagattacatgtgaattctggaaagggtctatgtatacaatcaagtaaaatattttaaacaagtccattgtgccttagttaaattacaaaatccaatacacagttgttttaataaattagtgcaatatgaaagattttggaagattaacatgtatccatattaggatcaaattgaagatttcaaaatttcttccaagatccatgtttcacttcttcttaagctatttcttcctgagctgtttaaagatgcatgctcagatttaaacaaacttactccaaatatcaaactgcctggatgaggggtgaatacatttacctttacacctcagcaaacacatggaatttcacacactgctctgatgaacccagtgacgagcactcactttgtttcatttttaattatctttaagaataactgtaccgattatcctagttctaaggtacatttattcaccaagtccaaactgggagccaaacactcttgctcctgcttctacaaagaaaaagggaaagggtgattttctccaataaggcagatttcctacaaatatgtagtttttggattgtttttcctttttcaaatcactgcttgttctttggtagtcaccagttaagaagctacagtttcctggggatggggtgacagaactcaagctgtaatcccaaaggcatcacctcacgttcccaccaccggtccacgggatgagcctgctgctcacacggttgcggtgctatggcagagcgccgacagtcttctctcaatactacatttatatttatgcacattttcaatatctgcagggtcctgtagaatcctacttaggccttccaaaagaagggctgccttatgatagcgataaacaatatcttcggtctgctgaaacatctcatccagggctgcagactgaaccatttctacagcacaattatagatgagtttctctgcagtcacactgttgatttcatcaataaacctctgtttgtcagagaagaatcgcttcagcttttctgtaagtttcttgcaca

SEQ ID NO: 434770 - DNA, 499 bp, Homo Sapiens
tttgagacggagtcccgctctgtcgcccaggctggagtgcagcgggtttaggctttttaagggaccccctcccaatcagggcaacagagggatgcccaaggtgaccgccaacaccttcctggggggctgactccagggctcaggaggaagggaccagccttcttcgccaagagggggagccctagcatgcacttctgggctggctttacccaaatagtgaggcaccccaggtgtggagacctccctctccccactccaaacaccactgggtcagggggctgccagccagccacctccagcagcccaggcaggaagccggaaatgatgcagcccaaattcctcttggtggggtttcctgtaagtggggagccgcccagggcaggatcataaatgggctgatctgaggtctgtggtcctaccggagaagccaggcatggaaggctgactatatatccacggccaatggctccagagccctaagccatgggcagaccagatg

SEQ ID NO: 434771 - DNA, 512 bp, Homo Sapiens
  misc_feature (402)..(402): n is a, c, g, or t
  misc_feature (450)..(450): n is a, c, g, or t
  misc_feature (501)..(501): n is a, c, g, or t
tttggattttcagcaggtacagttttgattttattgcaaggcacacaatcgtatatacaatgcataattatcatcttttaaagtacaagataaaaatcatatacattatagtaaagaacatatgagtatattcttgtttcagagaagaaaattgccttaaggaagctgggttataccgtttttggatgtgattttcgtatttatactgaatcatccgaacagctcttggttagaaaataaatctcattgataggacacacaacctttcacagctttcactttacaatgttccaatttaaagtcagccagtgtgctccctgaatttgcatgagtcatcgtatttcatcccaggactagatgaaacacctataaattgtctgacaatagttatacacgtttaanaactgtatttcttagtaatatatcacagaatagaaccattttcttaanattttatgggactctttattgattttttttctccaagctatttttccaaangatgtattatt

SEQ ID NO: 434772 - DNA, 399 bp, Homo Sapiens
ccaatgtagtccctgcttcacaagcaggacatcaggaccaaacaagaaagcgtgtacacactttgacaaagaaatacatttgtgcaagtggtattttccctgctacgttgtttactttatcattcctttaaagcagtaccctaaaatgatattcccttcttcactcctttttcaatgttggggagtcgatattaacaagaatcaagaagcttggacaccccttgtgggcacatacagctactattctctccttgggctgcagacttacatatgaggagatgcaggaaaatcaggcaaaccaataatggcaattaacgctgtaagagcacgtgaagtgctaacttaaaggaaacaggccaggcgtggccattcacatctgtaatccctcgtgccaagctt

SEQ ID NO: 434773 - DNA, 1153 bp, Homo Sapiens
  misc_feature (48)..(73): n is a, c, g, or t
  misc_feature (1003)..(1003): n is a, c, g, or t
  misc_feature (1007)..(1007): n is a, c, g, or t
  misc_feature (1009)..(1011): n is a, c, g, or t
  misc_feature (1020)..(1020): n is a, c, g, or t
  misc_feature (1030)..(1030): n is a, c, g, or t
  misc_feature (1036)..(1036): n is a, c, g, or t
  misc_feature (1044)..(1044): n is a, c, g, or t
  misc_feature (1049)..(1049): n is a, c, g, or t
  misc_feature (1052)..(1052): n is a, c, g, or t
  misc_feature (1064)..(1066): n is a, c, g, or t
  misc_feature (1070)..(1070): n is a, c, g, or t
  misc_feature (1080)..(1081): n is a, c, g, or t
  misc_feature (1089)..(1089): n is a, c, g, or t
  misc_feature (1096)..(1097): n is a, c, g, or t
  misc_feature (1102)..(1102): n is a, c, g, or t
  misc_feature (1109)..(1109): n is a, c, g, or t
  misc_feature (1111)..(1111): n is a, c, g, or t
  misc_feature (1118)..(1118): n is a, c, g, or t
  misc_feature (1121)..(1121): n is a, c, g, or t
  misc_feature (1123)..(1125): n is a, c, g, or t
  misc_feature (1128)..(1128): n is a, c, g, or t
  misc_feature (1132)..(1132): n is a, c, g, or t
  misc_feature (1136)..(1136): n is a, c, g, or t
  misc_feature (1141)..(1141): n is a, c, g, or t
  misc_feature (1144)..(1144): n is a, c, g, or t
  misc_feature (1148)..(1148): n is a, c, g, or t
tttttttgataaactctagtatttattaaattataaattttgtaatcnnnnnnnnnnnnnnnnnnnnnnnnnncctcaaactataagactagacagcaaagcctatgggaacaccatgaagtgtgttacaaacattctgaaacataagttactggctgttttcatttccatttcaataactttactataaaatagttgttattcatctattttgaaatcccaaattcacatctattcatacattaaattatgtttcctgttcataatatcaaacatctcacaggtgccaaattttagtaatggtcttatgccaatccatgcagaaaaataagacacaatgcaggagtcagatgaggaccattaatgcacagataatacaaacacactggccaaaagaactacagaagtttttaaaaagtataaagtaaacagacctcaagaaaactgggttattactaaacagctctcaactattaacacccaagttccttacattaaataaatttctcaacagagacatgttagacattttaattatgagtctatccttcccataccccttcccaccccaactcccaaaatgcactactagggatgagtataatgttatgtgggcagaaatttacaggtaaccctttcaaccttgagcatggagctgaagacatttttatttaaacttcagttactgtgcactgtccatcaggccttctagatctgacactgacactcactgttccaccccctgctactgatcgatcagttcccgatcgatctgatcgatcgggtactgtctggtttgcattagaaaccaaaagtctctgttgggtcaaggagtgctgtgcaacaactgcagatacatcctcactatcactactggcatctgattcagtttcttcaatggaggtgtctggtgctggtaccctgcctgaagatggtgattcatgatcttcttctccttctcccctatgactcctttcagctgtgttgtctccactgagttgtnaatnannnaaagatctncagaagagtncttgcncaaggggnggtgntgnagggcttgtaannnaccnactcctgtgnnaggggccntcagaannacagngggtaananagatccnctntnnntgnacanttcngcccncancagntctct

SEQ ID NO: 434774 - DNA, 310 bp, Homo Sapiens
  misc_feature (296)..(296): n is a, c, g, or t
tttttcagggtgaatccaccactttaatgtcctcagagaaccttgagtgagatgggagggagccgcaaggagggggagtgggctcccaggggcgaggagcaggggacacggaggaagcaggttcagagagggagggacagacagacagacactccagagagacagatgtcctgggtgaagagagccggggagcaggtgcttagctaccagaagtggtcaccccacctttgctggggggaagacacaaggagggatttggggagggactgaaccccaggtacaggcaggtttcccanaccccactttaagt

SEQ ID NO: 434775 - DNA, 1041 bp, Homo Sapiens
  misc_feature (46)..(122): n is a, c, g, or t
  misc_feature (171)..(171): n is a, c, g, or t
  misc_feature (215)..(215): n is a, c, g, or t
  misc_feature (862)..(913): n is a, c, g, or t
gtttcggtcgtcgcttccccggagggggagccctcgcttaccgatnnnnnnnnnnnnnnnnnnnnnnnnnnnnnnnnnnnnnnnnnnnnnnnnnnnnnnnnnnnnnnnnnnnnnnnnnnnnnatggctacaactttggggttggggggcttccgggaatcccaggcggtgnttgggggcttcctcagggtgaggaccagctttcaggggaggggntgggcgaggagaagtcctgagggctgtcatcctgtgaggggccactgggaaggctgtcctgaaggtagatgctctccagatcttggagctggacgatgccctgggggctgttctcggggtgcagctcctcttcgtccagcgaggaccaagcgctcagtgtggcctctgtgatggcaaactgctcggcgacccctgcagcaaagcgggcctcacgcagctcatccgggaggcagcagtaatgctcatcctcagctggggacagctcccagcctgcccgctgggcactccagcccttccactcgatgaggtgggccacgcggccttgggccatggccgtgggctttgtgatgtggtccttgatgctctgcaccacccccacaagggacgaggtggccagggctgccacgttgtagttgccggggcgggacctggagtcggacaggtagccgttggtggtctggaagcacctctgccaaggatcccaacagaaatccatctgtttgtccttgccaatgacacagtctggagccacggtgggagtgcggcccgagggcagatctgggttcaaggggtccgcaccctggggcatggggcagttcttgtgggcacattgtgaacaggtctcgcgacacgcaggagcccatcannnnnnnnnnnnnnnnnnnnnnnnnnnnnnnnnnnnnnnnnnnnnnnnnnnnttcatgtctccgcgggcccggggctgagcgctgcggagccagaggacgggcggggcggggggctcgggcgccctcagctcggcctcagctccagcctgggccgtccctgcatcccgggaattccggac

SEQ ID NO: 434776 - DNA, 516 bp, Homo Sapiens
  misc_feature (32)..(32): n is a, c, g, or t
  misc_feature (97)..(97): n is a, c, g, or t
  misc_feature (123)..(123): n is a, c, g, or t
  misc_feature (136)..(136): n is a, c, g, or t
tttaaagccccccgggagactctgaatctttntcagaaacagtgagttaaagcagtgcttctcaaaccttgatgtgcctgtgaatcacctaggggtnttgttaagtgcagtctgatccaggangccggggcgcggnactgagagtctgcacttaacaagctcccaggccgagaagccagtgcggcaggttcacaggcgaggcctggagtaacacaaagtgaaactcataatagacttcccactctagggcagtggagtcggaagggcacacggggtgcgtctccccggagttcagttttaccagatgatgggggaggggggaaggagttttatgttaaaccatccatgtatttttggagaagagagaggaaaggtttgagaagcactgtttccagcctgccctcttcatttagccaatgctttactgcgctagacgctttcatcccacaatcttaaaggggcagtttctattagccagtcttttacagctgagcacattttggctcagggaggtta

SEQ ID NO: 434777 - DNA, 729 bp, Homo Sapiens
tttggaggcaagaatattgaaaccaatccactctttctgtagctagctcccacgaagctgggattttcaacctcttgtttattcgtaaagcccatatggaaccccggttgaatctcccctcttcggattttaccaggaggccctcagtgccccaccgccgcccatggcacgtgaagagaaaggagggagagttgggagccacgagagaagccggctcggagccgcttccgtcggggcccatgtttcgccccaacagacccgtctctcctttctctccccgaaggtacttccttaggccggcagtgtcgctacggtggtagccaggtgagcacgggcacagtcccggggcgggggcgggtagagcggccctctctcgggagctccggtgggtctgcgaacctgccgggagcggaaggctgagtggcgctgggggcccgcgcggggctcctggctcccgccggcaggggaacagcgacacctactggccgcatgggtaccgcgcccgggccgtcagggctgccctgggacggggtgccgggctccgtggacttgggaggccgcgggaaacttcaccgaaggctctgcggactgctctaggactcgtccgccctggagaagacaaagccacgctttctggagacccctgggaggactgtaggatggaactgaacacacaggcacacacgcatgcccattttttctggggaaccggcctcgtgccgctgggcc

SEQ ID NO: 434778 - DNA, 546 bp, Homo Sapiens
ttttttttgtagaaaatttcatgtttactttaaagtcacgtaagtgtacaatggcattaagtacatttacaatgttgtgtgaccactgtcactacccatcttcaaaactttttcatcatccaaaactgaaatcctgcactccttaaaaaataactccccctaaacaataaaattcatggttttcaagacaaaatacaattcttgaacattttacaataagctaaagtagattaaaatgactttgaccatacaacaggagcagtcaggcttagattgctgcaaaaaggctttgcaggctggacaccatgatttgtacctcaaatctggctgctatttcccacactcctaggtcccaaagaaatgtgggtgaggtcctgcggttgacacaccgtcactgtcatactactggaaaaacagcccaaactgtttgcctcaatgatattgggtcaattgtgtcatcttcgtgtgggaagaatgccctaattatcattactccctttggacaaaattagcaagtcatttataaatcatcctcgtgccaagctt

SEQ ID NO: 434779 - DNA, 2715 bp, Homo Sapiens
  misc_feature (588)..(599): n is a, c, g, or t
  misc_feature (636)..(646): n is a, c, g, or t
  misc_feature (2627)..(2663): n is a, c, g, or t
aactagggggtacacttagctgcaggatatagagagtagagagatttatttcgcatttgagatgctttttataataaagttatgccaaaaatacagcaacaaatacagaaaaagtattaacaaacggagaagccccagatacacgtacagtaacaatacaaaaatgtgactggtcaaacagctcaagttcacatttaacactttcaattatttttaattacactatttctgttcaaaagaatgttttccttacatacaaccatgatcagtctttagtctcaatcgtaccaaaataaagctatatataagcactctgactaggtaaggtgtgaagtaccccgtgagttgctctgtggcttgagatgggacacatggtctcaaatgactcttatgcatgccttgccttaagaaagaaaagtaatgttgatggtttaaaaagtaagtactttttgaagcagcagatgaaatgtgtttactaccagcctaaatcaaagaacatggcaagagcaagattgttctcaggaaggaaaccataaatatggcatttatgtaaaatccttgcagcatctgaccatgcttttatctttnnnnnnnnnnnntcctcactttcttaaatataagtaacagtttattaannnnnnnnnnnacagtgagatatggctatgggaagcaggtgatactatttgtttaagaaactgggatgccaactaacacgtggagttccccaagactttgcaatctccatttgtgagtttctgtaaaaaagggaacccagctagaggattcacagagaccttgaatgacaagcgacatactcgaaatctgcagctctcctcccggagggcccagcgtgccaggagacacgctgcagtaaggcacttaccaagctcctttggatagagggaaagaagaaatcaatccaggcaacatgcaagtttcagtgaagtcagacattttatgggaatttaaagtcttgcctgttctcagtgcaccccagtcagttactgacatgtcagcctcagaaaccgcacatggcctcaggaaggtcaggccctcctgctggtgggcacgccattggctcttgatcgctgatggtctcgatgatggtcatatttcacagaaataatgaggaaaagcaggagggtagctccttgaatagcagccagaagaaaaaagtaatagttcaaatagcagccgttaatattaccaaagtctgtgtgactgctcatccatccgatggctttgatagacaccagtgccagcagtccagaacccacgaacgacccgacgccagagaagaaaaagaacaagcccattatggcactctgcatggacttgggggcagctgagtatgcaaattccaggcctgcgatacttgcaaagatctcgctgatcccaatcagcaagtactgcggcacctgccaccacagcgacagatcggcagcatggtagacgacgttgccgatggtctgattaatggttttctctttaacaaggttcagccttttactctccaaaattcctgcagcaaaggctgagcacatgacaaagaacatgcccacggcgatcctcttcagggaggatgggagcaggccatgtcttctcaaaatgggatcgaccagtttgtccttcagagggatgagcaggaggatgagcacagcatcaaacatggtcagccaggctgcagggagcgtgtgaggagtggttgtaatatttgaaatttctggaatcctcaaatgaagactctgtaaaacatatgttgtctgcatttggaaatacactgtccagtaaggtatcaaagccaagaaaacagggacaatcttgaccagagctttcacatcttccactttctcttctgtaaatggcccaccatgagacatcttacatgaatcaaacagactttgtttagaagattgctgaaagactccaatgccttcaccattactctggcgctctccacttcgcttctgggaacagcaggaatacgtcagtatcttgaacatgtcggtgaaggcactgccatcaggaggcttggtgatgaaaacgctctggccacagaggaagaccacaaaagcaaggccgacgcagacagtggggatcgcataaccagtgacaaagctgacgttctgctgaatataggcaatgccacctaacgacaggatcgctcccaggttaatgctccaataaaaccaattaaaaaatctcctagtggcttccggacctcgatctttaacctggtcggcgccgaagggcgtgatgttggccttgacggtggccacgcccaggcccaccagcaccagccccgcgaaggtggccggtgagcagcagcgggcggcggcgtcgggaccaggcgccgtgcagttgagcaggcgcgcggaaccgcagagcgcggctcgcgtggcgggcgcggccagcagcgggaaggccagcatgcccagcaggtagagcgccaggctcagcaggatggcgcgcgcccggcccagccgcgcgtcggccagccagcctccgaacggcgagcccaggtaggtgaggcccatgaagagcagcagcgcctcgctggcctgcgcgccctcccagcagaacggcccgctctcgacgaattcgagctcggccgatttggcctgatnnnnnnnnnnnnnnnnnnnnnnnnnnnnnnnnnnnnncgccgccaccgcgttaagcctccaggtcccctatatagtcaatcagtcccct

SEQ ID NO: 434780 - DNA, 1221 bp, Homo Sapiens
  misc_feature (101)..(112): n is a, c, g, or t
  misc_feature (318)..(342): n is a, c, g, or t
ggtatcccccttggaaaagaaggtggtgagtagtgtatccctttgagagacgcctgaaaaatctgcgggaaggggtaggttttggccccaaattgatgttnnnnnnnnnnnngaagggtaagtgttccttttcccaaagaattcccccaaggtgagcagttttcccccgttcaggaccgtggtaaaacgcgcggcccaggtcctagctttataatacggctccctataagggacccacttggtccaaagaaagctgggtaccgcgtaagctggggcccctcgagggatactctagagcggccgccccttttggttttnnnnnnnnnnnnnnnnnnnnnnnnntttacaacaaaattagtcacttttatttaaaagaaacattacaaataagtgtgcaaaattaaacatcatgattaaatacacatgaaaggaacatgcatactttacagcaacatccacagagaattagctgattacatgacagtgacagtaaagaactaaagaaaccggcaaaaccgaggactcgctgctatgcaggttttacatgtttgcaatctgaaatcaaaaccataaaatagagtttaacgggaatttaagaaaattaaatatatatcccaagtagctgacaatgtagagcccataacctagttaccaaatgttaaaaaaagttatgtgcctctccttcccaaaatgttagtgtgtagctattcttacaaatgaggggaggggagacggtggacctgggggctcggaggccagaccagggcatttccctccacaccagcgggaactgcatggaccctcccagaccctgctctggcagacgaccccgaagttaaaggatgttttccccataacgaatgttcaaagttcgtgcatcactctgctgttccctacacataaccgggaaacaggtttaatccaaaatgtaaccaggagaccccccgtccccgccccgcacacgcctgaggtgtgacggctcggcttctagagtggcctggtgtctgcctcattctaatggccccaacggagacggggacgccacgcacgggcacaggtgacgtcacgggcacagatgaccacctttgtggttacggaaaagaccacaggctgggcttacaccaaggggaaacatttacacctgggttctctttaacagggtcaaggtcgtttttttcttaatttttcgggccgggaaaaagaaattccctttctcctttt

SEQ ID NO: 434781 - DNA, 2200 bp, Homo Sapiens
acaaaaagtgtgcaaaaaaccatcatgattaaattcacatgaaaggaacatgcatacacagcaacatccacagagaattagctgattacatgacagtgacagtaaagaactaaagaaaccggcataaccgaggactcgctgctatgcaggacatgtttgcaatctgaaatcaaaaccataaaatagagtttaacgggaatttaagaaaattaaatatatatcccaagtagctgacaatgtagagcccataacctagttaccaaatgttaaaaaaagttatgtgcctctccttcccaaaatgttagtgtgtagctattcttacaaatgaggggaggggagacggtggacctgggggctcggaggccagaccagggcatttccctccacaccagcgggaactgcatggaccctcccagaccctgctctggcagacgaccccgaagttaaaggatgttttccccataacgaatgttcaaagttcgtgcatcactctgctgttctctctacagggtcaggtcgtttttcttcatgttcgggcgggaaaaggaattcctttctccttttctaaggcaagctgctggtgttgtattcaatctgcttatcatgtaagaacttacatctgcacacttgttcactcccccgctgcagactcagtaagaacgacggaatctgctgcaaaaacaaacctgaactcgtccaccctctcagcccagtccccaggtccgtatggagcccccgtcagtgtgaggatgcggcggagccactgaagctaacgtcacagctgaactcatgggaacagccagtggccgccagtcgagctggtcacagccactgagttacctacggtgccttgatgatgattctctctttaatactggaaatgggagtccttaggaaagcagacaaccacgtatggcttcgagaccagggtccctgggcagcccctccagcccgtggcccaggaggcccctggggcactggcaccagccccgagagtctgaaggcggcaggtggtgggtgctgtggcgcccccagctggagtcacagcttgtcatcggtcatctctagaaactgcgcgtagacatctcggatgcactcccccttggggttgaacaggaatttgtagtagctgccgtctgcacaaattgcaatgacggcgtttggctctgttccaaaggcacaaatgcacggagagcctgagggaacctgaaacttggagaaactccacttggaactgaagtattttggaaggaaactggctgaggccaaactggactgtttattcctttttggatcttcagctgcaaaaatatgcactgtgccgtggtcgctggatacgcagatgagggacgcatcctgattgaagttgatgcagtaaatattggctgcttgagatcctcttcgcagttcctggattaaatgccctgatgaagtatcaaatattcttataagcgtccctttctcggatgcagttgcaattcttgttccctgcaggttgagtgcaatgcagctcaggacaccctcgtgtgcaggaatgtccacgggtggcttctccgtgctggccaggtccacaagctgcacatggcccgtgtgcgtgcccggaaaggccaggagggagttgttactattgggacaaaggacacagaggcctttggggttatagcaggtttcgaagacgtgcaactgatggggattgtgtgtgaatgtgaacaccttaatcatggagtccaaaaccaccacaattctatctcgccgcagcttgactgccttgacttctgtagaaaattctatttcaataacagtcttcttcttcaggtcatcccagatcattactttgttgggagggtatttcggcttttttccaccaccaactaaagctaaatagttgcagcgaaataacatttcaacatggccaactcctccttctagaaattcttgtttctctttttcttttagtggatcagtgttatagactcggaatccattttccatcccacacgcaaagcatccgtggtcctggttgaagccggcgtagagcagcccgttgccgtgagggttacacggcaggaggttcatggcgccgccgtgctgggtcgccgctcctcagcgctgcatgcctctcgctggggacggcggcctggtcccttcgggccggcgctgaggccgcccccccgggaattccggaccggtaccagcctgc

SEQ ID NO: 434782 - DNA, 1234 bp, Homo Sapiens
  misc_feature (1153)..(1185): n is a, c, g, or t
tccccccctggggggtttacccgggattgtgttataaggtccccgtttgcccaaaatggcaaaaggacggtcttttgggttctgtttccaaaggcccccaaattccgggggaagccctgggggaaccctgaaaactggggggaacctccccctggaaactgaagtattttggaaggaaactggctgaggccaaaacggggccggtttatcccttttgggatcttcagctgcaaaaatatgccctgtgccttgttcgctggatacgcagatgagggacgcatcttgattgaagttgatgcagtaaatattggctgcttgaagatccttcttcccagttcctgggattaaaaggccctgatgaagtatcaaatattcttataagcgtccctttctcggatgcagttgcaattcttgttccctgcagtttgagtgcaatgcagctcaggacaccctcgtgtgcaggaatgtccacgggtggcttctccgtgctggccaggtccacaagctgcacatggcccgtgtgcgtgcccggaaaggccaggagggagttgttactattgggacaaaggacacagaggcctttggggttatagcaggtttcgaagacgtgcaactgatggggattgtgtgtgaatgtgaacaccttaatcatggagtccaaaaccaccacaattctatctcgccgcagcttgactgccttgacttctgtagaaaattctatttcaataacagtcttcttcttcaggtcatcccagatcattactttgttgggagggtatttcggcttttttccaccaccaactaaagctaaatagttgcagcgaaataacatttcaacatggccaactcctccttctagaaattcttgtttctctttttcttttagtggatcagtgttatagactcggaatccattttccatcccacacgcaaagcatccgtggtcctggttgaagccggcgtagagcagcccgttgccgtgagggttacacggcaggaggttcatggcgccgccgtgctgggtcgccgctcctcagcgctgcatgcctctcgctggggacggcggcctggtcccttcgggccggcgctgagccgccgcggccggaagtccgctctcagacgaattcagagcttcggccgatttggcctgatnnnnnnnnnnnnnnnnnnnnnnnnnnnnnnnnnatgcgccgccaccgcgtgaacctccatgcccctatatgagtctatacag

SEQ ID NO: 434783 - DNA, 893 bp, Homo Sapiens
agcggacttccggccgcggcggcctcagcgccggcccgaagggaccaggcggccgtccccagcgagaggcatgcagcgctgaggagcggcgacccagcacggcggcgccatgaacctcctgccgtgtaaccctcacggcaacgggctgctctacgccggcttcaaccaggaccacggatgctttgcgtgtgggatggaaaatggattccgagtctataacactgatccactaaaagaaaaagagaaacaagaatttctagaaggaggagttggccatgttgaaatgttatttcgctgcaactatttagctttagttggtggtggaaaaaagccgaaataccctcccaacaaaggaacagagaaatgaaatgggaagagattatcggtaggaaaaacagtggaagacagggcttgagatcttggcctttgagcggttctgtaatctcacaagtaatgatctgggatgacctgaagaagaagactgttattgaaatagaattttctacagaagtcaaggcagtcaagctgcggcgagatagaattgtggtggtttggactccatgattaaggtgtccacattcacacacaatccccatcagttgcacgtcttcgaaacctgctataaccccaaaggcctctgtgtcctttgtcccaatagtaacaactccctcctggcctttccgggcacgcacacgggccatgtgcagcttgtggacctggccagcaccggagaagccacccgtgggacatttcctgcacacgagggtgtccctgagctgcattgcactcaaacctgcagggaacaagaattgcactgcatccgagaaagggacgcttatagaatatttgatacttcatcaggggcattttatccaggaactggaagaggatcc

SEQ ID NO: 434784 - DNA, 1087 bp, Homo Sapiens
  misc_feature (643)..(643): n is a, c, g, or t
  misc_feature (904)..(904): n is a, c, g, or t
  misc_feature (934)..(934): n is a, c, g, or t
  misc_feature (1049)..(1049): n is a, c, g, or t
tttatgatatcatagtctttcgactttattttctgagataaaaaagtataggcataggtgtttttaatagtcttcttgatgatatcctttagaataatctatcaaatggcttctttcatgtttcctgattatcagcattcatcagtgttactgtcagccttgattaagtggttgaaaatttcagagaagaataagcaacttctgtgaacctttccccaatccctgagaatcataatcattacagaaatattttatcctttcatcaaatatctctggaaagtagccgtgttcgttcattgttaataggggcaaggtgcagtgtcatagagggttaatccatgtaaattgggcttccacccgtaaaggaaattttctggaaaatcacggaatgtaaggtcaggaaaaaaccaaagaaggaaaatgacatagaccattctgctgcagtagtgatcatgtgaagcacataacctttgtcctcggggttccatatggagtttctgttctaaatcagtcccaaaattgccactgtgcaaaactgatgagcaagtcagcatgctaagtgcacttactccacaccagataaccaacaacagtctgatccagaagacttgtttgccatggattttgggctgcatttggtagnaaaggatggtctgaacaaacatatataatgagcccataccaaaggtaagcacagctccacttacatgtgcagcaaaaagggttgttttataaaactgccgcaatatttagcattgccccaaataagcatttttctggagctactgtaccagtgtcactgatataaggtaaagccgggtctatatggtggagtgttactgcagtaatgtatgaaaatatgaaagctagcagatgtccaaattacaagggtctgaaggaaggnaaactgaggccttgctgaaaccaccacatnttctaacaggttttctgttttacaacttcacaaaatgttagtcttcagacctgctcatacctgcaccttttgtaaatccttaccagaccgactagcgctggccgtggcgccgaancccctatgctaaaaggagacatcccgggaattccggac

SEQ ID NO: 434785 - DNA, 1127 bp, Homo Sapiens
attgggtttcccacccggtaaaagaaatttttttggaaaatccaggaatgtaaggtccgggaaaaaaccccaagaagggaaaaatgaccttggaccattttggctgcaggtagggattcatgtgaaggcacataccctttgtcctcgggggttccaatggagtttctgttctaaatcagtcccaaaattgccacagtgcaaaactgattgagcaagtcagcatgctaagtgcacttactccacaccagataaccaacaacagtctgatccagaagacttgtttgccatggattttgggctgcatttggtaggaaaggatggtttgaacaaacatatataatgagcccataccaaaggtaagcacagctccacttacatgtgcagcaaaaagggttgttttctggaagtttgccacaatagaaagtcctaaacaactcagtattccaagtacaaggccagccttgtttaatttgatgataacgttctcttcaggactcagagcatgaacttgcttataacgaacataaatggtagcgatgcatagacctgccgcaatagtttagcattgccccatataagcatttttctggagctactgtacccagtgtcactgatataacggtaaagccgggtctatatggtggagtgttactgcagtaatgtatgaaaatatgaaagcagcagatgtcccaaattacaagggctgaaggaaggaaactgaggccttgctgaaaccaccacatttctaacaggttttctgttttacaacttcacaaaatgttagtcttcagacctgctcatacctgcaccttttgtaaatcaacaggaacgtgtactcaacaggaacgtgtactcaattagcttttgtgggaaagggttgaagattcttggtaactgcttcaacaaaccagaggaattaattagaccgctgattttctccggaagcgcgaagcactaggccgtttgaggatcctgctccgctttgcctgggaccaggaaaagacccgagagacggaactcggcatcaggcactgcttggggcaggaggagagtaggggaaaccaaggaagagaacagaaaggtagggcacggggagctgagcccagctgcaccctcgtgccaagctt

SEQ ID NO: 434786 - DNA, 750 bp, Homo Sapiens
tcatagtcttttgactttattttctgagataaaaaagtataggcataggtgtttttaatagtcttcttgatgatatcctttagaataatctatcaaatggcttctttcatgtttcctgattatcagcattcatcagtgttactgtcagccttgattaagtggttgaaaatttcagagaagaataagcaacttctgtgaacctttccccaatccctgagaatcataatcattacagaaatattttatcctttcatcaaatatctctggaaagtagccgtgttcgttcattgttaatagggcaaggtgcagtgtcatagagggttaatccatgtaaattggcttccacccgtaaagaaattttctgaaaatcacgaatgtaagtcaggaaaaaaccaaagaaggaaaatgacatagaccattctgctgcagtagtgatcatgtgaagcacataacctttgtcctcggggttccaatggagtttctgttctaaatcagtcccaaaattgccactgtgcaaaactgatgagcaagtcagcatccacaccagataaccaacaacagtctgatccagaagacttgtttgccatggattttgggctgcatttggtaggaaaggatggtctgaacaaacatatataatgagcccataccaaaggtaagcacagctccacttacatgtgcagcaaaaagggttgttttctggaagtttgccacaatagaaagtcctaaacaactcagtattccaagtac

SEQ ID NO: 434787 - DNA, 1094 bp, Homo Sapiens
agcggtccttttagcataggggcttcggcgccagcggccagcgctagtcggtctggtaaggatttacaaaaggtgcaggtatgagcaggtctgaagactaacattttgtgaagttgtaaaacagaaaacctgttagaaatgtggtggtttcagcaaggcctcagtttccttccttcagcccttgtaatttggacatctgctgctttcatattttcatacattactgcagtaacactccaccatatagacccggctttaccttatatcagtgacactggtacagtagctccagaaaaatgcttatttggggcaatgctaaatattgcggcagttttatgcattgctaccatttatgttcgttataagcaagttcatgctctgagtcctgaagagaacgttatcatcaaattaaacaaggctggccttgtacttggaatactgagttgtttaggactttctattgtggcaaacttccagaaaacaaccctttttgctgcacatgtaagtggagctgtgcttacctttggtatgggctcattatatatgtttgttcagaccatcctttcctaccaaatgcagcccaaaatccatggcaaacaagtcttctggatcagactgttgttggttatctggtgtggagtaagtgcacttagcatgctgacttgctcatcagttttgcacagtggcaattttgggactgatttagaacagaaactccattggaaccccgaggacaaaggttatgtgcttcacatgatcactactgcagcagaatggtctatgtcattttcccttctttggttttttcctgacttacattcgtgattttcagaaaatttctttacgggtggaaagccaatttacatggattaaccctctatgacactgcaccttgccctattaacaatgaacgaacacggctactttcccgaagattattttgatgaaagggataaaatattttcctggaatgaataattgattctcaggggaattggggggaaaggttcccaaaaagttgccttaatcccttctcctgaaaatttttccacccaccttaattcaagggctggacaggtaaacacgtgatggaa

SEQ ID NO: 434788 - DNA, 1238 bp, Homo Sapiens
  misc_feature (13)..(14): n is a, c, g, or t
  misc_feature (44)..(44): n is a, c, g, or t
  misc_feature (47)..(48): n is a, c, g, or t
gtgtattatttannatctacatataatgtgtatccttcaattanttnnaatttcaaaaaattgaagttacctagtaacaatgcaccagtagaacacaaaatactctgactttgtttagtctgtgggaaaagaaaaatctttaaactggaaagattttgtagtcttacaaagattacattgaaattggaattactgtagttcgtttttccctctaggagggcagccatttctctaaaagttgtgtaaaagttaagactaggatttcaaaatgcaagcagatgttgatgaagcatacgaaatgggcaactccgtttctatttcggagccgcagcgactccgactttgtgccccaaccctgtaaagggcaaaacctcatcccttcggtgtaaactttcaagagaagtggggcagcacactttaggcgtttcaccaagaggctggcgacatgctaggtcaggttgtccggagaatcggggctgaatgggagagatcttgagggcaagagcctcagagaccttcaggcaccgagctcgtgaaggtttccaagtgcccctctctagctgctcccagggggaattagtggttgctacagtagtttaagagggtcgtggtttttcgcaacccgggcggcgagatggcgctttggtgtaagcgaggtaaggtgggtgcactgtgatctccgctctcggagcctccagctgactgccacgccgacttgtggccagacctgcgacctccgccctcccccgcggcgccagcttctggaatctggcgtcgcccccacctctccagtcgaagtggagtccctctgtgcgggcctcgccgccatacccaggccgaatgggggtggggagggaagctggcagagctcggcctcaggatccgcgcccctgtggaaagaccgcagagggaagccgtttcaccagcctctccccttctggggtctcgggaaacacgcggtaattaccgaagaaccccgcactctgtgagaggcgaggctgcggggctgccgggacggtttgaggaccgggctcggccgaggagactccaaccttcaccctccctggcccccggtcccacttcccgccgtctcccggcgccgccacttcaggtagcccactcggcccggcctctccccgcgcccggaccaccccccacggggtgctctcactgcgcagcgagtccctccgctgcctcctcccagcccaaaatggcggcgatggccgccgagcttctcg

SEQ ID NO: 434789 - DNA, 1890 bp, Homo Sapiens
  misc_feature (180)..(180): n is a, c, g, or t
  misc_feature (230)..(230): n is a, c, g, or t
  misc_feature (427)..(451): n is a, c, g, or t
cttgaagtggcagggggggttaggatagtttattcggctcgggcgtttttaaaggatgttttgtggggtgtgagtatggtagctgagtgcgcagattggaagggcacagagatgcgatgggggaatttggctagcgggctttaatcccgcgataatagactgggacttgtttcagtttgngagagtggaggattctgtgaaggatggtgattggagattaacgtacgcantccagaaaggaaaggtccttgcgcaaaagattcccaaatttaggcagggtttctcaactccagaccgttgtaaaacggaggggccagggccttagcttataataggacctcaatatgggggccaccttggtacaagaaaagctgggtaggcgtaaacttgggccccctcgaggggattcttttgaagcggccgcccnnnnnnnnnnnnnnnnnnnnnnnnnggtccccaccaaaggccatttaatttctctgtaaagggtaagatgacacaaaagagccaactatggaaacggtgaggtgggagtctgaaccgatttagctgttctcagggcgcacagggtgttgacggtggttttcatctgccacctgcctccttgagacccagctggcctgagtgtgcacgaaatgggaccttctccttgggtccaccaggctgggaggcacccctaggtacccggctcctcatcacagcggcagccctctcggttccacatctggttctcctgacgaagccgctggttttcggtccggagcctctggacctcggcagccagctcctccacctggcggcaggactgctggccggtggacgcctgcagctgctgcagcctcctagtctcctcctccgcctgcgacagccgcttctccagctccaggtagtctcgcaccagctcctgcttgctgcggccctgcaggctctcggtgtggaagcgttcgtaagtctcagagaagtccttccgctggaactcaccgtgcgctcggccccgcccatcactgtccccggcctcactctccccactggaacctgggtgggagatcccatggggcacatccaagttgggctcctccgggtccctgtcattcatcaggaactgggtggtgttgtagggggccacgggctggcctttggcgaacatctcttcgcggacccgggaggccctctggctctgcctctcatcccgctgttgtttctcagcccagctcagctccaggtaggttcgccagtgccttttgcgcttcgatggccgccgacggtgtttcttccgggccagcacagcctccgctgagcagccccctgggctctgggtccggggactcctactgttccagcccaggccaccgacagccccagcaagatcttcatcctctgagtggctctccatccgcggtgtcaggggcagggaaccaccagagtcatgacgctcagggggtgtttgggggctccccggggcaccagaggtcttggcctcctccagggccactggtgactctgcattacaggcggtctggttcggagtggccatcatcttctgttccaaatctttcagcagacgcctggaactagtgacacctgaagtggcggcgccgggagacggcgggaagtgggaccgggggccagggagggtgaaggttggagtctcctcggccgagcccggtcctcaaaccgtcccggcagccccgcagcctcgcctctcacagagtgcggggttcttcggtaattaccgcgtgtttcccgagaccccagaaggggagaggctggtgaaacggcttccctctgcggtctttccacaggggcgcggatcctgaggccgagctctgccagcttccctccccacccccattcggcctgggtatggcggcgaggccccgcacagaggac

SEQ ID NO: 434790 - DNA, 815 bp, Homo Sapiens
atggcctcggcgtggccctttggcgaacatctcttcgcggacccgggatgcccctcttggctctgcctctcatccccgctgtttgtttctcagcccagctcagctccagttatggtcgccagtgcctttttgcgcttcgatggccgtccgtcggtgtttcttccgggccagcacagcctccgctgagcagcgccctgggctctgggtccggggactccttctgttccagcccaggccaccgacagccccagcaagatcttcatcctctgagtggctctccatccgcggtgtcaggggcagggaaccaccagagtcatgacgctcagggggtgtttgggggctccccggggcaccagaggtcttggcctcctccagggccactggtgactctgcattacaggcggtctggttcggagtggccatcatcttctgttccaaatctttcagcagacgcctggaactagtgacacccttattctcaaatgcaggccccgaaggctgcctccaccgctggttttcacacctccagccagcaaggggccaaatgggattcaggggccgtcttctctgtcctgctcctcgggtccctcaccaggactcatgtcctgtactgtcctcctattcgctgtcaagggctagtgcacacccactacatctgtgtgcctttctgtgcgactgcctgtcggtgcaattcccaacgcctgagccctacctcttgctgcagttgcagcagcatccatggtcaagccgctcaggccactaagactgggggggaagagagagcctgaccgcgcggtgcctgctggggattgtag

SEQ ID NO: 434791 - DNA, 150 bp, Homo Sapiens
aagcttggcacgagggcagaatgttgactctaaatgagtttttcctgtgacataacacgcatgaaaccaggatttctttcatgtgtgaaatgtcttaaatcagacttaccctttgtgattctcttttagctttaaatgtcatttaagaag

SEQ ID NO: 434792 - DNA, 721 bp, Homo Sapiens
ccctatactgattaatgtttcatttattgttgctcaaagttagataacagtaggttcaaatagccactggattcttaaaaatctttagtaaaacaaaatacatgggaataatattagtgattaatccatacaataagcagattcattaagttagcattactttgctttcatagaatatttttcttcttgttaagaaaatataaaaatgaaattttacattggttcttgtcaaaatccaattaatagccaaataattatttctaagtgcaacttatttctaagtgcaatcagcccttaacttaagggcttattgaaacaaagccactgtaaaagagcttttcaagaagttacaatataatgggaaaataaatcggcccatacattttgttgcaaaaagtgaacaaagctaatcaaatacaggagaaaaaaatccgaacaattatgaactactttttaaaaataaaaagcatgctttgtgattaggtgtctttattctttctcttatcaatataaaaagtatttgtttgttttagaaaataccatcaaatattcccaataaagacttcatttcatcagcttcatcatcaggatgatacatactgaaatcaacttcctttttacattcactgtttctaataaaaaaatccacttttttataattggaagaattggggtttttttcagagaaagtaaagcattgcttctcaatctctggtgacag

SEQ ID NO: 434793 - DNA, 1212 bp, Homo Sapiens
tttgggttacttttagaattttattgacttttttcttcataactttaaaacaaaaacagcgcatgaaaaccagtgtcttattccaaagtctcaactcagctgattgccaggtgaacatcaccatcttactcctctgaataactagacacaaattacatagcaagttcgagtttctgcccacccaagacacagccagtaatcagtcacaaacacagacacagccaactccaggggctccagctttctgcccatcttctctcagcagttcctcccatctgctaagatgcgccttcctggtggctctctctcaaggtgggtcaaggctgaacaagacagaaaagcacagtctaggtccaccatcacctcccactggccaccagttggccagccaggaaatcatttctgtacatcttttgtctcccccttttatctccctctctcttctccaaaacttgttgctatctatcactttcatgtaacaatggacttagtgtccattaaactgcctgagaagtggtttgagcctgacatattttcctgagctaaaaaaggaaaagtacctctgtggccttcttgccattaagatcaagtaaaaaagggactagcactactgaaaagggtcacgctagaaaagccttagaatcctctctccaccccgtgaaggtttctctagctgtagctcttaagggtacaagacggcaaatattctggggtgaaggaggtataatggggaaacacatttattttccccttttaaacttccctgctgccccagtctttgccttcttcttagtggatcccttgggttctggctccttgcgcttagctgaagagagtgagccggtcaccttgaagaaatcatccaggcggccctgggtgctgccttggcggctcttactcagcctcttgaccccactgcggattcgctcctcagagaactgcttttcaccacacatgaacttgatcagctcttcttcatttggctcgctccacttcagctccacagactctgggtccagcacctcaggttccaagaagagctggtgagcctccttgtggagccaattttctggcacagggtacttgttggggtcaagtcgccgcacgatctcctcgatgctcttgtgcttctggatgaggtccacagcccgcttgggcccaataccccggatactctccctcgtgccgaaatcgccacccaggcctcgctcc

SEQ ID NO: 434794 - DNA, 1953 bp, Homo Sapiens
  misc_feature (47)..(68): n is a, c, g, or t
  misc_feature (99)..(99): n is a, c, g, or t
  misc_feature (111)..(111): n is a, c, g, or t
  misc_feature (148)..(148): n is a, c, g, or t
  misc_feature (244)..(244): n is a, c, g, or t
  misc_feature (276)..(276): n is a, c, g, or t
  misc_feature (280)..(280): n is a, c, g, or t
  misc_feature (347)..(347): n is a, c, g, or t
ctgggccccccaaaatttccccaaggccaagttgggagtttttttgnnnnnnnnnnnnnnnnnnnnnngcccagtaattccgttcccaaacccccgggnccccaggcccanttcccaggggggttccagctttctgccccatcttctnttcaggcagttcctccccatctggtttaagatgcgctttcctggtggcttctctctcaaggtgggggtcaagcctgaaccaagacagaaaaaagcnccagtctaggtcccaccatcacctttccccantggnccaccagttggccagccaggaaattcatttctgtacatcttttgtctccccccttttatctccctcntctcttctcccaaaacttgttgctatctatcacttccatgtaaccaatggacttagtgtcccattaaactgcctgagaagtggtttgagccctgacatattttcctgagctaaaaaaggaaaagtacctctgtggccttcttgccattaagatcaagtaaaaaagggactagcactactgaaaagggtcacgctagaaaagccttagaatcctctctccaccccgtgaaggtttctctagctgtagctcttaagggtacaagacggcaaatattctggggtgaaggaggtataatggggaaacacatttattttccccttttaaacttccctgctgccccagtctttgccttcttcttagtggatcccttgggttctggctccttgcgcttagctgaagagagtgagccggtcaccttgaagaaatcatccaggcggccctgggtgctgccttggcggctcttactcagcctcttgaccccactgcggattcgctcctcagagaactgcttttcaccacacatgaacttgatcagctcttcttcatttggctcgctccacttcagctccacagactctgggtccagcacctcaggttccaagaagagctggtgagcctccttgtggagccaattttctggcacagggtacttgttggggtcaagtcgccgcacgatctcctcgatgctcttgtgcttctggatgaggtccacagcccgcttgggcccaataccccggatactctcacagtagtcactgcctagcaggatgcacagatccacaaactgttcctggttcaggcccagctcctgcagaatccggctcaggtggaattcctggattggcagctttttggcttcactggcagtcaggtgtcgcattagcacagggctgccgaaggtgaggcagtccatgtcctcggtagccgcagcatagactttgccagccttcaccagggcagcacagctggcctctgcctcactgggtgcatcaagataagggatgcccatgaggctcagcagatgtttgcactcatcattgtgctgcttagtgaccttcaccagccgcttagtgaatttttccacctcctgctcggccccagcagcctgagcctgctgcagctgcttctctgcctcagcccgccgctcactgcgtttggccagctcgcctgacttgagctgtggcggcttgccatcaaagacatacacgggcttgatgccgttctccatcatgcgaatggtgcggtagaacatgcccatcaggtggctggtggtctcaccctcctcattctgcagcacatccccaccctggcgaacagcaatcaggaactgataaatgctcatagaggcatcaatggccaccttacggccaaagtagctcttgatgtcattctcccggatggcactgggggccacatcagcaattagtttggccaggccttgaattcccatggcaacacagaggagggatgactggcctttgggacacgcggcctcggcggctaaagcttggttcggggttgccccgggcaggcggtcctaagctcgctctcccttctcagcttagcggcgggtggcctgacgttcagccgccttccaaagcccgcg

SEQ ID NO: 434795 - DNA, 1664 bp, Homo Sapiens
  misc_feature (12)..(12): n is a, c, g, or t
  misc_feature (31)..(32): n is a, c, g, or t
  misc_feature (87)..(87): n is a, c, g, or t
  misc_feature (91)..(91): n is a, c, g, or t
  misc_feature (283)..(295): n is a, c, g, or t
  misc_feature (572)..(572): n is a, c, g, or t
  misc_feature (1402)..(1418): n is a, c, g, or t
  misc_feature (1452)..(1468): n is a, c, g, or t
taaaatataacngaaaggaagaagagaaatnnagatgtaaaatgtgggtcagatattttataggtttccatttaatatatatatacngggnaaaatccagtatattctgagtaggtccttagttttctgatttctacatgtgtctgctatgtgcaaatgtagtatattatttactacatggttattgtggtgtagtgtgcaaatgttagcatgtgcattatcctgattactggacacagttttattcttatcaggaatagaacttgcacatgtaccatacaannnnnnnnnnnnnaatcacaaaggatgtatttccctaagtagcacttttggagcaggggaaggaagaaaactgctattccctaatcctcctcctataagatatgcatatgcctgaggtgtataaagacatttaggttagttaatgggcatgttaataagagcattgtgatgcaaattcattttcaaaatgaaaataattttttcttccccaaaatgagaatagtagaaattttggtgaactgagcaccatagttatataatatttccctgcgaaggtctagtttgaaganaaaaaaaacttgaaaacaaacctatgaggttgagcctggttgctataaagactttgggatggtatgtgtttctgggatgagctatatagaaagtttagttgactgctggaccttggatattcttactcggttcaaaatacacaaaaacaagctggtacatatggtgctttataatgcagtcgagagtaagaatacatgttgctgtagccccatttcctttacaaacccccgcacaatttcaaaagtggaagttaccgtggcctctggtttcccagttcctccgtggtgtaatgaagtcccaggttttagaagctgaagccaagcctagggtagcatcgtctgtacggtggtgaggcccagcacagcggtagctgcctagtgggaatgaccccctgagcatgcagagcccagagtcactgtcgatctgcgttcccagagaacagttgtgaagagtcctagaacaggaactctgaatcggactgtcaggggcctatgtggccaaaatgttactaaatataaaattcctgtcgtcttcagtcttcatgctttgtcactgtaaaaagaacaaaaagcgtttttactataatttaaaggagctgcttttttataggcacatactattgtcgctttgtactatatttgatagttgcagaaataatttagactgtaaaaaaactttgtggtatttgtactgttcctgaatgtttcaaaaaaagtgctttacttgggtgccataaatgttcttggtactgctggaattccccctcctttcccctggctttaatgggaaaccctggatatggataaccaatttttttcccggaagatannnnnnnnnnnnnnnnnaatgggggggggttaccgctttgggtaacaaaannnnnnnnnnnnnnnnngggtcacccgatattccccggaaaaggttttaccaacccccggggttgaaaaacatttagccccctttttaaatagcccccttttttttaaaaaaggcgggcgggagatgaacccccctaacacgcggttgagcacaagcccaaaaagtgtgggaaataatcccacccctccaaattattacaaattgtcgggagt

SEQ ID NO: 434796 - DNA, 468 bp, Homo Sapiens
  misc_feature (427)..(427): n is a, c, g, or t
tttctcccctgcctgaggtgctcttttaccatggacgtggacaaaggaggtttaaatgaatactttgttttgtcatgttcaaaaaaagagtattaatattttgtgactgcatctgtgaatgaagacactcaaaaagccatgtttccaacttaggttaataataaggctatttgtccacccactcttcggcattgctgcaatattcctgggcctcaagtgggaggccacgtgggaacaaggcctcaggaaaacaaaggacatgcagcctccctgagccagttcctataaaacaccaccagggcagggccacaggctttggacttctcttaggtgggctggcaactcttcctttttccctttcttccaggcaaggcgttacgggttttgtggacgttcaagggtcttgcccaaaaggaggcttggggtncacgggtaacctagggttttttggggccaaaaataattttt

SEQ ID NO: 434797 - DNA, 461 bp, Homo Sapiens
gccttaaaaagcctgccctggttaaaaaaattccaaaattccagggcagaaagcccactgaagatggaagctccccctcccactccttccctgagatcccggcttgtcccaacaaagacgcatcgggatttttgtaaccccagatggtactataaaatatgagggattattgctttctgtgaaacagcaaataaaaattgagttgaacttcacaatgttaagtgctactgtgagcattcgcaagcaatgtcactttctttcagattcagaaactgctatctaactcaatttctattaaaatttaccattatattcacagtaaaatagccgaatatattaacatgtcactgatctttgctgataataaccaaaatggggagggctagcaagagtgcatttcaaggctacgggccatcttccctttgtgcagcttgctttgcctttcccctcgtgccaagctt

SEQ ID NO: 434798 - DNA, 573 bp, Homo Sapiens
tatagtgtaactttttgtagagggacattttgacttttactgggtctaagttttacttttttattttgttccagacagtctcaatgtttgtaaagtctaggttccagatgtaagatatttggctgatattttagtgttactgagccattaattaattacaggctcatatattctgttaaatctactagagcaagggttgccaaactatggcccgtagccagaatcagcttcctgcctgtttttgtgtggcccatgaactgaaaatggcttttaaatggttgggaaaaataatcaaaagattatttcctgacatctgaaaattacatgaaattcaaattttagtgtctataagtttttattggaatgcagccacactaatttacatattatctatggatacttttttgctataatgggaaagttgagtagctgctacagaacctgtgtatgtgtgtcttgtttcacattgccgcttggcaaggctacaggaatcatgggtgatgcaggatattacctgaaagcatttgggaatgccctgtgtatttgctaggatttattactttttctggctac

SEQ ID NO: 434799 - DNA, 449 bp, Homo Sapiens
tgagtattaccaagttgtccttttcaagattaatctggtattttacttggcccttcctggaggctggactttaacccagagaaatgagtgaggcgggaaattccagtttgggaactgacaccctaggcaggggtgatggtggagatattttggcataggagggtatttagggcatctgtagcctccgattttacatagtcataaacaggagacttggacatttagcaggattatagtttgggtctccttaacaggagccaaagatatatttgcaaacttattgaatacacacacacagagacactgacaaaaatattaacctgactttttctaactaattatgtctatatggaggtggttcaaatgctggtagaagcataaaagagtgatatgatttttgtctgcctttgaaggtgggtttaatttgttatttgcctcgtgccaagctt

SEQ ID NO: 434800 - DNA, 847 bp, Homo Sapiens
ttttttttcagggattcacagaactttatttggaattaacaagctgttcatagatcactaaatgttgtttcacaagcttatagaacatggattatctttgatgaattattgaaacgatttgcatgaagtttatgactgcgtacagtgtattttctctgcaggtaaacagtcttgagttaccacatggattaaaaaaaatctatgaatttttttgtaatcataacaaaatattagcataagccttattgtttacagagttttaatctttcacaccatttcctttaaaataatgagctgcatttcacatgtgagctaaaattgttgggcagcccactacacctattgaagcgagatatagtcagctctcacttccctgtttcgtactgggggaccagtggtacaaatcagcaataaaacagtgtatgatgtcatgctacatagtttggtcttcacagtggaagatattttgtgtggctgttgcatatgatttacatttcttaattaaatttactcaggttaataactgatttgtctgcatcctagaaacaaccagctctcagggtttaggtgtgggttggtctgagtagtaggagcagccaactggaattaaaatgtttgctgtgagtagttcagaaaggcaatttttctgtgattatagagatgagtgcaactacacgtgatagctctgtcttcattcattttctttttgtggtgcaggtgtatttatgggacccacaaatataccatttacctcacaagcaccagctgcatttcagggctttccatcgatgggcgtgcctgtgcctgcagctcctggccttataggaaatgtgatgggacagagtcc

SEQ ID NO: 434801 - DNA, 2650 bp, Homo Sapiens
  misc_feature (923)..(936): n is a, c, g, or t
  misc_feature (1879)..(1936): n is a, c, g, or t
ctcccaatttgcccttataatttggtagacctgaaccaggttggtagacttgaacaagtttttaaaacaggacaagtattttgtcagctaaacgtttcctgatgattcctgactttgcaatactaagtaatttttggaaggttagtggcagtatacatcataggaaataaaaacccacaaatgaaaaggtctatggagtcatgtttaatgtagggaaataacattttgtcaatactaggcaccataaaatgtaaacacaattactgtcataaacctagatataccttcaaggattgaagattgaaagtggctttgttttagttagttaccctgtttgcatatagtgcagaaaaaggtcttcatgttagcactatgtacattaagaagagatccaaattacaagagaggcagataaaatttgaattctttaagcattcattaaacgaagttttggagtaacatccacgtttatcttcctttcactaatcacgttccctgttaagcacatcataacaacagcacagtgaagtgaatgatgaaataagagcattttgatacactagaaaacagtgctcagtgagacatttacattctatttatatgattaaacatttgatcatacagtaccttcctacaggattactggctaattttggggtggggtttatactattagaggtattactaacatgataactacttcccttatatgcaaacattagagctataattttattgagaggaaaactgattttgcaagttgagcagcttctcaaataatgcagtacatgaaatcatgggaaatatgagcaaagctgcccttgacataaaatgatttatcaacctgcttttcaccacatcaaattgaatcagtacagaccaacacggtcaatcagatcattcttaatatgaacaaatgggtnnnnnnnnnnnnnntatgcatatgaataaacaggggaactagatgcgtttcagcaaggaatgtcaggtggtagttctggatgaaacttgtattgcagttttcatttccacagttgtgtgctgagagtctgacctgatgagcttccagaccatcctgctgttgtgctggagggctggccaaaacctgcagtaggggttgcactactgatactcatgccagccatctgctgattcatctgtgagaggctccactggggctgctgagcttgcggcaggccaaacttactctggggtgcacccatttgtcccaccattcctccttgggggccaacaacgttctgaggaagtggcatcacaccagtttgtgcatttcccataaacccattgggcatgggcatgcccacctatcatgcttggactctgtcccatcacatttcctataaggccaggagctgcaggcacaggcacgcccatcgatggaaagccctgaaatgcagctggtgcttgtgaggtaaatggtatatttgtgggtcccataaatacaccaggagtactttgctgttgaatggttcctgtgccatacagagataagatggagtctttggaaagttgtttctttgccacttcttctgattttgtagtttgctcagtgaataaatctagatccccagatgttactgtagacagggttgcagctgctggtgcagagggtgtcccctgagctgggggcatgacagttgcaggtaagggattagaaatcatcggtccaaagatgtccagatcatcgttcaggggtggcaccgttgtgttcccgttggtcactggtgccacagcagggccatcaagtcctaaaagatccacagtgggctccacagcttttttagggctggtactttttttaggctccagttgctgatctttcttctgcagcttttcagctgtaagtggttttgccggnnnnnnnnnnnnnnnnnnnnnnnnnnnnnnnnnnnnnnnnnnnnnnnnnnnnnnnnnnaatttattttggtcaacagcagcttgcagagaaggagaggataccaaaggctgaagaggagcatcagaggaggaaatatttgtaatagctatggcatttttatcgtagtatttcttcttttcatatttatctctgatgaaaaattccactgcttgatctgtctgtggtcttcgaaagttctctggaagattggcttcatagagtagtcttgctttagtatttcccatatcttgcatgcactgtatctgttctgctgtccattggtctaggttgactgatttgaccctggatatatgaaccccaagatttctatgaattccagcacatctgatgcaaataaacacaccaatattccaggaagcccatcgaggacctttggcctcgcagtcggcgcagtacttgttgtcctcctccctcagaagcttggataggatgagctggtgctgctcgttcagcttctgagccttctcccgacaggagcgcgtcgccatctcggcagcggggcggggagcctggggcagctacgtgcctggcggcggacgctggctggagccgggcagagtgaacgcacctggcgccgaccgggaccgcgggcggactcagcccaggaagcggcagcggcagctggaacgggaggaggggcggcggcggcggtggcggtggtagcgccgacgtgtcccgcctccttgaccggcctgccggcacgcacccgct

SEQ ID NO: 434802 - DNA, 408 bp, Homo Sapiens
gggtccttttggctgcccttactagaaaatctttatcctaatccaatccaaggccacattgcctactagcctacttcctcccctgttagtgaagttatgatggcctaaagtatccaggcttgggacccaaggggaaatatatagctgcctacaagttgttcccagataaaatactagaattaaaaacatctgtaaactttgccttctgtactgttttcttctttcagtcctggtggtttgtggcaggtggaacatcaagttggcagcacaccgaattctgagaatgaaaaattcttaggatcagcaccttctttgacaagtggcagactcctgagtcttcccattgaaaaataggactggtaaaggagaaaagaacacattctgtcctgtctctatattttaatgttc

SEQ ID NO: 434803 - DNA, 2791 bp, Homo Sapiens
  misc_feature (1107)..(1132): n is a, c, g, or t
  misc_feature (1135)..(1135): n is a, c, g, or t
gaaatgcacagataatttaatgtaatttactttaagattttcccctctcagggtctgatttcagaaaatcaaattacaaagtcatcatcacatcctagatttattacaactgacctgcaggcaaaaggatagaactattacataaacacttcgattccatgtatatatcttaaatagaggaggaattcaaacaagaatacaggataaaatattccaaagctccaagaagcagttatgttactgagctccattttttacagacaaataaggcaatatccctgcacattagctttttgataatttttatacatttttctatggtacaagagaaaaataaccagagctcacaatgtacagttcttacactattttcacagtttgtgaacactatacacccttttgttttaataaagatacattgtaataaactccttgcccttaagtttatagtttataataatctatgattaatacactaaaattgccttcttatgtggtcatccacacaatagaacggtcagattagctcctggacagtcagaattgcttttatctccatttgcataatggcaaagtgaccctatgctgagccagatgggaagttgacagcagagaaacagattcctcttgagtccccgggagcaatggaggatgatggcttgctgtggtcgaaggcagacatagagcaatgtctcctttcagaacagtgggaagtctaaagtttaggataccgtgggggagaagatagggaaatgaggcaagtagatcaaagagataatcacttttgaattctgcaatttacagggatgtgactttaaacagcaccattctccctttattgtttgacagtatttatgactgtcactctgagaggagacacagcaatacgtgccacgatttggttctgtaatggcatcacctgcatctcaggccatgactgttttatattccagtgtgcttgaaccactcacagtgctgcttcactgtcatacaaagcctaaggttcagtgccagggaggcccaagcaaaacctaatgagaacctggctaatgggtaagtgaagaagcacaagatacttaaatggcctcttgtaacagtgctgagggnnnnnnnnnnnnnnnnnnnnnnnnnnccnagtagaattccaatgccaagaaatggtgatggactacgagaggttctagcaggtgatgaacgtaaaggctgccgtttcggatcctcatctggtccaatgtgtctctagaaaagatgcctctttatcacctaccacatcggctgggccccactattcttagccttttaaacactagcgaatatgagagatttggggctaaaaatccttggtaaggaacatccctgctaactgtaaaggttttttgatatagaaaaaaggcaaaatattggattaagcgcaagtcacatagcgacaatagaccacaggggaagggaaagagattcggaaactgaagacctggaccagtgatggcaagaagcaaacaactgagatttggtcttttgctgcctactagaaatctttatctaatcaatcaaggcacattgctactagctacttctccctgttagtgagttatgatggctaaagtatcaggcttgggaccaaggggaaatatatagctgctacaagttgttccagataaaatactagaattaaaaacatctgtaaactttgccttctgtactgttttcttctttcagtcctggtggtttgtggcaggtggaacatcaagttggcagcacaccgaattctgagaatgaaaaattcttaggatcagcaccttctttgacaagtggcagactcctgagtcttcccattgaaaaataggactggtaaaggagaaaagaacacattctgtcctgtctctatattttaatgttcacctctttgaacgcaacatggtttttggtaaagataaattcattctaatttaacatgatatttcaaacaggaaatttggctgagcacatcgatccccaaacatcaactgtaactgtaaagcaacagaatatcacatcagtaatctattgcacttggtgaagaaagtaaattcctcctttgtctcccagctccagaaggcaatgtgtctcgttggctgtgcaagctcttctcactcaagcccgagtttctatgttcagacatagtacattcatcactgtgtccttccaggatttggaagtctgacaaaacaccattccagtagctgcatctccaggttttgagtctagaaatgaatttaagatgtgatctaatcacagtcaacaacttgatcgtactgacttccacatttcatgaatatgttcatcacaaaagagcaggatgaggtctctctgaccagcactaacactgtgtgatcaatcaggtattacaaggatgcacgttctaggtgacaggagtatacagacatgatggaaacgaacaccaatcttattgcacatggtgtctgggcgagcaataaaaacactgtgatacgggatgaaaattctttacgtcttgcttcctctcagcccttttttctagagtctgatgtagcagcgatatcaatcgacatacatgggagagctgggagtagctggcatttgatccaggattttacaaacatagcatgcgacctcaacggcacgttcttcatacatcaaaataaagggatgtttcagaagctctttatactttggccttttggattcatccttcgtaaggcacaagttgacaaagttgatgaaactcggggagaattccctttcctcagaattactcagctgcggaggatctcgc

SEQ ID NO: 434804 - DNA, 1240 bp, Homo Sapiens
  misc_feature (13)..(13): n is a, c, g, or t
  misc_feature (25)..(25): n is a, c, g, or t
caaagtggaaaancttttattaganctgccaattctaggttcaaatttatgtcaaagcactttatggtaccataattagtacaactaaattattttttagctttaaatgtcatttttcactaaatgattttaaataagacatctgagttacttgaggcaacgtttagatacctgtacaagtttagattttgagaaactccctatttcctcattgtgtgtctctttcacatgctttttagaactcatttattccacaacatgtttccaacattactatctagtaatttcttaagacttcaaaaataatctccctgttcaattacaagggttctaaaagacaataaaataccttataatttcagtaacaacattttttctttttcttgggcaaagtattacaaagtgttcgcctaatcctcataatgttcttttaaattaacgtggaaatcagtaattatcctccttaaaaggtgggaaaactgaagcactgtaaagttaggttctgacccaaggtcagagtaaccaaggtgaaaaatctgggtatttcaacaactgctgttccagtgtatgtctattattattcgtatcaccttgaataaaatatggcatttaaaaatttatgatgtcataatgctgagtgagtctctactgagcagggctgcataatgttaaattgttagagacgaaaaattacaagcccggctttaaataataaagggattaagtacagaatagtatatgagtaagatcatcgatgccatttgtgctccggtaaattgccttacctaacagatggtgatgttgtcgtaagacacggccgattgaaggaagggtcacaggaaagcgctgaagaacgagggaacacgagtgtagccgtagagtatggggactgagcgtatagccgcacatagaagggcgaggacctaatggaggtgagagatacacggagaaaggggtgcaagagtggcgagaagacgtagtataggaagaaggggcacgtgggggggagataatgcggaagaagcgacgcgacaggaggacgcggagagcgaggagcgagagagcatgtaaggggcgccggagtcgcgatgcagcaggagagaggtgcgaggagagagtgacagagccgggaggtcggaagaggggcaacaggtagaagaggcgaaagaagagatagtggcggaaaagacagagagaggaagggaaagcaccaagacgagacaggagaggggatcaagaa

SEQ ID NO: 434805 - DNA, 1362 bp, Homo Sapiens
  misc_feature (59)..(109): n is a, c, g, or t
gttccccgcgcgacagttcgggagcgcgcaggcagtcgcgcgcacacacgcacgcaggnnnnnnnnnnnnnnnnnnnnnnnnnnnnnnnnnnnnnnnnnnnnnnnnnnngctaggacgctcgtcttcgctactgcatccccgaaccagcagagcgaagctactgcgggttctgttaacctcagcatcgtggggcgaagcagagccattgtgcatcaaggagaggccggtgcctgcgctgccgtctctggcacctaacccagcagaccgctcaccccatcggctggaatgcttgctgattcctctgcacacttctaaggctgagaacctgaggaacccagctggaaaatgccgtctgaacgctgcctcagtattcaagaaatgctgacaggccagaggctctgccactccgaatctcacaatgacagtgtcctggcagcgctgaatcagcagaggagtgatggcatcctctgcgacatcaccctgattgctgaggaacagaaattccatgctcacaaggcagtcctagcagcatgcagtgactatttccgggcaatgttcagtctttgtatggtggaaagtggagctgatgaggttaatttgcacggtgtgaccagccttggcttaaagcaggctctggagtttgcatacacaggacagattttgctggagccaggtgtgatccaggatgtgctagcagcgggcagtcacctacagctgttggagcttctcaatttatgctcccactatctcatccaggaattaaatagctttaattacttggatctgtacagacttgctgacctctttaacctcactttgttggagaaggcagtgatcgatttcttagtgaaacatctctctgaactcctgaagagccgcccagaagaagttctaacgcttccctattgcctgcttcaggaaggtgctgaagagcgaccgcctgacctccctgagtgaagagcagatctggcagctagctgtgaggtggttggaacacaactgccactaccagtacatggacgagctcctgcaatacatccgctttggcctaatggatgtggatactctccatacagttgccctgtcccacccccttgtccaagcaagtgagactgcaacagcccttgtcaacgaggccctggaataccaccagagcatctatgcacagcctgtctggcagactcgcaggaccaaaccacgattccagtcagacactctgtatatcattggtgggaaaaagcgcgaggtctgcaaggtcaaggaacttcggtacttcaatcctgttggatcaggagaatgctctcatagctgccattggcaactggagtgagctggctcccatgcctgtgggaaggagcacc

SEQ ID NO: 434806 - DNA, 1226 bp, Homo Sapiens
  misc_feature (596)..(710): n is a, c, g, or t
ccctatgcttaacttagcagcgtcgccgcgaatcgtattgagacacgctcgcctcgcgcgggacagcacaaaactctcaacttgcggcgcccggcggacacagacacatgtcggagacgcgcggtgcgttgtgtactcacgcgccgtctctcctctcggcgccgcgtcgagcggctagtttttttggtattgctatgacgcgcggctccagctggcggggcggtatgcatcaatagactgcgcacgccgggacgagtgggtgttggcggcgcgacggcgggcgtctcgcgccgcgcagcggcgacagacagttagtagtggggctccccgtctgtcggacaagccgtggggtctgcgcgccgacatcaggatgttcttcgtctgtccgcgtctcgctattggcctttgtatgaggtgagatcgcgcgccgcgtcgttgtgctcgtctataataataaagacgatcccgcacatagaggagggcgcgccgcgtcgtagtcagataagaagagagtgaggagggtggcggcctgaaggtgctgcgcctgcctcggcggtgggaggggattatagtataggggcgcgccgcgcccgccnnnnnnnnnnnnnnnnnnnnnnnnnnnnnnnnnnnnnnnnnnnnnnnnnnnnnnnnnnnnnnnnnnnnnnnnnnnnnnnnnnnnnnnnnnnnnnnnnnnnnnnnnnnnnnnnnnnataaatcaactaagtctctttaatattgtctttcagaagttcacacacactcacacacagatcagaacaaggcggggccgccgaggggagcggggagcggggacttgggaggtccatagcctggattcccttctgcccggctgcccaggggctgggatgggtggaagggagtatttacagagcgtttacaggcaggtttcttatcccagggagaagggtcctacaccaggaacttcccaaatgtccttaaaaaaagcaaaaggaaaggttctgggattagcaagaaaataggcagatacctgggtggaggagggacaaaaatgtacttgcaaaaaacaggagtgtgggggccttactaccccagggctcggtccttttgccggaagaaagggaggggtctgtccgtctgtgggcgaggcctggagccacaaacccaatcactggactgaatcaccccgcggagaagaaaagaaggcggatcctgccagacctgtaggcggggttttgtcagagctg

SEQ ID NO: 434807 - DNA, 344 bp, Homo Sapiens
ccttgtccagcactggcttctctggactctgcacacctccaggagaagaacccagaaaattgatcagttctaaaaaaccatgccccacgtgagttgctgtttctttccttcttgaagtacaatcattttgttgtgtaatgtgaacaccagatttatcccagaacctttccttttgctttttttaaggacatttgggaagttcctggtgtaggacccttctccctgggataagaaacctgcctgtaaacgctctgtaaatactcccctccacccatcccagcccctgggcagccgggcagaagggaatccaggctatggacctcccaagtccccgccccgccgga

SEQ ID NO: 434808 - DNA, 482 bp, Homo Sapiens
ttttttttatgttgtagaggcatatttattgacatgcaaagatgtttacagtatacagtggggggaagcaagttacaaacatttacagtatgatcttgttttagtttaactggcagaaaatctcaaagcatataactccatattttcacacatagaaactttcatatcagcttagaccagggattataattcccaccctgagtcttagagaactcagccatagcctaaatgtcctgggaatgctttctggtccataccaacttccaagaatcactatcttgtaggttgacacagcaacctcttctagctttcctgttttgtgttgttgaagctgcaattctggggtctaaatttctctaattaagtctattttgtagtgttagctgggcacaaatgcagaaatgcccggggttgcctactaggtaaaagataaagcccctgggcctttcatatgacacataggagaataaatcataaatggt

SEQ ID NO: 434809 - DNA, 788 bp, Homo Sapiens
  misc_feature (104)..(135): n is a, c, g, or t
atctgtggcttaaaatggcaaaaaagaaaatatccttgagtttgtaatctagttacagaagtaaggcatacacacacacaaagataacagtacctagagagagnnnnnnnnnnnnnnnnnnnnnnnnnnnnnnnncacgtgcacgctcatggccaaatgtgcgcactctacataaaggaggcaggagttcctataggctatttaatgtaagagaaactatttttctcctgttccagctgtatcagatactcgttccgcaacacagaaatgactcagaatctcagacaaaatgtattatttgttcaattttaattttgctactacattcataactcttaaattgttaggctgtttcatttacatcaaagttatctcacaaaagagaaggcaggaaacgttttgtgagtgcctattctatgtcaaacactgtgttggcaccatattttacaagtttttttcctcttctcacagtgatcttgtgagttagttacttatatttttattagaactcattattctgggtaccctccaatgagaattagagaggttaaataccttttcctagattcccacagcaggaaggtgggcatagctgttttgtctgacaccagaacccatctcaccacactgctttacagtcttcctgaagggacattttgaggtggggggggcttcaaagctcagagactggtttggaatggtttaattttgcaatggatcatgtccatgccaggtgttacaattcttaacttcctccaaattcgggtgtccattagacatttgggtac

SEQ ID NO: 434810 - DNA, 1454 bp, Homo Sapiens
  misc_feature (49)..(49): n is a, c, g, or t
  misc_feature (261)..(261): n is a, c, g, or t
  misc_feature (270)..(270): n is a, c, g, or t
  misc_feature (305)..(351): n is a, c, g, or t
  misc_feature (358)..(495): n is a, c, g, or t
  misc_feature (500)..(500): n is a, c, g, or t
  misc_feature (502)..(505): n is a, c, g, or t
  misc_feature (507)..(510): n is a, c, g, or t
  misc_feature (512)..(530): n is a, c, g, or t
  misc_feature (578)..(654): n is a, c, g, or t
atgagtgtgacaaagaggccgaaggatggataatatattgggtgagagntcatgagtgatgtcgcagtggggattgcggtgcttgggagtattatcgtatgcgggtgacagatagcgcggttagtatacgggtggggaatatcgtttgtgggggtatcacaagggggggctcgctaatggtcgatttaccatgggcgtggtatcaacaatggggcgcggggtggagataagtaagtaaggggggagaatgtgggtggggcnttggggtgnttgcccccggcgtctctatcggtgtttcgtgcgcnnnnnnnnnnnnnnnnnnnnnnnnnnnnnnnnnnnnnnnnnnnnnnnattcggnnnnnnnnnnnnnnnnnnnnnnnnnnnnnnnnnnnnnnnnnnnnnnnnnnnnnnnnnnnnnnnnnnnnnnnnnnnnnnnnnnnnnnnnnnnnnnnnnnnnnnnnnnnnnnnnnnnnnnnnnnnnnnnnnnnnnnnnnnggggngnnnngnnnngnnnnnnnnnnnnnnnnnnnttactcattctgcgcagatgttgaagtttgagcgaggcggcgacaagnnnnnnnnnnnnnnnnnnnnnnnnnnnnnnnnnnnnnnnnnnnnnnnnnnnnnnnnnnnnnnnnnnnnnnnnnnnnnagttcaacataaaatgagaaagaaaaaaatatttctgacattttcaaagaacagaaataggaaagtatgttcatatacattcaacgtatactgcacatattggttactacaatacaaagcaatgagttttttttaaagtgtagtttgcaagatggcacggttagtaggctcactggctttcatctgttgttgctggagggtgcagtctgctctcccatacatacagtaccatgtaaacacatcaggctgagcgcgtggtggtggtagggcaggttgggggcataagagttggaacaagcgcagataagtcaacagctttttagggctttcttggtaagcccccttctggtgagtagttggtgaccccaccaagtggaggggagactggggaccatggaaacatgggacagctcccacgaagggctcttgcactgcagaattccactcaagggatcttgggtccaggagccgagctgccagtatcagtggagaaggacaaggtgtatggggatcccgccagcaacatcaggatggccatgccgggcacccgctttcctctgtgcaaattcaggatgaaagactaggaggggactcgggacctcttgctctcctttcccagataaaaaaagggtggaagagtcagtgtattcaaggtctctctcttgttttgaagatcagaaggagataacccagaccctctctcagccccatgccacgccgcgaagactttggtttctaacatgaagagaaataaagataacacaataatagctactgcgtatgcactgcttcaactgggg

SEQ ID NO: 434811 - DNA, 892 bp, Homo Sapiens
  misc_feature (41)..(69): n is a, c, g, or t
  misc_feature (390)..(521): n is a, c, g, or t
aagcttggcacgaggggaagggtgacggcttctggcacttnnnnnnnnnnnnnnnnnnnnnnnnnnnnncccccaagcctggaacgcagagaggtctttactgctgggatccacggaaaacatgtctgtcctagccaagatcatatgaagagtttggcacggaggctgagaatgacctggcatagatggtttgccagttaggatgtctcaatttgagcctttgcttttggtggataactcagctcccctcttgtaacctggaaagttggttgcctttatcatcctgctggttttatccatggactgaacacccaacagcagtgcactatgctttctatggcatctttcattctcattttatattgtgctataaaaaggattgtttctccnnnnnnnnnnnnnnnnnnnnnnnnnnnnnnnnnnnnnnnnnnnnnnnnnnnnnnnnnnnnnnnnnnnnnnnnnnnnnnnnnnnnnnnnnnnnnnnnnnnnnnnnnnnnnnnnnnnnnnnnnnnnnnnnnnnngctctcctctttcagcctctttgtcacagggaagaagtgtaggaggttgccttgggccctgcctctctcctaacctcctcttccccactgggtaccctcagcccctatattttaattcttgatcatgtagaaattgtttttggtaaatgttgatattattgttattatcattattaataaataaagagaaaaggaatttttgtttaaatgagaaatgtttaaccagattctgttctatttgaattgtgacttgcaccttttgttcaaagtatttcctttaggcattgtaattgtgaacagctcttacttgtgccagtgacagatgcagtgtctcctttccccagtgtgccagtgtggagggacctctagaa

SEQ ID NO: 434812 - DNA, 594 bp, Homo Sapiens
  misc_feature (15)..(15): n is a, c, g, or t
  misc_feature (36)..(36): n is a, c, g, or t
tggtgtgtagaagtnaagaaagtgattaccaaacanggacaataaagaacttttgggacaccccttaagattttatggaatatttttagccaccaaagacaggcatattccagtttatccccagagtatttggtcatcctatctgcattttacacaggaaagagaaggaatgtgagtaaggcaaacgtcatcagtatctcagagatggcatgttgagaaagcttgctttctatgaagactaactgcaggaatttagggaatatttatgcttccatacaaactgacccaaatagtacagacttctgttagtacaatgatggaaatggacaggtgttttgaccagatttgtaatgcccttcctgtaatcttctttacacccagcacaaatatgcatttcaaaaagatgcgaaaagattgttgtttcttactaaatgtgttcttttgcaacccaggaaatagtttaaaaatcatatattctgttatacagaaaccctcgcatgcaattgttgcaactgtcttttaataaagactgactctccatgttcagtagccctatgatagtggtagttagttgcttgtcctcgtgccaagctt

SEQ ID NO: 434813 - DNA, 567 bp, Homo Sapiens
  misc_feature (19)..(19): n is a, c, g, or t
  misc_feature (26)..(26): n is a, c, g, or t
  misc_feature (39)..(39): n is a, c, g, or t
  misc_feature (53)..(53): n is a, c, g, or t
  misc_feature (72)..(72): n is a, c, g, or t
  misc_feature (84)..(84): n is a, c, g, or t
  misc_feature (94)..(94): n is a, c, g, or t
  misc_feature (102)..(102): n is a, c, g, or t
  misc_feature (118)..(118): n is a, c, g, or t
  misc_feature (124)..(124): n is a, c, g, or t
  misc_feature (149)..(149): n is a, c, g, or t
caagccacggttggccccncgtgggntgaaagtgtaccnttccgacgtcaagncattaaaagaactgccccncattggcccccngggagaaaanccctcccncgagggccggaatatncctacngcaacttttgccagaccagatgacncctgcaagaatttaaccctagtgaacaatgcccctattaagtatatttaaaaatggatgccaaaagggacttttaggtgggttgttccagcccaaatacttcaaggagaggacattgttagagagacgagcaattaaattcctttctacaaaacttaagactttaccagatgaagtcttaacaaaggaagtggaagagcttatactaactgaatccaaaaaggtcctagaagatgtgactggtgaagaatttgttctatttatgaagatactgtctgggttaaaaagcttacagacagtgagtggaagacagcaacttgtagagttggtggctgaacaggccgacctagaacagaccttcaatccctcggatcctgactgtgtggacaggctcctatagtgcacctcgtgccaagctt

SEQ ID NO: 434814 - DNA, 1342 bp, Homo Sapiens
cgggatgtgcgcggtgactggcggctgcactggcggcagctggaggtgtaatagtgcgggtagtgggtttggagaagttccgaggcggcggtggcgccggtcaggacaaggatagcggaaccgggccctgggcttgtcgctcaccatgccgacagtagaggagctttaccgcaattatggcatcctggccgatgccacggagcaagtgggccagcataaagatgcctatcaagtgatattggatggtgtgaaaggtggtactaaggaaaagcgattagcagctcaatttattccgaaattctttaagcattttccagaattggctgattctgctatcaatgcacagttagacctctgtgaggatgaagatgtatctattcgacgtcaagcaattaaagaactgccctcaatttgcccactggagaaaatcctccctcgagtggccagatatactaacgcaacttttgccagacagatgactctgcagaatttaaccctagtgaacaatgcccctattaagtatatttaaaatggatgcaaaagggactttaggtgggttgttcagccaaatacttcaaggagaggacattgttagagaacgagcaattaaattcctttctacaaaacttaagactttaccagatgaagtcttaacaaaggaagtggaagagcttatactaactgaatccaaaaaggtcctagaagatgtgactggtgaagaatttgttctatttatgaagatactgtctgggttaaaaagcttacagacagtgagtggaagacagcaacttgtagagttggtggctgaacaggccgacctagaacagaccttcaatccctcggatcctgactgtgtggacaggctcttacagtgcactcggcaggcagtacccctcttctctaaaaatgtccattccacaaggtttgtgacatatttctgtgagcaggttctccctaacctcggtaccttgactaccccagtggaaggtcttgatatacagttggaggtattgaaattgttggcggagatgagttcattttgtggtgacatggaaaaactagaaacaaatttaagggaactattttgataagttattgggaatacatgccctcccttcagaaaggcagaaaatggagagaatgctggtaatgaagaacccaactacagttcagttttgtggatgtttgttggacaatttttaccagtttgggcgaaaacttcagattttttacagccaactgtatgcggaaaagttaaaatttaaaataaggttgatactttgacggggcctgaagttttatataacacttctttttcttttcagggaaaaaggtggagcct

SEQ ID NO: 434815 - DNA, 647 bp, Homo Sapiens
  misc_feature (11)..(11): n is a, c, g, or t
  misc_feature (31)..(31): n is a, c, g, or t
  misc_feature (53)..(53): n is a, c, g, or t
  misc_feature (65)..(65): n is a, c, g, or t
  misc_feature (74)..(74): n is a, c, g, or t
  misc_feature (79)..(79): n is a, c, g, or t
  misc_feature (96)..(96): n is a, c, g, or t
  misc_feature (115)..(115): n is a, c, g, or t
  misc_feature (125)..(125): n is a, c, g, or t
  misc_feature (132)..(132): n is a, c, g, or t
  misc_feature (169)..(169): n is a, c, g, or t
  misc_feature (175)..(175): n is a, c, g, or t
  misc_feature (180)..(180): n is a, c, g, or t
  misc_feature (200)..(200): n is a, c, g, or t
  misc_feature (205)..(205): n is a, c, g, or t
cccagggaaanccgttgccggcctcaattancccccgaaatccttaaaccttncccccgaatggncctgatccngcctntcaatgccacggttagnccctctgtggggatgaagntgtacccctntccgacntcaaggcaattaaagaaactgtcctccatttggcccnatgganaaaanccctcccctcgagtggccangatantacctaacgccaccttttgccagaacagatgacctcctgccagaatttaacccctagtgaaacaatgccccctattaagtaatatttaaaaatggatgccaaaagggacttttaggtgggttgttccagcccaaatacttcaaggagaggacattgttaagagaacgagcaattaaattccctttcctacaaaacttaagactttaccagatgaagtcttaacaaaggaagtggaagagcttatactaactgaatccaaaaaggtcctagaagatgtgactggtgaagaatttgttctatttatgaagatactgtctgggttaaaaagcttacagacagtgagtggaagacagcaacttgtagagttggtggctgaacaggccgacctagaacagaccttcaatccctcggatcctgactgtgtggacaggctcttacagtg

SEQ ID NO: 434816 - DNA, 323 bp, Homo Sapiens
tttacactttgatatttattaacaaaaatggtccagaaaaggattgagtcaaaattacaaaatgattaagagttaaaacaaaagttgttctttattgtagtttctgggggactttaaccagtccccaaaggtgtttttatctcctaaaataggacttgaatgacatcactcaagtgacagattttaatagaaactcttcctctttccttctgtcaaagcaaaatatagtgaaagtctcgttacctcaaacctgctttcctaataagtgtgcatgcctgtagatggcttgggatgcagtgaagagagaagttaaacaaaaaggt

SEQ ID NO: 434817 - DNA, 346 bp, Homo Sapiens
ttaccatatccaatttccaagagagggaatttaaaagaggccagagcaagatgatgcatccttggttttctggacacttggtttgggttgaggagtttctggttggataggttccttctttatgtctttaccaccatttagaatacgttggctctcacaaaagaactgattaggatgattcaaagaaaagccacaatcatccacattgtgtatcatctcaaagtatttttgacaggactacctgataatgtgtcccctttactaaacccaacatctggcttatccctccaggagagatcttgtatgactgcaacttttgcttcagcagctccttcgtgccaagctt

SEQ ID NO: 434818 - DNA, 657 bp, Homo Sapiens
  misc_feature (312)..(325): n is a, c, g, or t
tttgggtggttttactagtttggaagcagttttaatgaagatggaaatgtttatcaactcaacacaggtacccccaaaatacaaatcaaaatatcatcttcagctgcatagcaaatatgatttaagaatttaacatcattatttgatcacaagcgtaaatatgtcaccataaataaatgtaaattcattgtacaaaaattcccaacaactcttaatacaaatatggtacatttgacagtttctgaaacagattatttttaaaactttttaaaacctaagctttatttttttcctggttattagacacacacnnnnnnnnnnnnnngaggctggggcagtaatgccaaggaggaaagaatattaaactcattgggtgttcggaaatcagtgccactggcaagccagggaaatgaaatctttctgctgaaagggaagacctcagtctactgggatcaagtctcctgaaggtaatgtgactcggcccagagggtcaaatttagggatatgaatgtggggtgatagaggtgggttattgaaatagaaatctcatcaaatagattattcaaatctccatgaagtcgtggtcaaggatttggatggaactctagccatctatcagctacagagagccagctaccatcatcagacaggactaaa

SEQ ID NO: 434819 - DNA, 1788 bp, Homo Sapiens
  misc_feature (29)..(29): n is a, c, g, or t
  misc_feature (422)..(548): n is a, c, g, or t
tttgtttcgacaggagttgagttgtttanatataaatctcatcggatagattattcaaatctccatgaagtcgtggtcaggtatttggatgaaactctagtcgtctatcagctacataaagtcagctgccatcctcagacaggatttaaaatgtagaaagatctggaactttgacgttttatatgttttgaaagcatgttctgccatctgggataatgtgtctcttttgcctctggaacacatctatggtcatcaagaaggaaaagtcagaaaccagaatagaaggtggtacctccagacaggaggatctgccagttactacttggaacctcctcccttctctcttccctgtatgatgtattttctttcatggcttagtggtagctcaaagctcaaggtgaccagaatgattcccttacagnnnnnnnnnnnnnnnnnnnnnnnnnnnnnnnnnnnnnnnnnnnnnnnnnnnnnnnnnnnnnnnnnnnnnnnnnnnnnnnnnnnnnnnnnnnnnnnnnnnnnnnnnnnnnnnnnnnnnnnnnnnnnnncaaatgtgctactctcaggatctgacctaaggggcctttcatatgtggccccctttcctcaccggaggacataagtgcatcacacaaacctcttgctgtgggcacttcctttggggttaaaaatgggaccatttgattaaggcaaccattgctaaccatcttacttccctgggctggagaaatatcaaatgtcacattttatgttcttaaaatctcagggccacagatttcctttgacaatgacatgctctgtaacatgaaatttatatcctaaagccttttgtccttccttcttaccacactcggtgggagattctgcagaagacttttggttcggtctagaaaatggaagtaaatgttacccctgggagagaagccacacccgaaagtctaacttaaggaatgtaaagagaacagcaagttgagagtaaaagctaaaatgttccaagaatctttcagcttctaggacaatgaaggttctgattccctaaaagaggactcttctttgggggcagggggtgtatcttggtattaaaagctcattgacaattactattcctcctcctcacctctgtgtttcccaagacgttttgggcttctgtggaaataaccccttaatattttctttcttgtggaaatgttccttgataagcaattctgtgccaagacgttgtccctaatttggtcactggctaatgctataggcagtgctatgactgatttgttcaaagctgcttcccctatgtggcccaatgctaagcctttcctgaaggaataagggaaccatctcaccatcaagcagctgagatggcctgaaagcatcctgtttggactatgacatttctggctgtgttcatacatactgcttccccacagcaggcctgatcagtctcctaccccacctgcatagagtgtgatacagctgtgaatgctttttggacctctctctagggcttccctgagagaggggagttagaatggggctttgggaagcctatgtggtagaatccctggtacccagagtgggagaagatgacacccggggcactgcagggagggaaccaggagagatgaagtagtaagctgaggcatgcccttctggccaggctggcgtctctgggcatggccacatctgttcacagtctgagacttgagtcctggggtcacacaagggcactgggtaggagatgtctatcttgggaggaggtcttgggaagcaaccacagataggtgggatgat

SEQ ID NO: 434820 - DNA, 481 bp, Homo Sapiens
  misc_feature (329)..(329): n is a, c, g, or t
  misc_feature (419)..(419): n is a, c, g, or t
  misc_feature (438)..(438): n is a, c, g, or t
  misc_feature (453)..(453): n is a, c, g, or t
  misc_feature (459)..(459): n is a, c, g, or t
tttctttgtacagatcctttttattcagatttatataggcaatttaccaacacagaaaaccagtctagcagctccaaagtaactgtaaaaacggtggtgctgacggtggtgtgccccacacagggcagggtgacctcagacgtggagcagcatctcccgtgggatactatttcagacgtgcactagtgagtgtatactgaggaagggattataaaccttccctgggcacaacaggatacaaaaagagataggaaccaatgatattttgtctagggtacaatatctagatttacagtatctagtttactgggcttcacttcgtatagcantgcacatttggaaaacgggtttctttcttcaagggggttttcaaggtttttggtaaatatgttaccatattggatgggctttgggaaacnggcaggggcaattgagttngggggggcctttttntcaccngggccgggtttctttctttttc

SEQ ID NO: 434821 - DNA, 764 bp, Homo Sapiens
  misc_feature (727)..(727): n is a, c, g, or t
ctaaatatcagatgtctttgatgtaagggtagggaatggaggaatattttcaattgtgtatttgtattacaaagaacttgaaatttactttcttagttgattatattaaatgatgtatatattatatgtggtttataagctcaacactggccatttttttagttttattgttaaatggtatttttctatgtttaattataatagatctggctttttctggatagcataaagatcactgaactatatatatataagaaacaagagttctattttagcacaaaggcattttatattatttattgaatccataagtttgttttcgtcaaaaacattccatattatttctgctcctttttatttgtatagtttgttatttaaagaaatggcagtccttcctgttcttaatacaataaaattgaaataatgcacctagtaatgtggccgacatctcttctcaccaccatggactgttttcaacaacagttgatcttctggtctgtgctgagaggcgcatgcatgtctttcgtcacgtcgggcagcacacctgctgtgaaatactgctttcatctacctcttcagaaggcttcttgcttgttgacaagtaccgcaaaggctttattctgggactgggctatctcataaaagggatttctgtaagactttgcagtgtcattccctcaggaacctagggtttgtttctaaaggccacgggtattgtccggggggncccctgtgtttggggggcaggtagcttatccctcccc

SEQ ID NO: 434822 - DNA, 1266 bp, Homo Sapiens
  misc_feature (328)..(363): n is a, c, g, or t
  misc_feature (428)..(428): n is a, c, g, or t
  misc_feature (466)..(466): n is a, c, g, or t
  misc_feature (1214)..(1214): n is a, c, g, or t
  misc_feature (1225)..(1225): n is a, c, g, or t
  misc_feature (1234)..(1234): n is a, c, g, or t
ataaaaatagcgattacagcggtggtgctaggctgatggggagcggggcaacgcaagcgcgggagaacacaatgcagtggagttgtgtgcagtgaatagtactgccgaacaggagggttgcgatacgaggggtgagagggcgattcgagtgtgggatagcaggggtgatcgttaggtgtggagagtggcgcgacgctacaggagctgaggtgggcgaggtatatagctcgcgcgcactcaaccacaatcggtaccggtacaaatatgtgagttcgctgctcgcgcgctgcgctaacgtgtgttatccagcctggaactaggatcttgnnnnnnnnnnnnnnnnnnnnnnnnnnnnnnnnnnnngcggtcgtcttctattttttgttttcttcaactctgccccccgccggggctccgcaaagaggggngaggatttgtcttgttgtccgcccccaaatgttgttgngggcgaccttggccccggaataattttttttgtgtgtcgcaaaagaggcaccgccttgtaaaaaagaatatatatatggcagaaataaatcttaaaagaggggcccgggggtgttgtctccggggaaaggggccacgggaggaaaaaggggagaagggggttttcccttccccgtggggagggcaaaatttgggttccgggtccgcgttcaagaaaaattccccttttccaacccaattaaggttccaaataccacaaggatccctgggggttctcaatgcatccccaaatattggttccatggcccctcatttgaaaagttccccatcagtttttaatgaaatctttcaaaaagaaaaaattattatagatcagtataaattatttttaattttagaaactgagattgaagtacagtttttagtttaaaatattaaaaatgaaaaaacctttaacattattaaagatgtgttgttacaaagttcctagatatatacatgtacaaaacaaatagatattactatctgacacctcaacccatgacttaccctaaatctcctgatatgaacaattaatctactgggaggcttttcccaataagtttcaaatttcttgcacaaagatttgctgccattcatattctgtgcatggatgaggacatttaatcacagactatttcaacttaatataacctagcataaaataaatccaatggaaacactacatttataagcgataggacaaactngcatataattngcaactttngccagactcattaaattcattaacacattcag

SEQ ID NO: 434823 - DNA, 361 bp, Homo Sapiens
  misc_feature (350)..(350): n is a, c, g, or t
tttcaagtaaatataatctgtaatctttattcttgaccctgcagaccacactcttagggccctcagtttactgccattctcaagagccaacttgttgcattgcttttaattacagacagaaatccacattcatcaaaaactggggatttgaggctgaagagtcagggagccagtctgctggtcagccaaaccttggagttccaaggccagcaggaatttacctgggcttggccactttagggcacaggatataaacacagagtgcaggtagagtcacacaggggaggccctgcaccaacctcggggctgaggatcaagtcttccctctttccagatacaccagcccattnaatttaccttt

SEQ ID NO: 434824 - DNA, 448 bp, Homo Sapiens
  misc_feature (316)..(316): n is a, c, g, or t
  misc_feature (393)..(393): n is a, c, g, or t
caagtaaatataatctgtaatctttattcttgaccctgcagaccacactcttagggccctcagtttactgccattctcaagagccaacttgttgcattgcttttaattacagacagaaatccacattcatcaaaaactggggatttgaggctgaagagtcagggagccagtctgctggttcagccaaaccttgggagttccaagggccagcagggaatttacctggggcttgggcactttagggcacagggatataaacacagagtgcagggtaggagtcacacagggggagggccctgcaccaaccttcgggggnctgagggatccaagtctttccctcttttccaggttacacccggcccacttaattttccctttcttatgggttttttnttccaacccccacattttgttgggctagggaagggagttggggggagggggaggg

SEQ ID NO: 434825 - DNA, 701 bp, Homo Sapiens
  misc_feature (44)..(44): n is a, c, g, or t
  misc_feature (77)..(77): n is a, c, g, or t
  misc_feature (217)..(237): n is a, c, g, or t
ggttgaaattttcccctgagacatccaatggctttcacagtaanaaggtccaactgaggtcttgcttctgccctccnaaagaggaagtgaacaaaggccaacaggatattttaacactggttgtgtcccctgtcaagctctggatagggaaggcatggcccaattgcctctgtgggccctctgggagccagctcctatgtcatccttgggctagaannnnnnnnnnnnnnnnnnnnnggagattccgtctcaggaggagaattggtgtgaaggaacttccaatgaccaatatcttagagaagtccttggactgtgctacattcagtgggtcagactccatcttcttcccaacggcatagagatggcaccgaaagaatgaatgagaaggaaggtccagggaacctgcaggcactgatgtaaacttgggtatttggtcactgaatctgtttccaggaagttctgccaccattgctatttgggtaaagatttttctcctggaaacagtgatgaggtataaatgaacttctcaagaaaagagtgcccattggtaacagttgcactggaaaataaccaggtggttttgaaattgggagggcaggctgtaccatcggactcatcctctcactcacatattccagcttcaggaatggattataaatactttggtttctcttctgctgtctctgcagaggccccaggtt

SEQ ID NO: 434826 - DNA, 555 bp, Homo Sapiens
tttccatagtaataattttaataaaaagcaaaaacagcaaaacaatcatttataaatgatttcgtctctgttggagaagttaacactgttattgctgtataaaccacttggaaatgagctattctggtgcctagttaagatgtattcttttcagcatattttcattttgccagttaggcaggaaaagctacagtccactttcctggagggaatttagctgaactactgcccacaggtgacagtgaactttacaaatcactccaataagtttagtagcaaagtaaacatctttctcaagtgttgaaatcacagaagttaggacaggacaagcagagaagcagtcttttaggtgttaaacttcatgccacttgtgcacattacactaggacacttgcttctgagaaatacaacacaaatgctacctccctggaactaagatgtttcagtgctcacgtgtatcagtttcttctctctgtctcccagcagcagtggtgtgctgacaaatgtttaacaaccagctctcggggaggggggtcttgatatagagtgtttgcc

SEQ ID NO: 434827 - DNA, 475 bp, Homo Sapiens
  misc_feature (17)..(17): n is a, c, g, or t
  misc_feature (23)..(23): n is a, c, g, or t
  misc_feature (52)..(52): n is a, c, g, or t
  misc_feature (89)..(89): n is a, c, g, or t
  misc_feature (94)..(94): n is a, c, g, or t
  misc_feature (114)..(114): n is a, c, g, or t
aaaacccactgggaaanggagcnaatccgggtgccccaagttaagatgtaanccttttccagccatattttccattttggcccagttanggccnggaaaaagcctacagtcccnacttcccctggtgggaatttaggctgaactactgccccacaggtgacagtgaactttacaaatcactcccaataagtttagtagcaaagtaaacatctttctcaagtgttgaaatcacagaaattagacagaacaagcagagaagcagtcttttaggtgttaaacttcatgccacttgtgcacattacactaggacacttgcttctgagaaatacaacacaaatgctacctccctggaactaagatgtttcagtgctcacgtgtatcagtttcttctctctgtctcccagcagcagtggtgtgctgacaaatgtttaacaaccagctctcggggaggggggtcttgatatagagtgtttgc

SEQ ID NO: 434828 - DNA, 677 bp, Homo Sapiens
  misc_feature (610)..(610): n is a, c, g, or t
  misc_feature (644)..(644): n is a, c, g, or t
  misc_feature (656)..(656): n is a, c, g, or t
tgtgtgcctgcgtgtgtctcagtgacgtgggaaggaatggcagatgctacaacagtgcagactcggcaccccatttatagaatgttctttttatatactatggaggaatctccactcaccttccactccacgtggtccctgtctcctgtccttgggacagagcagatccatttatattctcacatacaaccggatggatagccattccttttcttaatttgattcctgccaacaccctaaccgtcatgacttcaccttttaccatgggtggcttattaaaaacattttcctggacgaagacagttccctccccaagcggaattcgagtgccatctcttaaggtgatgcatttttaattcccactgcacaagccaggcatcacaatgaccatattcaccactcgttgtcaggggtacaccttttggaaggcagcgtgggctaatgtgaatggtactagtctgagtcagatccagttcaaatccaggtaacttaaagcttgtgtgacccaggggacactttacttcaacttgtttaaaccttaattttgttcacctataaatgttgatacataaacaaacttggaatgtgtcggcactttaaccacatgccnggggttttccataggggttccttttcctcttggnttccccccactntggaggcaacacaaggctcgg

SEQ ID NO: 434829 - DNA, 320 bp, Homo Sapiens
tttaagatttgaaggaattttattttttaacaaaatcccaacattgaattatacatagtagaattgtttagttctccaaacaattttatccattcgtaagcatgactaggaaatctttggtatttgtcagtgtttttgacaatatctcctaaaaacaaggtgggatatctttgagttattcggtagaatggtatgtagtaatatgcatatattgcttgaaatatgatttcatgagacctaagaaaaagggccttaaacaattctttcagttgaattttccatatatttcaggtgggaatatctaccaaagcaggaaatag

SEQ ID NO: 434830 - DNA, 561 bp, Homo Sapiens
  misc_feature (108)..(108): n is a, c, g, or t
actagtggtttagaaaacttaattggcctccagaaagtagataattcactcctctagtaccaagaaaaaagccaggcaattatctggagaatctgagtgattgagagnagaaatttgaagtatccagacaaaagcaaaccttctgtttgccctgaactcgggaaattccctgttgttctgatggaacagacagggccagctttatcttcccaggtcattgagccgcagtgagatataaagtctactaacaaagtttagatgggtctgcagaccgcttgtatgcattcttcatgttccaaaatttcttttagaaaaatatgaaaattttacacaacatgaaaagcagagaaggcaaatcacgtagaagagaatataataggatgataaaataaaaagagacaccgttatctgaaatggatgtcagcctttcaagtaaagtcaacactaccttacatgttccaagtggagaactcagtcaattttcagtggctaaaacaaatgagcaactattgactattttatgtgtatattttatgcattttttaccctcgtgccaagcct

SEQ ID NO: 434831 - DNA, 683 bp, Homo Sapiens
  misc_feature (670)..(670): n is a, c, g, or t
cctttttcggaatatagtctcttagatatttattgtaatcttcaagaaataaaacaaactcaaagaacaaaaaccactttctatatagaattcacatacaaactgaatacctaatagagcacataccatttttacacaattaatttcaataaagataattaaaacttcacaatgtgaatacacttcatagctttaaacccacacaagagctcctgtggacacatgaagagtcacaatatttgctatgcagcagtagttttcaactaaatgtcggtcactatatgaaagcattaagctgttttcaatattttcttaaggagagttccacagtgcagtcactgagaagggggccaaatgtgcctggttccaaaggaagatcttcatctgtggcatttccaatgccctttatgggaaacatggagctacagaaaaatctctgggtacacatctgccaggtggcattaggtcggacaatctctcatggtttggtgcactgggcaaatgtctaaatcaactgccgtaatatggcattaaagcaatttgcatattggggctgatcttgagctggtcaacacaagaggaatatgataatgcaacaagcttgtctttctcacggagactaaaaaggtagggagctaaactgggggtatttgaatgggttcaaagggcncgtttggctgctt

SEQ ID NO: 434832 - DNA, 454 bp, Homo Sapiens
ttttttttcaggaatatagtctcttagatatttattgtaatcttcaagaaataaaacaaactcaaagaacaaaaaccactttctatatagaattcacatacaaactgaatacctaatagagcacataccatttttacacaattaatttcaataaagataattaaaacttcacaatgtgaatacacttcatagctttaaacccacacaagaggctcctgtgggacacatggaagagtcacaatatttgctatgcggcagtagttttcaactaaatgtcggtcactatatggaaaggcattaagctgttttccaattattttctttaggaagagttccacaggtggcagttcactgaggaggggggccaaatgtgcctgggttccaaagggaggatctttcatctgtggcttttcccattgccctttttggggaaacctgggagctacaggaaatt

SEQ ID NO: 434833 - DNA, 688 bp, Homo Sapiens
taggaaaagtcatgtttttcttctcagaaaggttgatcacatgacatgtctactaagaattttcacctctgtacttgtatgtatattttattgttactcaatcttgtattttatttacaaattcaacactgtcaaccctgggaattctaaaataccaatgtatttttaggttgtagctaatgttgtattcactttcaattctcagttgtccacactggtgatataagaggaacaaatcagaatcattaaatactttgtaatgccatcataaactcatatattcatcctcaaactcccttgtttaatgctaattggtggcctggaacttcactgagatgcaaaatcaagaactgaagcctagttgctagataacaaaaagctataaatgtttatgtatgtgaattttaaattagaataaccgtcttaaactcctacttgccatttctaaggcaaagcattcattttaatattgtactttgccttttcattcagttagtggagtaagtcatgaaacccttaggaagaaaaacaagttatgacttattcactaaaattgatgcaagacagttggttctaggatgaccatggccatgtgtttcatcatattaaaaccttcagttctctctatgggtgcttgggctgggaggatttgacctgttgaggggtgtgcccattcatatttaatggg

SEQ ID NO: 434834 - DNA, 551 bp, Homo Sapiens
taaattagaataaccgtcttaaactcctacttgccatttctaaggcaaagcattcattttaatattgtactttgccttttcattcagttagtggagtaagtcatgaaacccttaggaagaaaaacaagttatgacttattcactaaaattgatgcaagacagttggttctagatgaccatggccatgtgttcatcatataaaaccttcagttctctctatggtgcttggctggagattgacatgtgaggatgtgccaatcatattaaatggatttggtctatgtgggtgatatgtggcctgaatgtaactgtgatagactgaaatttgttcttagctctcaaaatccactgaagaagtcaagtgaaggtgggtaaaataggggagattagtgacaactttgtgccaaattttttaaaaaatgggaagcaggtagccaatatttagaatgataatttaagggtgtggttggattttagttagttgtcacatagttattgaacctcatatgctcagtgctgtgggaatcaaacatggaagaggtatggctcct

SEQ ID NO: 434835 - DNA, 1593 bp, Homo Sapiens
tacttgtcttcttttcatttgtacttcaataccttttccacaccttcacgttcatatgtgatgtgttatctggtatacaccttatccatcctctttcaaatcgttcagaaacttctggctgagataatccatttttcttttggaacaatggaatgttcctatgtgttcttttggatatacgtgattctgccactcagaggatgctaaaagagacctggttcctgacggcttcttggggctccccctgccagctcatgtagggcatggaagtcgtacatcttcttgtggcaataagttcagaaacttttggaatatccaggaaaatggcgactcattcctcatccccttttcctcaactgcccacaaagcttgtaaattgtgttatgagagagttttctttactgagtttaataatcagagatttcaaggtttgttttttcatctcatgactggtttcattttcgtgaagaatgccatcttcataatctctgattagagctcgggctgccagcttgtggatcatagttccagttgtcttctgaagctcagtagtcgacaccattgtacaaaattctttctcttgaattagtgcacacagagttgcttgtgtgcagtgaggaatgaatccatagacaaggagtcgatcattgcgaaacaaggatggcacctgggctggggcctgcagggcctcgggcgcatctggattgagttgctgccatttgacggagacagagtggcaactcggagaacatagcctggtcatttggtcttctatctgttttctccaactatgcttggattttgcattaaaatattcaaatactccggcaccacactgggacaaaatccttaagacgtgacgatttgctgtagaaccgataccgcaggcgaataacctggtgtgcgggcggctcctcttcacgagctgtaatgtcaggctctcatcctggaggtgcccatcagacaccaggaggatgttccgtgaccctcgagcagggtacaataagctaagatatcggagtgttttcccagaagtctgtgttcccccatggtaggtgtggcagacatgatgaactctgctgccgtgggtattgcttgtgatatgcttaggatacgaaaatagctccttgtaacctgtgccgaactggataatatttactttctgcttctcacccaccaaggacagcgcatgcaaggtgatttgcttggcttgcaagaatgtcacaccctccatggaactggagcagtcaagacaaataatcacttcgctctcactggctaggtcagggaggtcgacatcgagatcgggttgaaagacaagcatgcaagcctcgctttctttttctggatgtttttcaacccacattcttgggagataggcagcagacaaaccgatgtggagagaaaatccactgctgtctaaggagctgccttccatggtgctaatgacagctttgcagtctgtgcgcttttgtttcagttcatgtgtatcactgaaaatgaattcaatcacatacggcatctcaatagacatagtcaaagagaagctttgctttgttcctatttcttttatacaaatcttctctactgtcc

SEQ ID NO: 434836 - DNA, 460 bp, Homo Sapiens
  misc_feature (57)..(57): n is a, c, g, or t
  misc_feature (70)..(70): n is a, c, g, or t
  misc_feature (203)..(203): n is a, c, g, or t
  misc_feature (209)..(209): n is a, c, g, or t
  misc_feature (367)..(367): n is a, c, g, or t
ggatggcggctgtttccctcggggaacccctggtgggtgtggggcccaccgaagcancccattcaccggnaggtttaaaagacccaggctgaacggtgaaggatgatgccccaggaagaaggatgaagggcagcccaggtcttcacgaaggccccaacgctgacagagagaaaggagcgagcataggtgggcagggcctggtnagcagncatgcggcccgcagccctgagcacccacagaccccaatagggctgccatccctaaggaaaacccaaccaccccctcaccccaaacttggccaatcaaggaagcaggctgggcatggttgcccactatgggggatcaccagctatggtcccgggcaggnggctgctccgcgctcctggtgatttactgacacctcgctggttgggaacaggaaacatgctccccatttctaggcctccctcgtgccaagctt

SEQ ID NO: 434837 - DNA, 841 bp, Homo Sapiens
  misc_feature (392)..(426): n is a, c, g, or t
  misc_feature (443)..(557): n is a, c, g, or t
  misc_feature (754)..(754): n is a, c, g, or t
  misc_feature (759)..(759): n is a, c, g, or t
  misc_feature (778)..(778): n is a, c, g, or t
  misc_feature (785)..(785): n is a, c, g, or t
  misc_feature (793)..(793): n is a, c, g, or t
  misc_feature (821)..(821): n is a, c, g, or t
ctatctccatgcctggctttttctaattatatcctagagaaaaagactaatggtatttcaaagctgtgtatttgtgacgagataaagaagagtcttaaacatcttgtttgggagaatgcacaggccagtcaggagacccacctcctcctgtgccctgagctgctgagacccgacagatcatgaaggctagtaaagggcagagaaggccctgagccatcagtttacactcgaattgttgactcccctttgtggtgtttttgaaggctgcttataccaacagctaatgtggattagtgcttatgatcttgaaaaagtcttgaccaagaatcctaaactccaccactcctcccattccagcttaacactatcagaataatatccaaattccagannnnnnnnnnnnnnnnnnnnnnnnnnnnnnnnnnnaagagagacagtgtctnnnnnnnnnnnnnnnnnnnnnnnnnnnnnnnnnnnnnnnnnnnnnnnnnnnnnnnnnnnnnnnnnnnnnnnnnnnnnnnnnnnnnnnnnnnnnnnnnnnnnnnnnnnnnnnnnnnggcatgagccactgtgcccagcctagtttcttttctgtatgctttttttacaaaactgtgagccacagaggttgaccacttaggccaatttgttgctaggaaggggaggaaaaaaatctccaactaggcctccaggacaaaacattacttcaaatttcaaacaggcagtttaggtttttaatttaacattacaggangttantttttaggacttttcaggntttctanggtcggantggggacacttttgcagggttggagggntggacattttttaccccaat

SEQ ID NO: 434838 - DNA, 1018 bp, Homo Sapiens
  misc_feature (72)..(106): n is a, c, g, or t
  misc_feature (123)..(238): n is a, c, g, or t
  misc_feature (899)..(899): n is a, c, g, or t
  misc_feature (913)..(913): n is a, c, g, or t
  misc_feature (942)..(942): n is a, c, g, or t
  misc_feature (950)..(950): n is a, c, g, or t
  misc_feature (956)..(956): n is a, c, g, or t
  misc_feature (962)..(962): n is a, c, g, or t
  misc_feature (992)..(992): n is a, c, g, or t
  misc_feature (998)..(998): n is a, c, g, or t
ccaagaatcctaaactccaccactcctcccattccagcttaacactatcagaataatatccaaattccagannnnnnnnnnnnnnnnnnnnnnnnnnnnnnnnnnnaagagagacagtgtctnnnnnnnnnnnnnnnnnnnnnnnnnnnnnnnnnnnnnnnnnnnnnnnnnnnnnnnnnnnnnnnnnnnnnnnnnnnnnnnnnnnnnnnnnnnnnnnnnnnnnnnnnnnnnnnnnnnnatgagccactgtgcccagcctagtttcttttctgtatgctttttttacaaaactgtgagccacagaggttgaccacttagccaatttgttgctagaagggagaaaaaaatctccaactagcctccagacaaaacatactcaaattcaaacagcagttagttttaattaacatacagaagtaattttagactttcagatttctatgctgactagaacactttgcaggctgaagctgacattattaccaaatacttcatttaagtacatactctgaagtgtcaggcttccagtatatatagcaacgctctgagagacaaactgggctcatatgacggggttgcattttattttcttaacaggtctttaaattgggcagttctgaaattctgtttggtcagttctagatggtacgtcatgtgaatgcaaccaagcactgtagttgaaattgtgttatgccagtactcatatgttgtcttaggtactacgcataatgttaatagctgagatgttaaagaatttgaagtctaaaatataaaagatgaatatacccatattaatcctatgttaagatgctctggaaataaaggccttattcccttacacatgcgatttttgtaagataatatatacacagtatattttaaatgtttgtgtgggtggnctgtgtaggtactncccctacaaccaagctggccaaatttttnaatttacnccatgnaattcntgccttttccaaaggtttaaggttgggggnattttnggccaagggaatttttcctt

SEQ ID NO: 434839 - DNA, 500 bp, Homo Sapiens
tctcccacctagctgaaggtgtggggctctggccagccacttcattcctgagtcccttctggtctttccagggggtgtgttatcccatcacacactctcatggagcactcctagagccacctcctcactggttctggggtgggctggtaattaatactcatacttgctcccagaagcagagagtgtgagtatctcagattactccagggagaaggaagctccggaactgccagtggctcactcaaggctcacaggtggcagtgatatgagcagaacccagaaacctagcattccaggtgtatcgggagtcaccagcaccattctggggctgccatggagaagggcacagggatggccagccctcagccactgtattcttagacacagcagaatctacatggaaatgcagtgattgtgataggaggaaacggagctgggggaactcaatctccaaaaggataactggccaagtttgcgctgcggggactgctcagaaatga

SEQ ID NO: 434840 - DNA, 446 bp, Homo Sapiens
gggaaccgcctccatggttggtccaggtaaagaaagggataatagttgggaaagtgaagttcccttccagaaccttttttctcctagggcggtctcgttatggttaatagccacggtctatgatttgcacacagttgctcaggtaattcgccgctggcaatgctgtaactattgccatggttaccattcagtggtagagtatccatgacacttgtatccctggcattgttcagaagcccctatttgatatgcaatgtttagctttactcccatacttgtctctctgtagggctcttgtgcgttgtacatgctgacagaagggttgttacagaccgccggttccccaagcaatgtattatagggattgttagtaccatgcggacgaagcagagcattgcttataagatgattagccatggctcctctgttgagtgacgctgaactgt

SEQ ID NO: 434841 - DNA, 696 bp, Homo Sapiens
  misc_feature (671)..(671): n is a, c, g, or t
  misc_feature (680)..(680): n is a, c, g, or t
catttatatggtttcaatcactggtccaattatacacatatatagatttaatagtattttctgtttccttccaaacattttatacttaagtaaatgctagcaatttatacatatttcatagtcaatgaatgtttttgcttctgtgtttgtgtgtgtgttctatggcttgttggatataaatgtcatagtatcttgtaatctttttcagaggggcttctgaacaatgccagggatacaagtgtcatggatactctaccactgaatggtaaccatggcaatagttacagcattgccagcgggaaatacctgagcaactgtgtgcaaatcatagaccgtggctataaccataacgagaccgccctagagaaaaagattctgaaggaactcacttccaactatatcccttcttacctgaacaaccatgagcgctccagtgaacagaacagggatctgatgaacaagctggtgaataaccttggcagtggaagggaagatgatgccattgtcctggatgatgccacctcgtttaaccacgaggagagtttgggcctggaactcattcatgaggaatctgatgctcctttgctgcccccaagagtatactccaccgagaaccaccagccacaccattataccagaagggcggattcccccaagaccacagtgagagntttttaccntttgataaccaacgag

SEQ ID NO: 434842 - DNA, 406 bp, Homo Sapiens
  misc_feature (357)..(357): n is a, c, g, or t
  misc_feature (384)..(384): n is a, c, g, or t
  misc_feature (395)..(395): n is a, c, g, or t
agtatttttaattatggtaaatcatgtaacccagactcatgaattttggggcagtggaaattatttcctttgactcttttttctgcatatcatcaatttgctttttactcatgtttcttctactgtcgctgtaagcttacttgttgttttttctttccttttcttcatgctgtcgtttagagccctacagagagacaagtatgggagtaaagctaaacattgcatatcaaatgtaattttttttagttcacttttattgcatcacatatagatgatgtagttattaaaaacagttcatctcacaatttaaaaactaaaaagcctatgaatcgacttatataaatatatgttaatagnggttagacgcttttgttgtctgattcntttattgtccncataatccaac

SEQ ID NO: 434843 - DNA, 693 bp, Homo Sapiens
  misc_feature (216)..(216): n is a, c, g, or t
  misc_feature (621)..(621): n is a, c, g, or t
  misc_feature (670)..(670): n is a, c, g, or t
tgagcagcatcatgctatctcttcacatttcaattctctacaggaatgtttatatttattttccattgtgtcctacagaagaaggtacgaaaagagtatgggaaatgcctgcgaacacattgctgtagtggcaaaagtacagagagttccattggttcagggaaaacatctggttctcgaactcctggacgctactccacaggctcacagagcganatccgtagaatgtggaatgacacggttcgaaagcagtcagagtcttcctttattactggagacataaacagttcagcgtcactcaacagagaggggcttctgaacaatgccagggatacaagtgtcatggatactctaccactgaatggtaaccatggcaatagttacagcattgccagcgcgaattacctgagcaactgtgtgcaaatcatagaccgtggctataaccataacgagaccgccctagagaaaaagattctgaaggaactcacttccaactatatcccttcttacctgaacaaccatggggcgctccagtggaacagaacagggaatcttgatggaacaagctgggtgaattaaccttgggcagttggaagggggaaggttgatggcctttgttcngggggttgttggccacctcgttttaaccacgagggaggattttggggcncgggaacttcttttccttgaggg

SEQ ID NO: 434844 - DNA, 568 bp, Homo Sapiens
  misc_feature (475)..(475): n is a, c, g, or t
  misc_feature (545)..(545): n is a, c, g, or t
atttatatggtttcaatcactggtccaattatacacatatatagatttaatagtattttctgtttccttccaaacattttatacttaagtaaatgctagcaatttatacatatttcatagtcaatgaatgtttttgcttctgtgtttgtgtgtgtgttctatggcttgttggatataaatgtcatagtatcttgtaatctttttcagaggggcttctgaacaatgccaggggatacaagtgtcatgggatactctaccactgaatggtaaccatgggcaatagttacagcattgccagcgggaaattacctgagcaactgtgtgcaaatcataggaccgtgggctataaccataacgaggaccgccctaggaggaaaaaggtttctggaagggaactcactttcccaactattattcccttctttacctggaacaaccatggaggcggttccagtggaacagggacaggggattntgatggaacaaggtgggtggattaacccttggcagttggagggggagggtggtggccttgtccgggggtnatggccacctggttttacccccg

SEQ ID NO: 434845 - DNA, 1008 bp, Homo Sapiens
  misc_feature (52)..(161): n is a, c, g, or t
  misc_feature (314)..(323): n is a, c, g, or t
  misc_feature (409)..(433): n is a, c, g, or t
  misc_feature (454)..(573): n is a, c, g, or t
aaaacgggcgccaaaaagggacaagttttttcgccgccccgttgtttccccnnnnnnnnnnnnnnnnnnnnnnnnnnnnnnnnnnnnnnnnnnnnnnnnnnnnnnnnnnnnnnnnnnnnnnnnnnnnnnnnnnnnnnnnnnnnnnnnnnnnnnnnnnnnnntgataaagaattccacccaccttttccgaaaatctcccgcccccggggccaaattttaaataaagccccccgggggcccccttgtagggagccacaaaaggccccggaaccccccttggggtttttttaaaaacccccggttcccccgggggnnnnnnnnnngggggaaaccaaccccttttttttgcccggatttcttttggaaaaaataaaccccagttccctttccctttggggcccgggccccnnnnnnnnnnnnnnnnnnnnnnnnngggggccggggggccccccannnnnnnnnnnnnnnnnnnnnnnnnnnnnnnnnnnnnnnnnnnnnnnnnnnnnnnnnnnnnnnnnnnnnnnnnnnnnnnnnnnnnnnnnnnnnnnnnnnnnnnnnnnnnnnnnnnnnnnnccaaagaattgtaaaatttattgtataagtattgcagcttttcagaatgtcatcattgccactaatgattactgatacacaacaagcagtttcttcaggcctgtggattggcatccaaatacagagtcttacgcagcggggacgtgggtgcgcgccccgcatgccacggaaagcttacataagtttaacttgaacagagcttgggaaatggggctgcaaaggagagcagttcccacgccaggaaccaacgtgaaagcactggaatcagcacaacagccatggaatcaggcaggcaggggaggacgggctgtgtccttctgagctctatagtacagcaagatttcaagcagtttccagaaaaacaacaacaacgacattttctttccttatcgacgggatattttatggttctggaagcttcgtgttgcacatagg

SEQ ID NO: 434846 - DNA, 1542 bp, Homo Sapiens
ttttttttagcggtctgccttcatcttttaatggccggtgcggtacagttagtggacagacgggggatgggacacagcaggggtgaaacagggcagtcacagccggggccggggatctggaagcgggggcggtcctccccctggaaacaccgtctctggaaggacacccttaggatcccctgacctcagggtgccacccacacgggcctggtgttctgggaggcccgggctggagtgacccccagcccctccctacgttccagggacccttgggtctgtcgagtcccttgctggatgagggtcaagacctaggtcaagctgacttcagccagggtgtgggggcccggcttcgtagcccccagacttacctcccctcttctatcccgggccaggaaggcaatgggagggctccctagtcaggcacagccccctgacctgtggcatcgtgtgggtgtgtggggaggtcctgacgtgcccagctggcatcactgctgtggtttcccagaggttgatgcagaccgcaggttggttcatttggaccccagggttcggactccttcatggataaggggttatgtttgggagaagcagtttttaagaatgaggacagaaggggaagctctgagggtgagaaggtggggggttgcccctctcttctcagggctccagagttcatgaggaggggtccctggtggaggctgggccaggcggtgccccgatcagtgcgggtgggtgatgagggccgggggtggagtcactgggggcgcacattttggcgggtgtctgctgtcctgggtggggacacggtgcgtgtgaccctgcagagtgctggctgggctggagccggggccgctggacacagatggaaggtagacgcaggtatgagaccaaacgcagaacacagtgctggccagagccccgggtcgcagaaacgtgttccggtcctcggaggactttgcagaacttcagtccagggtggggcatggctggaccctgagggagtggggctgctggcacagggggaggctcagggccccgcaggcactgaggtggggacaggggaggggccctcaggcctcggggcccctggtcaggccctcggcgtccctggcagtgggcggggctggctcagaggcctgcgaggatggaaccattggcggtggaggcgtgcaggcagctgccgtgagcgtcgcgggtgaggctgtaggtgcagtaggccacggcggaccccagcgtcagccctgacatgtaggacacggtcatggtgttccctgtggacaacaccagcctgaggggagcagggccagggcggccacctggtggccacggctgctcgggtgtgaggtgcggtgacacccgcctgaaccgtgccgcccctccaggacccgctgccccatcgctcctcctgggagcaccctctccggatcctgtccttcctcattccttcttcccgaggccatctgctatgcactccaggccttgcctgccttctctgagtcccccaagcccccattttttggcacgaggcctcgtgccaagctt

SEQ ID NO: 434847 - DNA, 1517 bp, Homo Sapiens
gctttcaaaatcttttgaaacaatttttctgaaatttatttctaaaagtcagagacaaaactttagaagtgacacatttatactaagcatacatgcgtgagcaaaaaaaataagcacagaatacaaaaatgaaatagtaaaattttaatacagtattctgaatacaagtagaataccactagataagaattgtatttacctaagaaatctatgatagtgtgggtggagataaaccagtttaggatagccacttcactattcacattttaatcagtgctgaccagaagctaaagcaatttcttttaggctaagattggcaaaaaatcatagacccaattttccttgttatgaatcaaatgaacatgttttaaggtgatttgtcctcatttaacggtagctggggtaagtcaaaccacagagagcccttacaaagactaagcaccaaatgatgaactgtttgtggcttttgttttgggccatcttaagttttgtgttttccattaacattcatgtgcaaattcttacaggcaaaagttttaacgtggaagtttcagcttggagatcttgccaactgtacttacaacagttttaaagcaattgatactttcagaacaatctcaagcttaattggttaccattataagatgcagaactttttaatgttttctggtccctgaaaattcaatagggccaaatgcattaactggaaatagcatttttttaaagtcttaatcaaagatgataatggataaaacaactatataggctctcatacacaatctttcttaattttcaccttgtaagaaatgattacaatgtccttcaggcttgttatacacccccacagaatcaagaagaaagccaacaaagaattgaacatttcaacaagctaggaaatatttactgtaagcatattgtgaaattctggaagacatactatcaatactttgagaaaacactattaacatgtgttgaagaaggcagtttataaatgaaacattacaaatcttatgtttatgcatacaacttataaaatagaaaaaagctgctatttttccaatagtatagcatcacactaacactatatagttaagattgaaaacttctgtacacacgttcactacacctccaaagcagcatatgcctcttagacatcctcatttgttatctaacatatgccaatcatggtttcagggatttgtatcagttcgagcaggctaaaacaatcattctgctgtatttatttaactttagacacagttaactagcttcagggaacaaaagttccataatcaatgaagaaacattaataccaaatccccacaacaggatggaaaacatttctaaggagaggatataatcctaacagaatggactatgcccctagttacagtgaatgtgggaattaattaggagtctgaaaaaatacattaagatatataaaatttaagtgattatcaaatcagtagtaactactaaaacttaaatatgaattattgatgtttttctaatgcaac

SEQ ID NO: 434848 - DNA, 2002 bp, Homo Sapiens
tttccacaggagtctttattacagtgtaaatccaagctcaggcctcccctgggccccatgcaaagccccggcgttggggctagtagcatccaggagacaccaacgcctcacggcgcctccagcggcgggtccggaagtgcagggtggtgccctgtctaggcaactacaagtcccagcaggccccgcggccaaggtgcctcgtctttcctggactcctggagcagagcctcttgggaaatgtagtcctggtcgctcaggtaattagcgcagagtccctagtgggagtgatcctgacacccaccgggaaaaggctcgggccgaggaggggggtgggtgggaacggacaagagatggagggggccagagggctgcgggggctgggggcaggcgtcctgcgggcagagacaccgttctcattcggctttggctttggatccggagactgcggctgctgcagaggccagggctccggtccctgggattttagctcggatcttagctttgatgtggctcaactgattggtcaccaaccccacatattggtcgatctgagcctggtgctgccggtacagcagggggatggtgaatagaccaatcactcccagaatgagaagagtcaaaccattgaagatggcacccacgaaggtcaagatgtagaagaggagggccagcttgagggaatccacgaggtcttctaccaggaagaagtgccgcagctgcgtggccgccgagaccacgcgggaggtgatctggtgggacaaacgttccgtctgctcccgagtcagggtgaggtccacatccaggtaggcctggaaagggttggctccatccccccggtgcacggcctgcagcactttgcggtaaaccctgagagagatggtgccgcagagcagcaacagagccaagtgcgcggccacggacacgatgctaaagtgcaggaggcagaggagggagaccatcaggcctgtgaagaccactcctgacgtcctcgtgtccttccagtacagcaggtccgccactagaaggcgtggctccaccgtgaattctaattggtccgtgctatcgaggcactgtccccttactggctctcgctccagtggcccccactgcttttcttcctcttccagcaatggctcttcgggcccagagttcgaatctcgcgatcgggatggggacggagtaccggcctggggtgtcccagagcccggactgagctggggagtcaagacctcgggcgatgagggctgagcaagtcggagtcgtaggtccagttcttccccagcttctcctgtctccaatctgttgggttcttggggttcttcgtcttccagcggggtggagctgctggtggaagagtcctccccggatcccgttccccgggccacccagcccagatggtccaaccgaagcctcaggtcttccagagggcgctcggatggaggcgcggtgtcaggatcaccccgtcgtccaggctccggggattggctcaggctggggatgctctccaagctgtcgcccaggctgggctgagggtgctggtctcgtggttccgagactgagcggccctgggggcgggggcggcgggcagttgaatccctgcggcccccggagcccactacaccatcaaaggcgatgtaggagaaggtcagctcccggggggtgccccagtcctgcgacgtggtctcctcctcgtcctcctctgagaattcccgggctgtgtgcagctctcgaaaatcagagtcgtcgttccctccttctgtggaatcaggagttgaggaggctgtagacggagcttctttgcagtgggcgaagaccggcaggacctgccccatggcccccctcgggcctgcatcgggacccccgcccactccggctgtgccgccctgggcccggggtcgcgggcgctcatctccgccgcgcccacgacgccgctgccattctcgccgcctcctcctcccgggctgctccagccgccgccgccgccgccgccgcctggtgctcg

SEQ ID NO: 434849 - DNA, 661 bp, Homo Sapiens
  misc_feature (179)..(179): n is a, c, g, or t
  misc_feature (282)..(395): n is a, c, g, or t
  misc_feature (468)..(520): n is a, c, g, or t
ttaataattaaaataaagttgatatcctgtctttagggagttcccttgatctcttgaaagagacacagccccatttacattatttcgtggatttcaccagcatagtatagtttttttctgtaagtccctcattcttatgtaataacaggtggaactgaggtttgaagaacctcagtggncccatcctgatgacattggagactcaaagagacaagagagagtagggtttaaaacctgagctttaagactcccactagcttcgtgtcctttggcatgttaacnnnnnnnnnnnnnnnnnnnnnnnnnnnnnnnnnnnnnnnnnnnnnnnnnnnnnnnnnnnnnnnnnnnnnnnnnnnnnnnnnnnnnnnnnnnnnnnnnnnnnnnnnnnnnnnnnntaaatatccaggaaattctggtactgttatgtgtgggtgagctgacctggatgtagatgttttcctctctctnnnnnnnnnnnnnnnnnnnnnnnnnnnnnnnnnnnnnnnnnnnnnnnnnnnnnttctgacctggctcctgcccattggtgtcccaagaaatcgtgagaatagttagccccccgtctccccagcctgttgctttctcgtgtagttgtttcacagtagttgagaagttgaagagcttttgcctatttgaaggtgca

SEQ ID NO: 434850 - DNA, 1962 bp, Homo Sapiens
atttgtcatatccatagtttattttaaaaaactgttaaaaactaaccatacaggtttattaatatacttaaaaagtttgttccctatgttgaagtaaaatacattagcaacatcttccggacaccatctttataaaagtaaaacttctagatcctgaaatgtactacagtagagtctatagtttacacttttaatcacagaattggtaattcattctccttactcccctacttcccacatgtgggcagttattacttcaaaattaatgacattcactcatgttatactaccacagatccttaaatagagtacatactgcataattactaacagagccagtcttctctatttgttgtcacatatttcatataagcatttgacttaaagtacaaatagaaatactacatcccataattgtaaacattcaccaggagcttccatagtacagtaagtaacagaggtggcccaagagtcagtcaagtgttccttcactcactggatactcgctgagacttaggaaaactgttttgaaggcaaattatccgtcagtcgttacttgtatttctataaggatgcagttctggatatatactcttacagttgagaaacacctgaaacgtgcattgctatagtctacatgtcagcaccgactttcacttacctgaaatattttgagttaaatgtcagcagtatgtacggttgttaatatcagaaattaagaataactgtgggtctcaagttcccttttgctggatacatacagagtacatgagttcccactgatgctaataggataccgctcatgcataccaagggtagttgaactcccccagggccacatgcaacccccaagtctgaggcacaactattacttctgccagtggatgctatacaagcatatttaaggctgtattcggctataaagagttcaacctactctttaatattcttttctatgtagatcacatacacaattcaaaattttactaggacaggtgaaaagtctccaaacactttttaaataccattctccatacaatttattgtcagcatatttacataggggagtgttcacactttaaaatgcaaccacaattttcaaattggttgtcacaatttgtccaggattaccctcattctcagttttccgacttcttggccagcgttcacatttgtcacgattgttcattgcagttctcaggcaattctgatgttgctctgaaggaagaataaaagttaaaaagtattcactgccaccccacttttgggacaggcttggttgcaaagaaaatggtgttcctggcgctgaaggataactaggaaacccatcagggctgagctggatagctttccagagccgaagctgaatggacctgctgtaacaatgctgactgcgcagccgcattatgctgtaattcttgcaaggatgattgtgaaggattctgaggaaacccagggatacccgggagggacaaaaggcctggaaaaacagaactccctgcagcttgaagtccagatgataaaccggcttgtgcaacaagagcggagttgaaattggaactgaatgctgaggcgaatcctgggaggactggagctggggatggggctgtggcagccacaggtagtggtgtgacagctgcgactgtagagggcgcctgcagccccgggaatgagggaagagcaggggtaacgcttggggtattagagacagaaaagcctggataggagggatttgaagatgacagaggtccttgagtaacagagaaaagtgagggaacagcagtggacaggttgagggggaaaggtgctgctgagactggtgctgaagcagaaagccctgagagaacagctgccgttgagctgggatgagggagagatgtggaggtggcagcggtagatgaggtggctattaatgaccctgggagagatactgacggattaagagatgggttgccagttacc

SEQ ID NO: 434851 - DNA, 365 bp, Homo Sapiens
  misc_feature (41)..(41): n is a, c, g, or t
cttcagtttgttggaaaagcccatttcaaaaactttctttncttttctttcttttttaattattggataataagtgctttcttcgtaaatgtggtattttgttaagccgaaatagcaattaaaaaaatatcctgccctccagatgggttcttttaaacaatttatgtagtgtgacaaagaattgttttctctgttttaatgtgtcatgaaatcttaatgacatggatctgttactaatttaagccattgctagatctcatccttttaggaaagtttgaggtacgagaaaaccttccaaataggcaccttccaattaggataatagccagctttctttgtcagaaatgtgctgaaggaaacaaggc

SEQ ID NO: 434852 - DNA, 383 bp, Homo Sapiens
caagcttggcacgaggctcacatcaagtaaatccttagtactacctgacaattgtacttttatttccattatattcaccctttagtttcctgtagaacgatatcatactttcttgctctttaagcagatatctttgctatctttactctcagctgataaccttggttttggtttcactcagaaaatagaggcaagtagatgaggattttcacaggtttccaccactgcattgacccacctacctgcattgtgccctataaactaagcctttcccttgggtgctgtggggtaaacttaagttcttaggccaggggcctactgaaggacactgctttagtagttctttttggtttcaggcatcattactttttccttttttggtg

SEQ ID NO: 434853 - DNA, 483 bp, Homo Sapiens
  misc_feature (331)..(331): n is a, c, g, or t
  misc_feature (363)..(363): n is a, c, g, or t
  misc_feature (424)..(424): n is a, c, g, or t
  misc_feature (436)..(436): n is a, c, g, or t
  misc_feature (457)..(457): n is a, c, g, or t
tttggagacggagtcttgccctgtcgcccaagctggagtgcagtaaataatttgggacatagttaaattgtcagacacagaaaacaagtaaccaaacctatagataacgaaaaactggcttcccaacttcagttctcaaggtatggttactaagtaaacatacagaaatttctcataattttcaattttcattgttccagctttactcgtgaacaaatgctaaatcagacatgaactgttatataggctacaggataagactctaaaaaagaaaactaaaattttgtaaaatgttagggctgtttcaggaatatagggaagttttcctctntacctacttacaaacatgggtcttttaaggcnggggacacaggaatctagggttattatcagtttgggtattgtgatatagggcaccgttccnttgtaggttccnccgtctgccgcgggggagttngttaaacgcctgggggggaggcttca

SEQ ID NO: 434854 - DNA, 534 bp, Homo Sapiens
  misc_feature (42)..(42): n is a, c, g, or t
  misc_feature (53)..(53): n is a, c, g, or t
  misc_feature (86)..(86): n is a, c, g, or t
aactccctaatggatcactgtatcccatttgtaacctaaagngaaaacacggncaaccataaaaaattaagactccttaactctgnaagttttacccaaatagtttagaatcggggaagctgtcccctttgcccttccccattctgcttttgcacgtaggtcctcctgcatggctacacatcagatacccactaagaacatgaatgcgctctgtattgtatttcagcggcgtcaattcacagcgtagaacttgaagtgcctcccaggaccttgccatcctcccaggtattctaggtacttctgctgcagcagcaaaaacttcatcctctgacatgacagaaagcagcagtcaggggaaaaaagttgatggaagtttcagaaaatgtttgtgccacaattattcccaacaacgtttgagagatttcaagtgcgcctcttaccacaatagcatgaggagaatgcactaaaggctttagttcattcaggtcattttctgccttatcccagtctccttccatgcctcgtgccaagctt

SEQ ID NO: 434855 - DNA, 494 bp, Homo Sapiens
  misc_feature (22)..(22): n is a, c, g, or t
  misc_feature (31)..(31): n is a, c, g, or t
  misc_feature (48)..(48): n is a, c, g, or t
gaggggatcttaccccccaaanttccacagnttcgcctccccatttangtaatggaaatttgggatgtggaccccccggggataatggatctcctgccgggaacatagaactggaattgaaatatgtccacaaaaatgcccaaaggaatatagaattttcactgattgatataacccatacatcttggggaagatttaaagttatgctgcctttgatttcatcatggaaacacatatatcctaaagtagctaatgttacatacaaagttgtaacaatccccatgccaatattcaacgcttgagggaaacgctttgattctttcatttggttttccagtggaaggaccactcctatgccttcaaaagcaaatacagcagtaccaaaaaagagtgggtatttcttccaaccagccactattggaaggttgtggggatctggcatgttcctgacaacatactggtaaattatcacaagactgacagccatggaaacg

SEQ ID NO: 434856 - DNA, 539 bp, Homo Sapiens
ttttatataaaaaggtcactttattttgccttttgtttggtatgctatcaatgccctttaaaatcctactattcaagtacaaatgctgatgtttacaaagtatttacaattttagtcttgttcctttctatcttaaaacacaacagctaactggttacaacagttaacaaaataataataataaaggtcacaaaaagagaaacccctgtcttatcaggcaccaaatctgaacaagggcttggatccaaccttctgcttcccgccaggtgctttaaaaacagtctggctaactgtttttatcatcagaataaacgtctttctttaaagaatagcagggcaactgtttcccagggtcgccaattagagtctgacagtgttcgggctgctgcctttatagtctgtgttctcaaagtttccaactcttacttgccgtattggaatgaacccagattcacaaggggaaggcctagacaacagcttcctgaacgcgtacttaattcttaggttagaaactttaacctttaaaagggaaggccaag

SEQ ID NO: 434857 - DNA, 454 bp, Homo Sapiens
  misc_feature (441)..(441): n is a, c, g, or t
tttagaatattagaaaaagaaacagatttagcaaacagaagtctaagttgttttagtggacatttaagttcagaacaattcacaaaatggtaaaatgtgtttcttcaattctttattttatgtcaacaatttctcagctagtctacagaaaaaacagttcattcaaaatacatcttatcattcccttttcactgtttgatattctgccccttcattctcttatgttccactttctgtaatggagctcattaccgaggtggtaggggactagtttcaaaggcaacacgagtcacagaaatatcaagccagtggtttccttcaggacattcatatacttctcgtgttaggaaaggaaaatctttccttggggtgcagtgatatcactcctgaggaaaccaattactttccaaatatctggcaatactatttttgacaggactnttttcacataggg

SEQ ID NO: 434858 - DNA, 731 bp, Homo Sapiens
ggatctgacaacttcttattgaaacctcaaaattatgataattctgaagaggaggaaagagtcatatcttcagtaatttcagtctcaatgagctcaaacccacccacattatatgaacttgaaaaaataacatttacattaagtcatcgaaaggtcacagataggtataggagtctatgtgcattttggaattactcacctgataccatgaatggcagctggtcttcagagggctgtgagctgacatactcaaatgagacccacacctcatgccgctgtaatcacctgacacattttgcaattttgatgtcctctggtccttccattggtattaaagattataatattcttacaagggatcactcaactaggaataattatttcactgatttgtcttgccatatgcatttttaccttctggttcttcagtgaaattcaaagcaccaggacaacaattcacaaaaatctttgctggtagcctatttcttgctgaacttgtttttcttgttgggatcaatacaaatactaataagctcttctgttcaatcattgccggactgctacactacttctttttagctgcttttgcatggatgtgcattgaaggcatacatctctatctcattggtgtggggtgtcatctacaacaaggggatttttgcacaagaattttttatatctttgggctatcctaagcccaaccccgtgggtaatttgggatttttccgggc

SEQ ID NO: 434859 - DNA, 205 bp, Homo Sapiens
actcaaaagtcaaaaaagtttttatttctctgatatataaaaccaagaaaactttaatacataatatgcatagttttgtttttttaaaaggagaaagtggcagaagtacagacctgtgtagaaaaatacacccaagcagctgttctaagcagtaattcctaaaattatgaatagcacacaaatctcagtgaaagcctcatttctt

SEQ ID NO: 434860 - DNA, 547 bp, Homo Sapiens
  misc_feature (501)..(501): n is a, c, g, or t
  misc_feature (506)..(506): n is a, c, g, or t
aagcttggcacgaggcttttcctgtgggttgactgactctgagggcgatttcggaaatgttttcagcagaaatgaaggataagcatcgcacatgtccagcaatgtctttgagaatgcagtcatttgcacgtgagttctcatctttgttttctgaaacagacgtttcttttagtaagtcacaatacatgctaattttcatttctagaatggtcactggcagttctcacttttaactataagaagtcacgtggaacttagtgatttttaacaaatactaaattcatcctcactttatgttgatcttccagcagcgtttatatatttagtaattttaaaaattcctatttgatacaattaaattttatataatgtgttttgcttgaataaaatgttacatttatactttgaggaactctgaccgaatctttccatacaggatacagggtaaaggaaatatttttctagggttgtcgggagctggcgtacctccccgctggcttnctccntgtggggccagcaccacccggctgggtcagtgggccggaac

SEQ ID NO: 434861 - DNA, 425 bp, Homo Sapiens
tttcaaaccatatgtggttttattcattgagggtatctctatgaagttgcaaacaattttcttttttgattccatttcttttggccggaatttctcaacctcggcactattgacattttggtctggacagttctttgtcatgggggctgctgtgcattgcagggtgcttagcagcattcctgggcctccacccactggatgtgagtacatccttccagttgtgacaacccaaaatgtctccagacgttgccaaatgtccccgggaaggacaaaagtcatccctgggttgaggaaccactattttgggcaacagggatgttctctgcccggggcactttgggttcctgttgtttcaaaaggggagtcttaagatatctgggtcacccttagtgtgggctggtctgtagtgggtaaggggctttgga

SEQ ID NO: 434862 - DNA, 320 bp, Homo Sapiens
aagttctgtccaccccccctcccatttcaggtgtgtcttctgtacaaagtgccattctcaccagtcctttgaagagtcgcaagatacaaagtcagtagtggcctgggagggatggggatgtacacatggggtccactgtgaggtgccaaagaatttggggataaggtcaggtaaacatcaccccctgaaaataaagctagtttaaaacaaatgcatcatggctgcatttgggcagctgcagaacgacgcccctcctgcagccagccagcttccttccctgggcccggtggggagcaactttgccacctcgtgccaagctt

SEQ ID NO: 434863 - DNA, 155 bp, Homo Sapiens
tttagttcataaagttttactagtagaacaaggacctgaatgaaggtggtggcagtaagaaacttggaaaacaaatgatacataacaaagactaaaactgctctccaacagtatattgtccactataaatcagatactatagaaataagaaatat

SEQ ID NO: 434864 - DNA, 535 bp, Homo Sapiens
  misc_feature (525)..(525): n is a, c, g, or t
taatgctgctctgacagggaacgttacaggctgacttagttcattacatatatattccatctctttcaccattgtccaactgtacccttcattgactttctcaggatgccatcctgttgtccaacccagggaaaacgtcacgtctggaaagaaggatgtacacggtgtcctaaaaatggttttgcatccttattactttgctatttccatttggacccaggaagaatatcggcattaatccatacaggacgcttcagatgcctcttcacattttccaagagcatcatggatggttctacaactgccagacttttgaaatccagcttgatgcctttattgcttttcataacttcagtcagccactcctgtagagtattatcactgtttgtttcagggggatgggccataattggctggctgtgttctgatccatcacttggaagaaggacatcagcctctatcatgtgagcagtaccttaataaaagtaaagttcttggccgggcgtggtggctcacaccagctcnccacaagctt

SEQ ID NO: 434865 - DNA, 316 bp, Homo Sapiens
tttggacattgaatgccatttattttgggcatatgggcgaattctatctgccagtcctcccctgagtaacttcccatcctttgattgtggtggggaagaagtcatctgttaaagggattatttttaagagggtttcacgagtattaacaacctatttgaccatttttagtagattttctcctgagaacaatctttggatgcactgatgtcttatgctttcctaagtgaaaggctcagtggaggattttaagaatcttccattggctggaggctggcaagcgtactttgcaatcttctgattgtaaccatcctgagg

SEQ ID NO: 434866 - DNA, 2554 bp, Homo Sapiens
  misc_feature (20)..(20): n is a, c, g, or t
  misc_feature (69)..(69): n is a, c, g, or t
cacaaggcctttataaaagncctcaggggctggtaaagtgaaccttgcttttctggcatttttcccagnccatgtgcccattgacccaggagtgaaactcaaagtataaattgcaaaagggctacttgtcaagatgacaaatatctatcctactgtttcaactatgaacatattctgaaatgccatatgccaggcgccataccagatactagggacataaatatgaaaaagtctttgcccctcaggagtaatattggttgtactggaacatttgtagctgaaggaaaatctccaaaaaagatttcaaagagactaaagtaggaatgggtgctggagaatgagcaagaagggtgagagtcccacgggtgaagggagaaagcagcagagaatgaatataagcccggagaatgaacataaatgtgaggggaagaggccagaggccaacactggaaggacagtgagggccaagaaaggaactacttatgtttctgagacctgcagggaaccatggtattaagctctcattaccagcacctaattttttagaggctggttttcccacttaagtgaaagagattcaccctgtttttagcaattatgacgcactatatttacttctgtcacattagctgattctgtggtggactgggtaatttgaaaagctcctttgaacatgaattgtttttaaacttacagtctagccataagcctaatttttaaaacagaatgcttaatttctccctgtaccatcagtaagattttgatttttaacaagtttacatgtcccattacatgtagataaaaggaatgaaaaccagtaaagacaccttttataatctgaaaatagatttttaaaccttcctttaatgtgaaattttctctttaatgtgttatgaattctatcaaatataaccatttaggattatttatagtatgtcactgatcacttctactagtatagacaaataaatttataaacattattttgaatgtaactaattagcataattttatttaagagttagactgtgttgtcaatactgacatttttgggaatatatagtatagtttatgagtcaagcttctgaaccaaaagttttactttgagccctattcctaccttacaagctagcaggtgaccttgggcaagccaacctattagaaccctgggttcacgtccatacagtgaagacatcataacctgtcctacctacttcacaagcttcctctaccgatcaactagatcaatatatgtaagattttttttgacaactgtaaagtactataaaatgacacttacagataagtcagtgaagttaaccatcaaaacaatattcatgcctataaccaaaagcttttaaacaaaacagcttaataaaaagtggtcaggtaagcaaataaagattatattacacaaactatgttcctcacctactctcatactgagtctaatctttgggaagataattcattttagggggggagagatctgttaagatattttttagtatttatacaaacaagctgtaactactattcaaaaataggtttttttcatccaataggagtatactctttaatagaactgtatttgaataagaattccatacaaatagaatatataccttaacacaagaaagcaagaaaagaatattttacattacatagaacattcaggtgattcgatcaaattatccctccaactaaatacttattttccctatttactacaaatattgcagtcagtcagtatatgccaataatcatatagttttaacatctagtagtgtgaagtacacttgactgtttccaaagggagagaggtgatgtagtcttcatttcaggggagaagaatggactgaattactgtctgctttttaatgtttcaactaaccattccattgcctcatcaaggccggtgcctttggttgctgacgttttgaatatctgccattttcggtccttcaaggcaggtaacccaagtgaatttgccatctctgaggaagtcatggcctgttccatgtcctgtttatttgcaaacaccactaaaatggcttttctcagctcttcttcctccaacatggcaactaactctgatttggaaatgccaattcggtctcggtcacaactgtctactacataaatgactgcatctgtgtttgaatagtaacatctccagtatggcctgatacttgtctgtcctcctaaatcccagacttggaatttaaggtttttgtacgtcaccgtctctacattaaatccaatggtaggtatagtagtaacaacttctcccacttgtaatctgtacaaaattgtggtttttcctgctccatctaatcccaaaattaaaattctcatttcccgagttccaaacagactggaaaatatacttgagaaaaagccacccatgatgaaccccctgtcctccctcgccgatcttcagtgattccttggccttcggctgcagctccgaggcggtttcctcgcaagcccagtcagccagcaacttccacgtcggactccaggcgggggcgggagcgagggtaagcccgct

SEQ ID NO: 434867 - DNA, 620 bp, Homo Sapiens
  misc_feature (151)..(159): n is a, c, g, or t
  misc_feature (498)..(498): n is a, c, g, or t
  misc_feature (509)..(509): n is a, c, g, or t
tttgggtcttccaaatcattttaatgaaggcatcggcagcaggacatacaacacgcccagacacacagcatagcagggcctcgataatgagataatttccccccacgtcttgagaagaagaatactatgtctttctttatgaacactattnnnnnnnnntaaacccctcacaacattctccgggacctagagcccaagagaacccactgaagatccatcatctgtgggatggcggaggcagtctctggggagcaggagggaatgtgcacagccaggggaggctgcagcagccttgcctctgccgtgaatgtcaggcagtgacaagcagcaataagggaacagagggggtggcagcagtgtttggcagctcttcagcaatcttaatcataaattcgggtaggatccagttggtggcattgccgggggggcacagaggtggtagcagctttcacctccttgggggtaggagaagtccctctgtttggagagggagaagangggcaatgcanaggaaggagccagggagcacaggctgtcttacaatcttgcagatctcagcttgaccacagccccagcgttatgagcagataaacccggcacttttcagaagaagaatcgga

SEQ ID NO: 434868 - DNA, 577 bp, Homo Sapiens
  misc_feature (28)..(28): n is a, c, g, or t
  misc_feature (38)..(38): n is a, c, g, or t
  misc_feature (47)..(47): n is a, c, g, or t
  misc_feature (84)..(84): n is a, c, g, or t
  misc_feature (94)..(94): n is a, c, g, or t
  misc_feature (100)..(100): n is a, c, g, or t
  misc_feature (105)..(105): n is a, c, g, or t
gtcaaaggggaacaaaaacaatgagtgnccactcctanagtttcctnaaacgtggctttgtgaggaattggaaaaaaccaaagnagggtctaanacttgntcttncaatggggccctcagcaaggtctttccccaaaagcagaggccctgggtccccatggcgctgtcccagcctggtggtgaaggttgtctgcaggaccttgtccctccctggtgtgcttcctgctattcatcaggccaggtctgtcccagggatctcggatggaattgctacaggaagaaagtgatgcagaaatcctttctctagcccactcacccccatttccacacgttcagatgtttctaggcttttcctttttaatcacatttctattctttcgtaagaaagagatgcacttgtctctatccatccaaagaaatttccctatgtcctctactgttgcattaggcctttttgtagacaagaaaatgtccatttatcctcttagggtgctatctcatatccttaaagacagtcctctttgggtgcactggtggaggatagtcccctttgggcccaacagagaagcagctgccc

SEQ ID NO: 434869 - DNA, 697 bp, Homo Sapiens
  misc_feature (51)..(51): n is a, c, g, or t
  misc_feature (79)..(79): n is a, c, g, or t
gggatttcttcaaactgaagattttcccacattcactacattcgtagggtntctctcctgaatgcatcctctgatgttncaattaggcgtgctttcacatagaaagcattaccacactcattacattcgtaaggtttctctcctgtgtgaattctgctgatggatcccaagaggtgagtgcaccctgaaagatttcccacattcattactactgatagggcttttcacctgtgtgagttctttgatgattgttgagagtcatcttcattcggaagaatttcccacattcaccacactcatagggtttctcacctgtgtgaattctttgatgctgatttagggatttctttgcacggaagttttttccacactccccacattcataaggtttctcccctgtatgagttctgtggtgttgggtaagggatatctttacacgaaatgttttcccacattcactacattcatagggtttctcccctgtgtgagttctctgatgaatcgtgagggttgccttctcagaaaaggttttcccacattcagtacattcatagggtctctctccagtgtgtgttcttgtatgtaggatgagttgtgacttcctgccaaaagatttcccacattcattacattcaaagggcctccgagcgcgtgggtcgacgatatcccgtaattccggaccgtaccagcgctttgg

SEQ ID NO: 434870 - DNA, 836 bp, Homo Sapiens
  misc_feature (14)..(14): n is a, c, g, or t
  misc_feature (80)..(80): n is a, c, g, or t
  misc_feature (144)..(170): n is a, c, g, or t
ttaatatgcaagtnaacaaagtgagaaatgaaatcgaatggagattggcctggttgtttccctagtatatggcatatgantaccaggatagctttataaagcagttagttagttactcactctagtgataaatcgggaaatttnnnnnnnnnnnnnnnnnnnnnnnnnnngagtaacctgtaactctcaattccctgaaaaactagtaatactgtcttatctgctataaactttacatatttgtctattgtcaagatgctacaatggaaaccatttctggttttatcttcaaagcggagaaacatgttgatttagtcttctttcccaatcttcttttttaaaccagtttaaggaacttctgaagatttgtccacctctgattacatgtatgttcttgtttgtatcattagcaacaacatgctaatgacgacacctagctctaagagcaattctgggagaatgaaaggaagtataaagtaacccataatctgcttggcaatagttaagtcaatctatcttcagtttttctctggcctttaaggtcaaacacaagaggcttccctagtttacaagtcagagtcacttgtagtccatttaaatgccctcatccgtattctttgtgttgataagctgcacatgactacatagtaagtacaggaacagtaaagttaaaacgggatgtctccattgatctgccaaatcgttatagaggaggcatttgtctgggactaggaaaatctgagttttacaccatactgtttaggggtccttttggatttaaactggactaaaaacagtgtataactaaactaacaggttaatatccgccgtacgta

SEQ ID NO: 434871 - DNA, 309 bp, Homo Sapiens
ctcaaggtgagctaaccacctttattcgccttaaaaaatactgtactggctggatatttaatcttgttagtttagttatacacttgttttagtctagtttaattcaaaaggactcttaacagtatggtgtaaaactcagattttctagtccagacaaattgctctctataacgatttggcagatcaatggagacatccgttttaactttactgttctgtacttactatgtagtcatgtgcagcttatcaacacaaagaatacggatgagggcatttaaatggactacaagtgactctgacttgtaaacc

SEQ ID NO: 434872 - DNA, 427 bp, Homo Sapiens
  misc_feature (361)..(361): n is a, c, g, or t
  misc_feature (366)..(384): n is a, c, g, or t
  misc_feature (412)..(412): n is a, c, g, or t
tttttccatggattagatcatctttttattgagttataatatacataaaaatccaccactgtaaacagtagcattcaatggtttttactctattgtcaaagctgggcaactatcactactatctaattcagaacactttcatcattccagaaggaaactctgtatgcattagcagtcctctcctcctcatagctcctgggaaccactaatctactttctggctctacggatttgcccattggagacatttcatgtgcatggaatcatacaatatgtggcattttatatctgggcttctttcactcaaataatgttttcaaggttcattcacattgtaggaatgtgtcaatacttgattccntttcnnnnnnnnnnnnnnnnnnnagatgagtctgtctccaacgcccgggtngaaagccgtgggaaa

SEQ ID NO: 434873 - DNA, 1096 bp, Homo Sapiens
  misc_feature (24)..(24): n is a, c, g, or t
  misc_feature (42)..(42): n is a, c, g, or t
  misc_feature (51)..(51): n is a, c, g, or t
  misc_feature (68)..(68): n is a, c, g, or t
  misc_feature (84)..(84): n is a, c, g, or t
  misc_feature (129)..(129): n is a, c, g, or t
  misc_feature (197)..(197): n is a, c, g, or t
caatttaacaaaaaataatacagnaaattagtaaataagccntcacaggtngctgttaaatgtactantctgtatgattttganaaaatagtatttttaactatagcattatacatatgcctagaaacnattttaaccacagcatgggtgagagagggtgctacctgcccctttgtcatgtggacactgcaccaggnagttcacagtctttattatgaggtcactggcatctctccatcgtaaagctatgagcacagggcctgccctcatttaatcatctacatgcagtgtatgtaggtaagtatttacagatgacaaaaccaaacagagtttaagctacgatagtgaaagaagaagattttaataatcctgaaaaaattgtagatagtattgtcttcacagggtatgtgaatgacagattcaaaaaagtcttttgggatagcctttcaaacattctatttctctttgtgaggtttgatcttaactgaatgtaaaggatgtaataattttctttttaaaagtattatattttaaattcagctggcacatgtgccattctgttacatgctgcttgtttgtgacatgttggttacatattgcagaatgctgaggtttggggcttctagtgaaagtgtaatgattttcaaaaacagccttgctctttctgttactccctcctgatcatttaaatgtttccagtgtccgaaaaatgcaacaactaaactgctctctcatttgcatctaattacaatctgataatagtgtgataatattaattgaaaagttgttttaaaggattttaaaattttaaattgagtaatttaagcttcatttaaaagttctgttttacagtgacttattcttcctttatatcagagtcccattgatttaaaaataaatctctttttagaaagaatagaaattctgagtgagctcatttttaagcctaagtgttgtgtgaattatcctggaagttgttaagagctatgttgaagtgctaactgtaaaaaattaagtgctttcacgacgaggctttcttaattcccactgattttctttccatgccgtaaacagctcataaaatgtcatatgtagc

SEQ ID NO: 434874 - DNA, 1122 bp, Homo Sapiens
  misc_feature (914)..(914): n is a, c, g, or t
  misc_feature (931)..(931): n is a, c, g, or t
  misc_feature (949)..(949): n is a, c, g, or t
  misc_feature (953)..(953): n is a, c, g, or t
  misc_feature (985)..(985): n is a, c, g, or t
  misc_feature (1001)..(1001): n is a, c, g, or t
  misc_feature (1016)..(1016): n is a, c, g, or t
  misc_feature (1026)..(1026): n is a, c, g, or t
  misc_feature (1048)..(1048): n is a, c, g, or t
  misc_feature (1066)..(1066): n is a, c, g, or t
  misc_feature (1072)..(1072): n is a, c, g, or t
  misc_feature (1074)..(1074): n is a, c, g, or t
  misc_feature (1080)..(1080): n is a, c, g, or t
  misc_feature (1088)..(1088): n is a, c, g, or t
  misc_feature (1092)..(1092): n is a, c, g, or t
  misc_feature (1095)..(1095): n is a, c, g, or t
  misc_feature (1100)..(1100): n is a, c, g, or t
  misc_feature (1114)..(1114): n is a, c, g, or t
tttaattttaagtttgaatgtatattttgaaataaaaatggaaaataacaaatttgtacaaaattgtcacatagaaacacactttaagataccattacatgctatgtgtatttacaaaagttacaggtctagtaagaaaaaagaaactgtcattgacaaatgcgagctcattttttgagcaacaagaaatctcccgtgaaatgtcatactgacagccagtgagacttggtgcagtgacggctccgcacctgctgaggcctggagcctgcctcccgggctgagtgctcagctctggcctccggctggatgccgtctagagtcctatgtgctcataggtctttttctttcagtaaacagtataaaacattactattttcctttgattgtaaacttcaacagaaaataacatacttaagaattttgctacaaagagtactatgatttttattgcctcaccacctttagaacatttccacttcacaagtttctgatttgcttcactttcttacttggcgatggcgccctggcagcatcatccacacataccagtgcgtatggggaaatgggctgtaggccttcctgcgtggtccatggctctgccttcatggaacaggctgggtcatgtctctgctcaggctcaaaccatctactctcaagttacaggcgagctcagcccattcatttattgctttccttatattccactgtttattatttaagttgtattttcatatgttcctatagaatttattcacattacctggctaataatcaacagtttggggtttttatataatagctcttcagatatattgctggtatatgaagctcaactgatatgcatagggacaaatcagaagatatttatgctggtagatccaggggcattgtagcaccttacagttaaaactccncccctctatgaatgtcnagttttagcttaaaagtntagntagttttgctcacactttctctcacataaaanataggttctttctcanaataaacattattgntattgttttncacaaagtgttcaggccaacancccaaaccatatcccganaatggncnaaatgngttagtancggnttntaatntaaataaggttggnctttgcca

SEQ ID NO: 434875 - DNA, 696 bp, Homo Sapiens
  misc_feature (91)..(108): n is a, c, g, or t
  misc_feature (111)..(111): n is a, c, g, or t
  misc_feature (117)..(134): n is a, c, g, or t
  misc_feature (137)..(137): n is a, c, g, or t
  misc_feature (139)..(141): n is a, c, g, or t
  misc_feature (148)..(277): n is a, c, g, or t
aagaaaaaaaggatggggggaagggttttgaagtgtatttagggggatggggctgggttttaggaaagatgtgtttgagaaaagttttttnnnnnnnnnnnnnnnnnntgngggtgnnnnnnnnnnnnnnnnnngtntnnntgtgttnnnnnnnnnnnnnnnnnnnnnnnnnnnnnnnnnnnnnnnnnnnnnnnnnnnnnnnnnnnnnnnnnnnnnnnnnnnnnnnnnnnnnnnnnnnnnnnnnnnnnnnnnnnnnnnnnnnnnnnnnnnnnnnnnnaattttaagtttgaatgtatattttgaaataaaaatggaaaataacaaatttgtacaaaattgtcacatagaaacacactttaagataccattacatgctatgtgtatttacaaaagttacaggtctagtaagaaaaaagaaactgtcattgacaaatgcgagctcattttttgagcaacaagaaatctcccgtgaaatgtcatactgacagccagtgaggacttgggtgcagtgacgggctccgcacctgctgaggcctgggggcctggcctcccgggctgaggggctcagctctgggcctccggctgggatgccctctaggagtcctatgtggctcatagggtcttttttctttcaggtaaacaggtattaaaacattacttatttttcctttggattggtaaactttcaaccgggg

SEQ ID NO: 434876 - DNA, 1143 bp, Homo Sapiens
  misc_feature (14)..(14): n is a, c, g, or t
  misc_feature (20)..(20): n is a, c, g, or t
  misc_feature (31)..(31): n is a, c, g, or t
  misc_feature (33)..(33): n is a, c, g, or t
  misc_feature (36)..(36): n is a, c, g, or t
  misc_feature (39)..(39): n is a, c, g, or t
  misc_feature (53)..(53): n is a, c, g, or t
  misc_feature (62)..(62): n is a, c, g, or t
  misc_feature (69)..(69): n is a, c, g, or t
  misc_feature (73)..(75): n is a, c, g, or t
  misc_feature (77)..(77): n is a, c, g, or t
  misc_feature (82)..(82): n is a, c, g, or t
  misc_feature (84)..(84): n is a, c, g, or t
  misc_feature (96)..(96): n is a, c, g, or t
  misc_feature (109)..(109): n is a, c, g, or t
  misc_feature (155)..(155): n is a, c, g, or t
  misc_feature (180)..(180): n is a, c, g, or t
ttaatcattcaacncctgcnggagttggggngntcntgngttcttttgtggangagtatttntaaagtncctnnncncatgngntaggtcaaatgnggggaaatacagnccaaatataccatcttctcacttggcataacaaactaaaaaaaccnccacccaaccatttctttagtgatnaaaaatagagttctttttgtgagcatggaaacaatacatggaatctgtttctttgcatgaaaagtagcgtcaaaggaaaaggactcaaattctgttgccacctttcggttaacccgggtaagaatgtgcataaattcaagcttgtcggcatactgtttcagcatggcacaaagcgactggatgaaccaggagccatcctttgaatttcgccaagaataataaccaggtgctgtggagtatgcatacaagaagtcggcctccactggtattttatgacacgccatgtcatcatcaacaccactgtctgtctcaatgccacagtccagttctgtaccacggcaggcctgaataatgaaaagtttgggttttccagttagacttctacaacgatcccctctgaaaaagtttgttatttttttcaggtcaacaggtccatttgttccaaaaattattccttcttcaccatggctcagaagcacacaaacaaaactgctccttttgctgtgatcttctttagaaacatcacgcatcaattccacaatttcttcacgtgtaagatcatttttattcctgacttcatatttcaagtttctgaatgtttccctgaggtttgctgcatcgacatctgtaccagaccgagatgtcattccagtgcttttatgaaaattcttattattaattattatacataaacccatctcaggataatccattttataactgttgtccagggatattccagagtccattgattcgcttccatgtatgatctttggttccaaatttttaatggattttgaatccactgagttttcagtgttctccatggatacctttattaacttccacaaccgcctcacaatagcacccatccgctaggagccgcgtctgcactgcttccgcggcccgccgccgggagatgtccgctctcgacgaattcgagctcggccgatttggcctgat

SEQ ID NO: 434877 - DNA, 884 bp, Homo Sapiens
  misc_feature (627)..(627): n is a, c, g, or t
  misc_feature (733)..(733): n is a, c, g, or t
  misc_feature (760)..(760): n is a, c, g, or t
  misc_feature (802)..(802): n is a, c, g, or t
  misc_feature (826)..(826): n is a, c, g, or t
  misc_feature (845)..(845): n is a, c, g, or t
aggaagtgttagcaaatgctaccatgtggaacactcaactttatttgctttatttatatatttaacaattctaaagtatttacttcttgctttgacaaaaaatgaaaaatataggagcactgactgactcctctttaggagaaaagggttatatgtacagctatggagagttacggttcctcctttaacaaaggaaaatattaataaaaaagtgcttcatcgatcaaaaaagagctaagagctgcaagcatttattcacactgtacatcagacccaagaaacccgtatcataacctcttggcacctgtcactaggaaatgcacaatcttcaattagaccaactttttccctacctgcacgactagatgacacagaatgtggaaaagaactacaccctgtttcaccacgttcaaactgtgttgccactggaagtcagagacgtgctcagatgctctgggctttgcctggactgagagcaccagggaagccttctgggccacgccttaaccacacccaggcatgcacagaaccaccttcctgagacacaccttgcccttggtcagggaactgctaccaaggggaagaggaatacagggcagggccagagcttagcatccctgacttacnctagtctcacatgatcacctgtcacagtagcagcttcaacaagtcagcatggggctccagagggaggcggacaaaacatgatgcagatacaagccaacctactttntcaactcccaactactcacaaattctngtataagctgttgccatcaagtactggagagaggctgattcnaagcatgacttttagaccctcagnacaatgcctctgtgcagancaaatgcatcaccaccgaggaaggatgttaaaatctcca

SEQ ID NO: 434878 - DNA, 418 bp, Homo Sapiens
  misc_feature (308)..(308): n is a, c, g, or t
  misc_feature (325)..(325): n is a, c, g, or t
  misc_feature (377)..(377): n is a, c, g, or t
  misc_feature (386)..(386): n is a, c, g, or t
acggcagcgtcacatgtggacaccacttattgcttatttatatatttaacaattctaaagtatttacttcttgctttgacaaaaaatgaaaaatataggagcactgactgactcctctttaggagaaaagggttatatgtacagctatggagagttacggttcctcctttaacaaaggaaaatattaataaaaaagtgcttcatcgatcaaaaaagagctaagagctgcaagcatttattcacactgtacatcaggacccaaggaaacccgtatcataacctcttgggcacctgttcactaggggaantggcacaattctttcantttaggacccaacttttttccctacctggcacggactagggtggacacggantgtgggggnaagggatcttacaccctgttttcacccacatt

SEQ ID NO: 434879 - DNA, 1347 bp, Homo Sapiens
ttttatttttgcatttgcttattgcaatactagttaaaacaccagtttataatttttttatacattcagttgttcaacaaatgattcttttaatctgcctgaagtttcaagtcaacacgtcactggagaaaatgtatgaaactgtagcactaatttctgaaacgaaggattgaagttcctctttccaacttctttcagaccatcactactccacatgttcctgctcttgtcctggaattagccaccgaatactctcagttcgaatggtagcatacataataaaactaattaaaaagaataaggaaaatacaagcaaccagtccacactttttatcaaagtgctgggaagagggcctatttggtcggcttgagttaccaccacattcttcttggcttctatacctgtctgattaaaaatgaagattttcagtgtttccagtgttcgatctgtatgattaaatctggccattggtttagctccttgaaataataaaatattaggaacagctacggtgccaaacctggtagaaaggctgctgtgctgagatgcatccagtgccaaaaagtgaagagctggaaatgcccggggcagagagttaaagtgaggggccaaactggcagaaaagcggcaccacggggtgtaaaacaggactagagtacagtcactaccgtttgggttcagaaaatccataaggtcctgtgacatatttaaaattttcagagtgaaattttctaatcctgtaatgtttctctcctcacagttcacctttggggatttcagactttcagtgttattggagtcctctgtcggggctgcgtcagattccgccacttctggctctgtgtaatactcctcttctctgtcagggaagtgtgctccagcgccatccagagagaaaaggctctctcggacgttgcaccttgagtcctccgctcctccagcaccacaggtgacgccgctaggctctgaactcactttgtcctcagcttccccaggaatcacagacagcatcaccatgtgatcgccttgggtgtccagccccagcaccgcattggcctcttctgctgccctgtcctggcccatcgggtcatgcaggagctcctcctcacccaggtacacagcccccacctggagagggtgagcaggctgctcctctgaccataagcgaccactttcctctgcaacctccacgccgcggacgggaagtcccagcacccacagcaatacttgccaccagccgaggagccgcatgacgcggggcggtcgtcgaccggcagccgggaccattgcccaggccgagaggcaatcggcgcacggctacgcgagatcccgggaattccggaccg

SEQ ID NO: 434880 - DNA, 464 bp, Homo Sapiens
  misc_feature (423)..(423): n is a, c, g, or t
  misc_feature (441)..(441): n is a, c, g, or t
  misc_feature (449)..(449): n is a, c, g, or t
aaaacaccagtttataatttttttatacattcagttgttcaacaaatgattcttttaatctgcctgaagtttcaagtcaacacgtcactggagaaaatgtatgaaactgtagcactaatttctgaaacgaaggattgaagttcctctttccaacttctttcagaccatcactactccacatgttcctgctcttgtcctgggaattagccaccgaatactctcagttcgaatgggtaggcatacataataaaactaattaaaaagaataagggaaaatacaagtcaaccagttccacactttttattcaaagtgctggggaaggaggggcctatttgggtcgggcttgaggttaccaccacattcttcttgggctttctattacctgtctggatttaaaattggagggtttttcagtgtttccngtgttcggtccgtatggntttaattngggccttggggttag

SEQ ID NO: 434881 - DNA, 386 bp, Homo Sapiens
  misc_feature (301)..(301): n is a, c, g, or t
  misc_feature (312)..(312): n is a, c, g, or t
  misc_feature (337)..(337): n is a, c, g, or t
  misc_feature (344)..(344): n is a, c, g, or t
  misc_feature (366)..(366): n is a, c, g, or t
ctctttaactttatattccaaatggaaaaatggtgcaatactctggtaataattttcttgcattagtccacaataaaaagctgctaaaggtaggtatacatgttatttctccagagatatacactgtactttttaaacgcagtcacagagtccttgagtaaacatttacacatgaattgtcgccagccctgtcctaggaattctctgtaatgtataggattagctaaaggaagggcgaggacactcagtgcaaagttagaagctaataataacaaccgtttgaccaatgcgccaaaaattnagcgtatactnaatacaaggggaaaacccacagttnaatcctnacacggttttcaaacactcaanccacagggaaactggcacgg

SEQ ID NO: 434882 - DNA, 178 bp, Homo Sapiens
gtactgaataaacaagcactattcttaagaataaggggtaagggttttactctcagatttgcttctcttatggagtgatatcgtacaagctaattggattctctcagcctcactttcctcatgtgtaaaatgacaataattctcctaattcatagggggttggcctcgtgccaagctt

SEQ ID NO: 434883 - DNA, 536 bp, Homo Sapiens
  misc_feature (81)..(89): n is a, c, g, or t
gctgctaaatgaaaagcaggtttggctttattcatgttactgtaaaaactaaataataaagtattcacaccaagcgtgaannnnnnnnngccagcaaaagttaaaacatcaaagaaacctctttcaaatactaacaaatttacttacaaacacctatatttattatttcataaataggcgcaacaggttccataaaaaaagattaaatacagacacagtatgaagaaacaataagacagagccatatgtaaaagttgtaatttagctgtttccaatctgtttctgcatctaataaaataccaggtaagcatttggcagttttatacataaaaggacttaaatgacatttactaaccattacacaaaaagtgatacaaaaaagcaatttttctgcagtacaaaataaatgtgtttgcgcttcccttaatactagtttctttttgtctgatcaatgagacaaagccaatttgtttttaaattaaaatcacttgggaatactttttattttcaaatattttgaaaatatagaactatca

SEQ ID NO: 434884 - DNA, 1436 bp, Homo Sapiens
  misc_feature (636)..(873): n is a, c, g, or t
tcttcaagaccagattagtattttatttttcccttcctaacactcaaattcatggcaggtgaaaagataatagaacataatcaaactaacatataaacacaattcaaaaacgtttaaccatctattatagctctttgttgtaaaacacacaaagttaaacagaaacatctttatataaattatccttaataatctgtatacactgtaaaacaattgaaaattcacaccaagatcctagtgcaagcagtggtgtacaaaagtgcaaacaaggttagtgattaacaacttaccatcaatataccacttcaacatactttacattcagccaaatactgaaggtttcaccatggaaaaacacttttatcacttttaaagtaacttggactatgttcaccctgagtgctcttgcctcagtatggcaactgattatgagttcaggttaagagcaacaccagggaatacagaaacccacgttaagttggccattctgacatgaatctatacttgaaaatgaaaacaatcccaaagaaaacctgtatgtcaaaaacagaactgttcctgcctttcaccccaaaatatttaaaactaaatctaagccacttttaaaatgcatgctggccgggcgcagtggttcannnnnnnnnnnnnnnnnnnnnnnnnnnnnnnnnnnnnnnnnnnnnnnnnnnnnnnnnnnnnnnnnnnnnnnnnnnnnnnnnnnnnnnnnnnnnnnnnnnnnnnnnnnnnnnnnnnnnnnnnnnnnnnnnnnnnnnnnnnnnnnnnnnnnnnnnnnnnnnnnnnnnnnnnnnnnnnnnnnnnnnnnnnnnnnnnnnnnnnnnnnnnnnnnnnnnnnnnnnnnnnnnnnnnnnnnnnnnntgacaaagcaagactccatctcaaacaaacaaacaaaaaagtatgctgaagaagaatccatctactccagtgcagcttttccaaaaatagttctgtgtaaactcagttttctatttctgccctaaaatctatttggggcaggggacacacctgaaacaaagttggctttggataacttcgcttactttcctttgaatactttggattctgtttaaaagtatgatgaaagccgtgaacaacaattagtgccattaaatatattagctatttaatgctctaaattataaggacaaaaattaattggttcagaactgcctctttaatagactctgtggcttcccttgacactggaggatctttaaaatccaggtgttgggtggggatttgtgagggggaatggtaacagggttcagaagtggaaacacggttttaacaaaattccagtcactttatacagaggcagagtcacatatcccaagagctggttcttcttttatttggttaaaaagcactaacttgaatttcaaaagaaggataataaaggaaatgtccgccctcgtgcc

SEQ ID NO: 434885 - DNA, 1190 bp, Homo Sapiens
gctgggtaccggtccgggaattctccgggataaaaatgcatattaatttcttcccccaaagccggattcttaattctctgcaacactttgaggacatttatgattgtccctctgggccaatgcttatacccagtgaggatgctgcagtgaggctgtaaagtggccccctgcggccctagcctgacccggagaaaggatggtagattctgttaactcttgaagactccagtatgaaaatcagcatgcccgcctagttacctaccggagagttatcctgataaattaacctctcacagttagtgatcctgtccttttaacaccttttttgtggggttctctctgacctttcatcgtaaagtgctggggaccttaagtgatttgcctgtaattttggatgattaaaaaatgtgtatatatattagctaattagaaatattctacttctctgttgtcaaactgaaattcagagcaagttcctgagtgcgtggatctgggtcttagttctggttgattcactcaagagttcagtgctcatacgtatctgctcattttgacaaagtgcctcatgcaaccgggccctctctctgcggcagagtccttagtggaggggtttacctggaacattagtagttaccacagaatacggaagagcaggtgactgtgctgtgcagctctctaaatgggaattctcaggtaggaagcaacagcttcagaaagagctcaaaataaattggaaatgtgaatcgcagctgtgggttttaccaccgtctgtctcagagtcccaggaccttgagtgtcattagttactttattgaaggttttagacccatagcagctttgtctctgtcacatcagcaatttcagaaccaaaagggaggctctctgtaggcacagagctgcactatcacgagcctttgtttttctccacaaagtatctaacaaaaccaatgtgcagactgattggcctggtcattggtctccgagagaggaggtttgcctgtgatttcctaattatcgctagggccaaggtgggatttgtaaagctttacaataatcattctgggatagagtcctggggaggtcccttggccagaactcaatttaaatccttttgaaaaaatattttggcagcttatccttataaaaagaaaaccaatgggggaaggctgaagggaattcccaaacaaaca

SEQ ID NO: 434886 - DNA, 1173 bp, Homo Sapiens
ttttttttgattaattgagtgattttagtcaagtgaatattgatacatggctgaaaaagcatgaaaataaaatgaacacgtacgggaattactattaacataagcgataacatcaaaacatctggtaaaatgcagttaaaaaaacaacacaaatgaaatggaatgtaaaacattttcacagtattcaaagcttttgtaagagacttaggatctaaaagaggagtactacaggaagaaactagaggaaacgggaatttcatccatgtcctgtgtatctgctggcaacaggtcagaacggccagtatgttattccctgcaggctgcctagggtgctctcctcaaacagatcacctgagcctcctgcatctatgaagttatgacacagcaaccagttactcagagtctgatgagaaaaacagattttaggtttggggaaatggggattactgtaatttacacatccaaatgcaaactggagctctgattgaattctacccctggggagaacttgatgctaacccacaggtaccaagagccaagtgttacacaggatatttttaaaaataaaatgtttttggaatcctcacctcccatgctatcttctaagataactacaaatattcttcaaagatttaactgagttgtgccaaggacctcccaggactctatccagaatgattattgtaaagctttacaaatcccaccttggccctagcgataattaggaaatcacaggcaaacctcctctctcggagaccaatgaccaggccaatcagtctgcacattggttttgttagatactttgtggagaaaaacaaaggctcgtgatagtgcagctctgtgcctacagagagcctcccttttggttctgaaattgctgatgtgacagagacaaagctgctatgggtctaaaaccttcaataaagtaactaatgacactcaaggtcctgggactctgagacagacggtggtaaaacccacagctgcgattcacatttccaatttattttgagctctttctgaagctgttgcttcctacctgagaattcccatttagagagctgcacagcacagtcacctgctcttccgtattctgtggtaactactaatgttccaggtaaacccctccactaaggactctgccgcagagagagggcccggttgcatgaggca

SEQ ID NO: 434887 - DNA, 2060 bp, Homo Sapiens
ttttttttgactattttaaaagattttattagaggaaataatctagtagataactttcttacttccacaaaaacaaagtttctcaaggatacaaaccaatggatttatctgtgaactcggtcccagaatagaaactagcaaaaagtcagtacagtactcaaaaaatacttttgtggtatgaaaaaagggcaggtgcagatgtagaactgtaccatcttcagtttctgttcacaattgttttaaaacaattctcatctatccagtctgctctcccacgcctcagatgagggaagccaatggtcaatgctctgtgatagcccaagtaggatccaatctaggtaatccctgtccaccttagctctgtcctctgagggatttgccaggttgcaccacaatagttctccattctctttagtctgaacttatgctgtaaacccaaggcctggcacaggggtatgcaggaaagtttgagtgaatcagtcacaacagctctagtacagtactgcatcgatatgctctggagacctgcagcctatttttcccagagaaataaagtggagtggagatcagaagccatggcttcccccctacctcctctggtcagtgcaggctctggctcaaatactgaagaaacatgttggccagttgcggcaagttctcattgttgcggatgcattttagtgtacgaaataaactggcgacgaaggcgactcagttctgccatggtcaagggccggttaaaccgcaagtgctctgtgagtaccaggaagcgtgagcaagtccccggggaacagcgctcttctgcgcttccatcaatccggccagtacttgactcgtgacctggtccaactggtgcagaaagctgccggaggcgaggggctgggactgcgtagactgatggggtggtggggcccggttctcaaacagggcagagcggatccccgccaggggcaacggctcctctaggcccaccaaagtgaataaaggccggtcccagcgattccgagaatcgggagcctcaaagcgcagcgttagggcctccaggagttcgggagagtaaaaggcaccggacccatgctttgcagatttctctgaatccggagtcacaagagctggagactccgcagccccggattcttctcgctccagttccttgggtacgtcggcctgggcacttccatttactacagagtccgcagtatgcagttccctgaggacgctgctgcccgccgcctgggctctcccgtcctcctcagcgcgtggccgccaactcacactgacgttccggccagggttctcgttcgcgcccgccacctgaggtcccgcgatcgggccgccgggccgtacgcagtagaccaggcagagcggggtgcgcgccgcccgtgccaggcagtagagctcgtaacggaaacctttgatgtagttaagcgagtccaggatgaccacgtcgtggcgactcaggcgccgttccacggaggctcgcagagctccacgcaatgccttctcacgggcagaatcgccgtacaccgctgggtcctctgcgcccaggacagctgcgtcgtccaccacgtacaccgcgcggccctcggcagccagcgccacgcgcaactcttcagcacgccggctcttgccgctgtacggcagcccgcaaaacaccacgagcggcatcctctcagggagcgaccattggcaaccgcgctgcgccaacttccgggttgtacgcgtctccgaccatgggatgctgtcacttgcctaaggctcaagatttgactctgaagagtgagtgattgagaatgaaattgagaggatgcccaggagaactgcaaggtgtctaacatgatcaccatcactctattggtcaatatctaaactcaggcaactgaatcctgctttggcaagatgcccaaccagacagtctgaagggatatacacctacaaaacaatgaaatcctagataacaatggactttcagaatgtgctcactagactcagtaatgacagaaccctccataaacacaaagcaagctaaaacctatgagcaacaagcaagtgaggctgcc

SEQ ID NO: 434888 - DNA, 2241 bp, Homo Sapiens
  misc_feature (126)..(126): n is a, c, g, or t
  misc_feature (390)..(399): n is a, c, g, or t
  misc_feature (543)..(630): n is a, c, g, or t
cccgtcgcgctatgtgagatgtgttatgttacacccgattcgacatgactaggagagggcctcaagtcgcgggccccgtaggagttcctttgtgtacagcgtgagctgtcccttcgccgtcgcgtnaggtagagcccgtcggtggtgtggcctccgtttttgagtttatgagttgacataggcttgttcgcccgcgtttattttgaggagcagaggttttatgttggtcccgtgcccccgcgtttttgtcctttcgtggtctggccagcttggaagcctccgggggtggcccggttttcggtgttccttttttccgagtgtgtgaacgggccaaaggttttgggccgccccctaattaagtgaagtttggtttttacccttgtcttgagnnnnnnnnnnatatggatagggaggtttatagtaggtttttctgtgggggcctgggagggccgccccctctctctctgtgggtggggtggatttgaaaatgtggctggtgtgggtgggggtagtttgtgctgtgtttgagtgtatgtatgttgnnnnnnnnnnnnnnnnnnnnnnnnnnnnnnnnnnnnnnnnnnnnnnnnnnnnnnnnnnnnnnnnnnnnnnnnnnnnnnnnnnnnnnnnggctggaattatgatgtgccattcaacctttaattacataagctgttttcaaaaatcacattcagcgtggagattttccagagatgctggagttggcagatggccaccacgtagctctccactttccacaaatggcctctgccagcttgggaagaacctccatgacctgtgtcctgagaagtcagagagcaagggccccacggccatggcagggtggagccgtgtagagggtggccaggtggccagctcgcggattccatccagagaggagactcaaggatcatgctaagtagggaacggggttcccacacgtcctcaggcattcaactcctgggccagggtccgtaacaaagggagacttcagccctcaaagcctctcactcctcaggtctgggcaggaggtccttctgccaagcagctcctcctgcccttcgcctgctttctgccaggagagacctctgtgtagagctggctatgaggtacctgcaccatttaacctattctcatttccatgtccccatccatgaatcatctgtgtgtgcccctatttccacatcatccccagggcttcaggtgggcaaggggctcagagtttacaggtagcctgagccactttggagctagtttttctgttcagggcttgacagataaagtttccagcttccagaagcttctggagattcacacccgtgtgaatgcccaagccctctagcatgtagaccaggtcttctgtggccaagtttcctgatgccccctgtgcgtagggacagcctccaagtcctgccacagaagagtccacgacactcactcccatctgcagggccatcaaggtgttggccagggcttgaccataggtgtcatggcagtggacagccagggcagccagaggcacttcctgcatgacagcagacagcatgtctttcatgatccctggggtgcccacaccaatggtgtcccccagggagatctcgtagcagcccattgagtagaacttcttggtgacctcagctactttagctggggagatcttcccttcataagggcagccaagagcacaggagacgtacccccgcacagaaatattggctgactgcgctgccttcaggattgcgtcaaacctctgaaaactctcctctatggaacaattgatgttcttcttggtgaagagctctgaggcagctccaaagatgactacttccttggctccagcagcaaccgctgcctcgaagcctttcaaatttggggtcaggactgggtagttgatgccaggaaacttctgaatgcccttcaagacttcagtgtggtcacccatctggggaacccacttaggagacacaaagctggtggtttctataacagagagtcctgcttcagaaagcatgtctatcagcttgattttcactggagtagatacgatattcttttcattttgtagtccatctcggggaccaacttccacaattttcacccgctttggtaaagtgcccatagatgaggtgctgacagcccggagggacgccaagcccaccagtcgccgcggaagcgccttcctcattgctgccatcttggcccagaatcccatcccgggaattccggaccggtaccagcctg

SEQ ID NO: 434889 - DNA, 651 bp, Homo Sapiens
  misc_feature (203)..(203): n is a, c, g, or t
ttcctgatgccccctgtgcgtagggaacaggcctccaagtccgtgccacagaagaggtccacgacactcactcccatctgcagggccagtcaaggtgttggccagggcttgaccataggtgtcatggcagtggacagccagggccgccagaggcacttcctgcatgacagcagacagcatgtctttcatgattcctggggtgncccacaccaatggtgtcccccagggagatctcgtagcagcccattgagtagaacttcttggtgaccgctgcctcgaagcctttcaaatttggggtcaggactgggtagttgatggccaggaaacttctgaatgcccttcaagacttcagtgtggtcacccatctggggaacccacttaggagacacaaagctggtggtttctataacagagagtcctgcttcagaaagcatgtctatcagcttgattttcactggagtagatacgatattcttttcattttgtagtccatctcggggaccaacttccacaattttcacccgctttggtaaagtgcccatagatgaggtgctgacagtcccggagggacagccaggcccaccatgtcgccgcggaagcgccttccatcattgctgccacctcggcacaccgacgctcggtcgctcctat

SEQ ID NO: 434890 - DNA, 372 bp, Homo Sapiens
aagcttggcacgaggcttttgttagccttataattgactaacaaagcaacctgccaagttggtgaaggttaattattgcctcatgaaatatacattcatcgcataaaagaattaaataggaagatggccaaaaatgtaaaaaagtcgtataaatttgtctaagaagaaaaagacccaatttaagtagtctgtgacttgactcccaaattctgacctgatggatgaaagtgaagatgtttcgtatggcaaattcagtaatgctacctcagtatatagttcctgtatacgtatttggaccacagttattagataaaccaaaaatatttcatgaagcatcttctgcttcagagtccatatccagccacccagcta

SEQ ID NO: 434891 - DNA, 1542 bp, Homo Sapiens
  misc_feature (1031)..(1031): n is a, c, g, or t
  misc_feature (1042)..(1042): n is a, c, g, or t
tttttttcaaaataaatgcaaaatttaatgaaaaaaataagtacaaagtgaatggaaaagaacaaaaacagtcaatgaatgcaggagtaaatgaattaacacgtgaagcaattttagaaaagcatgttaacgtaacagactagcaagccacacttcctcaggcctcgtatccatgagccccacttaacagggagcccacatttacacatacacaaacatatgcagtcagtaatgcacaattacaaaccacctagatcagggtacccacaactagaaagaacatatttccacatcggcctgggacaggtctggtttatgccttttgatctggtgtaattaatagcatcccctttctctctcaatagtcccaatttgggcaacgaattatatggtgattcttctacctcaaacaaacatggtttatgataaagacatgatagtaaatgccaacatgatcctgtaagacagccctaataaagccaacaaatgacaatgagaaaaagaggggtaaatgagactctgcagacagggtcacattctatgggggctaacttactaaacagtggcaagttttaagctcactttatgcaccaaggtttaatttggtctcagctaaagaagacaaaattccaaacacaaacagcaggggagaggtgcagtgaggcttgctggagggacctgtggaggcagctcagaccagaaaacacaagtctgtcaagtgtcctgaagatcctgggaaggcttaggcccgcaggcagccagccacgagtatggcctttcagtatgcctggggtgcgacccgcaggcgacaatggacgaatggccaagtctgcatactcccagagtccctaggttggccccatgaaccaggaatttctcatttcttatgtatccaatgaacctgctgggtcaccaggcctcatcttcataaatatgttagctgagagaggctatcttaaaggtcatgctctgacccaactgcatacactttcagacataaaattaccctagagatgagcccattggcagcnccacatttgcncctggatatgccagtttacctttttagataccctcactgaaagcatcagttttcaattgcaaccagatacggacttattgtgacgctaaggaagcttaatcttcagggccccttccaagaccctgtacctaattttatattaacattgtttttcttaaagaagtctttctaaataattcaagctttcagccccataaaatttagatccacccctggtcatagcataaaaagttgaattgtcactagaacctgctctgctgctggagcatggagcccctcacaggtaaaggctgcctcttcctggccgtgcctcagtggacacacacagctcacccctccacttctccctgagcagaacatcatctcaggaaggcaggaggaagccaggacttggtcctggaaatcaataatgcaagccagacagaaagggggaaatggtcatgagaaggaagacaggggcatgaaaagcaaactaccaattccaccctcgtgccaagctt

SEQ ID NO: 434892 - DNA, 293 bp, Homo Sapiens
caattttagaatattttcatcactctgcaaataaaccatatacccattagcagtcatcccttatttcccccattccacacccccacccccagccttaggcaaccattaattgactcaggattaaacaagtttaatcaggattcttcatggatgtactttttagctaactacagtttttcacatggaaatggaacttacagtaaacacttaacgtaccacagaatttttttctggatttctggtcctgaagcatgaagtgtactagaaaaccaattcttctgcggtacttgtgg

SEQ ID NO: 434893 - DNA, 518 bp, Homo Sapiens
cttttccacagggttcttgagttgttgtgaacttattgtttagctagtagctagtttaaccaggattaaacaagtttaatcaggattcttcatggatgtactttttagctaactacagtttttcacatggaaatgaaacttacagtaaacacttaacgtaccacagaatttttttctggatttctggtcctgaagcatgaagtgtactagaaaccaattcttcctgcgctacttgtggaatctttcttactggatcataatcttactttactttatacaatagatgcttaatcagtgcctttaataggaagttagaaactcccaatccaatcaacaaggctttgattctacctcctaagtactacccagatcacagacaatccaaatatcagaactagggggctgggcagagaggacaaatcatctattagggagtgggacagaaagtggaaacattacaaaggagcaagtaggctcagaacagaggggagagtaatactgtccctgtgaaaagtagg

SEQ ID NO: 434894 - DNA, 250 bp, Homo Sapiens
  misc_feature (12)..(12): n is a, c, g, or t
ataacaataganacatgtgcccagcaataatccgccccttcctgtgtgcgcctgtggggtgcgtgcgcgcgcgtgtgtacctgtgtgggtgaaggggatagggcgaggctgtgcctgtgccccaggtcccagccctggcccttcccagactgtgatggccatcctggtcccagtgttagggtagcatgggattacagggccctgttttttccatatttaaagccaatttttattactcgttttgtccaaa

SEQ ID NO: 434895 - DNA, 324 bp, Homo Sapiens
  misc_feature (40)..(40): n is a, c, g, or t
atcaatgaaaactttctttaccactaagatgttgaatttnttgccataatgggaaagagaggcctttcgtgctttctcaatagggctaactaggttgattattgatgttccaaataggcactctgtctttgcccatagtccccattttacctccacagaatagaagaacaagaatggcttcaaacacatgctgggtaacctaaaggcaaaaataaacaccttatttactagtaactctctttcaacaaatttatttggtttggcagtatacattaaattgtattatgtatcttacataaagcatcccttcggattggtaaaagg

SEQ ID NO: 434896 - DNA, 427 bp, Homo Sapiens
  misc_feature (189)..(189): n is a, c, g, or t
atttcagtggccattaagaccctgaaagttggctacacagaaaagcagaggagagacttcctgggagaagcaagcattatgggacagtttgaccaccccaatatcattcgactggaaggagttgttaccaaaagtaagccagttatgattgtccacagaatacatggagaatggttccttggatagttntcctacgtaaacacgatgcccagtttactgtcattcagctagtggggatgcttcgagggatagcatctggcatgaagtacctgtcagacatgggctatgttcaccgagacctcgctgctcggaacatcttgatcaacagtaacttggtgtgtaaggtttctgatttcggactttcgcgtgtcctggaggatgacccagaagctgcttatacaacaagaggagggaagatcccaatcag

SEQ ID NO: 434897 - DNA, 2882 bp, Homo Sapiens
gagagtgaggatgatgcctccgataccaaccctgatttctacatcaatatttgtcagccactaaatcccatgcacggagtgccctgtcctgccggagccgctgtgtgcaaagttcctattgatggtccccccatagatatcggccgggtagcaggaccaccaagtactcaatccaatagcaaatgagatttacttgaattttgaaagcagtactccttgcttagcggacaagcatttcaactacacctcgctcatcgcgtttcactgtaagagaggtgtgagcatgggaacgcctaagctgttaaggaccagcgagtgcgactttgtgttcgaatgggagactcctgtcgtctgtcctgatgaagtgaggatggcatggctgtaccctgacagatgagcagctcctctacagcttcaacttgtccagcctttccacgagcacctttaaggtgactcgcgactcgcgcacctacagcgttggggctgtgcacctttgcagctcgggccagaacaaggaggctgtaaggaccggaggagtctgtctgctctcaggcaccaagggggccatcctttggacggctgcaatccactgaaactggattacacggcacccaggatgaagcggtcgttttaagtttacgtgaatggctgatcgttgccctccagaaaccgatgacggcgtcccctgtgtcttccccttcatattcaatgggaagagctacgaggagtgcatcatagagagcagggcgaagctgtggtgtagcacaactgcggactacgacagagaccacgagtggggcttctgcagacactcaaacagctaccggacatccagcatcatatttaagtgtgatgaagatgaggacattgggaggccacaagtcttcagtgaagtgcgtgggtgtgatgtgacatttgagtggaaaacaaaagttgtctgccctccaaagaagttggagtgcaaattcgtccagaaacacaaaacctacgacctgcggctgctctcctctctcaccgggtcctggtccctggtccacaacggagtctcgtactatataaatctgtgccagaaaatatataaagggcccctgggttgcttctgaaagggccagcatttgcagaaggaccacaactggttgacgtccaggtcctgggattcgtttcacacgcagaagctgggtgtcataggtgacaaagttgttgtcacgtactccaaaggttatccgtgtggtggaaataagaccgcatcctccgtgagtagaattgacctgtacaaagacggtgggcagacctgcattcaagaggtttgatatcgacagctgcgcttactacttcagctgggactcccgggctgcctgcgccgtgaagcctcaggaggtgcagatggtgaatgggaccatcaccaaccctataaatggcaagagcttcagcctcggagatatttattttaagctgttcagagcctctggggacatgaggaccaatggggacaactacctgtatgagatccaactttcctccatcacaagctccagaaacccggcgtgctctggagccaacatatgccaggtgaagcccaacgatcagcacttcagtcggaaagttggaacctctgacaagaccaagtactaccttcaagacggcgatcttgatgtcgtgtttgcctcttcctctaagtgcggaaaggataagaccaagtctgtttcttccaccatcttcttccactgtgaccctctggtggaggacgggatccccgagttcagtcacgagactgccgactgccagtacctcttctcttggtacacctcagccgtgtgtcctctgggggtgggctttgacagcgagaatcccggggacgacgggcagatgcacaaggggctgtcagaacggagccaggcagtcggcgcggtgctcagcctgctgctggtggcgctcacctgctgcctgctggccctgttgctctacaagaaggagaggagggaaacagtgataagtaagctgaccacttgctgtaggagaagttccaacgtgtcctacaaatactcaaaggtgaataaggaagaagagacagatgagaatgaaacagagtggctgatggaagagatccagctgcctcctccacggcagggaaaggaagggcaggagaacggccatattaccaccaagtcagtgaaagccctcagctccctgcatggggatgaccaggacagtgaggatgaggttctgaccatcccagaggtgaaagttcactcgggcaggggagctggggcagagagctcccacccagtgagaaacgcacagagcaatgcccttcaggagcgtgaggacgatagggtggggctggtcaggggtgagaaggcgaggaaagggaagtccagctctgcacagcagaagacagtgagctccaccaagctggtgtccttccatgacgacagcgacgaggacctcttacacatctgactccgcagtgcctgcaggggagcacggagccgcgggacagccaagcacctccaaccaaataagacttccactcgatgatgcttctataattttgccctttaacagaaactttcaaaagggaagagtttttgtgatgggggagagggtgaaggaggtcaggccccactccttcctgattgtttacagtcattggaataaggcatggctcagatcggccacagggcggtaccttgtgcccagggttttgccccaagtcctcatttaaaagcataaggccggacgcatctcaaaacagagggctgcattcgaagaaacccttgctgctttagtcccgatagggtatttgaccccgatatattttagcattttaattctctccccctatttattgactttgacaattactcaggtttgaaaaaaaa

SEQ ID NO: 434898 - DNA, 977 bp, Homo Sapiens
ggagcagatccgcaccttggcggcagagagacatgcacggctcaatgattcatacaggcttcaacgcttccttgctgacttccgtgacctcaccagctgggtgactgagatgaaagccctcatcaatgcagatgagcttgccagtgatgtggctggggctgaagccctgctagatagacaccaagagcacaagggtgaaattgatgcccatgaagacagcttcaaatctgcagatgaatctggacaggcactgcttgctgctggtcactatgcctcagatgaagtgagggagaagctgaccgtcctttccgaggagagagcggcgctgctggagctgtgggagctgcgcaggcagcagtacgagcagtgcatggacctgcagctcttctaccgggacactgagcaggtggacaactggatgagcaagcaggaggcgttcctgttgaatgaagacttgggagattccttggatagtgtggaagcgcttcttaagaagcacgaagactttgagaaatcccttagtgcccaggaggaaaagattacagcattagatgaatttgcaaccaagctaattcagaacaaccactatgcaatggaagatgtggccactcgccgagatgctctgttgagccgccgcaatgcccttcacgagagagccatgcgtcgccgggcccagctagccgattctttccatctgcagcagtttttccgtgattctgatgagctcaagagttgggtcaatgagaagatgaaaactgccacagatgaagcttataaagatccatcccagactaagaagacacaagttctgcttgccatcttgagaggctttccacaggccagaggctgcttcctaacactgacagggcgtgcggtagttaagtcagttttgaagtgagaagcttctggtttctaatatacagtattatcctgatactgcagtcttatgggcaggtgcatgggaaggaaggctttta

SEQ ID NO: 434899 - DNA, 997 bp, Homo Sapiens
  misc_feature (46)..(46): n is a, c, g, or t
  misc_feature (65)..(65): n is a, c, g, or t
  misc_feature (120)..(120): n is a, c, g, or t
ccttgtttggtgatctgaaaagacttcttactgcaaagtacaactncctgaagcatctcatgggnagacacatgtgccttgaaatttcgagggttccagagctttctcatcaggctctcncaaacgctggaccaacaagaaccatgatatcccctggaggacgtttgaagtttcttataatggtcttcttccagaaagtagttccggagaggaggaacattagatagagcctgaaggacagcgttggcataatcattggcctttatgttattcagtcccacaatacccggcaggtaagtggtaccatcatatgcccgggacaatttggcttgcttgtccaagtttgcaatttgctgctttgtgaaagtgggcttcaacacatacgtgatatcctccaatgaggaatcgatgatctcatagttgtctggaaggcagtaaaacttgagggtgtggaggttgaggaaaacatggtggctaaactggacactgtgaatgtaggcgtgagacttcaaaccccggccttgaaagtacttgccacacaccagacaggcataagcattgatgtgtgagagggagatagaacacagtttctcaaagtcaaagtccagcacactcctgttaatggtgtccaggtacgggcagtggcggctcctccggtcctcagaatccactcggccattctttgctcgcacctcccgctcaggctccgagtcctcatcgacctcgcgctcccgcttcacccgcacaaacgggacaacagaagccggggcctcgcgcgcgctcgccggctcgaactcccgcttcacgcgcacagggctgccccgggagctcgccgcctcaggctcccgctcccgatctcgctcccgcttgacgcgaccggagctgccccgcgactcagactctcgcttcccgcgagtggaaccgcgagactcccgcttagaccggccggacatctccactaccggccgagtcgatcccgggaattccggaccggtcc

SEQ ID NO: 434900 - DNA, 875 bp, Homo Sapiens
  misc_feature (788)..(824): n is a, c, g, or t
ccgtgaaggacagcgttggcataatcattgcctttatgttattcagtcccacaatacccggcaggtaagtggtaccatcatatgcccgggacaatttggcttgcttgtccaagtttgcaatttgctgctttgtgaaagtgggcttcgacacatacgtgatatcctccaatgaggaatcgatgatctcatagttgtctggaaggcagtaaaacttgagggtgtggaggttgaggaaaacatggtggctaaactggacactgtgaatgtaggcgtgagacttcaaaccccggcctgtagggaagggtgaaaagcttgaaagtacttgccacacaccagacaggcataagcattgatgtgtgagagggagatagaacacagtttctcaaagtcaaagtccagcacactcctgttaatggtgtccaggtacgggcagtggcggctcctccggtcctcagaatccactcggccattctttgctcccgctcaggctccgagtcctcatcgacctcgcgctcccgcttcacccgcacaaacgggacaacagaagccggggcctcgcgcgcgctcgccggctcgaactcccgcttcacgcgcacagggctgccccgggagctcgccgcctcaggctcccgctcccgatctcgctcccgcttgacgcgaccggagctgccccgcgactcagactctcgcttcccgcgagtggaaccgcgagactcccgcttagaccggccggacatctccactaccccgctctcgacgaattcgagctcggccgatttggcctgatnnnnnnnnnnnnnnnnnnnnnnnnnnnnnnnnnnnnncgccgccaccgcgtaagctccgagttcgccctatagtgagtctatcattcc

SEQ ID NO: 434901 - DNA, 449 bp, Homo Sapiens
ctacagtacccatctccattttcagagagctccgatggaaatttctatgaactaattctcctgcacatactttggtacaagtgggctactggagccaccttccttcgttcaatcaaacagcatttattcagcttatttaatgaacactatccaagatacttgggggacagaaatgaaaagatggggagacctgtcaaacatatggtactatgtctatgcaaaataacattggaatgtagattcacagtggaaggcagggcaggcatggaagaattctgaggaatgagtgtgacagctcctacctgtaacagctcttcaagctcctgcttggaagggggtcagtcagcaaatctactagctggctgcgggcaaaagtccgcccggctggaggaaagtgaattccgggatttacagagcaggtagagggcatgcggcccagccctcaagca

SEQ ID NO: 434902 - DNA, 616 bp, Homo Sapiens
  misc_feature (562)..(562): n is a, c, g, or t
ttttttttcttaggcatcttatccttgaagtttaatgcttttaaccccgttccacttcccgccagaagagtgtcctcctcccatccccacagcacaccatcttctgccttttcttctcagcacctggagctgttcctgcagcaactccaggaggtggtggtgaagcatgcagagccagcggtgcttgaggctggggcgcatgcctctacctgctctgtaatcccgaattcactttcttcagccgggcggactttgcccgcagccagctagtagatttgctgactgaccgcttccagcaggagcttgaagagctgttacaggtaggagctggggctggacaatgggacaccccaaacaagggtgggaggggctgcaagacgggggatgtggactgatgagttctgggggaaatgctattgtggatcttctttccttctcagtcgtccttcctagatgaggatgaggtatataatctggcagccactctgaaacgcctctctgccttctacaagtgagtggctttcctcctcttccccatcccgtttttactggtgtctgtggngtggttcctctgtctttccagtatacatccctttctcccaaagactcatagctg

SEQ ID NO: 434903 - DNA, 2003 bp, Homo Sapiens
ggttaaccccataaaagctgaaggccaaaggccagtttggggttccttggaaaagaatccctgccctacccatccttcagtggccctctgggccacaaagccacttatgatcactgccagaggtggagcaaggtaaaggactgtgtcagcagttcatgttgtgacagcagcagcatctgcagaaaacgcaggtcatataccttggcttacacaaggaatgctatgaaaaatgagccaccaggtgggagctttaacataggtaatgattagtgaaagcttcttagaaagtgagaatttgtaatttctttattaaacattacattcagtgtaaaggctttaaccatcataatcaccatgatataatatgtgagtatgtatatgtaaaaaaatacccattgaacataaaattatgttttgaaatctatgcaacatgaaatatagtttgatataaaaaacccaactaatcagaaacatgaaaaccagtatgttttaataaaagcctgttgctggttctggaataactgtggcatgcatgttcctagtcatgttggacttctccttcagctttgattggagtagtgtgtgttccacaatgccaattctaatgtccatctctacagtttcttgcttcagttttgttaagctctgtttaatcttcaccaaaggagcaccatcagtcatgctgctgcccttttcttccatttcttgttttaccttttctaattcttccataacctcagagaggagtctggttctttccgtcactcctccatttccctgctggtatcgctcctttgcctcactcagctgggcttgagctgcacgatattcttgaaccaaattctcaagctgattgttgatgtacttttctcggctgctgatcttttccaaagtcctagtaatttcattatggagtttgtccaaaaatcccttggtctcctttagagcagattcaattccacttctgtgctggtgcatttggtcaacatggattctccaatccttattgtcagtcctaatcgtgactttcagttgcggtagtacacgttccacttctaggctccattctgcagcatctgttgtggattccaaaatatcttcttgtttggcagtctcgttcatatccaagtgatatgtctgggcctttaaaacgttgagatcaataaagttttcttcattatctgtctcttcttccacaaattcttcatccactttatttaatgttaattctgcatcatcttctgcaacgctttcttcttctaattcttctactgggtatattggccttttccaggtgaaaccaatatatttcaatgcttcttcagcgaagcaatcaagaacatagcatacatgttctccataacctgactttaattttgaaggaggaaaatctgcagttcttccaaatgaccgaagctcggatagtatgttagatattgttgcattagggtcatcatattcttgaggctgctcaaagggacgtcccgctttattaatcaaccaagcagcaagagtacaaaacatgtagaactgttcgccagggttggtaggcagtgcaaaatagtgtctggacggggccttcaggttgctcttccggaggaactcctcctcgtagcggagcagcttcagcttctccaccaagtcctccatcaccacgaacatgtggtaggccgcgccgggcccccgctccaagaccacttccccggtcccttcgccacgggacctaggcaccccatcttccaaacccgacgtcgtgacgacggccagagcagcagtcatcgcagaacggacagagtccagcgtgggctcaggcccacagacctctgcggcctaagccgccagccctgccgccgccagtacagccacgaccggttaccaggcgaccaccggacaatccgtcaccagggaaactagactccgcctccttccctccaatcagggcggctttcccgaatgacgtcacctgtggccctcttcttgcccatcccgggaattccggaccc

SEQ ID NO: 434904 - DNA, 446 bp, Homo Sapiens
tctttcctcttactttccttccttccctcctttcatatgagagactctatatggaaaaggaagctgaagtggcctgcacacgatatagaaaagccatattactttcctaagactggtaatccggcaatacctaatgcagcacatggctagagactccacatttgcccaacttctctgctcatcatttgccactgttctgtaaatttcccagtcccctcacagaaagcacatggcaccatttaaaatggctgctcactctctaagggaggtctcacaggctggtagtgagccctgtcccaatagtgaagttctccacaaatggggagacttctcccaggaggaggggaggcctggagatgggcatgcagtgggcaatgtcagctgccctccaggttcttgcttgccctttttccgccctgggtcagtatacaagctttcgggggaca

SEQ ID NO: 434905 - DNA, 622 bp, Homo Sapiens
  misc_feature (360)..(372): n is a, c, g, or t
ttctgcgagatccatgctttatgaacacattattctcacacatccggggataggtttgatacacaagatccttaaagtcattttacatattctgaaaccaagttgttcaaaagatgaattctgaaaacatagttggtgtagcaaatgaatatatcaaaacaaagaaaaacttcatccaaatatttacattttaaaaagacatttaaaaaataggctacttattaagtgtgcttgaacaaaccatgtgtggaattgaattccattcattacggagttagtttctgctaaatacttactgatgctagagcagacccctggcatctgaggatttaagagttcaactgttctcaatctatgctnnnnnnnnnnnnntgacaaataataaattctacatttccgaggcactaatttgaacttcagaagtgggagggctgatatgtaaggcaagttatttaggaatgaggagggctgacagctgtaactcagtgtggttttgcaactgcctacgttagtaccaggtattccataaaactctgtagaggccatttacatttcgtaaattctgtaattacaccttactgtatcatgccctagtagtttcacaaacttagatattcacaaa

SEQ ID NO: 434906 - DNA, 363 bp, Homo Sapiens
  misc_feature (305)..(305): n is a, c, g, or t
  misc_feature (324)..(324): n is a, c, g, or t
ataggaggcataattgtcctgtttgaatactagataacccttttaatggatattctacaattatgaatctaaggtgctttggaggagcctaggcaatctattccaaaattaaatgtaaggaaggtacatgagtaagggatggagtaggccctggaccaacactagagctccaaatttcctaaaaagcttgagcttcttttactgtgggccacgcctataatggggataaatctggttcttcaaacagtccctcccctctctaagctctgctggggagtagagacatcagcaggctggttctgtgnttagctcctccccatcttngactctcatcccattccctctttcctactacccattcag

SEQ ID NO: 434907 - DNA, 296 bp, Homo Sapiens
  misc_feature (25)..(25): n is a, c, g, or t
gtacaaagtgcttttaaaactatanggagctatataaaaacagggtatcatatatatacatatatatgccccgctgtggtaaatttaactcactctagaattcatgtgtgcagataaaatgtaatttatttatttttctctaagtctaatctgggctccctctcaaactctcatatgacagttggcaggaaaaataaaatctaagtgaaactaaatgttcaattcactttagtttcattccaattgcataatttaagtccctttaggtggtactcagtgtctctgatttaaaaaat

SEQ ID NO: 434908 - DNA, 411 bp, Homo Sapiens
ctgtacccttataaagagtgaaagccctgcccccttctcctatagaacccctagcaaggagactggaagaatcaaaaacaatccacccaaaaaatggcctgcagggacacagtcccagagaaagagactatgtacaacaaggtacagtaagtaagacctgcccacacacaggacttccaatcgacttcttagtgcttactcctacagatgaacagatcaaccagggccaccagatgctccaggaaagacaggagtccaaaaagaaaattcggtaagttttgaatatattttgagcaaatttttcagttctgttgaagtattgggggggacattcaacagtgagtagtagtttagggggaacagctggcacctcttggcagtcgcctcagagggtcaaccagcgtgtaggat

SEQ ID NO: 434909 - DNA, 1870 bp, Homo Sapiens
  misc_feature (1483)..(1483): n is a, c, g, or t
aacccaacacacaacccgagggggtgagggcattaggctatagaaacgtcgtttaaaaagcaggcggtacccggtccggaattcccgggatatcgtcgaccacgcgtccgggatgggaggcagctcagcgtgtggctgaggctcacgaccctgacagtgtcgccgaggtgctgtgggacaggcccggggggcctggaggagaaggactttcagaaagcagaagggctgctgctccgggcccagagaccaggcctggccctcaattattataaggaggctggattatggagtgacgctctgcgcatctgcaaggactatgtgcccagccagctggaggctctgcaggaagaatatgagcgggaagctactaagaagggggccagggtgtggagggattgtggaacaagctcgacactgggagcaggctggagagtacagccgtgccgtggactgctacctcaaagtgcgagactcaggaaacagcggcctggcggagaagtgctggatgaaggcagctgaactctccatcaagtttctgcctccccaacgtaatatggaagtcgttctggctgtaggaccccagctgattggaattggaaagcacagtgcagctgcagagctctatctgaatctggaccttgtcaaggaagcaatcgatgctttcatcgagggtgaggagtggaacaaggcgaaggttgtagctaaggagttagatcccaggtatgaagactatgtggaccagcattataaagagttcctcaagaatcagggcaaagtggactcgctggtgggtgtggatgtgatagctgctttggacctgtatgtggagcagggccagtgggacaagtgcattgaaacagctaccaagcagaactacaagattctgcacaagtatgtggctttgtatgcaactcacttgatccgggagggtagctctgcccaggcattggccctgtatgtacagcacggagcccctgctaacccacagaacttcaatatctacaaaaggatcttcactgacatggtgagctctcctggaaccaactgtgccgaggcctatcatagctgggctgatcttcgagatgtcctcttcaacctgtgtgaaaacctggtgaagtccagtgaggcaaactctccagcccatgaggagttcaagacgatgctgctgatcgctcattactatgccacgcgctctgcagcccagagtgtcaaacagctggaaaccgtggctgccaggctttctgtttcactcttgcgtcacacccagctactacctgtagacaaagccttctatgaagcaggcattgctgccaaggcagttggctgggataacatggcattcatcttccctcaatcgctttttggacctgaccgatgccatcgaggaagggactctagatggccttgaccactctgattttcaggatacagacattccctttgaggtgccactcccagctaagcagcatgtaccggaggctgnagagagaagaggttcgagactgggtgcttacagtctccatggaccagcggctggagcaggttctgcctcgggatgagcgtggcgcctacgaggcctccctagtggcagcgagcactggtgttcgagccctgccctgccttattacaggataccccattctgaggaacaaaattgaatttaagcggccagggaaggctgctaacaaggacaactggaataaattccttatggccatcaagacctcccacagcccagtgtgccaggacgtgctgaaattcatcagtcagtggtgtggagggctccccagcaccagcttttcctttcagtagttggtagagctgaggaagagttagggcctctccctcattaaagttttataaataattg

SEQ ID NO: 434910 - DNA, 514 bp, Homo Sapiens
actgctagttgaaaagtgggaatgggaagagagcagtacctgcttggtagctgtttcaatgcacctgtcccactggccctgctccacatacaggtccaaagcagctatcacatccacccccaccagctgggtcaatggaagacagagttacaagagaaaagagatgacatgagggaaagaagagggagagagtcttgtgagtctctccctgcattctgcctcctgctaactctccaagtctcaccgagtccactttgccctgattcttgaggaactctttataatgctggtccacatagtcttcatacctgtgaagatgttcagagagctccatcttcatgttccagaataccaaccctcccggtaagactttctcccagtctttacaaaaggaagtaaaagagaatttcgcagtaagaaggggttacaagcttacctgggatctaactccttagctacacgcttcgccttgttccactcctcaccctcgatgaaagcatcgattgctacaatg

SEQ ID NO: 434911 - DNA, 384 bp, Homo Sapiens
  misc_feature (86)..(86): n is a, c, g, or t
  misc_feature (238)..(238): n is a, c, g, or t
ggtcttgccggagaagtacccccctccaaccgaacttttggacctgcagcccttgcccgtgtctgctctgagaaacagtgcctttnagagtctttaccaagataaatttcctttcttcaatcccatccagacccaggtgtttaacactgtatacaacagtgacgacaacgtgtttgtgggggcccccacgggcagcgggaagactatttgtgcagagtttgccatcctgcgaatgctngctgcagagctcggaggggcgctgtgtgtacatcacccccatggaggccctggcagagcaaggtatacatggactggtacgagaagttccaggacaggctcaacaagaaggtggtactcctggacaggcgagaccagcacagacct

SEQ ID NO: 434912 - DNA, 2104 bp, Homo Sapiens
  misc_feature (1872)..(1872): n is a, c, g, or t
  misc_feature (1889)..(2011): n is a, c, g, or t
  misc_feature (2025)..(2025): n is a, c, g, or t
  misc_feature (2034)..(2034): n is a, c, g, or t
  misc_feature (2053)..(2053): n is a, c, g, or t
tagtttccacagcaactctagcttggggtgtgaatctccctgcacatacagtcatcatcaaaggcacccaggtgtacagtccagagaaggggcgttggacagaactgggagcactggacattctgcagatgctgggacgtgccggaagaccccagtatgacaccaagggtgaaggcatactcatcacatctcatggggagctacagtactacctgtccctcctcaatcaacaacttcctattgaaagccagatggtttcaaagcttcctgacatgctcaatgcagaaatcgtgctaggaaatgtccagaatgccaaggatgcggtgaactggctgggctatgcctacctctatatccgaatgctgcgatccccaaccctctatggcatctctcatgatgacctcaagggagatcccctgctggaccagcgccgactagatctggttcatacagctgccctgatgctggacaagaacaatctggtcaagtacgacaagaagacgggcaacttccaggtgacagaactggggccgtatagccagccactactacatcaccaatgatacagtgcagacttacaaccagctgctgaagcccaccctgagtgagattgagcttttcagggtcttctcattgtcctctgagttcaagaacatcacagtgagagaggaggagaagctggagctgcagaagttgctggagagggtgcctatccctgtaaaggagagcattgaggaacccagtgctaagatcaacgttcttctgcaagccttcatctcacagctgaaattggagggctttgcactgatggctgacatggtgtatgtcacacagtcggctggccggttgatgcgagcgatatttgaaattgtcctgaaccgaggttgggcacagcttacagacaagaccctgaacctctgcaagatgatcgacaaacgcatgtggcagtccatgtgtcctctgcgccagttccggaaactccctgaggaagtagtgaagaagattgagaagaagaatttcccctttgagcgtctgtacgacctgaatcataatgagattggggagcttatccgcatgccaaagatggggaagaccatccacaaatatgtccatctgtttcccaagttggagttgtcagtgcacctgcagcctatcacacgctccaccctgaaggtggagctgaccatcacgccagacttccagtgggatgaaaaggtgcatggttcatccgaggctttttggattctggtggaggatgtggacagcgaggtgattctgcaccatgagtattttctcctcaaggccaagtacgcccaggacgagcacctcattacattcttcgtgcctgtctttgaaccgctgccccctcagtacttcatccgagtggtgtctgaccgctggctctcttgtgagacccagctgcctgtctccttccggcacctgatcttgccggagaagtacccccctccaaccgaacttttggacctgcagcccttgcccgtgtctgctctgagaaacagtgcctttgagagtctttaccaagataaatttcctttcttcaatcccatccagacccaggtgtttaacactgtatacaacagtgacgacaacgtgtttgtgggggcccccacgggcagcgggaagactatttgtgcagagtttgccatcctgcgaatgctgctgcagagctcggaggggcgctgtgtgtacatcacccccatggaggccctggcagagcaggtatgacgtggcgctgtgtcatgtgaatttcccaagaagcatttcttctgtgtttccgtatgaaggctttctaagccctgaaatttgcagggtcatttcctcagtttgtgtattaaagaaaagctgccccanccaagcgtggtgctcannnnnnnnnnnnnnnnnnnnnnnnnnnnnnnnnnnnnnnnnnnnnnnnnnnnnnnnnnnnnnnnnnnnnnnnnnnnnnnnnnnnnnnnnnnnnnnnnnnnnnnnnnnnnnnnnnnnnnnnnnncgtggtggtgtgcncctgtaatnccagctacttggaaggctnaggcagtagaatcgcttgaacccgggaggcggaggttgcagtgagccaagt

SEQ ID NO: 434913 - DNA, 900 bp, Homo Sapiens
  misc_feature (239)..(239): n is a, c, g, or t
ccggaaggaggcatttataagcctgcaggggcccatgtagaagggttccttattttccaggggcagggccagcgagaccagaagcccattgttcaggacgcagcccagattgccaaagagaggacagccccatgtagcgggaagaaattctggcggagaagcactgtacttggggtctttctctcgcagctggcggtagggatcgggacccctgtgggctgcctggtacctcccccacnccaggcctcgttctttctccacggtttgcagggcccacatgggagctgtggtgcggggttccagccagcgggcgttgacagtggccagcgtaaggctcaggaacagcaggtaaagctggctggcctcccagaatgtgagctgagcccaagcatgctgtgaagccaagatgcagaggttgatgaaggcacagcccatggagatgtggaagtagaaggggaagagtttgctctgcactagtccgaaggtatgtcggggaaggcttcggaaaagcaggaagcctgagacgaaggtcacccacatttgcatgccccaggcacctgacaagaccagtagatggaccatcttaatcaggcctcctaggttcccgccttcctccatcttgcagtcctgggaaggaggcaccgggtggctcagaactttacctttgcctcatgcgtggccttcagaccctgtgagcccgctcggggacagggttacggccaatccagcagagattcgttaggaaccgggacctcaatccgcagcacccggattccgagaacagaggcgtcggggccaaatgggctgaatctggtacctcactcccacgcccccgggtggacagcgaccctcctcggccgcgtcccctcgtgatcccgggaatccggaccggtccagcct

SEQ ID NO: 434914 - DNA, 1055 bp, Homo Sapiens
atcaggccaaatcggccgagctcgaattcgtcgagagcggcgtgacgcctctgttctcggaatccgggtgctgcggattgaggtcccggttcctaacggtgggatcggtgtcctcgggatgagatttggcgtttcctcggggcttggtgggatcggtgtcctcaggatgagatttagggtttcctcggggctttcgggatcttcacctaatatccggtattattttatgagaggagtggtcttggctgtcagaactggatccctggggtgatatttgggaattagtggagtgatctctgaagacctagggctatgatctggagctgctgtggctgaaatttggggcctctgaagtggcatggagattgaggtccagagagcctgagatcttgagggctgacatttggagagatggggtcgagggttgtctttgggccttgactgctttgggcctttctcactctcattcccgggatgctttgccagaatctctgctggattggccgtaaccctgtccccgagcgggctcacagggtctgaaggccacgcatgaggcaaaggtaaagttctgagccacccggtgcctccttcccaggactgcaagatggaggaaggcgggaacctaggaggcctgattaagatggtccatctactggtcttgtcaggtgcctggggcatgcaaatgtgggtgaccttcgtctcaggtagggaccctcagcttggatgtcatgggtacctggggtggggatggaaataagaggggaaccgggaagtgccctaacacccctgtggtcccccataccctgcaaggcttcctgcttttccgaagcctttcccgacataccttcggactagtgcagagcaaactctttcccttctacttccacatctccatgggctgtgccttcatcaacctctgcatcttggcttcacaagcatgcttgggctcagctcacattctgggaggccaaggcagctttaccttgctgttcctggagccttacgctggccaactgtccacgcccgtggctggaacccgaccaagttgccatgtg

SEQ ID NO: 434915 - DNA, 845 bp, Homo Sapiens
ttgggtccttctctcgcacttgcggtaggattcgggaccctggtggctgcctggtacctccccacccagcctcgctccttctccacggtttgcagggcccacatggcagctgtggtgcggggtttcccagccagcggggcgttgacagtggccagcgtaaggctcaggaacagcaggtaaagctggctggcctcccagaatgtgagctgagcccaagcatgctgtgaagccaagatgcagaggttgatgaaggcacagcccatggagatgtggaagtagaaggggaagagtttgctctgcactagtccgaaggtatgtcgggggaaggcttcggaaaagcaggaagcctgagacgaaggtcacccacatttgcatgccccaggcacctgacaagaccagtagatggaccatcttaatcaggcctcctaggttcccgccttcctccatcttgcagtcctgggaaggaggcaccgggtggctcagaactttacctttgcctcatgcgtggccttcagaccctgtgagcccgctcggggacagggttacggccaatccagcagagattcggatattaggtgaagatcccgaaagccccgaggaaaccctaaatctcatcctgaggacaccgatcccaccaaagccccgaggaaacgccaaatctcatcccgaggacaccgatcccaccgttaggaaccgggacctcaatccgcagcacccggattccgagaacagaggcgtcggggccaaatgggctgaatctggtacctcactcccacgcccccgggtggacagcgaccctcctcggccgcgtcccctcgtgggtttcccccaaccaataatccgct

SEQ ID NO: 434916 - DNA, 956 bp, Homo Sapiens
acggtaccgggtttcgcattttgcgccccctttgggtgccccgagtgtgccccttgtgcacaaccttggtctgggacctcttgtgcccctggccactgtcggtgccgctgtgttgcccccctctcttggtttccccccgtttttgcgttgttgttcgttcttttttctgaagaagcatttattagcatgcagggcccatgctagaggctccttatttccagggcaaggccagcgagacagagcccattgctcaggacgcagcccagattgcaaagagaggacagcccatggtagcggaagaaattctggcggagagcactgtacttggggtccttctctcgcagctggcggtagggatcgggaccctggtggctgcctggtacctccccacccaggcctcgctccttctccacggtttgcagggcccacatggcagctgtggtgcggggttccagccagcgggcgttgacagtggccagcgtaaggctcaggaacagcaggtaaagctggctggcctcccagaatgtgagctgagcccaagcatgctgtgaagccaagatgcagaggttgatgaaggcacagcccatggagatgtggaagtagaaggggaagagtttgctctgcactagtccgaaggtatgtcggggaaggcttcggaaaagcaggaagcctgagacgaaggtcacccacatttgcatgccccaggcacctgacaagaccagtagatggaccatcttaatcaggcctcctaggttcccgccttcctccatcttgcagtccgttaggaaccgggacctcaatccgcagcacccggattccgagaacagaggcgtcggggccaaatgggctgaatctggtacctcactcccacgcccccgggtggacagcgaccctcctcggccgcgtcccctcgtgggtttcccccaaccaataattcgtcccgcctcccagccccc

SEQ ID NO: 434917 - DNA, 781 bp, Homo Sapiens
ccccggtgcaagagggcgccatgtacgaagaatttgccgggaccacggatgggcctctctcgcactgccgtaggatcggacctggtgcctgcctggtacctcccaccagccctcgctccttctccacggtttgcagggcccacatggcagctgtggtgcgggggttccagccaagcgggcgttgacagtggccagcgtaaggctcaggaacagcaggtaaagctggctggcctcccagaatgtgagctgagcccaagcatgctgtgaagccaagatgcagaggttgatgaaggcacagcccatggagatgtggaagtagaaggggaagagtttgctctgcactagtccgaaggtatgtcggggaaggcttcggaaaagcaggaagcctgagacgaaggtcacccacatttgcatgccccaggcacctgacaagaccagtagatggaccatcttaatcaggcctcctaggttcccgccttcctccatcttgcagtcctgggaaggaggcaccgggtggctcagaactttacctttgcctcatgcgtggccttcagaccctgtgagcccgctcggggacagggttacggccaatccagcagagattcgttaggaaccgggacctcaatccgcagcacccggattccgagaacagaggcgtcggggccaaatgggctgaatctggtacctcactcccacgcccccgggtggacagcgaccctcctcggcctcgtgccgaattcaacacccagcctcgtacctagccagaagttcgtgcccgctt

SEQ ID NO: 434918 - DNA, 3588 bp, Homo Sapiens
ttggggtcacactggtttattgggggccctggcgggccaagagctcttcagtgcataggcagacatgcatgtggggcagtgctaggaactggggtaggccttgggcaggggtcactggcaggtgttgtagatctgcacctgcaagttgatggcttgaagcacgctgcgcatcctggcctccaacccgtccaactgggctgccttactctccagtgcccgctcattttcctcataggtgccttccaattctaggaagggcaggtgtcagtttagggggggtttcccgcagtcttgtgtctctggtgccccatttcttaccctgtagccgctgcagcttgtcctgacggcttgcaacaggtcccgagcctcatcccgcagttgttctgcccttgcctgtgcagccagcacaccttgggccttgcgctcagctagggccttcaccgtctggtactgatcacccagaggaccgcgtagcagctgctcagcctcctgggcacgaccctgggcactgcctgccgtttcttctgctgtagaggctgccagactatttcctgcccgtttcaatttcagagcctccaggagagcatccaactgccgagccctttcacctgcagagctcagtgcccgctctgcacctgccatcctctcctggtacagggtctgctctgtgtcccgtgtgtcagccactgccccccggatggcaccctgggcaataccctgtgcccgctgggcctcctccagtgctgcctgtactgtctctgccttctgtttctcatcctcagcccagctccttgcccgccgtgcatcctgcagtagctgctcggcacgacgcacatctcctacagtacgtgccaggatcgcatccacatctgccaggctccggactcgctctgcaatcgcacccgccaggtgctggatctgctcagctgaagctgggatggagagctctagcacccgtgtggccaccatttcaatgctatcaggatcagccccctcctctatagggacacagcaagaacttaagaacatagattctccagcatgggcatgaggatacagttttggggtatggactcaggacatgtacatgggataggggtttgttaccaggcataaggatataatcacaaggacagggactatacaaggggctcagactcaagaacatggacctgggaccacatatgggcaataactcaggagccagtcaagggatcataaacactaatccagtgtagtccctgaggctcaagtatgaaccaagggagatacagacaccgggagttgccaaaggggacaaccacatggcctgggacacgtgggaggctcacggttgaggaagtccttcacactctggataagttcttgaagttcctggttggcctgttccacctgtcccctggaagcattagccttgtccagggctgcctgggcccgctgctgtgcctcgcttgcctgccgacgagtctcagccactctgctgaggatgctaccaccttctgccagtgcccgctgcagctctgcctgtgtgtgccgggcccggcccagtgctaggtctgctgtagccgctgccccattgcagctgaggcccccacagcgcggctgcccatcctcatctcgacagccggcacccccacaagggcttgtagcacagggtgcatcccctggtgccccacacaccagctcatttatgtctgtcaggctcagggtgtgggtatgggcagagagcttgccaagtgcccgctggttggccatgtgtttgctgttgaagtcctccttctgagcatccatcagtgcctctgtccgatgccgagcacttgccgagttgctcacagggctaggtactgccagggctgaggtattggcacgacgttctgcctctgcagactggctatgggcatgccggatgctgtcataggcacccaggaagtttgaatgtttgagcaagtcaagatgctggtcgagctgccgcagtgtgagattaagtgcaagcctatctcgctccagaccacttagtgcatggttggcattgaagttctcatcttgcacatctgtcaggtctgcctcgagctgagtcaggtgctcagtggcctccccaatttcacgccgcagctcctctgtggcctccacaagctgtgcagtggaggcggctgaggtgttgcgggcacctacgatgccctgcacaatgcccagcttctcctgcatgtgccagaagctgctctcaaaggcacccagcacacccgtctgttgcaactcctgcgcccgctgctctaggcgctgtgtacgggctgccaagtcctgcaccactcggtcccaatccccgaagcatgcatggcagggatggcaggcaggaaagattcctgagaagccacgggcacactggtcacagcgcacaccagacacccctgggcggcagctgcagtgacctgtgaagcggtgacactgaggtgtatctattccacgagagtcacaatcacaggcatggcactgcaacccagggtctccccagtggagctcttggcactcagaacaagtccgccctccaaagccggcacggcagtggcactgccctgtgaactcgttgcaggtggggcctctggcccggcttgggtggcaggcacaaggctggcaaccatggccactggtgaggttccagaagttgggggcacagcggtcacagctagggccctggacattggggaggcatgggcactgcccactgcttggatcacagtggcactggtcaggagaatgggcactgctgcggatttgtgcccagcaggttgcatgtgcagcggtgacagctctgtcgggcagcctgcccatggaagccaggcttgcagtgggcacagtgtggaccctctgtgtggtgtaaacagcgcaggcattgccccgtgtgggggtcacaggcatcaggatccattgggtcaatgttcccactgcactcacacagttggcaccggccacctggccttgatgggtccccaaagtgcccaggggcacaagcttcacatcgcagccccgtatagcctgcccggcagtggcacacaatctgctgggaatattcatcctggtggcaagaagtagcaaagtgccgttggctcccagggccttcaggacagggacagggccggcactggcccccatatggcagccgtgggtccccgtggaaaccagcaatgcacctttcacagtgctcaccccctgtgtgatcacggcagcccaggcaagcgcctgtgtgggtgttgcactcatctgcatgcccattgcagacacatggccggcagctagggaatccccactggccacgctggcagcggtcacagcgaagcccaaaggcaccagttcgacagagacattgcccactggtcttttcacagagactgctgagtgccccctcgtggctgcactggcaggcttgacagcctgtggggccaaagccatagtagccaggggcacagaggtcacagcggcgcccaaccactccaggcttgcacaggcactgaccaccatgagggttgcactcagaactcagtgaaccttgaggtgcactgacatgtatgtggggaggaggttgccaatcagtac

SEQ ID NO: 434919 - DNA, 678 bp, Homo Sapiens
  misc_feature (612)..(612): n is a, c, g, or t
  misc_feature (624)..(624): n is a, c, g, or t
tttgggggttcacactggtttattgggggccctgccgggccaagagctcttcagtgcataggcagacatgcatgtggggcagtgctaggaactggggtaggccttgggcaggggtcactggcaggtgttgtagatctgcacctgcaagttgatggcttgaagcacgctgcgcatcctggcctccaacccgtccaactgggctgccttactctccagtgcccgctcattttcctcataggtgccttccaattcctgtagccgctgcagcttgtcctgagcggcttgcaacaggtcccgagcctcatcccgcagttgttctgcccttgcctgtgcagccagcacaccttgggccttgcgctcagctagggccttcaccgtctggtactgatcacccagaggaccgcgtagcagctgctcagcctcctgggcacgaccctgggcactgcctgccgtttcttctgctgtagaggctgccagactatttcctgcccgtttcaatttcagagcctccaggagagcatccaactgccgagccctttcacctgcagagctcagtgcccgctctgcacctgccatcctctcctgtacctggtacagggtctgctctgtgtnccgtgtgtcagncactggcccccggatgggaccctggcaataccctgtgcccgctgggcctccttc

SEQ ID NO: 434920 - DNA, 628 bp, Homo Sapiens
gacaggggaagtcccagctttggactcctacttctggacgtggcctgctcattgactctctggtgctgctgccccgtgtcctggtgctagatatttttagtggggatatattcttctgccgtggagcgccagcccacctttgaacgctaccaatgccatgaggagggtctggtgcccagcaagacttctccctctgaggcctgcgcacccctcctcatcagcctgtccaccctcatctacaatggtgccctgccatgtcagtgcaaccctcaaggttcactgagttctggagtgcaaccctcatggtggtcagtgcctgtgcaagcctggagtggtatgggcgccgctgtgacctctgtgcccctggctactatggctttggccccacaggctgtcaaggtactcttctgccccttgttccctcctatgcttctctctccttcccattactgttctctctcctccttctggacctgctgctggtttcctcaaactaagtcttggaccctctactctcaacctgggtcagttgtagttctcttccatttcctgaccttcccacctagactcccactactcacactccctatgagaccctcccccacccggacctcaattaaggatcctg

SEQ ID NO: 434921 - DNA, 1174 bp, Homo Sapiens
  misc_feature (270)..(270): n is a, c, g, or t
  misc_feature (1032)..(1032): n is a, c, g, or t
  misc_feature (1084)..(1084): n is a, c, g, or t
  misc_feature (1094)..(1094): n is a, c, g, or t
  misc_feature (1097)..(1097): n is a, c, g, or t
  misc_feature (1110)..(1110): n is a, c, g, or t
  misc_feature (1113)..(1114): n is a, c, g, or t
  misc_feature (1116)..(1117): n is a, c, g, or t
  misc_feature (1120)..(1123): n is a, c, g, or t
  misc_feature (1125)..(1125): n is a, c, g, or t
  misc_feature (1128)..(1128): n is a, c, g, or t
  misc_feature (1130)..(1130): n is a, c, g, or t
  misc_feature (1146)..(1146): n is a, c, g, or t
  misc_feature (1148)..(1148): n is a, c, g, or t
  misc_feature (1155)..(1155): n is a, c, g, or t
  misc_feature (1160)..(1160): n is a, c, g, or t
  misc_feature (1169)..(1169): n is a, c, g, or t
gcaggaccacaaaatggaactttattcagtcacagacactgaccctccaatagccccagaagcaagagcctagggcccagcaatccatacccagtccttggagttgggcagggtaggacgctggccaagggccagtgctgtctcttgcttacagcctgaggactacgggagcagcagctgtggcctggccgctcccaatgctgggggcttggcttggtgccccatccccttcctgactgagctctatgaaggactcttaaaaaaataaantaaaatgcaagcaaagtgctttgaaagaagggaggacaccctattcctgctaaggggtagaggaagaaggtgaaggcggctaggtgcccataagagaaggctggcacaatcttcattcccgccagtgtgatttcagtctcaaaagatgagtatttggctgagaaatggaaggatactccaggctccctacggagttgtgctggggccatgctgagctgcccttgcaggcagccctgggtgctgggggcagacatgcaggacactgggaagagtcagaaccacaggtgggagggaatctcagagcccaggctccccactgagcttggccagcagctttgaactccttcagaggaccctaaaagtgaaggaagatgacatcctcatttctacctgagttgtgctcgcacgggagggacatctgtactcctgtggatgagaaggggaggccgcatacttgcctcctgtgtcctatggaggagatttccatcacatcctttccacccctccctccccggcccttgggcccagctctggccaggaaaagtggggaggccataaaggagaaagaccatgcctttcattttcttcctatgtccttatcgtccatacatcccaaatactaggaagctgaagaagacggtgactcccaccagggagacagtggcaggtgctgtgaagaattggcggtaattgattcggaagtaccagaccacacccaacagcaccacaaagacaggcaccatgaggctgcccacattgacnaccaaggctgggtggctcagtggccgagggggccaaggaggctgaggggctngaaaactganccngggggtgagcggnggnntnnatnnnnanttntnggtattttaaaaaagntnggcgggngggtntttagcagnggccc

SEQ ID NO: 434922 - DNA, 1078 bp, Homo Sapiens
  misc_feature (1013)..(1013): n is a, c, g, or t
  misc_feature (1027)..(1027): n is a, c, g, or t
  misc_feature (1032)..(1032): n is a, c, g, or t
  misc_feature (1044)..(1044): n is a, c, g, or t
  misc_feature (1047)..(1048): n is a, c, g, or t
  misc_feature (1053)..(1054): n is a, c, g, or t
  misc_feature (1076)..(1076): n is a, c, g, or t
agcggcggaagagaccggaccctgaacagaatcgcagattgccagcccttttcccgacccctacggaaagacgagtccaggggccgtcctggcgaggtcaaaacatttagtctggtcttttcagtgtgccaggcactgtgccaagtattttgcttcgatgatttcacgtcatcttcaaaacaacctcatgagcgtggaccctgccagcagccaggccatggagctctctgatgtcaccctcattgagggtgtgggtaatgaggtgatggtggtggcaggtgtggtggtgctgattctagccttggtcctagcttggctctctacctacgtagcagacagcggtagcaaccagctcctgggcgctattgtgtcagcaggcgacacatccgtcctccacctggggcatgtggaccacctggtggcaggccaaggcaaccccgagccaactgaactcccccatccatcagagggtaatgatgagaaggctgaagaggcgggtgaaggtcggggagactccactggggaggctggagctgggggtggtgttgagcccagccttgagcatctccttgacatccaaggcctgcccaaaagacaagcaggtgcaggcagcagcagtccagaggcccccctgagatctgaggatagcacctgcctccctcccagccctggcctcatcactgtgcggctcaaattcctcaatgataccgaggagctggctgtggctaggccagaggataccgtgggtgccctgaagagcaaatacttccctggacaagaaagccagatgaaactgatctaccagggccgcctgctacaagacccagcccgcacactgcgttctctgaacattaccgacaactgtgtgattcactgccaccgctcacccccagggtcagctgttccaggtccctcagcctccttggcccccttcggccactgagccacccagccttggtggtcaatgtgggcagcctcatggtgcctgtctttgtggtgctgttgggtgtggntggtacttcgaatnaatancgccaatcttcnaannctgcnntgtctccctgggggggtaccgnct

SEQ ID NO: 434923 - DNA, 1391 bp, Homo Sapiens
  misc_feature (16)..(16): n is a, c, g, or t
  misc_feature (25)..(25): n is a, c, g, or t
  misc_feature (35)..(35): n is a, c, g, or t
  misc_feature (1272)..(1272): n is a, c, g, or t
tgcccccgggaaaaantggggaagncccaataaanggaagaaaagacccatgccctttccattttccttccctatgtccctttatccgtcccattcattccccaaattactaggaagctgaaagaagacggtggactcccaccggggagacagtggcaggtgctggaaagaattggcggtaattgattcggaagtaccagaccacacccaacagcaccacaaagacaggcaccatgaggctgcccacattgacaccaaggctgggtggctcagtggccgagggggccaaggaggctgaggggcctggaacagctgaccctgggggtgagcggtggcagtgaatcacacagttgtcggtaatgttcagagaacgcagtgtgcgggctgggtcttgtagcaggcggccctggtagatcagtttcatctggctttcttgtccagggaagtatttgcctctgatggatgggggagttcagttggctcggggttgccttggcctgccaccaggtggtccacatgccccaggtggaggacggatgtgtcgcctgctgacacaatagcgcccaggagctggttgctaccgctgtctgctacgtaggtagagagccaagctaggaccaaggctagaatcagcaccaccacacctgccaccaccatcacctcattacccacaccctcaatgagggtgacatcagagagctccatggcctggctgctggcagggtccacgctgcaggaacaaagggggacagcatcagcagagcctgaggggttgcaaccaggtctctagtttgtttaggttctaactgacccagccctgtccatctttctattagactcctggtagacaaggatcgtatgtatttctcttggtactgaagtgtccaatataatgccccagtagttgctcaaagaattatctcatgaggttgttttgaagatgacgtgaaatcatcgaagcaaaatacttggcacagtgcctggcacactgcaaattgcaattgcttaataacggtagtaattatttatcacaaccacaactaacccctgatggtaagaaggttaatgtcattaaccatgatttacaggaaaagaaactgcggcaaagaaagacgaaaacgattggcacagacacagggaactctcgtggggaggggcccggcaggacctccaggtgtccggcctcaggggtctttgctctgtccctcagcctgtgatctaccctgtccgtaccgtgaccgcacggtgaggaggggtcccgcaccctttttntgaggcgaaggttccgcttttggatggtcctattccctcggcgttggactggggtccatgggcccacccgaaccgaagggctgcctggccccagcctccgtgataagaccagatcccgg

SEQ ID NO: 434924 - DNA, 1058 bp, Homo Sapiens
  misc_feature (333)..(333): n is a, c, g, or t
tgggcaaactcctggtatttttcaaggagatttctctatgttagggtttaaacacaccccccccgagtttccagcttccccaggtagaatttccccgggcctttcagcggcttttttaagcctttatcatccattacccttttgatggatgggggaagtccagtggcttggggggttgccttggcttgcccccaggtggtcccccatcccccagggtgaggacggatgtgtcccctgctgacacaatagccccaggaaggtggttgctaccgctgtttgttaggtaggtagagagccaagctaggcccaaggctagaatcagcaccaccacancttgcccccaccatcacctcattacccacaccctcaatgagggtgacatcagagagctccatggcctggctgctggcagggtccacgctgcaggaacaaagggggacagcatcagcagagcctgaggggttgcaaccaggtctctagtttgtttaggttctaactgacccagccctcatgaggttgttttgaagatgacgtgaaatcatcgaagcaaaatacttggcacagtgcctggcacactgcaaattgcaattgcttaataacggtagtaattatttatcacaaccacaactaacccctgatggtaagaaggttaatgtcattaaccatgatttacaggaaaagaaactgcggcaaagaaagacgaaaacgattggcacagacacagggaactctcgtggggaggggcccggcaggaccccaggtgtccggcctcaggggtctttgctctgtccctcagcctgtgatctaccctgtccgtaccgtgaccgcacggtgaggaggggtcccgcaccctttttctgaggcgaaggttccgcttttggatggtcctattccctcggcgttggactggggtccatgggcccacccgaaccgaagggctgcctggccccagcctccgtgataagaccagttgtcccggccagtgaggagtagggtcggctaagggggtcacaaaccgtccacacccctcaaacttcgatcccgggaattccggaccg

SEQ ID NO: 434925 - DNA, 615 bp, Homo Sapiens
  misc_feature (48)..(48): n is a, c, g, or t
  misc_feature (106)..(106): n is a, c, g, or t
caaccctaattttaatcctggccctgggggtaaatggttatttaaccngtgaccaatttaaaaatacctgaaacaatgggaagacaaaaagttggacaaattccancctggaacccccattccacccctcataaagtttttcctcttaacatacagaaaagtcatatttttcagcaatcttcaactttctattttgaggagtaggattattgcttttttgcccacacatgcttacagaagctgcgttacagatttccaatttgatttcatgttctgagaagcatctacacaagtctcaatgctattttttaagaaaacataggaaacagaaaacaagaacttatagaattcaggttgtcctggccgcaagctattcaacactgctactcacttccattgtatctttggaaagataaactacccagtacacaaggttgaatcctgcaaatgcaactgggaagagaattcgagaatactggtctattttactggtgcctccaaaggctggcgagagtggtgggggtgtgacaggtgttgattgtaagatgggcgctctcgtgagcactttattggcctcggaagatgaaactattggcaaagacagagaagtgatcc

SEQ ID NO: 434926 - DNA, 1374 bp, Homo Sapiens
  misc_feature (304)..(361): n is a, c, g, or t
  misc_feature (1301)..(1301): n is a, c, g, or t
  misc_feature (1317)..(1317): n is a, c, g, or t
ttttgtaaatgggttgtgttggggagagggattaaagggagggaattctacatttctctatgtatgtataactggatatattttaaatggaggcatgctgcaattctcattcacacataaaaaaatcacatcacaaaagggaagagtttacttcttgtttcaggatgtttttagatttttgaggtgcttaaatagctattcgtatttttaaggtgtctcatccagaaaaaatttaatgtgcctgtaaatgttccatagaatcacaagcattaaagagttgttttatttttacataacccattannnnnnnnnnnnnnnnnnnnnnnnnnnnnnnnnnnnnnnnnnnnnnnnnnnnnnnnnncacacatgcacacacagagatatacacataccattacattgtcattcacagtcccagcagcatgactatcacatttttgataagtgtcctttggcataaaataaaaatatcctatcagtcctttctaagaagcctgaattgaccaaaaaacatccccaccaccactttataaagttgattctgctttatcctgcagtattgtttagccatcttctgctcttggtaaggttgacatagtatatgtcaatttaaaaaataaaagtctgctttgtaaatagtaattttacccagtggtgcatgtttgagcaaacaaaaatgatgatttaagcacactacttattgcatcaaatatgtaccacagtaagtatagtttgcaagctttcaacaggtaatatgatgtaattggttccattatagtttgaagctgtcactgctgcatgtttatcttgcctatgctgctgtatcttattccttccactgttcagaagtctaatatgggaagccatatatcagtggtaaagtgaagcaaattgttctaccaagacctcattcttcatgtcattaagcaataggttgcagcaaacaaggaagagcttcttgctttttattcttccaaccttaattgaacactcaatgatgaaaagcccgactgtacaaacatgttgcaagctgcttaaatctgtttaaaatatatggttagagttttctaagaaaatataaatactgtaaaaagttcattttattttatttttcagccttttgtacgtaaaatgagaaattaaaagtatcttcaggtggatgtcacagtcactattgttagtttctgttcctagcacttttaaattgaagcacttcacaaaataagaagcaaggactaggatgcagtataggtttctgcttttttattagtactgtaaacttgcacacatttcaatgtganacaaatctcaaactgngttcaatgtttatttgctttcaatagtaatgccttatcattgaaagaggcttaaagg

SEQ ID NO: 434927 - DNA, 719 bp, Homo Sapiens
  misc_feature (310)..(383): n is a, c, g, or t
  misc_feature (388)..(388): n is a, c, g, or t
tttgtaatgggttgtgttggggagagggattaaagggagggaattctacattctctatgtatgtataactggatatatttaaatggaggcatgctgcaattctcattcacacataaaaaaatcacatcacaaaagggaagagtttacttcttgtttcaggatgtttttagatttttgaggtgcttaaatagctattcgtatttttaaggtgtctcatccagaaaaaatttaatgtgcctgtaaatgttccatagaatcacaagcattaaagagttgttttatttttacataacccattaaatgtacatgnnnnnnnnnnnnnnnnnnnnnnnnnnnnnnnnnnnnnnnnnnnnnnnnnnnnnnnnnnnnnnnnnnnnnnnnnncatanccattacattgtcattcacagtcccagcagcatgactatcacatttttgataagtgtcctttggcataaaataaaaatatcctatcagtcctttctaagaagcctgaattgaccaaaaaacatccccaccaccactttataaagttgattctgctttatcctgcagtattgtttagccatcttctgctcttggtcaaggttgacatagtatatgtcaatttacaaaataaaagtctgctttgtaaatagtaattttacccagtggtgcatgtttgagcaaacaaaaatgattgacttaagcacactacttattgcatcacatatgtaccag

SEQ ID NO: 434928 - DNA, 1035 bp, Homo Sapiens
ctcctctctcagtcagtatccttcaggaatgatagtcagattccatatcttcaatacaagtttcagctgctggtacccattcgttcagcatctttgggagaagctgctttatatcttgatatagtacgttttatcaggagcagagattgtcagaggcagccatctttcttgtccatgcctgttcttagagtgttattcattctgacactgtagccatctattgcaaattcacctttctgttgtttgtctttatcacttccataataatagaataccgttttactgagagcacaccaccgtttctgccattcaaatcccagaaagctgtgatcttttctgcgtttttcaaggtagccagcctttagaacaaaaggaaggtcttgtgctgcaattggaggaaactgggctccatcagagggggcttcatcgtctttatcatatcgttctgaggctaatgaaatagtgtctggaggcccagcaaaagggtcatcatattcttccccatcttctgcatcacctttgtcttgaaattcctgaagatagatagactttacatcttttatcttcttaataagggattctctcttttcctttgctttcttggataaattttctcctttcagtatatctgctacaaatgtttcaacatctgccaacaggttcctaatttcctcagggagggggtagggagaggaggtgctgctggggttgggcatgttagggagcgcagggcgtgcggggaaaggacctgcgctgaaaaggtgaccgacggggtggggctgcggctgcgacctagactcaggctagcggcccggattaagaacagcggggctacgagtcgggacactgccgggccggggctcacaacaaggaagtcactgaatctccagcgagctgcagctggactgtcggcccagccccgcccagagggccggggcggggagatgggtgggaagggacacgaagggcctgaggggtccaactgcgcatgtgtattcctcggttttcccggccccagaagaaagagcctccgct

SEQ ID NO: 434929 - DNA, 623 bp, Homo Sapiens
  misc_feature (266)..(266): n is a, c, g, or t
  misc_feature (271)..(271): n is a, c, g, or t
  misc_feature (286)..(286): n is a, c, g, or t
ctagaaataagaaaggtttatttagcaaaagccactagactagtgacaacatccagggagtaagtgcacttacattaacagaatcttttcccagagagttgatccaacagagttaatgacacaacagctttaggaagtagagtgctagtgggtagagggttaggaggaagcagtcaagcaaagagtaaataaaaggaatacaacgcctaaacaagatcagttgagagaaatgaggctaggaagaggttttacagagagagcattgntatangcaggattataaggnatataatttttaatctcaaatatacagtccatccagtgcagagaaattcttttcctggctccataactgtgggagcctcctgtgcacgagagtctgctggcacctggggtaggctggggcaggcaccaataaggttagcacccctggtgtccatttgtcctccatatagggcagagtagaagaatgaaaaagaggaaggcagagttgagttagcagagcaagaagcaaggagggaggacagggtgacatcgtcgggaaatcaggtctgcaatgttccctttcctgcccagttggccctgatggagggtcggtggctggtgatccttcaaggctccta

SEQ ID NO: 434930 - DNA, 1279 bp, Homo Sapiens
  misc_feature (556)..(556): n is a, c, g, or t
tttactgtttgagatgtttatttctagtttttagtgttaaaccccagctccatatttattccttaagtgtttcccctcaccctgggaagaagcttgttgtcgtttttgattgtcctctgccagcagatctgcacgagatgtgtttcttcagtctttcccacttgtgagacaaatctccattaaagtctcaacaaatgcaactgtcccttgtagagtaagcaagcctaagagtgctgcttctctgccctggccctggctggtcagagtactaggagttcttggatttccgctcttttctggccctggaggccatgaggctgaagaagagcccaggagccagagttcgaagataaacagccaagggaaggcagtaagtcagccaggatcacatctttcttcttcttccccacagcagcaagaacatcctgggccacctccacaggggcttcggccctgggctgtggtggtgtccataactccatacctagatccatccgcggtgatggcatttacagagaggttggtgtggatgtagccggggctgatgacggtcacntcaatttcatactgttccatctcggcacgcagacagtcaaagaaagcttgggttgcgtgcttggaggctgcatatgctgatcgaaaaggaatgctcatcttgccctggatgctgctgatggcgacaatgtggccttgcctcctcttgatcatggagggcaggagtgctttcgttagagcaactgggccaaagtagtttgtctccatgaccctcttgtccacatccactgtggtgtccatgatggtaccacggtagctgatcccagcattgttgacaagtatgtcgacatagccaaagcactgcaggatctcagctgctgctgcaactatggccccagagtctgtgaggtcgaaggtcaccaagtaaggcttgtgtgtctgcaccttggtggcatgagaagcggtgagttctctgatgagctcttctagggccccaccattccggccacagagcaccagtttagcacccgcagcatagaagacttttgcacattctttgcccagccctgaggtggcgcctgtgatcaccaccacagcattccgcaggtaggccttcccgcgcacccactgcagcagccggaagaggccgaagacgcccaggcagccgaacagcaggggcaggatggctgtggaggtgatgaagtccatggccttcaccttcggcagactcttcctggtagccggagagaccatagtcaatcaacttcatcctcccgcctccctc

SEQ ID NO: 434931 - DNA, 702 bp, Homo Sapiens
  misc_feature (57)..(57): n is a, c, g, or t
  misc_feature (105)..(105): n is a, c, g, or t
  misc_feature (127)..(127): n is a, c, g, or t
  misc_feature (132)..(132): n is a, c, g, or t
  misc_feature (252)..(252): n is a, c, g, or t
aacccctcttttgtcttggcagggaagatcttcagattaggtcttgacaatcaaggnaattggggaacctctgtaggccacccttgaatgggtcctctaatcaanaagtcccaggcttgtccccagncccantcacgcatggatggcattggccacatcggtaaacaccagccggctgggtctctgcagtgggccctgggagggcagagtagtcttgccctgcatggcctgcacagaagtagcagcctgtanagaggcgcgtcccgcccatgctccagcagctcctgctccaactcatcttgttcctccgtggggtcaaagttgtacatggggtagaggtcgacttggagggtggggccagtgtggacaatctcattctgcccgctgtgctgggacaggcacatgtctgcccatgggcacactcatgcacatgcatgaggcctctcggcaggtctgggggggctgcatccttccacttccattcccctacttccttccccctcagctcccatcctagcttggccccagtaacatctggttgccaaggatgggtggctgggagacctcctggaccctccgtagtatggatggaccctgggtgtgaattgcccttctcctggcatccttgcatactggacagtttcagctccatctctgggcttctcagggcccataacagatgctgccctaccctgtccctcc

SEQ ID NO: 434932 - DNA, 1586 bp, Homo Sapiens
  misc_feature (25)..(25): n is a, c, g, or t
  misc_feature (61)..(61): n is a, c, g, or t
  misc_feature (92)..(92): n is a, c, g, or t
  misc_feature (258)..(258): n is a, c, g, or t
tcctggaaccctccgtaataagganggaaccctgggtgtgaaattgcccttactccctggnatccttgcaatactggacagtttcagctccnatctctgggcttctccagggcccataacagatgctgccctaccctgtccctataacttgggtggtttcctctccccaccccagaggaggctccagattccaaaaaacaggtctctccctaaaagagggaaacttcccctttcctccccccaaatccctccccactnccgtatctcccctcatttccttccaacattagcggggcagaccctgatgtgagggatctggaacaaggggatgaggaaagccagcagaggctcttgaccttcctcagcatgagggatgccctctgtgccagggccctcaggtcaggagaagtcagtggtcagaagtccagcctggctagggccctctcttagagtctaaagtcagcaggtgggtctggagaacagctaggacctggctcagccctcttgtgtcttggcagggaagatcttcagagtaggtcttgacaatcagggagtggggagctctgtaggcaccgtgatgggtctctatcagaagtccaggcttgtcccaggccactcacacatggatggcattggccacatcgggtaaacaccagccggctgggtctctgcagtgggccctgggagggcagagtagtcttgccctgcatggcctgcacagaagtagcagcctgtacagaggcggcgtcccgcccatgctccagcagctcctgctccaactcatcttgttcctccgtggggtcgaagttgtacatgggcatgagctggtggcgtagcttctccagcctcttcttcttcctgatgtacaaaacttaatcctctcccggcgccgagctcagttggagaggctaggggtggtagtgactggcaggaggccggggcggggggaacccccaagcccggcgtctggggctgcgggtccgacccgagatccgccctccctgcaagccccgagccgctggccaggcccgctactgcgcaccagccgcatccgcgagcgctggctggctgctgaaccagcccctagcagatgcggtcctggagttcatgctgatgcggagagggccctggctgagaggctgcctgatgccagtcaacctgcccactcactcctgactccggagtgccccagcctgtggttcctgccacctgtggtggccacctgcacagccacctccttggataaagggagccccctgccttcctgggtgttaatcctctcccggcgccgagctcagttggagaggctaggggtggtagtgactggcaggaggccggggcggggggaacccccaagcccggcgtctggggctgcgggtccgacccgagatccgccctccctgcaagccccgagccgctggccaggcccgctactgcgcaccagccgcatccgcgagcgctggctctgccggcctgagctagggtgggtagggccgggacccacggcgcaggtggggccgggccgagcagcctcgggggatccccgaagctacagcgccttgcctccctgcacgctccgcgccccc

SEQ ID NO: 434933 - DNA, 1169 bp, Homo Sapiens
  misc_feature (974)..(986): n is a, c, g, or t
gctggaccggtccggaattctccggatagcagaccccgcccggcgaggaggagggagggccgccagtgtcgacatgctgctggaggaggttcgcgccggcgaccggctgagtggggcggcggcccggggcgacgtgcaggaggtgcgccgccttctgcaccgcgagctggtgcatcccgacgccctcaaccgcttcggcaagacggcgctgcaggtcatgatgtttggcagcaccgccatcgccctggagctgctgaagcaaggtgccagccccaatgtccaggacacctccggtaccagtccagtccatgacgcagcccgcactggattcctggacaccctgaaggtcctagtggagcacggggctgatgtcaacgtgcctgatggcaccggggcacttccaatccatctggcagttcaagagggtcacactgctgtggtcagctttctggcagctgaatctgatctccatcgcagggacgccaggggtctcacacccttggagctggcactgcagagaggggctcaggacctcgtggacatcctgcagggccacatggtggccccgctgtgatctggggtcaccctctccagcaagagaaccccgtggggttatgtatcagaagagaggggaagaaacactttctcttcttgtttctcctgcccactgctgcagtaggggaggagcacagtttgtggcttataggtgttggttttgggggtgtgagtgtttgggggacgtttctcatttgtttttctcactccttttggtgtgttggacagagaagggctcctgcaggccacagccacctaaacggttcagtttcttctgcgcctcaggctgctggggcctcagacgagacccaagggcagagcatttaagagtgaagtcatgacctccagggagcctagaagctggtggccttggccggctgtgctcagagacctgaagtgtgcacgttgcttcaggcatnnnnnnnnnnnnnagcgtcccaaatcaataagaaggtagaatgagttatgagttattcatattctgttggaagcttgttttccagtctcttgtacagcgttttaaaagaaatggattctatttattatgctttattggaaaaaatgttgtaataatttaatgtttttacccattaaattaagacttgtgcatgatc

SEQ ID NO: 434934 - DNA, 664 bp, Homo Sapiens
cagcggggccaccatgtggccctgcaggatgtccacgaggtcctgagcccctctctgcagtgccagctccaagggtgtgagacccctggcgtccctgcgatggagatcagattcagctgccagaaagctgaccacagcagtgtgaccctcttgaactgccagatggattggaagtgccccggtgccatcaggcacgttgacatcagccccgtgctccactaggaccttcagggtgtccaggaatccagtgcgggctgcgtcatggactggactggtaccggaggtgtcctggacattggggctggcaccttgcttcagcagctccagggcgatggcggtgctgccaaacatcatgacctgcagcgccgtcttgccgaagcggttgagggcgtcgggatgcaccagctcgcggtgcagaaggcggcgcacctcctgcacgtcgccccgggccgccgccccactcagccggtcgccggcgcgaacctcctccagcagcatgtcgacactggcggcctgcaaagccccccgccccgccccagcccggcgctgtcagcgcggagcagccggcgggcgctggcccgaacagccctcccggggcgcggccgtggtgcacccggctgcgctgctctcccgtcccggctcctcagcccgagacccccccgct

SEQ ID NO: 434935 - DNA, 2061 bp, Homo Sapiens
  misc_feature (442)..(442): n is a, c, g, or t
  misc_feature (498)..(498): n is a, c, g, or t
  misc_feature (516)..(516): n is a, c, g, or t
  misc_feature (540)..(540): n is a, c, g, or t
  misc_feature (574)..(574): n is a, c, g, or t
  misc_feature (682)..(682): n is a, c, g, or t
  misc_feature (829)..(829): n is a, c, g, or t
ttttaataaagcagaaatgtatttattaggcacccttgttcctcacagaggagcaagatccaggcctgagcgcctgggaagtctcttgaggttgcaggaatctccagagaaacataggcgctgcccagccaccaccccgagaacactatttggctggagtgtgaccgccgaggtgatcctggcaggaggctggggttggctcctcgactccacaaacactgaggagtgggtggggacacccatgacacccacccaaacactggcagagagggaggcccttccacatctggggcacatgtcgctgggcctgccagggggaggaggagcctggagagtcccttgcccggggccaggtcctcagggccctccccaaatccgaccgcctctcctcgccaccgctgactcagtcccacacgtaggggtttctaaagacctgagagtncttgccgtctttcggcggtgtggccgcctggtggctctgggccgagtacatgtctncagcccgcaggtcgagtnggcactgcccatcacctggctgtnggcggtggcccgtgggaggatgatgtcgttagcnccttcggacggaactttgtgcatcagggccatctcagtgggctggtacacactggtcagcagccgcccattgtacccgctgtatggtgacaccggcctcttagctgcnaccggctcatccatggaaaaggccttgttctccacgaacatgctctgacccttctgctctttcaggatggtctcatagcccacgccccgggtggggtacatggtccccctggtagctttgctctgggctggacttggtcacctgggnagatctcggggatgacgtagaagaggacgaaggcccaggcattggcggcgagggcgatggccagcgtggggtcatcccaggtgggactgttgtgctgcttgttgccgtaagtatacatgacgatccacaccacccatatggcaacggaggtggctgtggtgaggagcacaaagaccccatgcttacgccagcgcttgtagcggccacacagggcgggccaggcccccaggaaggcacccagcagcagcagcatgacgtagatgagtgccatgacaaagtccatgttggcgatggcacagggggaggccacggcccagcctgcgctgctgttgccctgagggccgccctcgccactgccccgaaccagggtgatgatcagccactctgtattgatgatgacctctaccagggtcagcagcagagccacagtgaagatcacccagccccggggcccgtggttcttccgggccaggaagttgagggcaaagacgtgagccgccagacaagagaagcagatggcgaacagaaccccaaagaggaagcgccgagaggcacaggtggagaagtcgggcttcaccacacaggcaaacacgaggcagaagaggcccagggtccccagaaggaagaatacctgggtccccagcaggctccgtttcttggtgtcctgcacaaaggggaggctggccaccaggatgatggtgagcacaaacgtggtgacaatgcccgccccagccacggcctccaggacgatgccccacgccccagagcggtcacacaggttgtagtacagggggttgaggccttggctgcagccgggtgggacatggccctgggcccaggcccctgggaacaggaagagaggcagtcccaggcacatcaccaaggctttgtggatggccatcctggctcccaggccaggctctggttgggtccctccaggctgagccgactcgtactttccggctggtgagggagatgggagtttctggccctgccggcgtgtgggttgttgctgttgactgccacgcccccgcatgcgggcgcgcgcacactcacgcgcactcactttctgggctcggccttcgccggggcaattggtgtgagggtgcagccctgcgcaccccccaccgcgtcttccagagagcgcgcctacggacacgcgcggggctaccttggcgcgtctccgtgggggacacctagcctttgtcaccttcgtcctggccctcccgtga

SEQ ID NO: 434936 - DNA, 925 bp, Homo Sapiens
  misc_feature (126)..(180): n is a, c, g, or t
cggagatacagcctttagagggctttccatgatccccgtccccctcctgggggcttcaaaggcaagggtcaaaagattcttctcggtcaattttggggtgccttcctgtcttggtcatcctgtctnnnnnnnnnnnnnnnnnnnnnnnnnnnnnnnnnnnnnnnnnnnnnnnnnnnnnnngttttctcttccccatctgtgatctcctttccagtccaagtttcctgtagacatgcagtttcagcagctgggagcacatgaccttcacagagaaaattttgtaggggctgctcctgatggtggaagtaccagtctcccacaatgtcttcaaactcctccaacatggtctcacactgcttcttgaggtatgtgacctccacgctgggctcatcccaaagctccagagggatccccagatccaccttcacccccttctgcactaggcctttcagtgttgccatggtctgactctgacccttggcatatctcagtgagcccttgcgctcagcgtgaacactatagtccaggatccgctcacataaattctctaaggcctcttccagccttgtctctgaaacgctgtaaggcacgtgtctcttcctcttgcctgtatccagcacctgccccagctccagcacctctcgagatcgaccggtgcgactcagttccgcctgtagctctgtgctcagcagcttacacacttcgcatttgctgggcaagcgttctgtgtcatcgtcctcctccttcaacatcccagcccaagcctcgtgcacggccaaaaaaaggaaaagcaatattcccaaccgcacaggtcccatgacaaagcgccgtctacaaacaatcaccgcttgccttcaacttcgggaaggtagtgtgggtcccttaaattcccaggcggctagcggcaaccttaaatccagccgag

SEQ ID NO: 434937 - DNA, 288 bp, Homo Sapiens
  misc_feature (198)..(198): n is a, c, g, or t
  misc_feature (251)..(251): n is a, c, g, or t
aattgagttggtacaagcaggatgtcattggctaggtgacaaagtcactgggggaccaaataccaagatgcccgttggtgagagagaccctccccaggaccctccccaggcgcctccttctccgtgacgttcaggaccctccccaggcgcctccttccccgtgacgttcaggacccctccccagggccctccccaggngcctccttccccgtgacgttcaggaccctccccaggcgcctccttccctgttnatgttcaggaccctccccaggcgcctccttccctgtg

SEQ ID NO: 434938 - DNA, 2067 bp, Homo Sapiens
  misc_feature (636)..(636): n is a, c, g, or t
  misc_feature (638)..(638): n is a, c, g, or t
  misc_feature (640)..(640): n is a, c, g, or t
  misc_feature (642)..(642): n is a, c, g, or t
  misc_feature (644)..(644): n is a, c, g, or t
  misc_feature (646)..(646): n is a, c, g, or t
  misc_feature (652)..(652): n is a, c, g, or t
  misc_feature (654)..(654): n is a, c, g, or t
  misc_feature (660)..(661): n is a, c, g, or t
  misc_feature (663)..(663): n is a, c, g, or t
  misc_feature (665)..(665): n is a, c, g, or t
  misc_feature (826)..(835): n is a, c, g, or t
  misc_feature (2030)..(2030): n is a, c, g, or t
acgaaagtgggtaacgcaagggtttttttatcaatgttttatttttaaaaacaggtgaatccacttttttatacatcattgcacttcaataattacacaaaacacacaagtacatgcatctacaattacgcaccgcatgagaaccgttaggttataaaatctatcatcaaccagtaaatcaatgtgaaaaaatacagtgtcaaaccaaaaagtataactatagttgcatagaatattaccatgctataacatttcaaggtcattggaaacaaaagaaaaattataaaagtttgccttgattgaatgaatgtacaagaataaggttcaacacatcagtgcaaaaggatttatgaatttacatgacttaacagaagaaaagataatcacttaaaaagcaatcatacgtatatactgcaattcattatacccattcagtggactgttccagcttattaaagtcacaggttaagcccttaaaattatagatttcagtttatattactcatctttatgtaccagaactgcacaatttcctcatctgacaacatacaataaggaatgaatatcagcagcttaaaaatgaaacaagcatttactttattttggatttctcccacccccaaaaatataaatatntntntntntntctttntntcccgnntntntctgtaggttttgctgtactttacaaaagtgtatcactagatggcagcagtgcattttagagctttgccaatttaacagctgcattaagtaaaaaatggcgcatgcatgatctgatcctcagaggaccttttcacttctatttaaatattttaacaaaggnnnnnnnnnngcaacattcacagcacatcaagcccaaaatagtttacaccttctacactgaagcattgtttaaaatgtacctggctagatcacccttacaggagaggctaaataaggcatgctttagacagtcattgtggtgttgctcacttgaaaggggagagaaccaaagaggtccaagcagaaaattttagcaggtcatgttgccaccagtttcaggaacctaaagatattgtaagcagtacttaatttgtgtttctctggcgcaagtttttatctttgtgattgttggtagagttggttttcattggtccagctggttcatcatcgtcaggaacctcatctggcctcttcctcttctcatacacaacaatgatcaccacaaggatgataatttcagccagaattcccaagaaaggccagagtggggccaggtgctccgcaccctgaggacagtgacaacagaggcggagccaatggcgttggtggcattacattcatactcgccagggtcttccgtgatctgcaggttcacaatgttcaactcagtgtaattttccttgttgatgatgaagaagcggccagaggtattgacaatgtccatgggcatcccgttctccttcttgcgccatatccagtctgggtgggggtagccaactgacttgcaatacatagtggcatcctgcccttcattcttgttcttactccgtttatggccagtgatgtcaggagcggctttcacttcaatggtggcgtttgctttaggagcgctgacaaagtgatatacgcagtggtattcgcctgaatcctcagctctcggcttattgatcctgtactccatgttgctggcattcttacgagtggcactcagttccaccccattctttgtccagtagctgtatgtaagggtgtgagagctggaggtgaggttacactgcagggtgacagggagaacagggctgtctcgaataatgacctcttcactggtgacaatccttggctcgttctgagcggcgcctggccctgggaggagggagccagagaccagcaacagcgagagggccagggcgctgggcagcgacgaacccgacatcctccctagcagaagacccaacagcgaatgggccggggccagagccggggccggggaagggataagagggagggagggggcggacgagtgcgcgagggagtgagcgagggangcagccgcggctcggctccgtccttccccgtccatcc

SEQ ID NO: 434939 - DNA, 1645 bp, Homo Sapiens
  misc_feature (216)..(256): n is a, c, g, or t
  misc_feature (418)..(427): n is a, c, g, or t
  misc_feature (1512)..(1512): n is a, c, g, or t
  misc_feature (1564)..(1564): n is a, c, g, or t
  misc_feature (1566)..(1566): n is a, c, g, or t
  misc_feature (1569)..(1570): n is a, c, g, or t
  misc_feature (1578)..(1580): n is a, c, g, or t
  misc_feature (1583)..(1584): n is a, c, g, or t
  misc_feature (1599)..(1599): n is a, c, g, or t
  misc_feature (1613)..(1613): n is a, c, g, or t
cattcccaggtgggaactgtttccacggcttatttaaaagtccacaggtttaagccccttaaaaattatagatttcaggtttatattactccatctttaggtaaccagaactgcacaatttcttcatctgacaacatacaataaggaatgaatatcagcagcttaaaaatgaaacaagcatttactttattttggatttctccccacccccaaaannnnnnnnnnnnnnnnnnnnnnnnnnnnnnnnnnnnnnnnnctgtaggttttgctgtactttacaaaagtgtatcactagatggcagcagtgcattttagagctttgcccaatttaacagctgccattaagtaaaaaatggcgcatgcatgatctgatcctcagaggaccttttcacttctatttaaatattttaacaaaggnnnnnnnnnngcaacattcacagcacatcaagcccaaaatagtttacaccttctacactgaagcattgtttaaaatgtacctggctagatcacccttacaggagaggctaaataaggcatgctttagacagtcattgtggtgttgctcacttgaaaggggagagaaccaaagaggtccaagcagaaaattttagcaggtcatgttgccaccagtttcaggaacctaaagatattgtaagcagtacttaatttgtgtttctctggcgcaagtttttatctttgtgattgttggtagagttggttttcattggtccagcgtcaggaacctcatctggcctcttcctcttctcatacacaacaatgatcaccacaaggatgataatttcagccagaattcccaagaaaggccagagtggggccagtggctccgcaccctgaggacagtgacaacagaggcggagccaatggcgttggtggcattacattcatactcgccagggtcttccgtgatctgcaggttcacaatgttcaactcagtgtaattttccttgttgatgatgaagaagcggccagaggtattgacaatgtccatgggcatcccgttctccttcttgcgccatatccagtctgggtgggggtagccaactgacttgcaatacatagtggcatcctgcccttcattcttgttctcactccgtttatggccagtgatgtcaggagcggctttcacttcaatggtggcgtttgctttaggagcgctgacaaagtgatatacgcagtggtattcgcctgaatcctcagctctcggcttattgatcctgtactccatgttgctggcattcttacgagtggcactcagttccaccccattctttgtccagtagctgtatgtaagggtgtgagagctggaggtgaggttacactgcagggtgacagggagaacagggctgtctcgaataatgacctcttcactggtgacaatccttggctcgttctgagcggcgcctggccctgggaggagggagccagagaccagcaacagcgagagggccagggcgctgggcagcgacgaacccgacatcctccctagcaganagacccaacagcgaatgggccggggccagagccggggccggggaagggagtntnggnngggagggnnnggnngagtgcgcgagggantgagcgagggaggnagccgcggctcggctccgtccttccccgatcc

SEQ ID NO: 434940 - DNA, 1138 bp, Homo Sapiens
  misc_feature (231)..(231): n is a, c, g, or t
  misc_feature (1035)..(1036): n is a, c, g, or t
  misc_feature (1049)..(1049): n is a, c, g, or t
  misc_feature (1055)..(1055): n is a, c, g, or t
cccaggtggcaataacattcaatactcgccccagggccttcccgtgaacctgcaaggttcaacaatgttcaaactcagtgtaattttcccttgttgatgatgaagaagcggccagaggtattgacaatgtccatgggcatcccgttctccttcttgcgccatatccagtctgggtgggggtagccaactgacttgcaatacatagtgcatcctgcccttcattcttgttcntactccgtttatggccagtgatgtcaggagcggctttcacttcaatggtggcgtttgctttaggagcgctgacaaagtgatatacgcagtggtattcgcctgaatcctcagctctcggcttattgatcctgtactccatgttgctggcattcttacgagtggcactcagttccaccccattctttgtccagtagctgtatgtaagggtgtgagagctggaggtgaggttacactgcagggtgacagggagaacagggctgtctcgaataatgacctcttcactggtgacaatccttggcttctgaaggacgcttatggtggcctgggctcgaatccatgttatggaggggttttgcctcaagtcattcctcttggggtcgttgctggccctgcactcgtaagtcccagagtcctccaaggtgagccgggttattctcagcacactcacgccgtttgacccgtaggcggtgtttacggtgacacggcgcttccgagcaccgtcccacagctgtctgaaagattctgcccggttgacttctgcgtaccaccactggatttttggcgtggggctcccgaccacgtcacagtacagctcaaaggcgtcccccgtgagcttagtttctgacatgggcgacttgacaaacccagcgttctgagcggcgcctggccctgggaggagggagccagagaccagcaacagcgagagggccagggcgctgggcagcgacgaacccgacatcctccctagcagaagacccaacagcgaatgggccggggccagagccggggccggggaagggaggnnagggagggagggngcgggngagtgcgcgagggagtgagcgagggaggcagccgcggctcggctccgtccttccccgtcctcctcctgccgccgcagcgccca

SEQ ID NO: 434941 - DNA, 350 bp, Homo Sapiens
  misc_feature (53)..(116): n is a, c, g, or t
agtttgaatatacttggcttcaatctccctatttctaaccttaggaatctgannnnnnnnnnnnnnnnnnnnnnnnnnnnnnnnnnnnnnnnnnnnnnnnnnnnnnnnnnnnnnnngtggccacttctgctgcttctggctttatttctggggccggtggtggagccactgctggaggagcttctgccggggcagcctctggtgattttttaagcaagcagatcaaataattgtacttaataataatattataaaaagtataatgaatgataatatcatcatgtctacagcatgttcttcacgtctggaatgagtcatattgtgattttcaccttctcctgaaggtgtcc

SEQ ID NO: 434942 - DNA, 3342 bp, Homo Sapiens
  misc_feature (119)..(119): n is a, c, g, or t
  misc_feature (754)..(763): n is a, c, g, or t
  misc_feature (907)..(922): n is a, c, g, or t
  misc_feature (947)..(977): n is a, c, g, or t
  misc_feature (1740)..(1763): n is a, c, g, or t
ttttatataatgcacccaattagaatgagagtgttatacagatgcaagattagaaaatgtctttgtgtatgagtgattcacgaaggcccattataatatcatccttcgatagagtgtgnaggtttgtttgtacacccgagaatgtgtgattgtgcatgatgattataaaaaacaggagttagctctcccaataacaagagaggcgtagtatatatgtcttgtgtttttatgcgccgcccccacatgtatttatttctatagtacgcggctcagtgggttcatctgaaaaaataagtattgtgtttgaggcgcgcctcgcatgggtaggataggtaaatgtagatagtggcggagtacatacaaaatttgagacaccctgtatatcggtgggtggcggtgttgttatgtctggggtttgtccgagatttttactatttatatctccgatcagacatcctctttagaaatatagatatttatatttacctaatctagtatattcgtccgatcagaagaaatgtggttctttaatagaatgggagcttcttgtacgtatcagagggtagaggtgcgggttaattattggtgtctatgccgactgtagttggtcgaattattttgagttgtctgggggggtgcgggttggggaaattcacctgtgtggaaataaatccccgagaaaaggcactatgaggagcatccccttctgggacttttttcctaggaagcgatccggtgttgctcgccggcgggnnnnnnnnnnggggggggaaattccaatcccttttttgtggcgcggtgttttctcgggaaatagtcagggcgctggttcattacctatggggcccgcgccccaaaggaaatggtcttgaaagatttttagagggccgaggggggcggacaaggnnnnnnnnnnnnnnnnattctttctgaggtcactgtgtcgnnnnnnnnnnnnnnnnnnnnnnnnnnnnnnncacaaaccacttttattacccagtgggtgggcctgggctgtgatgttggagaaccttgggggtgggggctgcggaatgcagctgagcctctcctggctctgtctgctggtctaggccagggtggggctgatcaagggcagagagctcaatcttgggggaagaggaagagaggatagagaggccaaacaggcctcttcccctcctcttcacccatgcccacagctattaaatataacaaaaacgcaactctttacagcacaaactacacagggaagtccttcctcccagccctgtggcgcacagcatggaagaggagctcgggaggacagggttggggccttccagggtctgacaccaccccactcctcttcctagcaccatggggtagggacaggcagctttgaacagaggaaacaaaactccaacttcctccaaactcctatgcaggcaggtccatctagtctggtacttctggcccaagggttttctgctccttccaaacctttgagctttctcaggacgtgagcttagctgagacttctccaagaggggctggagccctggtctctgaggcacagtgggcctgggaaacaggcaagagtctggttcccaaagtttttcccagcccaggcctctgccttggcaagcaggaagcagggccaggtgagagccggtgagacccaggctcaagaggggccgggtggtgtggttatagaccaggtgctccgtgtcctcggtagtggagacagtggagctggcaggnnnnnnnnnnnnnnnnnnnnnnnntccgtggaagtcctttctctggttcttgaagaagcagtaacccaagatggctaccaccaccacaatgcagatgaccaggaacactgcgacagccatctccacagagcctgtgctgggaatggggatttcccgcctcaggccaaacacatccttcttggagatgccgcgacaagactcgaggcactgctgctcttcctcaaagttgttcttgttgccataacaaccaccataggtaaagcgggcgcagtgttcgctgaaggggttgtagtaccagcgcgggatgctctccttgcagagtcctgtgtctggcaggtccacgcagtgccctttgtcactggggaaatggatgcgctggagctcgtcaaagccactcgtgtatttttcacaggcagcctcgtcggaggcgtcggggcagttgggggtgtcgtcacactccaggaaactgtcgatgcagcagccattgctgcagcggaactgggtgggctgacaggtgccagagcacactggatggcgcctttccatggaggggccctgggggaaagtcgcctgagccccagagctgcctctcaaaggcccaccttgcacacccccgacagggctagaatgcactcttcttcccgaaggtagttgttcttgttgcccaagcagcctccataaacgaaactcttgcagatctgctccgtggggtcatagtaccagcgtgggaaagagccccggcagcgacccaccttgttggatgcgaggcagtagtcttctgtctgcttggtggacagcacagtgactgtgacgttggccgtgtcctctgggtggtctgagctagtcactgtcagctggaacaggtaggtgccttccttgagtccccacagttccacctggtttgggtctttcctctctaccctgacatccgtgtcaccccgcagtaggcgccaatctgtgttttccacatccttcagcaccaggggttcctggggttgtaccttcaagtctatgcctgcccaggccttggggatcccagaccctccaaagccctgggtccgcagctggcggtaggagcggtacacttccctcgtgaggtagttgatgaagccctccctgggcgcgaacttgcacacgaagttctgctcgtagaggcagttgatgaggaagcaggcggcgatggcgtcctccccgcggtcgggctgcagctccactagcgccaagttgcagttctgggtggtgcagcaggcgcgcacgcagtcccagccccggcgcacggtgggggactccaggaaggtagctccgttgctgaccgaggcgttggtgtccagcacgaagccaggcaccccggcggtaaagctgttcaggcagtcggctcccgcgggcagcccagggggcgcgggcggtggcccggcctgggtgccctggaggccgagcgtgcacagaagccacaaggcgacggcagggatgccggccggggcgaggcgggcgcgggccatcgtcctcgcaggggccatcgccttcctccccaggggggtcaccttcagagcgcgggcctctgggttccgagggtgctggatcccgggaattccggaccggtcca

SEQ ID NO: 434943 - DNA, 416 bp, Homo Sapiens
gcgttgaagcaatcagagattcatttgtctcggatgagcctcagaggaatgactttcaatagaatgggaggcaggtttgcactaagcagttcccagattgacttttccctttatcttagtgattttgggggtcccaagatttatttcccttttacagtcctcttcatactctacactttctccttctatcttattcttacaattgttacaatgacctatgaaaataatcatcctaagtatctatttctagcctaaaaatctctcctaaattcctattacacactgcccattgcacaattactctttgatatcccacaagttacctcaaactcaacatactcaaaaccaatattcttctgtctgtgtcagatacaccaactttgtgcataaacattcatatactatggtgaaaatag

SEQ ID NO: 434944 - DNA, 1007 bp, Homo Sapiens
  misc_feature (243)..(246): n is a, c, g, or t
aggaaatttagaccagctgtttgttaatcttaactttagccaagacaaacaccaattcagttacttacctagggatgggtctcaggctgaggactgctctctaccaacctagaagcaggaaaaagtaaactgatcttccctgttggatgcgcgctcaaattccataaaggagttatttgtcttacatcgtcatggaggcaggaaaaacttgccttccttgtgttggaagcaagtaaaactccnnnnaaaaaagatcagggactttctggagggcgtgctctcagacctcagcaaattgtcctattggtttgagacataaagttagctcatgctggtaccaggcaccgattggagatttgtcaaaggcaggggcatctctactcagaatccctttggggttaccaaaatgtgaacgctgtttgagacaggtctcagttaatttagaccatttattttgccaaggttaaggatgcatgcctgtgacacagcctcaggaagtcctgacaacatgtccccaaggtggtcagggcacagcttggtttatacattttagggagacatgagacatcaatcaatatatgtaagatgaacaatggtttgatccgggacatcctgaagcaaaagcgggtcaactcgaagccaggagggagcttccaggtcacaggtaggtgagagacaaatggttgcattcttttgagtttctgattagcctttccaaaggaggcaatcagatatgcatttatctcagtgagcggagggatgactttgaatagaatgggaggcaggtttgccctaagcagttcccagcttgacttttccctttagcttagtgatttgggggcctcaagatttattttcctttcaaatttcccccttttcttttaaaaatattttggagaaagcattttagaagacagtgagtctctggtctggtctctcatggctaggacagtttattcctagatggggtaggttttaggttattaggaaagctcatttttagcagc

SEQ ID NO: 434945 - DNA, 568 bp, Homo Sapiens
acaccaagtcccaaaacgaaaataaaactttcatttgccaagggaacaccacagcagctcctgccctgtactgagctctccaaagactgggcaggcaaagtccctctggccccctctggaagtggaaagtgctcgccctggaggacagcaacagagccaaggtgaggtcctgctcaaaggtgggcagggggctgcgctgactcctttcggcccttgccagcgatgggccggcctcgctcctcccagatggtgaggccatcgcaagagcagatctgcttggggttctggaaaaggccagcggagcgtgcaatgatgccacaggccaacctctccccggagttccctgtgatcttggataagggatggcctccccggcccaggtcatcttctccctcatcaataatcaggctgcggccaatcacatcccacaccttcagctgctcatcctccattctgaagatggcgcggccgtcagcatcagcacggacattgcccaggtctccgcggtgctggaatgagatccagtgtgtgtataggggatgtgtgccacgtggtgccaagctgctcc

SEQ ID NO: 434946 - DNA, 1022 bp, Homo Sapiens
accttctgagtggccgcctgtcactttcccgcctgcccggttcccgcggtggtgatgaactccaggtgttatagggaagggtgccacgtggtgcgaagccgcattcttctgattccctgattcgacgccttcgtcctggttcccctaaagtacccagtgccctccctgtgcgtaccagttctcgtaagaatctgagctcccccgaggactgggcaggcaaggttcctcttggccctgtccggtcagagtcctgggggccccccatgagatgctccatcagggtttaaagtgattcccacagctgttgcagttgtttgtaaggtccccgtactgatggacgtggagtccatgcagcccaggctccaggccgtcaatagttccctcgatgaggcagcgctcaggggtcagctgtaggaagcgcaccaccccctgcacggtgccaggcccccccaggatggccactgctgcccccagattctctgcaaggtattagacacttgggctggcttgccacctcacccagcacacctcttcagcagctcgggaagggcagggagtctcacataattttcacaccttcctcaaagccactccaacccagagcctgagaatcctatgattagatttgtaccagctctgagccacctccctccgagaggggccaaggccacagtggtcactcacgcaactggccgctgcccatgcccttgagtaccgcctgccgccccgtgccttccaggagagcctgcacctcctggctgggtagagtggtgtgtaccaagaccatctggtcctccaagtgcacctccacatcctggacacctgccaccccttgcagggatttgcgcaccgcgtccacacagctctgacaggtcatctgcaccgcgaactccaacgtgcagagggtcccctggttccccgaatccgaagccattctggacccagtcaccaccccgagacgcagaactcctccggcgcaggagcaccaaccagcgcggcgtcgcggggactgagcctctaaa

SEQ ID NO: 434947 - DNA, 1246 bp, Homo Sapiens
  misc_feature (68)..(163): n is a, c, g, or t
accgtggcgttgtctggtcgtccccctggccgcttttcggggcgtgcgcgtcgtcgggtgtcttctgnnnnnnnnnnnnnnnnnnnnnnnnnnnnnnnnnnnnnnnnnnnnnnnnnnnnnnnnnnnnnnnnnnnnnnnnnnnnnnnnnnnnnnnnnnnnnnnncccccgccgcttgactgaacgtgtcattgtgccaaggggaccacccactagcaagctccctggccctgtactgagcttctccaaagactgggcaggcaaagtccctctggccccctctggaagtggaaagtgctcgccctggaggacagcaacagagccaaggtgaggtcctgctcaaaggtgggcaggggtctgcgctgactcctttcggcccttgccagcgatgggccggcctcgctctctcccagatggtgaggccatcgcaagagcagatctgcttggggttctggaaaaggccagcggagcgtgcaatgatgccacaggccaacctcttccccggagttccctgtgatcttggataagggatggcctccccggcccaggtcatcttctccctcatcaataatcaggctgcggccaatcacatcccacaccttcagctgctcatcctccattctgaagatggcgcggccgtcagcatcagcacggacattgcccaggtctccgcggtgccggtcagagtcctgggggcccccatgagatgctccatcagggttaaagtgattcccacagctgttgcagttgtttgtaaggtccccgtactgatggacgtggagtccatgcagcccaggctccaggccgtcaatagttccctcgatgaggcagcgctcaggggtcagctgtaggaagcgcaccaccccctgcacggtgccaggcccccccaggatggccactgctgcccccagattctgcaactggccgctgcccatgcccttgagtaccgcctgccgccccgtgccttccaggagagcctgcacctcctggctgggtagagtggtgtgtaccaagaccatctggtcctccaagtgcacctccacatcctggacacctgccaccccttgcagggatttgcgcaccgcgtccacacagctctgacaggtcatctgcaccgcgaactccaacgtgcagagggtcccctggttccccgaatccgaagccattctggacccagtcaccaccccgagacgcagaactcctccggcgcaggagcaccaaccagcgcggcgtcgcggggactccgct

SEQ ID NO: 434948 - DNA, 749 bp, Homo Sapiens
  misc_feature (610)..(610): n is a, c, g, or t
  misc_feature (619)..(619): n is a, c, g, or t
ttcctggccgtggtgggcatcgctgccacgttgttcgtggtgatcacctttgtgcgctacaacgacacgcccatcgtcaaggcctcgggccgtgaactgagctacgtgctgctggcaggcatcttcctgtgctatgccaccaccttcctcatgatcgctgagcccgaccttggcacctgctcgctgcgccgaatcttcctgggactagggatgagcatcagctatgcagccctgctcaccaagaccaaccgcatctaccgcatcttcgagcagggcaagcgctcggtcagtgccccacgcttcatcagccccgcctcacagctggccatcaccttcagcctcatctcgctgcagctgctgggcatctgtgtgtggtttgtggtggacccctcccactcggtggtggacttccaggaccagcggacactcgacccccgcttcgcagggggtgtgctcaagtgtgacatctcggacctgtcgctcatctgcctgctgggctacagcatgctgctcatggtcacgtgcaccgtgtatgccatcaagacacgcggcgtgcccgagaccttcaatgaggccaagcccattggcttcaccatgtacaccacttgcntcgtctggntggccttcatccccatcttctttggcacctcgcagtcggccgacaagctgtacatccagacgacgacgctgacggtctcggtgagtctgagcgcctcggtgtccctgggaatgctctacatgcccaaagt

SEQ ID NO: 434949 - DNA, 2550 bp, Homo Sapiens
  misc_feature (44)..(44): n is a, c, g, or t
  misc_feature (53)..(53): n is a, c, g, or t
  misc_feature (55)..(70): n is a, c, g, or t
  misc_feature (103)..(103): n is a, c, g, or t
  misc_feature (143)..(144): n is a, c, g, or t
  misc_feature (169)..(169): n is a, c, g, or t
  misc_feature (230)..(230): n is a, c, g, or t
  misc_feature (257)..(257): n is a, c, g, or t
  misc_feature (327)..(327): n is a, c, g, or t
  misc_feature (385)..(385): n is a, c, g, or t
  misc_feature (394)..(402): n is a, c, g, or t
  misc_feature (444)..(444): n is a, c, g, or t
  misc_feature (457)..(457): n is a, c, g, or t
  misc_feature (496)..(496): n is a, c, g, or t
  misc_feature (516)..(516): n is a, c, g, or t
  misc_feature (565)..(565): n is a, c, g, or t
  misc_feature (726)..(726): n is a, c, g, or t
  misc_feature (749)..(749): n is a, c, g, or t
  misc_feature (1368)..(1398): n is a, c, g, or t
  misc_feature (2451)..(2451): n is a, c, g, or t
  misc_feature (2473)..(2473): n is a, c, g, or t
tcatctaagtaagggtgttgcggagtagatgagtaccggggtangttggacgnannnnnnnnnnnnnnnntgtaaacggttgtgatacgccgcgggagttagntagtgactggtgggtggcgggtgaaaagtgaagagtgggnnccagagtggggaagtaataggcgtntgaagcggatcgcaccactaatgttgtaccactggtcaggccggccgtgcccgccgaacanaatggtaggggaggcacggaggaaaanaacatgggcgggaacgcgggtttctccggacttcaaggcatggcagtccggcatgaccgcgacaccaggnagtttccattctggaccaggcgtgcaccgtcgattactgcaatgatggggtctggatnagcagtgtnnnnnnnnntcgccaaggtagacgtgctgattgccgccggcagttgttgtnagaagtggtatgngtgtggatgagcggccgttcggcgtaggagtgaggcggnctggtgcagggtgggggtangtggatgtaagattaatggggcgggtcttgtagcggagataggttgatntagaggggattaacaattgtatgggtgggggcgtggtttagcgtgatcgattgatttgagcgcgtcgtattacgttgaagatgatgttatggtccggttcggccttagttgcaggccgcgttcgaaagcagcgtggggtcgcgtttggccaaaaatggggnagatgttgtgtggatggtagggnggagtgctcgtgatatggcatgtgaatgtgcatacgttcgtgacggagcgtgcggacgtgggcgttgacgggctctttctgcgtaactgcatcttgggtgtctacgcgggtcatcgtatagtatcgacgcgttcacgaggtatggttcaatgattttgtgcgtgttgtgtttcgtatttgggtgtgtcgtgaatcgctgtgtagcgggattcgttgtcgggtggcggtagtggtacgtgggtggggtttggtcatgggaggaaggtgagtgggtaagggggggtgtttgggggatggaggtagtgtggagcggtttgtggaggagggtgtcgggggtgctcgggggtgagttcgtgtgggtatgcgagaggtgctgggggagtagttgctttgtggtaatattgtggggagatgtgtagtgtgatggaccatgtttgggttatgatgcggattgtgggtggtgcggtgagcgatgtgttgggtggtaggggaattgttgtatcgttgttgtgggggtggttatgaggggaatgggagtatgggggtggcggattgattgggatgggagtttggggggggtgttaggtgcggtttggacgggagcgtgtgggtgtcgctnnnnnnnnnnnnnnnnnnnnnnnnnnnnnnncgaggcggaggcgtcggcgtggggatgagtagtgagcaagtttggtggcggagagaaaaaaatccagaaattgaaacatttaaaatatgaaaacccaaaggggaagtgagtgggaagaggcaagagaggaaaggaactggagtttcttgggaagggactcccatgtctcccttcccatttatgggcttggggtctggggtacgaggctcacacagtgagtttgcagtgacacagctccttgtagatctgccgacgaagtttgggcatgtcctgctgggtgaagctgaatggctgagacagggccagatgcttgcagtactgcaacacaaaagcaccacagtcactgtcattattctgcctggccacattcattttgaagtaacctttccagccctggtggaaatccagtcggtctttctttaccgcctctgcctgtagatacttggcaatatgcttagggcagcggcggtttagggtacgctgcgagtcaaaataggtgatggtgcgtcgcctcacatcaacagagatgagggaccaatgcacctccaggtggatggggattagcagtagctccttattgaagatgtccaccttttcagggactgtgtccatgaccaggtctccatacatgttcatcacctggtcattgagccagttctgtccatacaaggtccccaagtcatccatggtcagcacgtgccgcttataagccactcggaagcccctcaccatggcattgcctggcatccgctggtaagactggatcagctgcaacaccaggcccttcctggaaggggtggaaaactcctgctggaaaatgtcctccagcttctctactacctcatcagtgctgaggggtatgaggctgccatacgtttgaaggaattcgtccaagatgctctgtacgcaggtcacatgctcctctcgcagggggctgtgctggccggctttctccccaggcctctctgcctcttctgccatgcccaaatctgagccctgaaaaagctcctgggccacatggtccccgatgctgcacacattgctgatgaggangctggcatcagggggtgccaantgcgctccccttctggcccaaagtctcctctggaccctgactcgggcctcctttcatgtactctgcccaacggtttc

SEQ ID NO: 434950 - DNA, 1153 bp, Homo Sapiens
  misc_feature (36)..(36): n is a, c, g, or t
  misc_feature (66)..(66): n is a, c, g, or t
  misc_feature (103)..(103): n is a, c, g, or t
  misc_feature (455)..(455): n is a, c, g, or t
  misc_feature (687)..(687): n is a, c, g, or t
  misc_feature (704)..(704): n is a, c, g, or t
acagggggctgtgctggccggcttttctcccccagncctctctgcctcttctgccatgcccaaatntgagccctgaaaaagctcctgggccacatggtccccnatgctgcacacattgctgatgaggatgctggcatcagggggtgcccaatgcgctccccttctggcccagattgtcccccaaaaccgttgggcagagtacatgaaaggaggcccgagtcagggtccagaggagactttggagtccacctgagtccatcttcctccatggggggcccagagggcactggtggagaccctctcaccccatcctcagccatgagagcacctagcagacccagccggggtggaggtggcccccggggggagtcaaaacgacaacagggggatggcacctgtggcgtcgcacccccttgctggggtgaaagatggttcttggggtgtgcgaggccccnccgccggccccggtggcgcccccaaagcttccagtggaatgtcagcgaggtgctttttgagtagagcagcatccggaaggttctcatggctcggcggcggcgctgtgagcaggtttttcgatgagtggggcgggaagggcggggccgctgggaggttcccagctgactccatcttgggggcagcctccaagctgccacttcctcctcttcatcttcatcctcctcctcctcntcttcttcctcttcttnacttgctgaggcatcaaaagagggtcgggggacagggaggcgtctggctggcactgtggtccctgacccaggatctggcccaaaccctcccacctgacttgagtcggggtttgggaggtgggggccaacgaagacgctcccgcctgggacttgagtaagctgggggtatgccgggtccaggaggctcaggcccccaggacccggtcccttgtatagtctctttcatcttccagtacccgggagcggggaagccgggcggacgggcccgaaggcgggcgtctccggcctcaagcttcccggctcatctctccggcgacggcggcggccccgccactcctgctgtctttaggcgcagccgtctcaattcaggattccaacgcttctgggccgcgtgccgcgccgccgagcaccccgccgcgccgcctctggctctgcttcagcttcagctt

SEQ ID NO: 434951 - DNA, 534 bp, Homo Sapiens
catgtgacctgcgtacagagcatcttggacgaattccttcaaacggtatggcagcctcatacccctcagcactgatgaggtagtagagaagctggaggacattttccagcaggagttttccaccccttccaggaagggcctggtgttgcagctgatccagtcttaccagcggatgccaggcaatgccatggtgaggggcttccgagtggcttataagcggcacgtgctgaccatggatgacttggggaccttgtatggacagaactggctcaatgaccaggtgatgaacatgtatggagacctggtcatggacacagtccctgaaaaaggtgcatttcttcaatagtttcttctattgataaactccgtaccaagggttattgatggggtgaaaaggtgggccaaaaacgtgggacattttcattaagggagctactgctaatccccatccacctggaggtacattggtccctcatctctgttgatgtgaggcgacgcaccatcacctattttgactcgcagcgtaccctaaac

SEQ ID NO: 434952 - DNA, 392 bp, Homo Sapiens
  misc_feature (41)..(41): n is a, c, g, or t
  misc_feature (159)..(159): n is a, c, g, or t
agttggtggtgccttttaagttttcacattcacatggggcnaggaggctggacagtttcctaggaattcaaagagtcctacagcttctgcaggagtgtgtttccagcactctgaagatcatgtgtgagaataggctctctttccctgcctcaggtgganacagacccctcccactccctcttcccaacctcttctaactcatcgtcacaatgggttccacagatgacaggtctgtcttcccagactggagttgggaggtgggcaggaggttattggcaaggggagccctctggccatcattcttctctgtccaggccaccctgaaggaaggaactggggagggttgcctgtcctcctgaggcttgggaggtctttgacacatgctcagtaat

SEQ ID NO: 434953 - DNA, 1372 bp, Homo Sapiens
gcggccgcacaggccctgggcatcaatccagcagggctcccgactcactccctggagaccagctccccaaccacccggccctgatggcatcccgctgcggccaggtgtcctctcagccgaggtccttgtcactgcctagctgcgtccgcctgccacaccagctcacccgagatgtaggtggcctggacgtgaagggagtcgtcgagcaccacgaagtctgcgtcagcaccaaagtccagggtccccttactcttctccagccccagcaactgggcggggtgcagggatgcagcctccagggccgactccatgctgcagcctgtggcctgcaggaagtgccggacacagacgtccattggggctatgctgccactcagcgtcttggtgcctgccacgtaggccgtcagaccgtccacttccacttcctgctgtcccagcgtgtgccggccgttgcccaggcccaaggcagggatggcatcggtgaccagcaccagcccctggggatgggcacggtgggcgatccgcagggcggcggggttggtgtgcgtgccatctgcaatcatcccatagaagatgcagcggcctgcgggcagccggtcgctggtcaggagccccacgatgcctgggtcgcggtggtggaaaggcagcatggcgttgaagaggtgggtgatgaaggtggctccgctccacacagcatcctctgccgcccgcaggtcagccactgagtgccctagggacacgcagatgccacgggccgtcagcgcccggatcacttcgtggctacggcccaactctggggccagcgtcacgatgcggacattgtccaggggcccgtaggtggccagcaagtcctggaaggcatcggcctcgaaggagcggaggtgggcctcggggtgcgcgccccgcttctcccggctgatgaaggggccctccaggtgcagcccttgtgataaacctccggtggggaagtgaccagggtggggcagaaggaggtgacgccgtgcgacaggatcctccgggccacgagggcaacccccgaacccacgtcctccgtggcttgagagaagtcaacaccaaatccaccgttgatctgcacgtcgatgaatccgggagccaagatgcggcccccgcagtcccgccgctcgtcggccacgcgccgctcctcaaagaacagcttctctgggtccaagatgcggcctccgcgcacccacagatcctccctgagcagtttccctccgcgcaggatccggcagttagtgaactggagcacgcgggcccccgcccgcgccctgctcgccgcagcatcgtgagccgtgtcgggagcgagcggctccggagccccagcggcggccaaatcccgcgcccagtgacg

SEQ ID NO: 434954 - DNA, 1627 bp, Homo Sapiens
aacaaggcctgggcaccaatccaagcagggctcccgactcactccctggagaccagctccccaaccacccggccctgatggcatcccgctgcggccaggtgtcctctcagccgaggtccttgtcactgcctagctgcgtccgcctgccacaccagctcacccgagatgtaggtggcctggacgtgaagggagtcgtcgagcaccacgaagtctgcgtcagcaccaaagtccagggtccccttactcttctccagccccagcaactgggcggggtgcagggatgcagcctccagggccgactccatgctgcagcctgtgggcctgcaggaagtgccggacacagacgtccattggggctatgctgccactcagcgttcttggtgtcttgagggactgtgagggcaggctaactgggggggtggtggtctgcctgtcatgtgggcctgggtcacctggtacccaatgcccaggagctcctgtgggcagagcttgggctacagtccgggcacccggtccagccccttggggacccaccactcacagaccacctaaacccgcacccgtgctgctcactgacctgtggcctgcaggaagtgccggacacagacgtccattggggctatgctgccactcagcgtcttggtgccttgagagcagagagggcaggctctgggggggtcgtgggccacctggcatgcgggctgggacctgggacccagtgggtcagggcgctcacctgccacgtaggccgtcagaccgtccacttccacttcctgctgtcccagcgtgtgccggccgttgcccaggcccaaggcagggatggcatcggtgaccagcaccagcccctggggatgggcacggtgggcgatccgcagggcggcggggttggtgtgcgtgccatctgcaatcatcccatagaagatgcagccggcctcgcgggcagccggtcgctaggtcaggagccccacgatgcctgggtcgcggtggtggaaaggcagcatggcgttgaagagttgggtgatgaaggtggctccgcttcacacagcatcctctgccgcccgcaggtcagccactgaggtgccctagggacacgcagatgccacgggccgtcagcgcccggatcacttcgtggctacggcccaactctggggccagcgtcacgatgcggacattgtccaggggcccgtaggtggccagcaagtcctggaaggcatcggcctcgaaggagcggaggtgggcctcggggtgcgcgccccgcttctcccggctgatgaaggggccctccaggtgcagcccgaggacccctgccccatggggaccaccactcttcacagggatctgaggaacaaccttgtgataaacctccggtggggaagtgaccagggtggggcagaaggaggtgacgccgtgcgacaggatcctccgggccacgagggcaacccccgaacccacgtcctccgtggcttgagagaagtcaacaccaaatccacctgagcagtttccctccgcgcaggatccggcagttagtgaactggagcacgcgggcccccgccgcgccctgctcgccgcgcatcgtgagccgtgtcgggagcgagcggctccggagccccgcggcggccaaatcccg

SEQ ID NO: 434955 - DNA, 821 bp, Homo Sapiens
ttgggtccggtgtggaaagcagcatggcgttgaagagttgggtgatgaaggtggctccgctccacacagcatcctctgccgcccgcaggtcagccactgagtgccctagggacacgcagatgccacgggccgtcagcgcccggatcacttcgtggctacggcccaactctggggccagcgtcacgatgcggacattgtccaggggcccgtaggtggccagcaagtcctggaaggcatcggcctcgaaggagcggaggtgggcctcggggtgcgcgccccgcttctcccggctgatgaaggggccctccaggtgcagcccgaggacccctgccccatggggaccaccactcttcacagggatctgaggaacaaccttgtgataaacctccggtggggaagtgaccagggtggggcagaaggaggtgacgccgtgcgacaggatcctccgggccacgagggcaacccccgaacccacgtcctccgtggcttgagagaagtcaacaccaaatccaccgttgatctgcacgtcgatgaatccgggagccaagatgcggcccccgcagtcccgccgctcgtcggccacgcgccgctcctcaaagaacagcttctctgggtccaagatgcggcctccgcgcacccacagatcctccctgagcagtttccctccgcgcaggatccggcagttagtgaactggagcacgcgggcccccgccgcgccctgctcgccgcgcatcgtgagccgtgtcgggagcgagcggctccggagccccgcggcggccaaatcccgcgcccagtgacgaaccccagccgagagctgagac

SEQ ID NO: 434956 - DNA, 734 bp, Homo Sapiens
  misc_feature (74)..(74): n is a, c, g, or t
  misc_feature (685)..(685): n is a, c, g, or t
gtgacccgggaggcagccaccagctctgtgctactgcccttggaccctggggaccgagtgtctctgcgcctgcntcgggggaatctactgggtggttggaaatactcaagtttctctggcttcctcatcttccctctctgaggacccaagtttttcaagcacaagaatccagcccctgacaacttttttctgccctctcttgccccagaaacagcagaggcaggagagagactccctctggctcctatcccacctctttgcatgggaccctgtgccaaacacccaagtttaagagaagagtagagctgtggcatctccagaccaggcctttccacccacccacccccagttaccctcccagccacctgctgcatctgttcctgcctgcagccctaggatcagggcaaggtttggcaagaaggaagatctgcactactttgcggcctctgctcctccggttcccccaccccagcttcctgcttcaatgctgatcagggacaggtggcgcaggtgagcctggacaggcccccacaggagcccagatgggacaagcctcagcgttaccctgcaggctttctttcctgttgagggaaagccagcattcacgggattttcaggccaggcaccgttcagaaggttgaaaccaggcaaccgtattggggttaggggttggggaaggtttagncaacaaggaagaaggggttggggaagggcttggaatttttttgggttgg

SEQ ID NO: 434957 - DNA, 834 bp, Homo Sapiens
  misc_feature (17)..(17): n is a, c, g, or t
  misc_feature (47)..(71): n is a, c, g, or t
ccaagaaatcttaattnctttattgtttgactttttgactcaacaannnnnnnnnnnnnnnnnnnnnnnnnctgaaacgttcttgttgttatgagccttttgttttgttctcgttaaatgcactcgacccaaaattggtttggcatatcgaaaaggagaccaaggagggaggggctggggcgtgggaggtggggaggaggcccgaatggacagaaagttgaggataagagaagaggaacatagagacagccagaaagacatggggaaagagtgttggagacagagaaaggggaaggcaagggaaagccaaaagaaaccaaaatccagagaaaaagaattaacaagatttaggagcaaacgagttcaggagcctaaggaagggagtaggagaggaaaccaagacccttctctgtaccgtcccagctggggtgggggcgtcaaggcaccaggtctggttaggttggggggacacctgggctctgggggcggctttgcactggactgcagtgatgtccagccccagcagggggccctgccacacagctctgaggcctggaagccacccggcgatgccggctggaacaggacccgatacaccctctctccctttgattgtccgagtctggagagatacaaggaaggctgggcagggaggaagttggcctctctgtgtgcctcagccccctggaactctcctggccctcctcctggtgtcgggggcagccacaggctgggctgcttcccgggacaggccagctcctcgcctgctcatgcctcctgcccgctcttcacagacctctgaccaccccgtcgggtggagcgggtaccgagctc

SEQ ID NO: 434958 - DNA, 1517 bp, Homo Sapiens
  misc_feature (72)..(73): n is a, c, g, or t
  misc_feature (106)..(106): n is a, c, g, or t
  misc_feature (375)..(375): n is a, c, g, or t
  misc_feature (550)..(550): n is a, c, g, or t
  misc_feature (1315)..(1315): n is a, c, g, or t
  misc_feature (1500)..(1500): n is a, c, g, or t
agtctggagaggatacaaggaaggctgggcagggaggaagttggcctctctgtgtgcctcagccccctgganntctcctggccctcctcctggtggtcgggggcancacaggctgggctgcttcccgggacaggccagctcctcgcctgctcatgcctcctgcccgctcttcacagacctctgaccacccctccacacaacagagctcccagcctagtgcagtccgggaagggccatggaactgtcccttgccctccttagagtcgtctggcaagactgtccctggcctcacttctcctccccatctagacttcacccatggtcttctggtgtaatgggttaggcctttctaccagaaaaagccagagttggaanccaaccccacctcttccccacacctgttcccttacacgggacaaaccaccatctttggtctgaccccttctcccctaattgatggggacaagccagccccagctccccgggagaagggaggggctttctagcagcaaaaagggtccctccagccacctacctgtccccttccccncagttccttcctagagcccctcccccttaacccaacaaagttcatggcagcagcaggctgagacccgaagatgtttgaaaactcatggcacttgtgagaaaaggaggggcagagagatggggagaggtcagagcagaggtggaggggccacctctggggaaacggcaatgcaggggctgggctagggtggcctggggctatgctgcccctagagttgagggaagggggctggggaggctggcctgacaggctggagaggagggggccgggacaggtgctcaggacacatcccgagcctggagcttccggggtctgggatttggggtcaagccgcccagaacatgggtgtcccgaccccagccctggcacctggcttcggttccctgcgggaaggtggaggatagggaaggtgatctctcacctttgcccctccccatcccccagaccgccttgccgttcccagcaccctcctcagccatacccatgccctccacaaccccagtgcctccccattttccttctgccatcaacctctctaggtgggaaatcagccccatcttccccggcgagagtccccagagcaatatacaagaagcaggaactcaaagggacagcgcagccatcttgacaaagcatctttgggtgtgaagaggtctcccccgggccggtggggagggaagggggagacaggcctctggtcctggggcaggcagtgagaggtacacgccccagaagggctgatgatgccgggcaggcggagcaggnaaaggaggggacagaaacgggtgccaggaaggaaatgggttctttgtttcgctgttgcatctagattttgttttctgtctctggattgtaaaaagctgctctggcggcccgcccgccccggcggtgactggggatgcacgtacacggagaagtcctgggctgccaggccagcagcgctgctctgntccggagaaagcccggg

SEQ ID NO: 434959 - DNA, 963 bp, Homo Sapiens
  misc_feature (59)..(59): n is a, c, g, or t
  misc_feature (210)..(210): n is a, c, g, or t
  misc_feature (212)..(214): n is a, c, g, or t
  misc_feature (230)..(230): n is a, c, g, or t
  misc_feature (234)..(234): n is a, c, g, or t
  misc_feature (236)..(236): n is a, c, g, or t
  misc_feature (255)..(255): n is a, c, g, or t
  misc_feature (260)..(260): n is a, c, g, or t
  misc_feature (290)..(290): n is a, c, g, or t
  misc_feature (299)..(301): n is a, c, g, or t
  misc_feature (382)..(382): n is a, c, g, or t
  misc_feature (384)..(384): n is a, c, g, or t
  misc_feature (399)..(410): n is a, c, g, or t
  misc_feature (419)..(458): n is a, c, g, or t
  misc_feature (462)..(462): n is a, c, g, or t
  misc_feature (464)..(464): n is a, c, g, or t
  misc_feature (467)..(467): n is a, c, g, or t
  misc_feature (471)..(471): n is a, c, g, or t
  misc_feature (476)..(476): n is a, c, g, or t
  misc_feature (480)..(480): n is a, c, g, or t
  misc_feature (482)..(482): n is a, c, g, or t
  misc_feature (497)..(497): n is a, c, g, or t
  misc_feature (500)..(500): n is a, c, g, or t
  misc_feature (503)..(503): n is a, c, g, or t
  misc_feature (517)..(517): n is a, c, g, or t
  misc_feature (550)..(552): n is a, c, g, or t
  misc_feature (579)..(581): n is a, c, g, or t
  misc_feature (583)..(583): n is a, c, g, or t
  misc_feature (588)..(599): n is a, c, g, or t
  misc_feature (606)..(609): n is a, c, g, or t
  misc_feature (611)..(611): n is a, c, g, or t
  misc_feature (619)..(620): n is a, c, g, or t
tttattaatattttaaaatatgaaaactgtaaaacatagtttttttgttaacacctgangactgttcaagtaggtacagcatcttcatacaaacaatttgaaagaagaccaagtttaagtaagaatcttatgacatgtaaggaataacattgatgaagctattctttaaatagttgcattcatgtctaaagtccatttggttttctaaancnnnaaggtacattcttgcntctngngaccattttcttgacattncagcnaatcgctattggtgatagccccacttctcntagctcgtnnnccttatatttgttacacaatgtaataccaaagttataactttatcccaaaataattgtgttgaccatgtttcccttgcccntnctccctttcccgatnnnnnnnnnnnngcttcgtcnnnnnnnnnnnnnnnnnnnnnnnnnnnnnnnnnnnnnnnntctntnttncgcntgttntttngnggcgttgcgttgggnggnggncttccctgtttggnggccaatcttcagattgtttcttgtcctctagnnngttagttgagaggtactattgatggcnnntnttccnnnnnnnnnnnncgtggtnnnncntttccctnntctatggctcatcctacctctgtggccatacatcatgccatttctgattttttttaaaaagattgtgtgaatacttcgggtgagaataaaatataaaatactatctatataaagaataaacacataaaatacagttatgccttttaaaagtttggacagacgtatcttcatagagagatgcaaacaatgaaagtgtagttataggtccaaacttagccaaaatatgacagttttaatataatagtttgtttgaaaaaaagtagtcagacttcatccaaaccacccttgcggtacaatatttcttgcataaaataaccattctatctatcctatagtttatctt

SEQ ID NO: 434960 - DNA, 745 bp, Homo Sapiens
tgaggataaatttgctttcagtgcaggatccccggcccttcgcacatccctgtcagaatcctggagctttttcccgaattagcatctgtttcccgaagtctgtcacgtgctcgctgtatcttttctctggtcatgactaaggttttccgacatctcctgaccatttgctcggtttccactgctatttggtatccagcctctagtctccgagatgacctttccagcctctctgtgttatcgagcagatgtgccctctggttctctgaggaattcccatcatcccccaggagctcattccgtacttcgtcactgtaggcgatccgtgaccttttaaaatctgtttcgagttttcccatttcttgtttgtagcttctcattctgttgctgtacatccctcgactttggggtggtatctctcggacttccaaatccatctgttcaagcagttctttcgcttcttcaagctgtttctccacatttgcaaccatctgtttcttttcatcaggcgggagtcgtgggaccctcgcaatcttgctggtgatctctgcagtgagcaccgcgaagtcctgctcgtaaccttcgaagtcggacgacatggcggctccggaacgagtagcccaggccaaagcctaggtcagggaaagggcctcgaggggcagcgaggggccccgcggcttaggaaccccggaaggtgcccccgagagcagaacggagaaccggggacagctctcaacccagccgcttc

SEQ ID NO: 434961 - DNA, 425 bp, Homo Sapiens
acgctctctctgtgggggcaccttccggggttcctaagccgcggggcccctcgctgcccctcgaggccctttccctgacctaggctttggcctgggctactcgttccggagccgccatgtcgtccgatttcgaaggttacgagcaggacttcgcggtgctcactgcagagatcaccagcaagattgcgagggtcccacgactcccgcctgggatatttgcttgaagccaggatctctgaacttataccccactcatctcctgaagtccccagttagttctggaggagatggatgatgtcttaaagaggtttatgagtccaagtaagggaacaagaggagaggcgaggtgatgtatcatgaagagatgaggccatcagccactttgcacaaaatctctgagcagcagagcttggtgtaatacggta

SEQ ID NO: 434962 - DNA, 1349 bp, Homo Sapiens
attttgccaataattattttattgatactttttttattgttacaatgggaaagtaaggtgtcaaggatatagaaaggaagggcatgcatatgagggaacacagtatcattttagatcttagaaagcaatgagcatctgataagtctttggggaaataggaaaggaggaaaatctaataaagacaaagatcagcaaaagaaaaacaaagagaggctacaaaatgcagttatctacctggaattataagagaggggctaaatgtagtcatctcctctttttggagatcagaaggtctctgggaaaagagaagaaccaatttttcagaaaataactagggtcacagaatgaacaagtggaattagagagccagtgatggacgtgaggaaacagctgtgtaggttttgaccagtgagcaggtggtggtaatagtatcacagggttgctacttactgaatcactgctacaacatgcaaggaactgtgctagactttacagaatgattcctaatcattgaagcaaccctcacaaggtaggcattattatcatcccagtttcacagaggaggacatcgaggctaccaagttaagtagcttgtcctggtttcacagccagcaagtgacagggtcaagagagggacccacatcggccagacactgaagtcaggatgttttccacattcctacttccccatattacaaatttcacagagggtttaggtgagaatgacttggaagtttacaaagtcccagtgagggttaaagaacaacaaggagattcagatgtgagcaggatatttataagtgtcacaggaaaattattggatcctgcctcccaggatttctaggggatggaaagaagacagggattatggtgggaggtgattttgattggaggatttctttgagggagggaactggcagaaggagtcaggccctacggtggccctaggcagaaatccggtagttggggtggacctggggcctgacgtcgcagaccatgccaagaagctgggccaggacacgctctcggtttctctgctgggagctctgcatgccctgcacctggcgccttgtagcctgctccacctcagcagacaggttcccctgggagcccatggccgcctgctgcttgctctggaattcgtgctctcgctctctgcggtattgctccacctccatctgtgcctcctcctttgcctgcttcagtcgccgggccttcctctttctggcatctgccaccttctcagctgcccgcttctcagcttgcagaagctgctggataccttgggactgactggccatttctgttgttatggccgatgctgttttgaatgctgtcaaagtaccccc

SEQ ID NO: 434963 - DNA, 927 bp, Homo Sapiens
  misc_feature (764)..(764): n is a, c, g, or t
  misc_feature (847)..(847): n is a, c, g, or t
  misc_feature (849)..(849): n is a, c, g, or t
  misc_feature (879)..(879): n is a, c, g, or t
  misc_feature (893)..(893): n is a, c, g, or t
tggtagacaacagccaaagtttatttaacgtgggaatgcttacaataaataaagcagaggggtaaagagaaacagaacagtaccttgaggacaaagaaaccccaaacccaacacaaaaatcaactcctgccttcttctgtatgccccaggctctgagaagccactgttcctccccagggtagagagactgcaaggccggcggccagcagtgcacatccccaagcagcagctgggaccctgggtcctgaggggccactggagacctaggaagcctttgcaagggcaaaacccaatggcaacatgcccacgaaagcttcaagtcagaacgtgggcctgcaaaagacatttctgggctctgctctctcctctaggcccacacacctgctgaacagacatctgtgcccaggcacctcccagaagcccctttattataggacatctactctctgttcctgtcctcactggcccctcccatcatctctctgaagactcttattatggctgcctcctaattcttccagagcagccacacccaggactgtgacgggctctcacccactgtggggtcacagacaggcatggggctggctcccatcccagctgcctcccccagcatcttcagaggtggggtacacaagactttcagggggctggcaaagctgcaggaactgtgcagcttaggtgaaccctggattctgcaagccccagtggagttttctcagcttctggaaccacaggccagagctgccggggcaatggggctnccagctttggtaagggctgttggcattaagtggcacccggtggctggaggggtctcccagggaggacggagcctgccccacantntcccacagtttcctgggagtgctagaattngggttcttccacgnaggctcagaaaggcaccagggggttcctcctctt

SEQ ID NO: 434964 - DNA, 338 bp, Homo Sapiens
cagcggcagcaggaacagatgaaacagcagcagtggcagcagcagcaacagcaaggtgtacttccacagactgttccttcacaaccgtccagtagtactgtccctcctccaccacacagacctctttatcagcctatgcagcctcatcctcagcatttggcttctatgggttttgatccaaggtggctcatgatgcagtcctacatggttcctcgaatgatgtcaggaagacctgctatggatattccacccattcatcctgggaatgattcctcctaaaccattaatgagaagagaccagatggaagggtcaccgaacagttctggagtcatttgag

SEQ ID NO: 434965 - DNA, 1944 bp, Homo Sapiens
  misc_feature (241)..(241): n is a, c, g, or t
  misc_feature (302)..(406): n is a, c, g, or t
ttatggatgagtatttatcatgggactctaattgttgcgtattaactttttacatttggagcatttgtgtatttcgatagacaccttccttctcgctttatccagtgtttttgttcttaggtttcacggtgtcgttgatatcgaatacttcacactatttatagaagtgttaatgatttgattttttctgatcattattatttgaaatataaatactatcatttttgaaatttttccgagnatatatattcagcgtttcttatatagtcttgcgtctccttagtgctcgcggcccaagattnnnnnnnnnnnnnnnnnnnnnnnnnnnnnnnnnnnnnnnnnnnnnnnnnnnnnnnnnnnnnnnnnnnnnnnnnnnnnnnnnnnnnnnnnnnnnnnnnnnnnnnnngggtgttgtggtttaagtatttttgtaatgcttatttttttgtttgttgataatattggtgtaaggtgtttcttttcttgtttggtttgtgttgcctagttattgtgcatatgtatttttgtttgggggggcaccagctggtgcagcgttttcattgtgacgccacttggttagttgaaatgggacacatacagggccgtggctgagtaaggcggcattcaccacgaggtgtccgatcacaagcagagaccccgctttgtacagccaagactttttatagttattcagcaggtaggagcagcctctggcagccgtgatgttgagcatggggaaggcatagatgatgaagcgtagctccttgtgtggcaggagggagtagagtgccatgaagcccagtgccagcaccgtcggcgcgtgcgtccttctgtctaccaagcccagggggatgaagagcaggctgcagcccaggccgcggggcagggctgagtagaagtaccacagcagcggggaggtcccccagttggagcttttgttcaggacagtgttgtaccaaagcacctttctcttccggccaagtgagctgccgccaaaaataagagtctatagcaaccgtcagtcctaaacagaggatccctgccgggacggcgtggcgaagggctctgactacagaaacctttcggttgcccaaggccagcagcagcaggaggcccaggaacaggcacagctccaccctgtacacgatgatggcgaaggctgacagccagatgaagcgggcccactcgtggccgcagccaggccgcgagggccagcaggactacaggcagggccagcacattgggcagtgtccgcgtgcagtagaacatcaggtggaactgcatggccgtcacccagcagaacatggtggccaccatggccccgaagtgccgtctcaccttccttttgtaacgtccagagtccaaaaatcacgccgagtccaagcactcctctaactattagctgagagtaaaacttggacattttctaacagcgaaagcacgtaaaccgcggggctggagaacactgcgatcaccactggcccgaggaacgtcctggggacgactccggggaactcaagatggtcgtactgctccaggtcttgccagtggtagagcaggtcatgtgtggcctgcaggttgaagctctcctccactttggtgtagggacagatgaccaggtggacagtggctacggccaccagcagccccagcagcaggggccgcctgcctgatgacccctttccagccattccaggctttcagcttcacgtaccttcacaggccaacagtgcgagacaccagccgttagcactgccactccacgcatgctccgcagctcccggcggcgtccttcgaagcgcggctgcctgggccagcctcggcaggaagcaggacggcggaaacagaacagagcccgaatctaaagtccttgcccaaatctaaagtggctaccgcagccccggccgctacggcacgcagagaccctctgtgaactgagtaaag

SEQ ID NO: 434966 - DNA, 443 bp, Homo Sapiens
aaaggtggtcagttgggaggggagctcctgggctctccctggctgccctggggtggggctgagcctcagttggagtcagagtctgaggagtcccctgaggaggaggagctggagctgctgccctcggactcattatcttcatcctcatcgtcatcctcgtcgtcgtcttcgtcctcgtcatcctctttattctcatcccctatcctcgctctcgtcctctgctgctggactcagaggagtcgccgccatcttcagaggagtccccattctcatcatcttcctcttcttcatcctcgtcctcgtcatcctcatcctcttcatcatcctcctcggactccgacttggactgcagagtagtccggctggatttggggtttgggcctcgcagcttggtcatgctcttacgtttattggagatgtactctttatatgctgcacggtcc

SEQ ID NO: 434967 - DNA, 982 bp, Homo Sapiens
ttttggacgtgaaatctttacttagagaaaagcgacagagtcagagacccacgggggcggggctgcagcgagggcgcctggggacacgaacacggcggagagcatcgggagacgcgctggtcacaggagctggcggaggacgcccgggccgggctgcggggctggagacgtcactgcgcgggcgggggcgccgcgctcccggccgccttccgcgccgcctccttctccgccttggccgacggcttcccggggggttcggtggccgccgccgccgccccagcctgggtgggccccttgcgctcctccttggctgcgcggtagccgtccccccaggccgccggcgtctccgtgccgtgcttgcggctcagcgggtaggccccgatggccgccaggatgctgcggtggcgctcggggtccatctccgtgtagtacatctccagggtcagcggcgtgcagatcttgtgccgcagcaggaagccgtcggggcaggtgaactggtcgtaccagatggccttgtacatgatcagcacgcagcccagtagcgccatggcgaaggcgatcatccgtgcggtgggcagcctgcgcccttcctctgggtggctgcagttcagcctctggccctccaggtcagggaaattctgctggtctggggaggacagctggtattctgtctgtgtcttgatgaccacctggtcagggagtggcggctggagctggctgatgtccaaggggctgatcagaggcacactgtccatggcagccccatcctggtccccagggtctttacctggcttcccagagaagctgcagcccagcttcaccatggtggatggcagtccttgtcaggcggctccactggcagctgctgcaggacgcggtcggggaggacgacgatgcggatgtggatgcggaggatgcggttccagacgcttcgcggccgggcggggcgggggctgcagctgcgagaccgaggctgtggtcg

SEQ ID NO: 434968 - DNA, 1003 bp, Homo Sapiens
  misc_feature (8)..(8): n is a, c, g, or t
  misc_feature (11)..(11): n is a, c, g, or t
  misc_feature (14)..(14): n is a, c, g, or t
  misc_feature (23)..(23): n is a, c, g, or t
  misc_feature (31)..(32): n is a, c, g, or t
  misc_feature (61)..(61): n is a, c, g, or t
  misc_feature (82)..(82): n is a, c, g, or t
  misc_feature (90)..(90): n is a, c, g, or t
  misc_feature (102)..(102): n is a, c, g, or t
  misc_feature (119)..(119): n is a, c, g, or t
  misc_feature (128)..(128): n is a, c, g, or t
  misc_feature (142)..(142): n is a, c, g, or t
  misc_feature (157)..(157): n is a, c, g, or t
gcctttgnccnagntggttttcnagaatttnnatttttccgcgctgtggacccccaggtgntgggccgcagcctcaggggantcggaggntgcactcaccangcctccccaggtgactncccaccagngggtgcatgtgtgntaccatgagctgcanactggaacgtgaggcccaggggcggggagccttagcagatctgtctactggagaatggaaggctttggaaacagtccacgttagaatgactaaagctatcattagtaacattgacagatttaaacaagaggatgagagaagatatttgccagatatactgcagaaaggaagtattacatagaaagcccgtaagtcactgaagatgagacaatgacccactgggcaaacaagcaagcagcactcgcgggcacttcccagaaagaaaaacatctcaggagcgccactgtttggtcagtctgcacctgcagcctcgggagggggcctggtgggtgcagggcagccggtggggccagctctgggcgggatgactcactgccaccctctcctccctgagagcaaggggaccccagactggcctggacggaacccaggcacccccagctgccttccaccttctcctcctgtcctgagtccccacagtgggtggggtgggtgtggttaccctgcgcccttcctctgggtggctgcagttcagcctctggccctccaggtcagggaaattctgctggtctggggaggacagctggtattctgtctgtgtcttgatgaccacctggtcagggagtggcggctggagctggctgatgtccaaggggctgatcagaggcacactgtccatggcagccccatcctggtccccagggtctttacctggcttcccagagaagctgcagcccagcttcaccatggtggatggcagtccttgtcaggcggctccactggcagctgctgcaggacgcggtcggggaggacgacgatgcggatgtggatgcggaggatgcggtt

SEQ ID NO: 434969 - DNA, 499 bp, Homo Sapiens
gtgtttttagaaagccttttatttatcagaagtaaaatctgctccttttctccttaactccatggtttatgctctggagcgcgctccgcagagtccttgctgcgctgggcaggtccactggtgtctgcgcccctctacctgggtggcccctccccttacaacgcgcgacctcctgctccatgcccctccagggccctgagttctgaactggaggctgatcttcggtgtcctgaagccatggctccattacaaactgtccgcagtgtccccaaccgcagaagcgggagggcctgggcccggggcgcacaggagggctcagccccaccgaccctgacccggcccctcccgcagcacaagatctgcacgccgctgaccctggagatgtactacacggagatggaccccgagcgccaccgcagcatcctgggcggccatcggggcctacccgcctcgtgccgaattcgccacccaggcctcgtacctagtaccgtagagtatg

SEQ ID NO: 434970 - DNA, 895 bp, Homo Sapiens
cggacgggaatcttactagagaaacgaccagagtcaggacccccggggcgggctcagcgaggcgcctggggacacgggcacgcgggagagcatcgggagacgcgctggtcacaggagctgtcggaggacgcccgggccgggctgcggggctgggagacgtcacctgcgcgggccgggggcgccgcgctccggcccgccttccgcgccgccttcctttctccgccttggccgacaggctttcccggggggttcggtgaccgccgccgccgcccagcctgggtgggccccttgcgctcctccttggctgcgcggtagccgtccccccaggccgccggcgtctccgtgccgtgcttgcggctcagcgggtaggccccgatggccgccaggatgctgcggtggcgctcggggtccatctccgtgtagtacatctccagggtcagcggcgtgcagatcttgtgccgcagcaggaagccgtcggggcaggtgaactggtcgtaccatatggccttgtacatgatcagcacgcagcccagtagcgccatggcgaaggcgatcatccgtgcggtgggcagcctgcgcccttcctctgggtggctgcagttcagcctctggccctccaggtcagggaaattctgctggtctggggaggacagctggtattctgtctgtgtcttgatgaccacctggtcagggagtggcggctggagctggctgatgtccaaggggctgatcagaggcacactgtccatggcagccccatcctggtccccagggtctttacctggcttcccagagaagctgcagcccagcttcaccatggtggatggcagtccttgtcaggcggctccactggcagctgctgcagacgcggtcggggaggacgacgatgcccgct

SEQ ID NO: 434971 - DNA, 2575 bp, Homo Sapiens
gttggttcttttcacactgaaacacatctttttattatatactaaatttaaaaatacaaatcttattaaaaatgcttatcaaacattgtatacataagtactgtcaaatactattgggttttgacattatgtacatttgctaaggttaattagaaacagaacaacgtaatatcactttgctgacactgaatttcagcagttaagtgttttaaaatttggcaactatgaagtagtgatctgcacaggaagatgtttggagaggtaaaataataagaaaacaaacggaataatgcagacatttctgcagtaagtgttaataagtagatttcttcctcatcctcttaactcattgtaacagaaattaaagtgcacaagaccaccaggaatacctgatttggtgtaccctaaatatacactacagccggctgtgctgccatattgagggtttcaattctttgtactgttcctgaggttttggaagttaattttgaatgtggctagcggaagggaggccaacactttctaaattgcaccaaatggccttaaagtgtagaaataccaaagaaaaaaatattaatttggaaatagattcaaggaaataatccctgtctactttgccctaggaataaaattagaataaggacacagttttacctctggaaaatgcttactaaaatctgtttcaaaagaccagacatgtacagcaagcacaatactgtcagttattgttcaccacttatatactgcatcataaataccaggtataaatacctgccgctaaagggtcactagaaatacaggtagaagcatgttatcactttacactaattttactcattaggtataatttgtaaaaataggtcaccaccccaccatacaatcaagaaagaggaaaagaaaagttgctattctacaaaagtgctccttttagctttcaaccccaatagcttaattttgggtaaaacaagattgtaaggtatggccatcagttctaaataagctgatgatgccatatatacatcctcatatatatatatgtttaaatttcagttctggtttaacactaatgtactagtacaaaccatttataggaaacattctatcggccttatttacaaacacacaatgaatgacaaagatatggaaaattttaaaaattgcagataaatgtagtcatagtttactaaagataagacaaatttgcataactttttttaaaaccaaagaaaaatgtttagaaagaaacccctaccatatacagaatacctattggtcatcggacctaagaggcaaatcaacgtaaggatcgtgataaaatttttattactgtttcttttaataacatatcaatgagatctatttagagtactacctacaaatacacattctctcatgattcagtgagaatattaagttattgaatacatttttttactctcatggcacttacatttggtaacactaataaggtaaatttagataacacttaaatcatgattatgaatgtttaattgaatattttcctttctgtagctgtgaaatgtaaagcttagatttgcttccatcaggcctcttaaaccaaacttcatcatggttaattgttgtaattacagcacttgtaggacattcatcttttttatcaatacatattgtttgtccacgtatataccattcaccatcataatatagtcttccctcttcagatctagcactgtgcagatgttttttccagtttcacaggtggttccgttttcactctgtgtggccccaatgtagccattgccttcctaattgttgtccagtcttcaagaatatcaagatcttgtagcatataaactatatatggacctgaaacaacaactggcttctttttgtcaggactgaaaggatccttcctcttttttcttgactgaagctcatcattccacagctctgaggtaatatcaatgctgtgcctatcctcttcaagccttcttatcttctcctctagttcactctggactgtatcatatagcaacagcttttcgctctcacaatgctggcgagaagcttgaatttcacattcatatttgttctttacagattctaagcagagctctctatagattcctgctacctttgtacgaatttgcatattttcctgtaaagttgccagcggttccaagtattctggtgcttttccagctatgacttcttgtagttttgcatccacctgacttaatcgttctttataaagttgatctttgagatcggtaaactgtttttcaagattggacatttcatccaaacattccattcttcttctttcacagtcttcatcatccatttctgagctatctccatcctcggagaccgacgagctctcagtgtcctcgtcctcggagctgctcccctcattttcggcgtagtccacctccatctcatcgtgatggttggtctccttcttatcccctcgggaatggactggcattttccagccgcgccgtcgctttccactaccggcgcccagcccggccaccgccgcttcaatgaagggcgcgcggaacgccccaacccacccagccaccgagcttgc

SEQ ID NO: 434972 - DNA, 531 bp, Homo Sapiens
  misc_feature (319)..(319): n is a, c, g, or t
  misc_feature (399)..(399): n is a, c, g, or t
  misc_feature (460)..(460): n is a, c, g, or t
gaaacaattaaattttaacaagatttaaatgtatttatttaaactaggtaacataagtacatggaacaaaagggtatacagtgagagccagtggctctctctccggtcctccaactccttgacatttctactgcagcagcaattgctagtactagcatccttacagtcttctaaatagagtccttgcattcccaaatatgtaagtattctaaaatgattcctttggtcttctttggagaggaaatttaccttggagatcctggcgagtagtaaaactttctgatgagggaagaactggtctttccttcatgggaactcntcttgccacgcaaatcaagcaggactgcaaatcttaaaccacacatgtttacatttatcatattgggcttttctagtgantcaaacaaacccaagtgtatttatgacagcacagcctgtcattaaaaaagcagtaaggganacagtgatgaaacactatgtacctgagcttcctactggttttattctcttcatgaaagtggtaggtgggta

SEQ ID NO: 434973 - DNA, 1248 bp, Homo Sapiens
gtctccaattctccccggtaaccatctaccgctggctgtgcaggtggatgatgtctgtggcgatggcattcaagaagttgcgttcgtgggagacgactaggatggtggagggccacgtctgcaggtaattctcccagccacaggatggcccctgacatccagcatgtttgtaggttcatctaacagcagaagatctggcctagcaaagagggcccgggccagggccagcctcatcctccagccacctgagaactcccgggtgggctgctgctgcattttaggggtaaagccaagcccagcgagaatgactgatgccctggcaggtgccttgtcagcctcaatctcctccagtttggcatagatttctgccagctctgcagcttcagagccctccgccctgccagcagcaatctgggcagtgagctcccgctccctccgtagcaaatcctctcgcacactgtcactctccagcacactctgcagggcaggagtgtcatctccagcaacctcttgctcaacgtgcagcagggaaatgtgggctggaacccgcagactccgggtggccagcatcttcagtaacgttgtcttccccaacccattccgccccaccagcccgtaacggcggccccatgccaggttcacatccgctccagccagcagtactctatcgccaaaagacacatcaaagttctcaattcgcacatcataggatttgttcttgccagatgattccaaccgactctcctttctgctgcctgcctggctggctgatgcctcttctaagactagagggttgctggtcttgagcgtgtccttctctgagcgcttctcctgctttgccttaagtcgagcctcggccttctctaacttctttgcattcactgtcgaggactgttccctctttagcagtcctggaagtttggttccacagtcgtagttctccgttatctttgacaactggataggggcgtccagtagcacctggctatttccctggctttgtggctcagccagacgcagagtgttgtacatgcgctggcacacggccctgatgcccgcgtcatccttgctgtccccggacacctcttgcaatagttcccctacagcttccaccaggtcatccacagactcgaagtccgcgctgccgctgtgcaagacgccggtcacgtagtcgaagacttgtccgtcaatttcggggaactcgctccgcaggatttcggcgcaagtcgccatgttccactcaggaac

SEQ ID NO: 434974 - DNA, 866 bp, Homo Sapiens
  misc_feature (612)..(612): n is a, c, g, or t
  misc_feature (758)..(758): n is a, c, g, or t
  misc_feature (809)..(809): n is a, c, g, or t
  misc_feature (821)..(821): n is a, c, g, or t
gtctagagcttagtgatgggagatacccgtgggcacatgatacagtagaccattctcctcccttggttctgggaagcctcccaccctgcctactactaggcttaccccttgttgtgctgaagggtcttccacagtggcctccttggggacccagaacccggaggaaggggcatagaggcaggaagtggggccgatgtctgcaacccagaccacttcgtgtaatgggctcttgaccaaatccctttttttgcgatttacccgttcaagcaaaacaacgttttggttaactaaggattgtgctaaagccgataccaggtccttcacacgtgtgcactaggaacaggagcgaacagcacagagagacgctccctgtgggacgcagcagccccgtggccccggtccagttcccagccaccctccctggctctgctcacaccagagatttccatagcaggagcggttggtgcagaagtaggttcagatgaacctcagttaacgtcgccacccctcctcccaccatggtaccctgtaggagccctgtatgacatctgagcgtggtggaggtaggagggttgccagctgcagtgaccctgccacagaggcagggtcagntgcagaggtcgctttggttccgcttccctgggccacagaacggaacacagcataggttctgcagcaggagccgcagtggcaggatggagggtgcgaagggcaaggagtgcactgctgggcattcctgggccagccccggccctctngtgcctgctttcctgtgacttcagaaggcaggtggacagagcctccctctnggccttgtcctntttcccagccacagaacggggcagggttggcacccaaccccaggg

SEQ ID NO: 434975 - DNA, 291 bp, Homo Sapiens
attgacttacatcctcaccagcagtgtgtgggagctccagcagctccacgtcttggttagcacttggtgttgtcagtttttttaatattggccattctggtggtacccaggaatttgaatccatagttcctgacttgaaatcagggcccttcttacttttagcatgctcaagacaggtttgaattttgtagcctcgaatggcctcagaaatcaatacccaggacccacaatacagcaggcaagcatatgagggagcccctgcttcatggctccagtgcctagggagggtct

SEQ ID NO: 434976 - DNA, 732 bp, Homo Sapiens
gggcacaggccgctattttaaccatgcagcttctgtggttcatgcattgccttatgatctatagtccttcttgctgtagggcttgttgcgcagtatgttatcaatctcatttaccacatgtgatgtcatctttgggagaacctgaatggcaccaaggttttcaatgagttgttcaggagtggatgatcccaggagcacagaactcacaccttcatttctcaggcaccacgcaacagctagctgaggtagtgtgcatcccagacgctccgcaattggggaaaggtcttttagcttgttttgctgttttctcccttcttcacttacaattctttctttcaaccactggtagcacttcagtgaagccctggaactttcaggcaccccgtttccgtattttcctgagatgattccacaggcaagtggagaccatgtcattgcgccaacacctattttgtggtagagctctggcagctggacctccactttctctctctggaaaagatggtactcagcttgttcacagaccggtgggatcatattgaactgtcttgctacagaataggcttccatgatctccatagcactccatctcgaggtgccccagtacatcgccatgccttggtttatcacatgtgtcatggctcggacaatttcttccatgggagtgttactgtccggtcgatttgcaaagaccacatccacatactcgagctgcagcctctggagggagcc

SEQ ID NO: 434977 - DNA, 746 bp, Homo Sapiens
atgaggttcacatattttattgaattaccattctttgacatcagatctttaccagacattaacatttcaatgttatgcttttccccagtgctaccagtggttgaaagaaagaattgtaagtgaagaagggagaaaacagcaaaacaagctaaaagacctttccccaattgcgggcgtctgggatgcacactacctcagctagctgttggtaagaaaattactaagctatggggtggtagagggacttctgctgagatcatagttttctattgctgaccacacccttaccatgataaaatgtctattgcagggacagatgatctctgaagcataaactcctgctaaatataaagtgagttatttgaggttccccagaattttctacatgatagcaaatttttcttacttctttctccttgctcttataacatagtttgaatgagaacatgtcagtgataacatacactatcacagatgtcaggggtgaactgtgtagtgacatccatttcttctggctcaaatttctgtctgttgaaaactaaaccagggttggtgagaagataagatacagggctgtgacaggcccaaggctactgccacatgaaaagctgatcctagagaaatagcttcaccctgaaagttcttgaaggccataaacgttgttcttctaatgctgtggagtccatgaaaggtcatgattgctggtaacaattgaaaaccacacgcggctgggcacggtggctcat

SEQ ID NO: 434978 - DNA, 2428 bp, Homo Sapiens
cactgtttcgactgtcacagtaatttttatccaatggtttatatgcatgtcacgtagaacttttaagcacattaatctcagacatgtcctatacaagatgtattttaccaggcacttgaatgttaggtctattagtgacaaaaagtagagttcacaacaatttcatggactaagggcagttaaggtcgttacatatatactttgaggtctttcaccaatccaaatatagaaataacactattttacgaacttgggataagaaatcagatctccctgatatttcctacccataatttttgcggaataaagcagtgactgctgccaaggcctgatgaagctttttcaacaaatgtctaagacacagttgtttcaattctagttttcttctttttctctatgccggtataacccacacccttactgttggtctatccatatcctctatgcaaataagtcacctcaagattcagggcatcaaaaatggttataatttcaaaatagtccacattttagtataaattttacagcaccacagacatcatgagtttaggtatcttggtctggcaatatttcaatgtggtaatatcaacccataagaatgtgtaaatattgaacctttaataggaagtcattgtagcattttgttaaatgaccaaagttattaataagcattgttaatgctttaagttgttaaacatttgaactgtcagaatcacgtaaggaggagatattacacatacattgttaccacccgaatgagaacacacaatgcttcagacagatgatactgagatattttggatttttcctgttgttgtgttctgtttttaaagaaattatagtttagtttggccactccctagattcttggtttaccagcttataaagagtacacctaagaggcagtataatatacgcacgtagagaccatttccccctttatcatctttggctagaagcctcatgaaaggaaactgaggacggcagaggcaggcaggctccgtgcgcttctgcctcacacgtcactgaccggaaggctcgcatcgtccaagtctactaggtcacaatctttttcctgagggccatttttactttgaggtcttaacagagcttgttcagtcactttggaagctggttctcttggagagacagtctggaccttgaagttcctggcttgaccttggcaagagactcgtaaaatcctcgcttctccatggtaaaggttgagaccaaagagttgctgcgagaggctgtgaaatgtgaggtggcggcggctgcgttggtaggacggaaagcgtgtttggattctgaaggaccggggggatgctcagaagacgcagatctgccgggaccccgctgtgctacaatggcgccagagactgctttaatccaactgtgcatctcttcagggctatcagcctgcacatagatagttcgagacgttgttacaatttcaaaagaggttgtccctcatcattatgtcgcttttgcttacattcctggacttgtatgaacctctttaagtggtattacgcgaagaggttccttttccagttcagatttgaagtagcctattgctgttttcatccaattgaaaatatcgttctcttccagtttttcatcactgctccttgttttacacaatatccagctttgataaccgcactatcttgaggtggtttaggagtaaagtaaggaaagatggctttgtgaccgtttcagattatttctgtcaatactttcaccacattcatttacttcttctttctgagtgggagtaatgatgggtacgccaccacaatatcagttctgtaagacacttgctttttcccacattcaccatggcgacttaggttatcagaattaggctgtgagtctgactgctttggtactgtaatttttatagctttgtttaacacatttacccattccactaggtcctgctgatcattggcttgtaggaagtacttcctcattcctgcattcataacaaaacagaactccgcctttggccttagcttagtagcatcgctaacctttgaaatgtaggtaagcttaatggctccaacacgtgatgatccagaaggtaggttctgtggattatccatgtaccacacgaaactatcttctctggtatccagtatgaagtaccttcgaagaaatttcccactgttttcattttcttcaatgtctagaaaaccacaaatgcgattctgacgatccacataaggcatttctgagcttgaacattacactacaggagatgcagaacacagaggaacatgctaaactgcaccaaaggaattcaatcagcaagagccagacgcggcctcggcccggagcacccgcgccgccgcggccccggctcccacagaggctcggctgcccggagcggcgtccgcgacggccagcccgcgcacatgccgct

SEQ ID NO: 434979 - DNA, 1016 bp, Homo Sapiens
ggggaggggggaattatgagatgggtacccgccccccaacaattatccagttttgttaaaaaccttggttttttcccccccttccccacagggggaatttgggttattcaaaattagggctgggagtccggactgcctttggtaccgtaattttttatagcttgttttaacacattttccccattccactaggtctggctgatcattggcttgtaggaagtacttcctcatttcctgcattcataccaaaacagaactccgcctttggctttagcttagtagcatcgctaaccttggaaatgtaggtaagcttaatggctccaacacgtgatgatccagaaggtaggttctgtggattatccatgtaccacacgaaactatcttctctggtatccagtatgaagtaccttcgaagaaatttcccactgttttcattttcttcaatgtctagaaaaccacaaatgcgattctgacgatccacataaggcatttctgagcttgaacattacactacaggagatgcagaacacagaggaacatgctaaactgcaccaaaggaattcaatcagcaagagccagacacaaaccactcaagacggccccaaagctctgcggttggcagctggcctcggcgtcgaaagacctgggtctggtcgcctccccggtgccacctgcgtgaccttgggcaagtcgctttcaacgctgcctctggccacctgccccgaaggtgcggaggtaaatcgcggacaccgcccgacttcagggcccagggcggagccggcttcggcctcggcaagtcctgaagccaaaatgcattaaacaccaggaaaggatgcccggggacgcgcgcccggcgggcacagccctggagggaggcgctccgaccggcgccaccgggaatccccgggcagctgcgcgcaccgcgccccgagcgggatttctcggggggcggagacgccgaggagctcgtcggccccgcgaccgccgcgggcctccatcccgggaattccggacgc

SEQ ID NO: 434980 - DNA, 1631 bp, Homo Sapiens
  misc_feature (1)..(3): n is a, c, g, or t
  misc_feature (29)..(29): n is a, c, g, or t
  misc_feature (31)..(31): n is a, c, g, or t
  misc_feature (33)..(33): n is a, c, g, or t
  misc_feature (63)..(65): n is a, c, g, or t
  misc_feature (76)..(76): n is a, c, g, or t
  misc_feature (87)..(87): n is a, c, g, or t
  misc_feature (89)..(91): n is a, c, g, or t
  misc_feature (104)..(104): n is a, c, g, or t
  misc_feature (113)..(114): n is a, c, g, or t
  misc_feature (135)..(136): n is a, c, g, or t
  misc_feature (138)..(138): n is a, c, g, or t
  misc_feature (159)..(159): n is a, c, g, or t
  misc_feature (164)..(164): n is a, c, g, or t
  misc_feature (170)..(172): n is a, c, g, or t
  misc_feature (178)..(179): n is a, c, g, or t
  misc_feature (201)..(201): n is a, c, g, or t
  misc_feature (217)..(217): n is a, c, g, or t
  misc_feature (220)..(221): n is a, c, g, or t
  misc_feature (268)..(268): n is a, c, g, or t
  misc_feature (422)..(422): n is a, c, g, or t
  misc_feature (457)..(457): n is a, c, g, or t
  misc_feature (462)..(462): n is a, c, g, or t
  misc_feature (465)..(465): n is a, c, g, or t
  misc_feature (580)..(580): n is a, c, g, or t
  misc_feature (1214)..(1214): n is a, c, g, or t
nnntagtattgttgtgtggtgtccagtanangnatgtaaccgctacaagatccaggaaaaaannnacacggcagangacgacagttntnnnacttgctccccanccttcccgnnaccccgccatgtgcaaaattnnanctggggtctgcagctgcttgntgatntccagnnnctcttnntccacagcctgcaaggtctgancaggcaacggccctgnttnngtgaggcccccgcctggtcactccccgcgccccccatgcaggcagtngaggggaggacacgcaggaggaccagacgctaaaggtgtaaacgggcagccgtggcactcctcacctctcaataagataaataactaaataaataaacaactaaataaagacatgaaggaatggatgcaaaaacgtgaacggatggcgcaggangtccctggtgggggccacggtccccttaaggcatntggcnacnctgcaggcctctggtggtaggtgggtcagaggctggtggaggacacggacagcgtcggggaggatggcggcgggaaattgagcagctccagcaccgccacacccacactgctgcnccgggtgaacatgcaggatgcggccacccacttgttggtcctcgggttgtacttctcgatggagttgaggctggagctaccgtcgttaccccccacggcgtacaaccatccgtccatggccaccaggtcatgcgtgcttctgcggatattcatgggcgccacgctttcccaggctccagcctttggactgtatctctctaccgagttgaggcagctggtgccgtcgttgccccctgccacgtacagggcaccctccagcacggccacgcccgctgagctgcgtcggctcagcatggacgccacgggcgaccacacgttcacttctccacagtggccaggtgtgaggagctgtcgtagccgcccacagcatacaggttcccatcaagcgtggccactcgcacatagcgcctccgggtgctcatggcagcgacggacgtccacgttccggtcagggggtcgtagcgttcagcactgttcaggcaggaggccccgtcatagccgccggccgagtacaggagtccatgcaaggcggccacacccaggcagttcgccttgtgcccatggacacctccggctgccacgtgttagtcacggggtcgtaggactccacggtagccaggtctgaggtcccatnatagccgcccacagcatagagccggttccccaccgcagccactcccacccgggcccggcgcgtggacatggaggccaccacgtgccagcggtcggtgcgcgtgtcgtaggcctcacagtctccgtggatggcaaacaggctcccgccgcctggggagggcaggtggagacgggactcgtgagtggatcccactgctgggccacaccccaggctcctggagaggcccccacagcaaaaagcacaggcccggccccctcgcagcgccggggacgtgtgcggctggtgcctaggacgcccctctgctcaggcagcaggtggaacttcagggcctcgatgaggaggtccttgcagtcagggtggtgcctcaccaggctctcggcatccacgtggcccagcaggaagtcgcggctcagcaag

SEQ ID NO: 434981 - DNA, 410 bp, Homo Sapiens
ccctaagatgtcttcttgagctgtcttactttgatatctgttgtgtaacgtttgtactattatctgagccagatcctttcaaagattgcctttttataaaattgaagctatagcttttaggctaaaattttaacgtagatatttttatgagatatttttttcaagagtttgaatcgctttttattgtccatggtaatgaaatgttgtgttctttgcatcattcactctcaaacgtagttcatgcctgtagctctcttccttttgtttctcacccttcagaaacatatttttcagtagctccaggtagatgagccttttatatattttttaaaataccatttgcagggaaatcggctgaatttaaaaaggcagcccggggtgtacctagaatggcaaggaactgatgtaag

SEQ ID NO: 434982 - DNA, 1482 bp, Homo Sapiens
aactcaggggcgagctgcagaaatacatgcaacatggtgactggaaccctaaggactctgcaatatgaataattccctagagaacaccatctcctttgaagagtacatccgagtaaaggcacggtctgtcccgcaacacaggatgaaggaatttctggactcactggcctctaaggggccagaagcccttcaggagttccagcagacagccaccactaccatggtgtaccaacagggtgggaactgcatatacacagacagcactgaagtggctgggtctttgcttgaacttgcctgtccagtcaccaccagtgttcagccacaaacccagcaagaacagcagatccaggttcagcagccgcagcaggttcaggtccaggtgcaggtacatgcagtctccgcaacaggtctcggcctcagctctccccacaactcaccgttcaccagcctactgagcaacccatccaggtccaggtgcagatccaaggccaggcaccacagtcagcagccccctccattcagaccccgtctctgcagagtcccagtccctcgcagctgcaagcagctcagatccaggtgcagcacgtgcaagcagcccagcagatccaggctgcagaaatcccggaggagcacatcccacatcagcaaatccaggctcagcttggtggctggccagtctcttgctggtggtcagcagatccaaatccagaccgtgggtgccctttccccaccaccatcccagcagggctcaccccgggaaggggagcggcgggttggcacggccagtgtcctccaaccagtgaagaagcgcaaagtggacatgcccatcactgtgtcctacgccatctcagggcagccggtggccaccgtgctggccattccacagggccagcagcagagttaatgtgtctttgaggccagacttactgacagtagacagtgcccacctgtacagtgccaactgggaccattactagccctacaggagaaacctggaccatccctgtttattctgcccagccccggggggacccctcagcagcagagcattacccacattgccattccccaggaagcctacaacgcagttcaacgtcagtggctcacccacagccctggcagctgttaagctggaggatgaccaggagaagatggtggggcccacatctgtagtgaaaaacttccccatgaagaggttagttgcagacccttggcaaatcttctcttttccaggcgacaagttccctgaatgggcacattccaccattcccactgagctgggcaagcgctgtgggcaggcacgtttccagaaataaaggggccacaattgtgcccattatggggcccccccaaaagacaccggagagagagaatcccccaggggaacgaaacaaccacaccagaggacgacagcaaaaccacagtaatgtcacccaactggccggtgtgaaatgtgaacacagacagcgaaacgttcccgaa

SEQ ID NO: 434983 - DNA, 1790 bp, Homo Sapiens
  misc_feature (761)..(762): n is a, c, g, or t
  misc_feature (1438)..(1449): n is a, c, g, or t
  misc_feature (1770)..(1770): n is a, c, g, or t
gaaaccatggaatcctcttattttactggttagaggtgagctgccaaaggtactgggtttcaaatacagtaacagccaacttgtttgtggtcagacttccagtgacgtcaaccttcagaaacttcaacatctgtgaactctgggggaagcggggaagaagcaggaagcccagagcctcctggaaacactggccaaaaagcccatgcatcccttcttggaagccaagcagatctgacacataggaaatactggctttcctggcttccccaagaaaccttcagctttgccctggaggtttccatcagcgagcaggaggtgaagagcagaagcctcagaaagcaggttagaagaggaagagggtgctgggttggcaagaagtgacagccccatattgtacgggaacatattttgtatcatgtgcacaagataaagaacagctaaagctgttttaaaagtatagccgggggacataggggtaaaaggacccaaacgctacaattgccccggatagctccactgacagagcagagagcagtaaaaaaccatcagtgagaacagcataatatcctataaaaggccaagccaagccctacacatattgatagctcttaatgatatcactgcaccgtaccaaggtataaaaggggctgatgtttataatcatgaccatgactcatcaagaaaaggttaaatactctccagtatactctgtttactaaggcagggaagtgcgtaatacattttagaaagatttccctcannaaaaaatatattaaaattttaaagattcagcacttaaagggttaatcctcggttatctgaatattcacatacattcctcattttacaacaatactagtaaatgaggcattacctttttttgtagtcattagtatcaaattattggcaccattcagttttaaggagaggggcaggagagcaaactatacaatataacataaaaatacagttctgatacaaatatatgagatcagttcctcttaacaagtggtcataagaaatgaatgaacattttacacacaaggaaatacaactagtaaatcatcacatggaaaagtgctcagccttgctagcaattaatgaaataaaacaactcttcaagaacaactatacatacctattaaactagcaaaaataaataaaaatggcaaaacccaatactggcagagctattggtaaacagaaatgcttatacattgctggtggcatcataaattgtcgaggggattcaagcattcagagggggtggggaggctaaactagatgacctttaaggtccttccaacccaaagattggatctttctagaaagcaatctggcaatataaaacaagagctataaaatacttcatgctctttgaccttgtaatccctctttggagatattcctaagggaataatccaaaagaaggagcagnnnnnnnnnnnnacagacattcatagcagcactatttataagagtgaaaaattagatataactcaaatatctaataatggggtgaagtgaggttacccatgttacatggatataaagacatttaaattggtgagagtagaatctgtgttgacaagaggagacaagtgttaggccgagaagtaaaacaaaggagaatgtacacaacgatcatagctatgtaaaaatatgtgtgtattcattgagaaagctagggaactaatttagagggatattttgtggttagggggttgctttattcctgcaaagttgttcaagtgcattaataaaaatttnaaaacacatttcttgaaact

SEQ ID NO: 434984 - DNA, 522 bp, Homo Sapiens
  misc_feature (30)..(30): n is a, c, g, or t
  misc_feature (79)..(79): n is a, c, g, or t
  misc_feature (112)..(112): n is a, c, g, or t
  misc_feature (128)..(263): n is a, c, g, or t
ccaagtatagccaccccggctcctttttcngtgccctgtggcaagccatgtcttttcccacccccttcacttttagacnatgtgtgtccttaccaggtgaaagtgggtttcntgccaggccagccatnnnnnnnnnnnnnnnnnnnnnnnnnnnnnnnnnnnnnnnnnnnnnnnnnnnnnnnnnnnnnnnnnnnnnnnnnnnnnnnnnnnnnnnnnnnnnnnnnnnnnnnnnnnnnnnnnnnnnnnnnnnnnnnnnnnnnnnngttttgtaactcctccctttctttcttcctttcttactgtcttcgtttttttgcttaaatatttaagagtcttcatttttctgtcttcctttgtggttaacagtatgttttaatttgttgctttttacttttagtggaatctattataggtttttgtattgtgtttaccataaagcttacaaaatacattttatagatataacaggttattttaaagagatgacaacttatcttagattacaagtaatagaaacaaaga

SEQ ID NO: 434985 - DNA, 861 bp, Homo Sapiens
  misc_feature (712)..(813): n is a, c, g, or t
acgccgcaagcagtgggcactgatacggctgggctggggacactgagctgtgatcagatcactttccatttgtgtataaccttacacttttccaaggagactcgcaggcacagtgttgcagttggtcctcaccacagttacatggggtgggacattatcctcactttacagatggggaaactgaggtatagactagaaacatgatctcgccaaggtcaatcacgttggtggattatttatttttttaaatagtcacctggaaaacatccttgcatcttaggttcacccgttgactcaccaactggctcagtggcccttgatgaaaggatacatgctataaattagtagaagagttcgtctcctggggccaacatgcttgcttcccataattggatgataaaaattataaatcctgatgtgtttctctttttaccaatggctgtcaggaaactcaagagtaaaacttaattgcatgattatgggaattacaccagttagatttacagaataatttctcttgcttttttacttcttatttttattttactgaacccctatgattaagattgtaaatagcctctgatgctttttgaaaatcctgagtaattaaatcagtttggttgaggactcgatcccttaagtccctgctcagtgctctttttaagatacagcatcatgtttattggttaaaagaaagatgaggctggatgcnnnnnnnnnnnnnnnnnnnnnnnnnnnnnnnnnnnnnnnnnnnnnnnnnnnnnnnnnnnnnnnnnnnnnnnnnnnnnnnnnnnnnnnnnnnnnnnnnnnnnnaacgcgtggtcgacgatatcccgggaattccggaccgtaccagcctgg

SEQ ID NO: 434986 - DNA, 624 bp, Homo Sapiens
aggaaataatcaaatctatttatttacaagtgatttacagttagaaaacccaggcaggggtatgggcagggtccgaatgtgggatggcacttgggctctggcaggtcacttgtctgcacggacgaaggaggcgaagacgctgtccttccggctgagcagcttctctggcttatcgaactcaaggatggcaccccgcttcaggacgatcaccaggtctgcactcaggatggtgtgcactcgatgcgcgatggtgaccacagtgcggtcttcgaaggctgtcatcaccaccttttggaggatgttttccgtggccatgtcaatggaagccgtggcctcgtccatgatgaagatgctggtcttcctcacgaaggcccgggccaggcagaacagctgcctctgtccctggcttaaattcttcccgccttctgtgatgattgcatcgaggcctcctggcagtgccttcaccaccagcttcagctgggcgatttccagggcctcccacagtgtgctatctgagcacttcctctcagggtccaggttaaatcggatggtgccgctgaagaggacggggtccttcgaacgtgtccaccatgcggaagaaggcaagagagaaggaggacttcc

SEQ ID NO: 434987 - DNA, 1711 bp, Homo Sapiens
  misc_feature (143)..(173): n is a, c, g, or t
  misc_feature (896)..(911): n is a, c, g, or t
taaggcagggcttggtacgaagccaattaaccagagtgcaattacattaaaaacctccccaaaactttccgtggcacattgcattatggtaaaaccagaggttcatcacctattttgtattagttaggccagcctgtgatagnnnnnnnnnnnnnnnnnnnnnnnnnnnnnnngcaggagctatttagacaacaaaattcaaagtaaactaattctgtaactgctgactttgaagacatcccacagtgactgtctgccccacaacacatatccgtggaccccagtacctctcacgaggacatagcctgggccaagcacatgggtcctgggcagctgccatcgttcccacccctgggtcagctccgcctgactcaggcacccccacaattagtacaatttttcgtaagttaaagatgcattcaaaataaggcttaattcccattttgcttagtgttttgtttggaaatgcttctaacaatgattcttcaacttctactgaatgcacagtatttactgccactgctcatctccttccttcctccacctccctcaacattcagcttccccaccatcacttgtctcattactccttctggtctttctttcctggactttctgctacttaatctgcttcccaagaacaagtgaatttactaacatgaaactggtcagactaaccatcatcttaccaatgatttcttggtctcatttgctccaccctgttagaaagtgggccctctttctttcactctaccttcccctccacaagaagcccagatgtgcttgcctcccacaaaagagccacatgccccagagtccaagggttatccttaacaaagggtctgacatgtaaccttcctaaatgtgcatttcacactcggacaagccaatgaagnnnnnnnnnnnnnnnnaaagttcatctcccctgccccaaaaaactgatagcatgtgccatatcagaaaaatcctggtcttagcagatcaatatacatagttatttggtcattcgacatatgcactttttaaggaggttcaggcttcattttctgttgaagagtttgttaccatagagtctggctttcgagtcattctatccagttcttcctgaacatttgacaacacagtcttttgtcctgacttcttggctgtgctctgcaccccaccagcaccaggacttccaggagagcctgtctttttactcaacagactgttgaagaagctggccaacaccccttcacttgctgcattatttttgatgtttgggtccggcttttttaactgacgtgcctggggaggagctaggcacactggctggccctccccgaccctgggtccttggagagccagagggtcctcttgcaggagattcagaagctctcgtgggagtggctggttgcttggcaaggagtgactgttgcttcattaggaacacctgctcatcttctgctgccaactctttgtcgtggaccagctttctcacgggaggtttcacaataaagtcttcatatgcatcttccggcttcacggttgtaaaattttcatgtaaaatagctattttcttttcattgtcccagcctgcaggtctaaaggcaaagagagagggactgaattgcttttcctggggctgccttagagcatactcagatcacattcaggactcctgggtaggacacttctcacaagatatagtgtgtagttgtccggggttgtt

SEQ ID NO: 434988 - DNA, 1883 bp, Homo Sapiens
atccttcagcaagcctcttttaatgatttaaaaaagaactactaacttttacaaataattgtgttcagagacagactttcaatctaaagaaaagatcaaggacctagctctcgtggcagaatgcagaaacagaagcctccagattgatctctgcagatgctaacgtggcccactttgtcctcatattcagcctgatcctaaagcccttacaactaagccaatacctgcttggattcttctgacaactggcaaagatgtcacgttccacttcttatctcaccacctcttaaccacaaattggccccagtggctttcaaaagggggaaaaaattgtgcgagtttgagactgtttatgtattcatgactaaaaccaaatctgagatctttggaactcttagctggccctggggcatgcgagccgcctgtgcatccctttggtccacctggaggcccgtgaagaccttcagtggaaggaagagtgggtcagatgagacgtgtccatttcatcagtcagccatcggtgacaggctgaattcagagacccaggccagagtgtaccagctacaaaatttatccaaggattccaattatgctttaaaaaattctaccagaagaagtaaaaaacgatgtttatatgttaagaaatgtaacagagtagctctcatttgataatataaaatagctctgcctctattcaaaacagttgattttaaaagtaggtatatagtcgctatacttattattatttttagattgctttaaaaagcatatgcgtccctatctctttggcaagcacccagcggtgagtcacgccctgcacccgcagcagccgatctgagaggctcctcagggagcctccgtgaacttttccaaaccctccatgcgggccgcacacaggatgcccgtgccgggtcgtttcccatcagcttccagccacgctgcttgcttgtagctaaaagcaagccagggatgcccgtgtcagatgaagctgcttacgagtctccatggaaaggcggcgctggtggtccggcacttggtttgctcaggtgcactctcttcagaggtcgccgaccgagccctccaggcggctccagcttgggcgcctcgggatgcgggccggggagacctcccggggcaggaccggcctcaggggccagcgggcgcgtcgttggggcccagcaggagcttggcgccctgtttgtcgatgctggagttgatgctgtctgcgtccttctccggctcggggacgcatggtgcaggcccacggggatgggtgacgtaggcctcggtgtagacggatcggccagccggcgcaggcgggggtgcggcgcaggacgacggtggggcaatgtagacagtggcgctgcggaagcgcacagtcctccttcgccgtacagcccggtcaggcagccccggcacaggcagtaggcttcaggcaggtaccctggggtacctcgccgggtcgtaggagattctgtaggcccagggcgacacgctgcgcaggttggtgggcggccggaatcggcgggtcggcggggccttgccccctgccgggcagctcgcgttgcgcgcctgctcacgcggccccagctgcagcgtgtggtggaaggcactgagcacgccggccgccaggcgcccgtacagctgctccagtagctcctccggccggtccgcgcagccccgcggccgcgcggggcgcctgcccgccctcggggcgcccgcggcccagctcggcggcagcgccagcaggaagccggctaccagcatccagacccggggactcggaccgagaagccgactgagcgaggtcgccgcccggcctcacggacacagagcgactctgcacctttcgcctccaggagctgaaaacattttatcccgct

SEQ ID NO: 434989 - DNA, 536 bp, Homo Sapiens
ctctaatttcctcgaagtacagaatctcaagaggtagctctaaggagaatccctctgggtttgagcgcattcctcttccagggggcctattcttggactgctttccttaatagagaaatctctctgagccaaaatcggcctcccccaattccatcctgtcggccccacttttctgctccggagacttccaagccagtccccactcctccttcagccagtcgggcccgcacccgcgcccggcagggccagccctctcctcctcctgcgtggcgcagcacaggccctgagcgcgcgaccccaggccctgggcgccccgccgcatgctcgcggctggaagccccagtttgcgtggcccttcgggttattccgctcaagagccgccgcgtcgccccatctcggcgcgaatctgaaagcgctttcgggggagaagatgttgggggcactggtctggatgctggtagccggcttcctgctggcgctgccgccgagctgggccgcgggcgccccgagggcgggcaggcgccccgcgcggccgc

SEQ ID NO: 434990 - DNA, 630 bp, Homo Sapiens
gagttagtcttgggcctcggttttgcggtggggcgatacttcgtttcatcattatcgaagtatggatcaggccacatcggcgagctcgaatcgtcgagagcggatcctgctccgccgccagcgagggagccccggagcctaagacgcccggacccgccgcctcgcagacccacccttgcccctgcgcctcgtcatccgcccgccccagccagcccgcgcagggtccgcggtccgcttttccgcgagaagccccctggtggtctttcctcgtacccggggactcggaccgagaagccgactgagcgaggtcgccgcccggcctcacggacacagagcgactctgcacctttcgcctccaggagctgaaaacattttgtcacttgtgcagtgtactcaccagtgcccccaacatcttctcccccgaaagcgctttcagattcgcgccgagatggggcgacgcggcggctcttgagcggaataacccgaagggccacgcaaactggggcttccagccgcgagcatgcggaggggcgcccagggcctggggtcgcgcgctcagggcctgtgctgcgccagcaggaggaggagagggctggccctgacgggcgcgggtgcgggcccgactggtga

SEQ ID NO: 434991 - DNA, 838 bp, Homo Sapiens
tgcagccccagtgttaggccaacgtcaggggggccaatcaccttcataccatgttcttcaagtcttttggaaatctgccagcctggctgccttccaggaggtggcattccccaggcatggataagccctagtccctcatctgcagactcagcaacaagaggacatgcacctaagagaccctcatgtatgtgggtcccacggagacaaagttcacgattttgggggtctggcttgagctctgagcattgccaggggcaggatggaaggatgatgaggatttactcttctctgagatgcccgagggtgccagggaggccggacacagactggcctccagtggaaccccacctggagaggggtctggggccctcaggggggttgtagggggcgaggacctgtctccacagcagcagccacagcaaggactggccatgacaggggtctggccaccatcctcctggccatgacactgtttcaggtggccgcacaggtggcaggtaagggctgagtagacaatgccactgcccaggctgtccacaagggggtctgtggcctgctcctggggaagtgggggctttggcatgtcctctaccttttcccccggctccagacccaggtgctctggggagctgcttgggagatgtgagctctgcggactgcgaggtggctccctgtccagtccaaaggtgaacaaggggacagggactggggcagggtccccagggcagccaggaatgaggtcttggaaaggcttatacccctcttccccactgctagccccaaacccacatttctctggggacacagcacatcccggaaattccggaccggtccagcg

SEQ ID NO: 434992 - DNA, 173 bp, Homo Sapiens
cgggattgtattgcctaaaagttggctgtcatccttatctttggtcctatctatgtaatgtgcttttatctctggtcactttcaagattttgtctttatcacttgcttcaagaaatttgattatgatgtgcattgatgttgttttcttcaggacttttaaaacttggagtttg

SEQ ID NO: 434993 - DNA, 2012 bp, Homo Sapiens
  misc_feature (33)..(33): n is a, c, g, or t
  misc_feature (53)..(53): n is a, c, g, or t
  misc_feature (74)..(76): n is a, c, g, or t
  misc_feature (85)..(85): n is a, c, g, or t
  misc_feature (97)..(156): n is a, c, g, or t
  misc_feature (239)..(286): n is a, c, g, or t
  misc_feature (326)..(326): n is a, c, g, or t
  misc_feature (340)..(340): n is a, c, g, or t
  misc_feature (351)..(352): n is a, c, g, or t
  misc_feature (356)..(356): n is a, c, g, or t
  misc_feature (363)..(363): n is a, c, g, or t
  misc_feature (370)..(371): n is a, c, g, or t
  misc_feature (375)..(375): n is a, c, g, or t
  misc_feature (384)..(385): n is a, c, g, or t
  misc_feature (394)..(394): n is a, c, g, or t
  misc_feature (405)..(405): n is a, c, g, or t
  misc_feature (419)..(419): n is a, c, g, or t
attccgaaagaatggtcaacttctttgctaggnaggcaagatgttccggaggncacactagagatagcaccacnnnccaccctancccacatccccnnnnnnnnnnnnnnnnnnnnnnnnnnnnnnnnnnnnnnnnnnnnnnnnnnnnnnnnnnnntgctgacacccgtgcactcatgtgcacacactcattcacactcatacatattcacactcaggcatactcatactcctcatgannnnnnnnnnnnnnnnnnnnnnnnnnnnnnnnnnnnnnnnnnnnnnnntgcagacactcatggggacactcaaacatgctcacatgcncattggggcccagngagagggatanncatnatttgtntgcgcanngggncactttttnnggtggtaangatttagaggnaagagcagctgggnctcgtgctgggataaccaggtacaagtgctctctgcagagaataagtgcacacaggttggtgtcttctgaccgagagccctcctgaagggaggtctgtacctcctccctcatctcattttacacaaggcgacaggtcagagtccagggtgggacgagagcgagggagcactgtctctggcagcagcacttgccactccacaatgtggagaccagaacggcaccccagagagcacaggggaaatggctcatctttaaaacaatggcagaagaaatccagccaaggtcacttttcctgtgtgagcatgtttaaggccagagagtggctacttctctgcctcctgcagctccctcagtgtggcttggaggagttggcgaagcttccagaacacgctggaggctgctctccgggtgttcccactggggaccccagggtctgcacattcctgcaccgcctcctgtaactgcagctgaagctggaaagagaccgcagagctcttgagaggcgcggaaaaccaatggcgaaatattttgtcacagatgacctgcaggttgttgtttacgcgctgcgctccgcatttgttgactcgtaaatcacatcttgaaaaacagtcaaagaaattgcagtcttcatctcctgtgcagttttgctcaaggatttccctcattttaggttcaaaaaaggccatgtccacatcaatagccaccactgtgaagtcgctccggatggcaaagttttccggcttgatgtcgcagaggtggaggcggtgggaaaagtcactgtcaaaatggttcaccatgtccaagaagctgagtgcgatgtcactgatggccttggcctggccacccccaggggcacctggggcccggtccagggggaagagtgccctgtggtgggggctgcccgcggccaggaactccaccgcgtagaagtggccgcaggaacccagcacgggcagcacgtgtgggctcaggtcctgcagcaggctgaagtagacgtactcctcctgctgcagcagggcccacaggctggccagctgtccccgccagcgtgggccccgcctgcccggccaccacggccccaggctgctgttggacaactccaggcccagagcgctcttgacctccccagccaccatcaggaggagttcggcctcgggcatgtcctggccaccctcccctgcctcctcttccaacaggctgaggggcgggaagctggagaaggcctcctccttggacttgaggaccacgggccggccgcgccagtcggcctgcagcaccttcttgcctctgttgtagtgcaggcagcgttggaacagcagctttcccgccacacacaggtcctcgcagaggtccccggccagcgtgccgccctggtagtcctggcacagcgcggccaggatgcgccggctcttctcgtcggtgcagcgctcggagaggacacccgggtgcgcgcggagcagcagcgcggccgccagcacccagcccgcggtccacgcggcgaaggcgaggagcgtgccccgcccgcagcgcccgcgcctcctgcaccacccggcagggccccgcgcgcccgccgcccgcgccatggccatccc

SEQ ID NO: 434994 - DNA, 532 bp, Homo Sapiens
  misc_feature (12)..(12): n is a, c, g, or t
  misc_feature (69)..(69): n is a, c, g, or t
  misc_feature (212)..(212): n is a, c, g, or t
  misc_feature (331)..(331): n is a, c, g, or t
  misc_feature (425)..(425): n is a, c, g, or t
  misc_feature (433)..(433): n is a, c, g, or t
  misc_feature (441)..(441): n is a, c, g, or t
  misc_feature (448)..(448): n is a, c, g, or t
  misc_feature (464)..(464): n is a, c, g, or t
  misc_feature (473)..(473): n is a, c, g, or t
  misc_feature (480)..(480): n is a, c, g, or t
  misc_feature (516)..(516): n is a, c, g, or t
agcttattttcntttgattgtatttaattccgaaagaatggtcacacttctttgctaggtaggcaagangttccggaggacacactagagaaagcaccactcccgaccctaacccacatccccaacacactcacctgcccacactcacacaatcacatacacatgcctacacttatatacacatgctgacacccgtgcactcatgtgcacancactcattcacactcatacatattcacactcagggcatactcatactccttcatgaggcacaccacactcacctgtggcacactcacctgtgcacactcacacacatggcaggacactnatggggcacattcacacatggttcacatggttcatttggcacccggacacgggcttacacttcttttgtttggcacacagggacattttttaantgggttangtttttcngggaggntcgttgggactgtgtngggggttancggggtncagtgttttttgcggggtttggtgcaccgggtgggngttttttgaccggggg

SEQ ID NO: 434995 - DNA, 2133 bp, Homo Sapiens
  misc_feature (698)..(713): n is a, c, g, or t
  misc_feature (1061)..(1072): n is a, c, g, or t
  misc_feature (1402)..(1412): n is a, c, g, or t
tttttttcacttttcgttatttttattgtttgacaagcatttacaacgttccattcatagacctaaaaacataaaaatagaccttctttcagcttataaaagaaatatataagaacttttgacatagacacgtcatgaccttatgtacaagagacaatggcaccctctccaagcaccagacttccgagtgttttcagatggatgtgttgcactggagccagtaaatgcgacgattagaagcctctgcttccgttttccatctggacgcgatcgaaccggagatgatatggaaaaatgcagtgatacaaagggtatagaaaccattctaaagctttttcagaaaaccagaagatatagcaaaaatttaatagaataaaactttcaaaagatcaagctcgaagccctggaaacccgaaaggcggggggaatacagggtgggaacgcaggaaaagcaggcagaggcacaagagcatgatgtactgaactctctattgtctggaaatataaagtcataactgatttttataaaatataactcctaaagctactataaaattcaggtctttaaagtacctactgatgtgtcaaacaccaaatagatattttccccaaaaagaaagttttcatagtattttaaacccttcttaggaagtggacattgtgacatgggaaaagaaaaagctataaacctttttttnnnnnnnnnnnnnnnnttgaaagtgctataacttgtttttcttcttagtatttggatatctgtttagactgttaatgttttgagcatgtttaccctgtttcgttggcatgaagaaagtgttaaacacaagagaagtttttaaagaggttgttctgtttaaaggtttggttatggactgtcagggaaggggaaggtaatctatggatgaagatgcaattttgatggaaaaaccaatgatcaccatggcaaccccatgagaaggaggctcccctccctgccatgtgcaacagacacacacaccgcccaccggggtgtcatgtttaatccaaccaaactcccatctcaaatatagattcaaacattnnnnnnnnnnnntccgctttttggaagaaaagtatatccttcgcatgagcttgctggcctttcatatataaatataaaaccaccacgcctcactctctctgtaaaaggttatatcctcattttttaggctcagggatacatacactaacactgtaaaattctcatctatttgtgcccctgtatctcaggtaaaatacaaaaaatagtgtttcttttctttctctcaagcgataaatttggatctcttttcaaagagtttggcatctctataattctatgcaaaactagagcttccgaacatggacacagagtaagaccagccatagaccaaaacaggaaggnnnnnnnnnnngaggctcattgaaacatgaatcgccaccctctcctcacacattcttaaaatacacggagattctcagacatggaagagggaagggtacagtcagaacacggcaagctgtacacatttcattttgtgtgtgaaagaggtttccccagctaggagactgatttcagatagaaggatcgtgtgtgtgctactatcccttaaattaatctgttgtacatccgttaactcctggggtgatttgctttccagtgctatagaatcttttttcttttaattgttcaggccctgatttattgagaataaataaaagcccttagtaatatacagaagataggactcaagcttatttgggatcctgatcaattctttctgatgttgttgaaaatgacaaagttgggtggctacatggcttcagaaccaagtcagctgccaaaaccgtgtgtgcaagagcgcgacctaaggggacattcttgtcgacggtacaggagggtgggcagagttagggcaggaagtatctacacacattctctacggggcaggtgacgcagtcagatctcagtgttcagtttcctggagggggcaaagtcttcacgcctaacccaaatgacttcctcgcttgcgctctccaggcctccattgatccccgacagggcagcttgcttcttgagctgtgccatgcgggacgcgtgactatccagggttttccggcctctttcccgctgcc

SEQ ID NO: 434996 - DNA, 536 bp, Homo Sapiens
  misc_feature (370)..(370): n is a, c, g, or t
  misc_feature (401)..(401): n is a, c, g, or t
  misc_feature (418)..(471): n is a, c, g, or t
  misc_feature (495)..(495): n is a, c, g, or t
  misc_feature (502)..(502): n is a, c, g, or t
gacacttttcgttatttttattgtttgacaagcatttacaacgttccattcatagacctaaaaacataaaaatagaccttctttcagcttataaaagaaatatataagaacttttgacatagacacgtcatgaccttatgtacaagagacaatggcaccctctccaagcaccagacttccgagtgttttcagatgggatgtgttgcactgggagccagtaaatgcgacgattagaagcctctgcttccgttttccatctgggacgcgatcgaaccggaggatgatatgggaaaaatgcaggtgatacaaaggggtataggaaaccattcttaaagctttttcaggaaaaccaggaggatataggcaaaanttttaataggatttaaaacttttcaaaaggntccaggctcgaggcccnnnnnnnnnnnnnnnnnnnnnnnnnnnnnnnnnnnnnnnnnnnnnnnnnnnnnnaaaggcggggcagagggcaccagnggcttgntgtacttgacttctctattgtcttgggggatttt

SEQ ID NO: 434997 - DNA, 488 bp, Homo Sapiens
  misc_feature (23)..(23): n is a, c, g, or t
  misc_feature (30)..(30): n is a, c, g, or t
  misc_feature (40)..(40): n is a, c, g, or t
  misc_feature (72)..(72): n is a, c, g, or t
  misc_feature (357)..(368): n is a, c, g, or t
aaaaaccccgctttttgggaagnaaaagtnatatcccttncgcatgaagcttggctgggccctttccatatnataaaatatataaacccccccacgccctcactcctcctctgtaaaaggttatatccctcattttttaggctcagggatacatacactaacactgtaaaattcctcatcctatttgtgcccctgtatctcaggtaaaatacaaaaaatagtgtttcttttctttctctcaagcgataaatttggatctcttttcaaagagtttggcatctctataattctatgcaaaactagagcttccgaacatggacacagagtaagaccagccatagaccaaaacaggaaggnnnnnnnnnnnngaggctcattgaaacatgaatcgccaccctctcctcacacattcttaaaatacacggagattctcagacatggaagagggaagggtacagtcagaacaccggaagctgacacatttcatt

SEQ ID NO: 434998 - DNA, 683 bp, Homo Sapiens
ttttttgctgatctagacttattaaatttatttcatgtcattgtggtcacttttacagctgtttagacttattttcaatcacattactcttcacagaattcacagaattcattaactaactagtatgttacatccaagggttcttagtagcacattgaaatagaaaagaggcccacgagttgttgcttgtgtgtggaacctgagtctgattacttagacagatgtctagaacattattgctttattaggcctatttttaaaaataataaattattcctaggaaacccaccctgccaggtgctcattctgcgactgctgtgggttcactcagaacatacctgactggtgggtgctgaatgaacctcccacccatgtaccctgctgctccggacgctctgagggctagagcaatgcccctccatgcgtgtaaacattttctacagcttgccactttcctccctggtcttgcagccaatgggctgcagtcatacatgggtctctatgtaaaacttaaattagacctaaacaacagggttcagcgaatgaggactaatgctcctataaaagccactgcccatgcaagggaatacacctgatgcaacaaaaatatcttgagtctccaactataaggaatgtctcaaagaaaatgtccttgatttaattatggtccaaggtggctgccc

SEQ ID NO: 434999 - DNA, 1794 bp, Homo Sapiens
atcataaaaacctttttatatcagctcacccacacctccctccgttcctccctgccctttctcgccctggtgatcatcagggatgctggagtctggcgcccccccacaccaccagagctgaagccgacattcaaggtggacgtggcgcgtggagagcaagggaaggcccagctcctctccttcgtccccactctctgtgggctcaggaaacacacgctgaccggaggcagtggccaggagaggcaggctagggtgcaggctcacgccattggtgcagtccttctggggcagaaaactcaacacgggctccggcttcccatcattgccaggcccgtccgtgtcccacacagagacagccccgctcgtgctgccactcactaggaactgcccggtcgggtccagatcgaagtagatgcgctgattggtggtcacctctcgacccagggaccacagtgggtaaccagactgccggagatcccagcacaggagctcagcatccttgcgggctcctgagaagaagcggttgccatcgggatgaaagcagaggtgggtgatgcccccttggtgccctcccagcaaggcgagaggggagccatcatcccaggcatacagacccagggagcggccgtaggagccacaggcatagaggggctgggctgggctgaaggctatgcaggagatgatgccgctctggccctgcttttttgcaaatgtggctcggacctcgcagtctcggccaggccgggccgtggaaaaaacacgcacagtccggttgaagccacagaagagctgggagccatccggggagaagcagagcgaatgggctgccgtcagctcatccaggtggttgtaggcgcgaaaggaagcccggagctctccagtgaatgcgtcccagatatgaatcgggttctcccggctgctgctggccacgtaggaggtgtctggctgggctgaggacatcagagaataccagcagtaatcatagatggtatcaccttccaccattcgaaggacagggaccatttctgcatattccacctgctccccctcatggtacagctctgggggcaggttataaattcgcaagatgttatcagcactattggtcaagatgcaggaaccgtcaggagcccacttacagcctttcaagaagttctcaggttgggtgctgaactctgaccaggaaccactgagaaatcgaggcagctgggagaagctgtagttccaagcggtgtctccctcgtcctctgcagcgggttccccagaggtatcttccatggcttttccagaccccaactctggcccgttcgcttcttcttcagaaaggctcccgtttgcttcttctgcaggaaggcttgtattttcagaaagttcttgctcctcgattcgaggactcaactcactaggggaaccaaactctgtttccaggggagtggagagagaaactgggtccccctcccctagctcctgggacacagctgagccagccacaggatctggggacaaccggggcggatcccccctttcgggaggcggtggcatcagttcagagtccgcatttttattcatcggggaagcgtggggagaaggatgggctggagctgggtcctggtctgaaggacagcagtccggagctaacggttgagtctccaaagtcttcatactgtgcttccctcctcttctgggagtaggcagaagactcccgggaggagaggcgaacagcggacgccaattcttttgaaagcactgtgttccttagcaccgcgatcccggaaattccggaccggtaccagc

SEQ ID NO: 435000 - DNA, 962 bp, Homo Sapiens
ccaggagaattcccagccaggaatccatagatgggatcaccttccccccattggaagggacaggggaccatttctggcatattccacttgctcccccctcatggtacagctctggggcaggttataaattcgcaagatgttatcagcactattggtcaagatgcaggaaccgtcaggagccccacttacagcctttcaagaagttctcaggttgggtgctgaactctgaccaggaaccactgagaaatcgaggcagctgggagaagctgtagttccaagcggtgtctccctcgtcctctgcagcgggttccccagaggtatcttccatggcttttccagaccccaactctggcccgttcgcttcttcttcagaaaggctcccgtttgcttcttctgcaggaaggcttgtattttcagaaagttcttgctcctcgattcgaggactcaactcactaggggaaccaaactctgtttccaggggagtggagagagaaactgggtccccctcccctagctcctgggacacagctgagccagccacaggatctggggacaaccggggcggatcccccctttcgggaggcggtggcatcagttcagagtccgcatttttattcatcggggaagcgtggggagaaggatgggctggagctgggtcctggtctgaaggacagcagtccggagctaacggttgagtctccaaagtcttcatactgtgcttccctcctcttctgggagtaggcagaagactcccgggaggagaggcgaacagcggacgccaattcttttgaaagcactgtgttccttagcaccgcgggtcgctacgggcctcttgctgtcgcgggatttcggtccaccttccgattgggccgccgcatcccggatcagatttcgcgggcgacccacggaacccgcggagccgggacgtgaaagccagtaggccaacaggccgaggaatcaaa

SEQ ID NO: 435001 - DNA, 1093 bp, Homo Sapiens
ccacagaggagctgggagccttccggggaaaagccagacgaatgggtttccgtcagctcatttcaggtggttgtagccgggaaaggaagcccggaagctctccagtgaattggtccccagatatgattcggggttctccccggttgcttgctggccacgtaggagggtgtcctggctggggctgaggacatcagagaatacccagcagtaatcatagatggtatcaccctttccaccatttcgaagggacagggaccatttctgcatattccacctgctcccccctcatggtacagctctgggggcaggttataaattcgcaagatgttatcagcactattggtcaagatgcaggaaccgtcaggagccccacttacagcctttcaagaagttctcaggttgggtgctgaactctgaccaggaaccactgagaaatcgaggcagctgggagaagctgtagttccaagcggtgtctccctcgtcctctgcagcgggttccccagaggtatcttccatggcttttccagaccccaactctggcccgttcgcttcttcttcagaaaggctcccgtttgcttcttctgcaggaaggcttgtattttcagaaagttcttgctcctcgattcgaggactcaactcactaggggaaccaaactctgtttccaggggagtggagagagaaactgggtccccctcccgtagctcctgggacacagctgagccagccacaggatctggggacaaccggggcggatcccccctttcgggaggcggtggcatcagttcagagtccgcatttttattcatcggggaagcgtggggagaaggatgggctggagctgggtcctggtctgaaggacagcagtccggagctaacggttgagtctccaaagtcttcatactgcagaggaagcacagcggagattagcctcagccaggatggcttcgaagttctcagggatccgacgcagagctaaagaaacccacctgtgcttccctcctcttctgggagtaggcagaagactcccgggaggagaggcgaacagcggacgccaattcttttgaaagcactgtgttccatcccgagaattcc

SEQ ID NO: 435002 - DNA, 1117 bp, Homo Sapiens
  misc_feature (390)..(390): n is a, c, g, or t
agttctttttccccaggtgggaaatgtgcgttcccccgagaaaagagaaatcggggggtttttccccgcggctgattcgttgggcccacccttatggaaggttttctctgtcctgggggtggagggtcccttccgtaggatattccccagccgggttatttctttggatggggttcgccccctttcccccccatttgggaagggaccaggggaccccattttctgccatttttcccaccgtggctccccccctccatggttaacagctctgggggggcaggtttataaatttcgccaagaatgttatcaggcactattggtcaaagatgcaggaaccgtcaggaggcccacttacagccctttcaagaagttctcaggttgggtgctganctctgaccaggaaccactgagaaatcgaggcagctgggaaaagctgtagttccaagcggtgtctccctcgtcctctgcagcgggttcccccagaggtatcttccatggcttttccagaccccaactctggcccgttcgcttcttcttcagaaaggctcccgtttgcttcttctgcaggaaggcttgtattttcagaaagttcttgctcctcgattcgaggactcaactcactaggggaaccaaactctgtttccaggggagtggagagagaaactgggtccccctcccctagctcctgggacacagctgagccagccacaggatctggggacaaccggggcggatcccccctttcgggaggcggtggcatcagttcagagtccgcatttttattcatcggggaagcgtggggagaaggatgggctggagctgggtcctggtctgaaggacagcagtccggagctaacggttgagtctccaaagtcttcatactgtgcttccctcctcttctgggagtaggcagaagactcccgggaggagaggcgaacagcggacgccaattcttttgaaagcactgtgttccttagcaccgcgggtcgctacgggcctcttgctgtcgcgggatttcggtccaccttccgattgggccgccgcatcccggatcagatttcgcgggcgacccacggaacccgccctcgtgccgaattcgccacccaggcctcgctcc

SEQ ID NO: 435003 - DNA, 408 bp, Homo Sapiens
  misc_feature (286)..(286): n is a, c, g, or t
atttattgggcatttattgtaagccaggcaagtcagcagaaacggcctgagcagtgcccaagagcactcactcactctccctagcaaacaggctcagaactctctcacacatgtcatcctctttcccactcaaaactcccaccccaaccttcctggaatgcagggctaacaggacctcctgcctgcctgctcatgactgattactttcaatcccagctgcaatgcaaactgaaactcattctgtatatcaccactctacaggagaggtctatttctggggcacccngaagtcagcacacatactgctgggatcaggactcgtaattcgccttgggtccaactccttctatgggtttagctgccctcattcctgtgggtaatacaagatcaaacagtcacaactttgcc

SEQ ID NO: 435004 - DNA, 1285 bp, Homo Sapiens
  misc_feature (12)..(12): n is a, c, g, or t
  misc_feature (67)..(67): n is a, c, g, or t
  misc_feature (77)..(77): n is a, c, g, or t
  misc_feature (88)..(88): n is a, c, g, or t
  misc_feature (100)..(100): n is a, c, g, or t
  misc_feature (141)..(141): n is a, c, g, or t
ggtatcaagagnccaggaaggtttcccaggtcccccaagttcagcccctagggctgtgcctcatttncaggggtcanccctgcccaanccctaagaggangggtgaggggactcccaaagttttttgatgatgccccccanctcgggtgaggcccccttcaaaagtgcccatctgtttacttctcaaaatgaaaaagaatttcaggtctgagtgtccaggaaaggggggtgaattttcataaccggcctgtgacagcgatgggaagggagccacccccccttccaggagggttcccacccagcgggccaagttgggaggaggaagtagctggcatgaagccgggcccacccaaacttccgggagagaggaaaaggagaacacgggatgaggaggctttaaatagtatttcataaaataaaaatgcccagcactcttaggaacctctcattcaaccgcctagtttttgtttaaataattctaatgccagaggctggggggcagggggcggccagggtatgtacatgaggaggtgtttaaattaaaacacaaataataattaagacacacaaactgagactaaggcagaagatgtagagcgggcctttgaggccctcgcgcttccaggactgcaggcttcctgtgggcggattagggcttcctcttggagaagatcagccggcgtttggagtggtagaaatctgtcatgctggtctgccgccgttttcgaccctgagagtctccaggtccacctggggacccttcagcctgctcccctgagcgaggcacaagggtacaagacagtgacaggtccacatggtcttcctctgctgtcccctgcagcagagcaggtgaggtgccaggccgcctgcctcctcccaactcatcccggcctcgccggggccccgtgggaaggtagagcttgggcaggccaaggccccgcacacgctcccaggcgaagtcaccctccagtggtgtctcggtgacaaagtcgaagttccatcgctcacgggcctcctggatgcagcccgccattagcgcatcacagtcgcggctcagctgctcgctgtccactgggccgaagaggcggcggcaggccttgctgccgcatgggttctgacggacatccccagccggttctgacatggcgcctcctctgagtgcctcggtgcctcggcgaatccgcgcccagctccggctccacaaggaactgacttcggcacgccacccagcctcgctaccttaggaccgttatagtactgcctctttgataaccgtggtgacaac

SEQ ID NO: 435005 - DNA, 1768 bp, Homo Sapiens
tgggtggcgaattcggcacgaggagcagctgccgaagtcagttccttgtggagccggagctgggcgcggattcgccgaggcaccgaggcactcagaggaggcgccatgtcagaaccggctggggatgtccgtcagaacccatgcggcagcaaggcctgccgccgcctcttcggcccagtggacagcgagcagctgagccgcgactgtgatgcgctaatggcgggctgcatccaggaggcccgtgagcgatggaacttcgactttgtcaccgagacaccactggagggtgacttcgcctgggagcgtgtgcggggccttggcctgcccaagctctaccttcccacggggccccggcgaggccgggatgagttgggaggaggcaggcggcctggcacctcacctgctctgctgcaggggacagcagaggaagaccatgtggacctgtcactgtcttgtacccttgtgcctcgctcaggggagcaggctgaagggtccccaggtggacctggagactctcagggtcgaaaccggcggcagaccagcatgacagatttctaccactccaaacgccggctgatcttctccaagcaggaagccctaatccgcccacaggaagcttgtagtcctggaagcgcgagggcctcaaaggcccgctctacatcttctgccttagtctcagtttgtgtgtcttaattattatttgtgttttaatttaaacacctcctcatgtacataccctggccgccccctgccccccagcctctggcattagaattatttaaacaaaaactaggcggttgaatgagaggttcctaagagtgctgggcatttttattttatgaaatactatttaaagcctcctcatcccgtgttctccttttcctctctcccggaggttgggtgggccggcttcatgccagctacttcctcctccccacttgtccgctgggtggtaccctctggaggggtgtggctccttcccatcgctgtcacaggcggttatgaaattcaccccctttcctggacactcagacctgaattctttttcatttgagaagtaaacagatggcactttgaaggggcctcaccgagtgggggcatcatcaaaaactttggagtcccctcacctcctctaaggttgggcagggtgaccctgaagtgagcacagcctagggctgagctggggacctggtaccctcctggctcttgatacccccctctgtcttgtgaaggcagggggaaggtggggtcctggagcagaccaccccgcctgccctcatggcccctctgacctgcactggggagcccgtctcagtgttgagccttttccctctttggctcccctgtaccttttgaggagccccagctacccttcttctccagctgggctctgcaattcccctctgctgctgtccctcccccttgtcctttcccttcagtaccctctcagctccaggtggctctgaggtgcctgtcccacccccacccccagctcaatggactggaaggggaagggacacacaagaagaagggcaccctagttctacctcaggcagctcaagcagcgaccgcccccctcctctagctgtggggggtgagggtcccatgtgggtggcacaggccccctttgagtggggttatctctgtgttaggggtatattgatgggggaagtaatcttttctagggaggggagacactggccccctcaattcgtccagcgaacctttcttcatcaccccattccctccccagttcaattgcactttg

SEQ ID NO: 435006 - DNA, 1505 bp, Homo Sapiens
  misc_feature (159)..(170): n is a, c, g, or t
  misc_feature (652)..(671): n is a, c, g, or t
tgtggaaaagacgtgcttgtcattcttaataaacaactagagtaagaatacataagagaaacagagtggtatctttatatgatacacaagtgtatgttacaagaattccatcaggcacaggagcctcaggttttaaggcctcaatgttaggccaacatnnnnnnnnnnnnggcatggtaaagtttttacttttacatctaaaatgtcacttgtcataaaggagggtgtaatagaaattgtctttaataaatcataattgaagttcccctcatttttcttccattaagatgctaagtttatgtctgatcatgaagaaagaaaagaacatcgttcccctgtggtcagcaaagtctgtcagcccagtggaagtcggctggggagattccctccagggtccatccatcattaattccatctctcttgaagatggaaaggggccacatttcttttcacagtccaagccctttccccaggccccagacaaaaaagagtcagccagcaactttctaggacatatgacactcaaggaaacccagagccaccatcggctgaggagtctgccgcagcaggtttatgaagatgcaaagggggcaaagttttcttttatattttaaacagaagcagcctgaaaggcttcgtaactacaccaatnnnnnnnnnnnnnnnnnnnntggaggcctcttctttagtgtgaaagtctgtctggtttttcctggctggtttctcttgtgccatggccaaggcatctcagtgcatagtgcttgcattggccactgcgatggcctcctgaatttctcttatcaccaggatccgcgtcagcatttgtcccatctgctctctgctgataggctggactgagtaccagattgggctgttgggggccaccactggctcaggtgtcaggtaaaaggtgtcattccggcctttcacactctgggggcatttgaagaggtagaaatcatagagcttgatgggacatctcaatggattctctggattttccgtctgttctgcatacatgtcatctgtaactttctggccagtctggtgtattccaagggccttcaagtaccggatactcgtgcttttatccttgggattagaggggttcttctttgtctgtcgcaagaccttggagaaggccagcttcatgtgctggtccactgtcttcaataggaagtacctggatcacaagtaaaatgcaaggcagagggaggggtgccgggaggataccatgactcatcctctgcccactggtgcttcagaggagccactgcccacattcccaagatctgggcaggcccgtacccaagcagtgtccagtgcaggaaccacatcaagatggatggtaggggtctggcaagggtgtttgcctcactggttacctaataaaatgcagccaagtggggttagggctttcagtagcccagtttctcaaatatatgtcagaggaattcagaaggcctcttggatagtttccacactcttcactggacagatgccag

SEQ ID NO: 435007 - DNA, 894 bp, Homo Sapiens
  misc_feature (143)..(207): n is a, c, g, or t
  misc_feature (274)..(329): n is a, c, g, or t
aaattttttccccctttaaggccctaacaggttttactccccattttaaaacccttggagggcgggggatccccccagaggggtttttccaccccgggaaatggcattcggtttcaaataggggcaagcccacttggaacacnnnnnnnnnnnnnnnnnnnnnnnnnnnnnnnnnnnnnnnnnnnnnnnnnnnnnnnnnnnnnnnnntcccctgtaggtaaaccccattttaacttgcctaaaagtcaaagtgccctgttggttaccgtaccannnnnnnnnnnnnnnnnnnnnnnnnnnnnnnnnnnnnnnnnnnnnnnnnnnnnnnncaatctagaagatctcacaggttataccatcacatggtttaaccttcaagggacccaatctgtaagccatgcaaaaaattaaacttaattctatttttaaagaaaacatcttagagctttctgatcattaagtatgactggaaccaaaaaccaagttgccttttcatcacaacttatgccccaagtcattatacaaaatttttccaaagacaatgcttcttagtagcattcttggctctacttaacatattaagcattctcttccttatttcaagatcattaataaagatgaaaattcatgcttcttatagtttactatttatacaacactcactgtcctttacatacaagtggggtgggaggtttggacaccaatgttttacaattttaaaaattcaaaccacatggtttgatagttgtctttcaacatctatactcatccctaagtcaaccctcctttcattttcccagagaggtagatgctaactaaaatgagtacataaacctacaaaaaaaattctttaaagcaatagttgactcagtaaagggtattcatcaaccctag

SEQ ID NO: 435008 - DNA, 2081 bp, Homo Sapiens
gctgcgacagtctctttatttccatctcagtctcccctgcctgctcattcctggggctccaggccccaagctcagcagcagagagtttataaataaataaattacaaaagcgggcagggagtggcctggccagccctcccggggctatggctcagtgctcagtgagtgacagctgcaggatccgctgtaagtcctcctcctcctgctgcccgcgccgctcccgctcctcctgctcccgtgaagacaactccagggccaggcgcagtgctcttcaaagctgggtggaccgggggctgggggtgtcctgggaggggatcctgggcccctgggctctgtggacagctgcaggctttcctggagggcccgctccagctgaagctgttcctcataaaccgtggcctggggaggagggcgggcaccgggccgggtgttggtcagggcttcccagacggtcacctgctccgcctcagtgcccgcttcaagcaggctctgctggatggcgaactgcaggaggtcatcgtcctcgtcccggaggggctcgttgcgctccatgcccagcacgctgtacccgttgggcacttcaaacacggtggggtccacctcgcacgggaaagggttccctgatgcggcaacagcagagctgggggccggcacccacacggagctcaggggctcatcacagccacacaggttgctgaaggtgatgcgggcattgagcacgtggaaaaggggaatctcaattttgacggggaagccaggtggaaggcgcagagtgatgaagtcgcgcagcttggcaaagtgagcgttgctgatggccattaggtcgatgatgggggtcacctggtcacccagggagagcgggtgctcttcactcagccacagtgttgccttgaacctctgtactttgctggacatctcgatggggcggccaatgttccgtgactccaggctgaagttggggtcgaagtactcctcaggggagatggctgtggggttggtggggctggctgcctgctgcacgggggccccggtgtgggaggaatgctgctgcggcatccccaggaaggactggaatggagtcttccccgctttgctcctcgacttgtcctgatcagagaggtgctccgtgcgtgtgcgtgtcaccagctccacgttggtggcactgtacaccttggcctcgtagccgctaacagtttccatcttctcagaccgccagccccagataccacatttgttcctctcaaaggccacattacgagtgtccaggtgggtggagacgataggagaggtgaggcgactggccacatgctcctcgctgggcgcatggcggccagcagtgtttcgggctcctgcagagtgagccccagtgtctccacatgcaccacctgccggtcatggtccacttccatcaccagggctcctgcctcctggcccttgaagatgaagctcctccggccccgctgccaggtcatgtgctcgaagcccaggagactggtgtctactcgcaggctctcaccccgcttccacacgcggtacacatcgcttgggcacatcttagacacaaggggcacccagctggtgaactcccacttcatctcaacgtagaaatcgggggcctggcgaagtttgttgagcagttccggaatgcccgccagcctctgcgtggccctctggtagtcccgatactggagcaccagctgcaccatctcggggtctccagtgctgactgcctcctgcaggactgcccagccctggcggttctctttgcccacgttggcattgtgtcgaaggagcactctcacagactccaggtttcccagagacacggccagctccagtggggtccgcccgcgggggtcctcctgttcaatgtcgtgctggtggctgtgcagtgcggcctccagttcgcgatgccggttcgcccagacgagccggtgcagcgggaaggtggggcccgggccggccatgctgggcctcagcgccgcatcccggccccgcctcggcttcgggcctggcacggccccctagcctcccctccgagccgcgccccagctgcgccccccgcggcccccgcagcagta

SEQ ID NO: 435009 - DNA, 1129 bp, Homo Sapiens
  misc_feature (124)..(200): n is a, c, g, or t
  misc_feature (333)..(333): n is a, c, g, or t
ccgggggggccccggggtggggaggaaattttggccgcccctcccccagggaaggccggaaagggaatcttcccccccttgtttccctccggcctgcccgaaaaaagagaggggctccggtgcnnnnnnnnnnnnnnnnnnnnnnnnnnnnnnnnnnnnnnnnnnnnnnnnnnnnnnnnnnnnnnnnnnnnnnnnnnnnngttcagaaccctggtcccccacaattaaacctcaccaggggagaaccccagtccctcccgtcccagagaccagaggagattctgctcccccaaaaaggaggaggtgggcaggttctgacccccaggaagtccncaacgaggagatgcagccccagggtcaagaggaacacactcctcttttgatcctcggtaccctgggtaggggcccatgatgtgggtgagccctgtgtactccgcaggggctgggcactcaggcccgctgagttcccacaaatgctcagggtttccagagcccaggggctactttgggatggatgtggagaggagctgagttcctggacctcatctcctacccccagccccccacccctagcctctcctgccttggcctcgtagccgctaacagtttccatcttctcagaccgccagccccagataccacatttgttcctctcaaaggccacattacgagtgtccaggtgggtggagacgataggagaggtgaggcgactggccacatgctcctcgctgggccgcatggcggccagcagtgtttcgggctcctgcagagtgagccccagtgtctccacatgcaccacctgccggtcatggtccacttccatcaccagggctcctgcctcctggcccttgaagatgaagctcctccggccccgctgccaggtcatgtgctcgaagcccaggagactggtgtctactcgcaggctctcaccccgcttccacacgcggtacacatcgcttgggcacatcttagacacaaggggcacccagctggtgaactcccacttcatctcaacgtagaaatcgggggcctggcgaagtttgttgagcagttccggaatgcccgccagcctctgcgtggccctctggtagtcccgatactggagcaccaatcccaggaattccggacc

SEQ ID NO: 435010 - DNA, 1748 bp, Homo Sapiens
  misc_feature (495)..(522): n is a, c, g, or t
ccaccacgaaatttattaagttggtattgatgtttctgtttgactaacgtgaatagccaggataacagcctcattcactcgttgtttacggccagtatatagtgagggtgggataaagtatgggcggttaggtatcaccgcgagcatgctgagtgacaggttggcggatacgtggtccaattgtagttttctgttcccctgttttagaatataacggccgtgggcgcggtaggtgtcgcgcagtcagggggcaaaaggacggtttaaaggtgaggtagatacacagcgtcttgcggtttgtggtctaaactgcgcgggtttggcagggtaagatggcacactgggcacctccacttcccttccaccccccatgaggtcatctgcctgcagcagttctcctgttccccaggcaacagccaattaagacattaattaccgtgagagtgagggaggcaggagatgcccaagaatcccacaaggaagggattttttttnnnnnnnnnnnnnnnnnnnnnnnnnnnngaagggtggcagtgactaccccattgccaggataagcctcgtaggagggtcaggaggggagggtgggacaccttgcccagtggcactttcctcttccctcatgggcgtgaacagccctggcctgccccttaccccaccagaaataccaaggaatctataaaagaaatggcatcctatgcttcctggctgaccacatcgtgccccaggccctcttgtactggcttgggccaggctcacaaagcctggggaggggctgccttttacatttttccatttttcttcaaaaaacagatgaaaatgagttgacagctaaaaaatgaacacaaaagcattaaaaacagtgatgatagcggacaagcagtcctgggaaggtggcaaggggggcgagggaggggcagggccaggggactgtctccctgcctgctgtccatcagtgtccagccctgccttccaagaaggggcgcccccacggagcccagaggcctggccagagggggaaggcacaagagcatgggggttaggggcacaagcacccccctccgaagcccagggggcagggaaaaagggggattataaaagccaagaaactacaaaactaaatacaaaggtgggcacagctggcaaggggagggggtgtgggggcgaaaggagaggtccggtccaggccgactgtccctcgggggcctgaggccgtgccgggcactcagaccttgtagtagatgttcgccgggctctggggcggcatctcttggacgatgtagacagggtgcccgtagtccccactcaccttctcatagtgggggcagtagttgttctctgtagtccgtaagggaatgatgatgtcgctgggctcggtgcccgctgtgccactgccccccttgggactggccagggtactgagcgagagggcagccgcccgctgctgtgtgtgcttgcggtgccgcttgcgtagcttcagtagtaggaccgtcaggaagatgatgatgagcaggaagatgacgcaaccggcaccgacagccgcgaacaatgccaccttggagttgaagaagccatcagggtccccgctgctgcccccacttgcacctgggccactcttctcttcctggttcacagtctcatgcttgccatgagagtcacccagggagccccgactaccaggggcctgtgtggccatcttgacagtgttgtcgccacccagcctcgctacctaacccggagagtactgt

SEQ ID NO: 435011 - DNA, 731 bp, Homo Sapiens
  misc_feature (132)..(316): n is a, c, g, or t
gtggggcttccagggctctgtggaggatgcatttcttgctctgaagtggcctggactctgtggcttgagctgccctcctcaactccagtttcctgctccatcgctacacctccaacctcctctcccgtcacnnnnnnnnnnnnnnnnnnnnnnnnnnnnnnnnnnnnnnnnnnnnnnnnnnnnnnnnnnnnnnnnnnnnnnnnnnnnnnnnnnnnnnnnnnnnnnnnnnnnnnnnnnnnnnnnnnnnnnnnnnnnnnnnnnnnnnnnnnnnnnnnnnnnnnnnnnnnnnnnnnnnnnnnnnnnnnnnnnnnnnnnnacaactgggcagcaaaactattacaccctccggtataatagttttggtgtttcaatgactgggaggaaaagggttggaattttttgctttggggtccctcttaaccttgtatttttaaggtctgggactcaccaaccctccccttccaaccagagaaactcactgcagtatctccttgaaagtctggtgacgtgtctgtctaagtgctggtgagaggcacaggaccaactgagggcctcacgcagtacccctggccacagggtgcccgcctaagcccacacctgctgactgcaacaagcccatggccaggacggaacacagagaagggtctgaggcctggagcgcgccatgaaggccatggggcaagtgaggatgcatttcctggctctgaggtggcctggactctgtggcttga

SEQ ID NO: 435012 - DNA, 2116 bp, Homo Sapiens
gacttaaaacaacacaaatttattcccttagagttctaaaatcagccaaaattataaaattagcctcactgagccagtccaggtgggagcagggctggggccttccagggctctgtgggaggatgcatttcctggctctgaggtggcctggactctgtggcttgagctgccctcctcaactccagtttcctgctccatcgctacacctccaacctcctctcccgtcacctgctcttctgttatacagacccgggtgaggacatcaagccctcctgaacaagctgggataatcttcctggcgaaagatccttaacttcattacatctgcaaagcccctttggccatacaaggtaattttgacaggttcctgggattaggacatgggcatcttgggaggccactactggcctaccacaactgggcagcaaaactattacaccctccggtataatagttttggtgtttcaatgactgggaggaaaagggttggaattttttgctttggggtccctcttaaccttgtatttttaaggtctgggactcaccaaccctccccttccaaccagagaaactcactgcagtatctccttgaaagtctggtgacgtgtctgtctaagtgctggtgagaggcacaggaccaactgagggcctcacgcagtacccctggccacagggtgcccgcctaagcccacacctgctgactgcaacaagcccatggccaggacggaacacagagaagggtctgaggcctggagcgcgccatgaaggccatggggcaagtgaggtctgctgagatagcgcaggtctgcggagctgaagtgcagctgcagaggctggtctggtgctgcgagaactggaagaagctgggagctgtggtccctgtccacagagatgctggaaactgtggctgggagtggctctgaggccgtggagagagagcatctctgccccacggcatctgcgggtgagggcaaggtcctcaccagacaagtgcagctccaagtcccagatgttgggctttttcttggtactgagacagcagtggggcagggtggggcagtggcaggaaggcagggagcctctcttgctacctcttctccatgctctgcatctgcagactgagggaggtgaagctggccaggaggtcagtcacttcatccacctgctctttggtactggtcatctgcaggcgggtgcagaggtcatccaggcgttctcgctgctcatgttgccctaggcgctccagatactccctcagcatatggatgatctgcttcacctccagacgcacagcctctaggcactgggcatggccctcctgcaggatattcagctttgacttggccaggtgcaggggtgtgcgaccagctcggtccagggcatctacacgggcccctcctcgtagcagtgtggtgatgacaggaacgtggttggtgcaggccgccaggtgcagtggcgtgttccccagcccatctcgctggttaggatcagcaccatggtccaggagcagctgcacaatctggtcattgccattgcatgaggcaaagtgtagagctgtgcggcccttgtcatcagctgcacagggatccgcgccatcttccagcagctgctgcactgtttccacatcattggcattggccgagtccctcagtctcttcagagcgtgcacctccttgcccgtgggcccgagccgccggtggggcctggcagcgcgcctcagccggccagcgggtatcttgcagcgcagctcgtcgcgcggctccgcatcctgctgccacaggacgtgcaagtagcgcagcggcgactgggccccgccggacgcccggcccgagaggcccgcgccgccgccgcccagcgcagacccgaagtcagcgaaggagaagaggccctcagcgtcagtcagcggctccggcgccaccgcgcactcgccctccgagctcgagtggcctgagcgcggctcgtcgtccgcgtccccggcggcggctgccatggcaacggctccgcgcgggcctggccgcctgagcctcgttcccgaccgaccaacggacctacttccctccgccctgagtcgtgctgtcagcgagctggcgggcgggatcccgggaattccggaccg

SEQ ID NO: 435013 - DNA, 333 bp, Homo Sapiens
gacttaaaacaacacaaatttattgccttagagttctaaaatcagccagaattataaaattagcctcactgagccagtccaggtgggagcagggctggggccttccagggctctgtgggaggatgcatttcctgctccatcgctacacctccaacctcctctcccgtcacctgttcttctgttatacagacccgggtgaggacatcaagccctcctgatcaagatgggataatcttcctggcgaaagatccttaacttcattacatctgcaaagcccctttggccatacaaggtaattttgacaggttcctgggattaggacatgggcatctt

SEQ ID NO: 435014 - DNA, 1059 bp, Homo Sapiens
  misc_feature (135)..(135): n is a, c, g, or t
  misc_feature (143)..(143): n is a, c, g, or t
  misc_feature (157)..(157): n is a, c, g, or t
  misc_feature (516)..(552): n is a, c, g, or t
agaaaaaaaccctttttccccccaaatttttttcaaattcgccttccgggaccatggtccccactttaaccctccttaggggtccccctattcccctttccccctcaccccctaatttactgcccttttacattntaaattancccccctcaccttntgccacttacctgtcccatctaccacttttctagtttctcctttggccccagcaccttcccctcttttcagactccagtatccaagcacacccgtgggtgccccagcactgccttttgaggaggctccttctacctgacccaggtgtcctatgggcctatctcgtatcagctaggctgtggacaccaagaatccagaatctgggttcacttagtgtactgcaccccttttctgctccctgataggtgttccacataagccagggtgttgaagctgaggcaggatgtgaggaaaccaggcacacagcagccagccggatactctagcaaccaacactcaacagcgtgctgtgcaggtagnnnnnnnnnnnnnnnnnnnnnnnnnnnnnnnnnnnnnatctcatctgtggctgaggtcctcaggaggtaggccagcgccccgtaaacgagggatgttccaacacaggcttctgactaagcatcattcaggatgcagggagaaggtggcctctgggctccagcagccggctggggtccagggtggaggacagggaagaacaaggggctgaggaaaggaggccagagcttcatgtttgcccaggtgagggcttactgtcctgcagcaacatcccacagctggctcaagttctggccaggagagtaaggggtcacagggaaatacaatgctgggcccctcttggagggagaatgggagtggaatgtgcgggctcaggtccaaataccaactcaagtctcctgatggctggggacaccctggagggccagatggctctgcctttctgagctccaggtattggggaaaaccaccctgctctggcagccagaggagtgcagctggtgtgagaggggaagtgcaggtagaggtgaaggcccacagttggct

SEQ ID NO: 435015 - DNA, 305 bp, Homo Sapiens
aacaaacaattgtgtttattgacaagttcatacatcagtacaaacgggcacgttaaaaacagcgcccccgccccatgcagccgaggatgaggcaggaagcgccgcgacctgcacaaagtataaaagttataaataaggggctttcaaaacagggcgggggcaaatctggagtggggcggcggttgccggtggcctcagacatgcagaaggggacggggcgccggccgggccacgaggccccccacccacatggggcagagggcaggaaaagggcggccacattctcctcgtgccgttcgtgccga

SEQ ID NO: 435016 - DNA, 278 bp, Homo Sapiens
  misc_feature (105)..(118): n is a, c, g, or t
  misc_feature (141)..(196): n is a, c, g, or t
  misc_feature (220)..(220): n is a, c, g, or t
atttattgttgtagatgaaaagtctgatgcctatctgattcttagttctttctgatagttagtatgattttctgtgtaactgtaaagtgtgggggttttacttcnnnnnnnnnnnnnngagacaagaatctcgctctgtcnnnnnnnnnnnnnnnnnnnnnnnnnnnnnnnnnnnnnnnnnnnnnnnnnnnnnnnngttcaaatgatactcccgcctcancctcctgagtagctgggactacaggcatgtaccaccatgcccaactaaattttgtatt

SEQ ID NO: 435017 - DNA, 584 bp, Homo Sapiens
tcaccacacatactgttaaacaatcttttaatacctttggaattactctttataatttttatacttcaaattaagaaaaccgcccaatgttcaggcaactttggcattaacatttccaagaaagggacaaaaacaactattaatgcaacatcatgaagagattggggacaattgtgggtgtctataaagctctctttgaaaagctctttaaagcgaactcaggtaaatggaaatgaaatctgactttttacttaggccaaataacaatgaggtttgaatataaaatggaagattcaggccctttctacctaagatgaaggcatttagtttgctcaaattcaaactccaccaaatactctgaatggaaagtttggcaacagaactggacatgtggaggttcaccaaccattttgatcaaaggtgatctgattttatctcacttcttgcctaacctttctggcttctttaccttgactagatgcctgtggcattatataatgatgcagcccagcagaagtaggatgctaataaaccctggggtaaagcagcaatcatctgcatttttaccacatacacttgaataa

SEQ ID NO: 435018 - DNA, 2121 bp, Homo Sapiens
ttttttttcagatacaaagcagtatttatacatttatttatatatgtatatttacttcagaagaaacgaacatttcggggacaggaagcaagcaggcccggggctgcttccctcactgcccacctcagagtcagagttggcacatgacaaataccaagctcagggagaagaactgggagttaactgggaagtagggggcgctctatgcacacgcaggcttctaagggtgcacggtatgggcaggaggatttgcactgggaggccctatgtacagcttgaagctagggggagattagcccagtgactacaggaacaaacgccaaaggagagagaagaagggagggatgacctgctggaccccagggcagggacagggccaagacactcacaccattgccagccgggcagctggcagcttccagcaggtggcccacttaccttccctgaagcccttttaccacaggcttaaggcaactttggtccaaggttgaccccctcaagcagcttggatccccagcctgtccccaactcctgcactgaggaacccctccccaggcttggaaacagagccagctgctaacggttttggggctgtgctgtgtccagatgggctccatggggcagtggacggtcactttccagttaaggactgagggcccgcagtccaagaacatgaacccccattgaggaagcccaggaatcctattacatggagtggggctcggcagttttaaggcatagggaggattcccccagtgggagggagaacaaagtcatcataaggaaggctcagcccctgcatggtttgggaatcgtaaaattcctatgtcaacggaaccaaattggggagggggctgggagcaagctatccctgctattcctgcatccccctgctcttccctatcctgaggacaagtgctttgagatcaatggcaaaagggggcctgcagttcataggcttcaaggaaaggcctccactatagaaaggcctcccattcaaagctgagaatgagtggtgggacaggggcaaggcctgcttcccaaagaggtggcagcataccacagggcaaggacagcaattccctttcccatttctggacccatggcagacatggctaaatgaatactacactccttccatgagcctggatgtagcctcggaatgcaccaggcaccactaagaaacttgaaggtggcacttaagatacaacttcttccctaacccagggtcttggtggttgggagtgggatgggtgtcggaggctccctgggagggatcagagtcagagccctgtctttgcaagtgtcacacccctgctctggcccactctgagctttctagctccatccttccattccttcctgccctggtttaagtgcatttagtaattacttcattaataacagcaaaagctatttgcatctgcccaccagccaagaccaggctgctgcttgagggattcctgctcctctgctcagagagaatgatgtggtcactgatcactgtgagctccagacgctcccaggaacgcaggcagtgaagctgcaataccatctgggggctcaaagggaatttcctcttcctggatattcctggttcaaggctctagggcttacctggcccactggcccctactggttcaggcctgtgaagggctgagggtggcttcaccaggcactgagtagacttaaggcacaaagtcagtttctccaacccaggcagggctggcctcggctgccctgggacttcttgggagccaagccctcccagggagaagaaacctcctgggccacacttaaagcttagaagtccgagtctggcgtaacaggcaaaccccagaaagtccactaccaagccatcccccagggaacagctttaagggggagagccgtctgccctccattgactcatgggggtccacccaagtctcttagggctggatccgagccccctgctgatctcaaaggtgggcaggtcctctctccaaaagggttggctccagtctcaaaaggggaggcaagggagaatgggctctgaacaaatcagggccacaggcttccccttccctccagggcacctgaaccagccctccaaccaccattctggaaagaggtaaactg

SEQ ID NO: 435019 - DNA, 2410 bp, Homo Sapiens
  misc_feature (628)..(628): n is a, c, g, or t
  misc_feature (2038)..(2038): n is a, c, g, or t
  misc_feature (2165)..(2165): n is a, c, g, or t
cactggtaacaatttcaagaacctttattgaaaccaacattcaaataatatctcaagggtgaaatgtttcagcaaaaccaatttaacaattccaaatatatataaaaacatgtaattttcttgaaggtgataatttacccctcccccattttatctgctatacttcattgcaccaaatagggaagactgtttaatcatctgcaccaaaaaaaaccccctgcattttgacaagtgtaaatgtcaaaaatcccatcaaatcagagtataattataggcttaatatactataactaaggcttccaatactacagtccagaaacccagtgtgaattttcccattttcaggtctcccaataagcttgactgctggattaagaaggcacaggggccattacttacgacaaagtgacgcagtacttcggaaaagtaggaacgggcagtgccagcgagcttctactgacttaagcagggtgcctggctggatcagcgtgagagagtgctctgctggctcctgtttctgagttgggcccaggcgagctgccagggcagtagaagcttcagtgggagacaggtcaaaggggtacttgttttcagattttaaccaggtgggtgctacgtagcacacggnaagagcaagctcttaagggtagcatctatcaggttttcagatactaaacagaaatgagcacagtctgtacttgtgtgccaattttaaaagctttgccagtatttaaaaatatatggtcaggaggagactttacagtttctctttacaaacggtatataatgggagaaatggccttgtggcagaggacagtcccagacagcagccttgccacagctcaagtagacacagtccttactaagtctccacgaagagcagtagctggggagggcttctgatgctcttatttacaatcccacaatcactgctctccttcaagtctagcagtcccactgtatattgcaacttgatcgtactaaagaccgacagcaaaggatacagccagtctcgcctctgtgaagtgttgcagagaacctggagagtgctaatgaaaagctgttttaccaaaaagttgccacgggcaacctcatatacttaggcttatgtttagaaagagcaagggtgctactggtagacacttgaaattcgaagtgttttttgtgaataaaatgtgtttatggtaacttagggaaaagtggtagtaggacagcaaacatgtggttctacatgtacatgaagttagacaagctgactcccctcctagaaagcctacctttcaggcacatatttgtgccaaaatcccagtgaagcacaaacaacagtaatttatattagtatgtggcacagttcacatttccaatagaacttcatcttccctgaaacaatactcagtacagtctcaaaccacacaatgagtctcatcttaagctctccggtccttctacctgtgagtggtcatcttctgggtgtgggacccctttctggaaggcctcggtctggtcggtgtgctgagggctgggagcccctgggtgtccctcagtgctgctggcctcgagggtgatctgctccggcccactggataggcgctccaccttttctaagtcttcaatgtgactgactgagctggtctcactcaaagcatctgaacctcgcagggaccttttaaaaggcttctggcctggaagcctctgcttggtgcgactgcccgagggcgttggaggcagcgtgactcctgcaccttgtgctttgtagacatatatgggttctgtggactccagagagcctgctgtcaagttaaaagttcttcccttctgtaaagcctggaccggagaaaaccaattcagcacggagcccactacagggatctgccgcaacaccccctcttccagaagccgttcttcacttgccttctgcagctccacttgagcttcctgaatgcctttccgaaccacttctgtcatgttttccagaagcctcgagttctcctctatctcccgggctgtggccgcaatggtctccacgagctcagcagcnatcgacgttgtcgctcgccatgccgacataaaggcagctcttcatgctcttatactcagggcctattttaaaggttaggtcagattccagttcatttaacttcttcaggagtccagcatggatgttnttcccttcgggatctgatttcaaactgctcttatcatcattagcatgttcatacctaaaacaacatcaaaccacagcatttcagcttaaaagatcaaatgtctcttctgatacaggattagaaacctctaaatattagcaagacaatgcagtggaaccagtgggcaaaagagctactgcgagtgtctccagaccacaaactttctggaagtgtgccaggagtaaagagaaagtcacaggaaagcc

SEQ ID NO: 435020 - DNA, 305 bp, Homo Sapiens
acctaaatcctggctttgtcactccacactctatagccctttttgcaaggcctgagccataataaaggttacatgggctgctctgctcatggagctttttctatcctggttttcagatactagacagaaatgagcacagtctgtacttgtgtgccaattttaataagctttgccagtacttaaaaatatatggtcaggaggagactttacagtttctctttacaaacggtatataatgggagaaatgccttctggcaggctgctgtctggactgtcctctgccacatgcatcgagatcctctaga

SEQ ID NO: 435021 - DNA, 397 bp, Homo Sapiens
  misc_feature (34)..(34): n is a, c, g, or t
  misc_feature (36)..(36): n is a, c, g, or t
  misc_feature (65)..(65): n is a, c, g, or t
aacgtcataaatgtagttgggattgagaagcttnanagataccttgttgctgagtccttcccgtnacttccgataaccgttctctaacttgccttcccttttgccgtctttatcttttttctcagattttttccttaaacggagtgctgtgtgccaagatgttgacttcttgagagtcccgtccgggttctccacgatgactgcactggtgtggcccaggacaaagcctggaatccagccctcagctgcggggcactggtcagtggcggctcggaacaccagaaacatgttctgctggttgctggccagaatttgaacgacctctccttggtagacgttgatctcatcctccttcactgccgtgtaatcgtgtgtcaccaacatggtggagatgttg

SEQ ID NO: 435022 - DNA, 2014 bp, Homo Sapiens
tagtttgaaatagttttattggctcgtaagacctttgcatataaaaaaaatacccaaaacactatgcagtattaaatcacaattacatttttttaccaattaaaactacccagaatatacattttttaaagaaaagaaaatcctacagaactgaattctgaaatgacattatgacttaaatactatgacaaaatagataattccttataacattaattcattgcacaaagctgccaggtattttcataagcataaccgctgcaccgagtgcaaatgaacacaatttcaaagttacacatttattcgaaagaactgcgcctccacctatggaactcttaaatttctggcacaaaatgttggtctgttctaacttccaccaggcaaccaactttgcaatccactaactttctttctggccctcccttaaaaaagcaacatccttctgctgtcgtgccctgaggagtcagcacctcctctgcttgaagaaatctacccccctcaactcttcaggcaggtactcctgatccacaggctcgctgtacatggggttgtacttgtagcctttgccatagcccaaatccttcatcagcctagtgggcgcgttcctcaggtgcaggggcacggggggcagtggcccctggtggttcctcaggcaggctttgacgttgttgtaggcgctgtacacctcaatggactttggggctctggcaaagtagaccacacactgggccagaagcacctcacattcaggcatgcctataaaatgacagccttggtaggcagcaaccgcttgtgttaacgcagacgggtctgccagacctatgtcctcgctggcaaacctgacaagcctccgtgccacgtagagtgggtcctctcctccctcgagcatgcgagccagccagtagagggaggcgttctggtctgagccccgcatggacttgtgcagggcggagatgcagttgtaatgctcctcacctgcccggtcatataaaatgtgggatcgctgtaggccctccttcacgtcattctctgtgatcagaactctactgggagaataggattgcccactcttcttacagaacatcttcctagagcttaacctagccagcaccgccagctgcagtccgttcaacccagctcgggcgtcaccgtcactgaggtaagccagggtgtctactgctttatcctctatgaacatggcgggctctgagctgctgttgctgctgtggctcagagggtcagtgggacggctagagtctaggacgtggattcccagggagttgatcgctcgcattaaaatagtcaccattgcctctactggaagcttctcaagaacaatcactcgacagcggctcagaagagcagcgttgacctggaaggaagggttttcagtggttgccccaatcagagtgatcgtcccacattccacgtgaggaaggaaagtgtcctgctgagatttattgaaccgatgaatctcatcaataaaaaggatggttttccttttgaaaaagctcttttcattttgagcttgttttatgacatctcgcacatcatttgtcttggcatttgttgcagataatgtcacaaaccttatgctatgtttcttgctgttgctggctatgatgtgagccagagtggtcttgccgcagcccggcggcccccacaggataagcgaggggatttcgttggtctccaggagcgagcgcagcagggtatcctggcccacggccttgctctgcccgaagtaatcctgcagcgtgtcaggacgcatcgtgtcggccagcggcttgccctgtagcatctgtcggatctcctcggcagccagcgcccgggggtgcgggcggcccccgccgctggccccgaaggcggtggcggcttcggcagcgtccgcgtcccagtgccccgggtcgtcctcgccgtccgcgtccgcgtccccgtcgccatcgccgtcgcccacggcctcctcctcctcctgcgcctccgcctcgtcccagctgcgcggagacgcgctccc

SEQ ID NO: 435023 - DNA, 469 bp, Homo Sapiens
  misc_feature (24)..(24): n is a, c, g, or t
  misc_feature (34)..(34): n is a, c, g, or t
gggccgttcaaccgttcaactgangtaaaacccnaggtgtccaactgcctttaaccctcctatgaaacatggcgggcctcctgaagctgctgttgcctgctgtggcctcaagagggtcaagtggggacggcctagagtcctaggacgtggattcccccagggagttgatcgctcgcattaaaatagtcacccattgccctctactggaagcttctcaagaacaatcactcgacagcggctcagaagagcagcgttgacctggaaggaagggttttcagtggttgccccaatcagagtgatcgtcccacattccacgtgaggaaggaaagtgtcctgctgagatttattgaaccgatgaatctcatcaataaaaaggatggttttccttttgaaaaagctcttttcattttgagcttgttttatgacatctcgcacatcatttgtcttggcatttgttgcagataatgtc

SEQ ID NO: 435024 - DNA, 579 bp, Homo Sapiens
  misc_feature (34)..(34): n is a, c, g, or t
  misc_feature (42)..(42): n is a, c, g, or t
cattatctgcaacaaatccaagacaaatgatgtncgagatgncataaaacaagctcaaaatgaaaagagctttttcaaaaggaaaaccatcctttttattgatgagattcatcggttcaataaatctcagcaggacactttccttcctcacgtggaatgtgggacgatcactctgattggggcaaccactgaaaacccttccttccaggtcaacgctgctcttctgagccgctgtcgagtgattgttcttgagaagcttccagtagaggcaatggtgactattttaatgcgagcgatcaactccctgggaatccacgtcctagactctagccgtcccactgaccctctgagccacagcagcaacagcagctcagagcccgccatgttcatagaggataaagcagtagacaccctggtttacctcagtgacggtgacgcccgagctgggttgaacggactgcagctgggcggttgctgggttaggttaagctctagggaagatgttctgttaagaaggagttgggcaattcctattttttcccagttaggagtttttgattcacagaggattgaacgtga

SEQ ID NO: 435025 - DNA, 244 bp, Homo Sapiens
cttatgttctgacccacctactaacacttttgtctcacaaaaggaaatattttcctccaaaaactataggaaggacatattctcattgaaggatgtttatttagcttcatttagcttcacgagaatctcagcactttatcctttatctctttcctttatctctttttaacaaggaccgctgaaaacttcacgggttgtgttccatctgcacaccagtgtttgggaaccactgccacatgcattt

SEQ ID NO: 435026 - DNA, 1223 bp, Homo Sapiens
  misc_feature (305)..(377): n is a, c, g, or t
  misc_feature (424)..(462): n is a, c, g, or t
  misc_feature (471)..(488): n is a, c, g, or t
tagggaaggcgccgcggtattggctcggggggtcgccgcgcgtcatcggcgcaccggggaaaagaaaggggtacggggggaagtgggctatttgcgtaaagtttctgtgtccctttcgggaaggggggtttggaaaggtgggagaccggggcaaaacaaacccccccctttgatggcggtggttttttggtttggcaagccagcagattatcttgcaggaaaaaaaaggatctcaaggaagattccttgggatcccaaaaaaaaggcccgctcattaggcgggttaaattccccgggtactgcannnnnnnnnnnnnnnnnnnnnnnnnnnnnnnnnnnnnnnnnnnnnnnnnnnnnnnnnnnnnnnnnnnnnnnnnaccactttgtacaagaaagctgggtcaggaaacagctatgaccatgnnnnnnnnnnnnnnnnnnnnnnnnnnnnnnnnnnnnnnngcctcgagnnnnnnnnnnnnnnnnnnactggtgaaactcaactttattaaacttaaacagagaagctacttctgcacatgttaaacacacatggaaccaaacagctcgatggagacaccctgcactgcttatggtgatgctgcaggaatggcggcagcgatgcccgctacactccatggcctgctgcacatgtgacaggacagttatttcatctatgcttacacctgcaggtcccttaccctagaaacactctatatcttcttaggtacttcccttgaaacaggatgagttctagaggaaataaaactgctgcacttacaaacctagaaatattcagggaccaagattagttgttcagtgacctaggaaaccttagaatcctgtaggttcctcaggagaggtgcttccaagtacttgagaatccacaggcagagatgcttccctttccatggtggatgtgtatgtcactccaggacaaactgcggagtcacggagtgtggaacacatctggttgtgtacagtacactatcccagaggaaaatcacaaagcaacacaactctgcagcaaaaactagtcccaaagtcagaagataaaactagcaaaaactttgcacaatatttagagaaaagctctagggtgtggagagtatgggtcttcctttttctccatgcaccaagcagagcacagtatcattccttaagctataaacaaaaacccttttgtataaatatttaaatagtaacagacacactgacaacgg

SEQ ID NO: 435027 - DNA, 472 bp, Homo Sapiens
  misc_feature (132)..(132): n is a, c, g, or t
  misc_feature (390)..(390): n is a, c, g, or t
  misc_feature (395)..(395): n is a, c, g, or t
  misc_feature (444)..(444): n is a, c, g, or t
gactggtgaaactcaactttattaaacttaaacagagaagctacttctgcacatgttaaacacacatggaaccaaacagctcgatggagacaccctgcactgcttatggtgatgctgcaggaatggcggcangaatgcccgctacactccatggcctgctgcacatgtgacaggacagttatttcatctatgcttacacctgcaggtcccttaccctaggaaacactctatatcttcttagggtacttcccttggaaacagggatgagttctaggagggaaataaaactgctggcactttacaaacctaggaaatatttcaggggaccaggattaggttgtttcaggtgacctaggggaaacctttagggaatcctgtaggggttcctcnggggngggtgctttccaggtacttgaggaatccacagggcagaggtgctttccntttcctgggtggggtgttgttttgttca

SEQ ID NO: 435028 - DNA, 3755 bp, Homo Sapiens
  misc_feature (19)..(19): n is a, c, g, or t
  misc_feature (36)..(36): n is a, c, g, or t
  misc_feature (42)..(58): n is a, c, g, or t
  misc_feature (60)..(60): n is a, c, g, or t
  misc_feature (65)..(67): n is a, c, g, or t
  misc_feature (70)..(70): n is a, c, g, or t
  misc_feature (78)..(79): n is a, c, g, or t
  misc_feature (91)..(91): n is a, c, g, or t
  misc_feature (94)..(94): n is a, c, g, or t
  misc_feature (102)..(102): n is a, c, g, or t
  misc_feature (119)..(119): n is a, c, g, or t
  misc_feature (261)..(261): n is a, c, g, or t
  misc_feature (288)..(288): n is a, c, g, or t
  misc_feature (292)..(292): n is a, c, g, or t
  misc_feature (343)..(343): n is a, c, g, or t
  misc_feature (345)..(345): n is a, c, g, or t
  misc_feature (352)..(352): n is a, c, g, or t
  misc_feature (385)..(385): n is a, c, g, or t
  misc_feature (412)..(475): n is a, c, g, or t
tctttattaaataattaantacaaagaatgaaaatnaaattnnnnnnnnnnnnnnnnncnccccnnnggngcgcttcnnggggtgggcccnggngggctgtngggtggcagggctaggnggtgctgggccactcagtgccgacttggggaagtgcacgttctgaacagccttgccaagcagccgaccggtgggaggtcaggggaagcctggcccaagctgtggacaagctgtgtttgccgccacagttaatcacaagcctntgacgacacagggccacagagctggtnactnaacatctggtacaaagggtgaggtgaaatccacgcgcaggggattgctgtncngtgggcnggggccagtgtgccggagtgtgtggggtgggtntacgtgatcatacgggctactaatcannnnnnnnnnnnnnnnnnnnnnnnnnnnnnnnnnnnnnnnnnnnnnnnnnnnnnnnnnnnnnnntatcccagtggctgcttcgtggcgccctggggctctgacttccctcagcccagcaggccacagggcctgcctgcaccacgacactcgctggttttatggcaggaggcagaagccgtggaagcgaatggaaaacagcacagctgacttcacagtagtagatactggtgacacttcatggctgcgacccagaatgaacttaatgcacacagggacgcagggtgtcactggtcctgggcctttgtccatgactaggtggtcagcaggacttctgcagctgactgtgcaatggctaaatgaaaaaaaggccacagactaacctccactttcctgtcttcaaaattctagtgacactgggaatgctataggacctcctactattctcttaaggtcctaggaaagtttcaggaactagggaaaagactgggtactgaggctgtgtccccagatgtctgcttccgaagcagccgcgtcatgacgggtttctgctgaggaagtggtgttggcagggccccatatgccctctcgggttgtcaggggtgggagacaggctgtatgggggtccttcatgtgcagatggaacagcatcgcctcacagctgtgcagacgaacagatgtggtctactgccacgaacaatgcggcataaaactgatcaatattataataaagatttgtcttcttcatctccatatctacaaagtgattctacatttccttggacaacactggagggcccgctcagtcttggcactgacgctggaggccatctccagctccctggcccctgtggcgagctggcggcttcaggtgtcacaggccggctgctccaggccttcgagggggagctggctcctgtggggggagttggggctcggtgggccgctggggttggagctattcgatggagttgagtgtttggtggagtccgaatcaggctctttgtcaaagtcctggtctggatcagacatacttctcagaggcacagtcacgctaggctccgatccacctgatgagggccacgagatgtagggcttgttcctggatggaggctggcgagccaggttggtgggagcggggcccggcctttcctcctgggaggggggcacagcactcagaggcaggtccatgagcacctgcatgccgtcgcctgggcccatgtgggccacgtggttgaagttggttgggttggatatcattttggatctcaattctgggtctctaagcatctctcgcctctgctgcagtctctcttcctctgggaccttgaagacgaaccgccttttgctcctggtgcgcagcatctgcttcttgctgttgtcggaggtgtccggcacgttgagaaccgctcccgagaacttgctcttgaagtagatcaagcgtggaggctcgcagttgaggaggttgagggtgccttcagagttcaggggccttatcctccgcaggccgatggtctgcacccactccatggtgcgcacatcaaagacgtccacgccatactcgctgtacaccgtgacgtgggtggggctgcaactacaggcgacaggagccgcaggccacatgagctcctgcgcgcgtgccctccggccttgcgggtccacgtacagtcccatgtggctgaagcaaagcaggtactcctcgctttcgagctccacagcacaaagggcatcaaaagactgttgtgagaggaacgcaagcgaggggtcattgggatttaccaggtttagaggctgcccgtccccctggatgctcagcaggcagaacccagaagggtagcccacacagagcctgtccctgagcaccgccaggcactgcacgctgccgggagccacaatctcattgaactttctgtggaatggcttcgttctctggatctcatagcaaaggatcagccgtttcacggccacaaacaggcaggtgccagagttcctcttgagtgtggccgtggccatgagctggcagcctttggtttccggaagcttgatgtcaaagctgccttccgctccatcaagggacgaccacggatagaggtgcacatggtggttccggccacagaggaggattacgatcttctccctgggagcaagctcgatctggtgtaccttcttacagtcagcggcacggacgatcacatctcgggtgacctctatgacatagagcccttcttctaggccgactgcaatcctgtctgcatccacgatggcagctgtcaggatggccttgatgagaggcagcgagctgtcgtaggcttccaagggaacatgcacgacctgattcctcagccggtttttatgaaggatggactggagtccttctagaatcccaacccacttcctcttttcattctcattttctgtcagaatgagcagcgagctggtcttagaaggtgcacctaagagagaggccgtcaccctgaatatacatggaatatctcggcgtgtagcatgaatgacatctgaggccaggactgagctcacggaaaactcgtcatctctgagatccaagacttggctcgcaatgacaccaggctgggtggattttccttcaggcagatcatacaggaagagcttgcagtcacagacgactgcatatgcgcgctgccatcccttcttcacccccgtgggctttgggaccttgacatggcctttgtaggctgttccgatgcctcgctgcacgtccacgcccagaggcctcttggactgctcgggaggtattgggcacacctggggggcaccgtctttgcaggacacgtggcaagcaaaggaacacacctcgcaggcgtagccctgccggatcagcccaaccatcagggaggtgcagtggctgcactgagtagggctggagaaggacttgatgctgaactggtgagcttttggctcctgctgctctgatgcagccacagacatcgacggggacgcttctggcttcggagcttgtgtttcttgctcactagctgagctggttctaaatgtcaggtcatgtgcaagaggagcagtgttgaaatactcaaaaatggaatcctgaaaatctggaagtttgagcccagtatctgctctgaatttttcttccatctttttcttcaaaatttccatttcttctaataattctctgtttttggcttcggaatcctttagtttgctttccaaggtgaggttggcgtccttgaccttcctgagctcctcctggacaagctgcttggcccggatctccgcctccagggccgactgcagctccagccgcgcggacatgtccagcttctggctgcggcgcaccttccatcccggg

SEQ ID NO: 435029 - DNA, 544 bp, Homo Sapiens
  misc_feature (440)..(440): n is a, c, g, or t
  misc_feature (447)..(447): n is a, c, g, or t
  misc_feature (462)..(462): n is a, c, g, or t
  misc_feature (489)..(489): n is a, c, g, or t
  misc_feature (512)..(512): n is a, c, g, or t
  misc_feature (519)..(519): n is a, c, g, or t
atgtctgatcagccaggactttgacaaagagcctgattcggactccaccaaacactcaactccatcgaatagctccaaccccagcggcccaccgagccccaactccccccacaggagccagctccccctcgaaggcctggagcagccggcctgtgacacctgaagccgccagctcgccacaggggccagggagctggagatggcctccagcgtcagtgccaagactgagcgggccctccagtgttgtccaaggaaatgtagaatcactttgtagatatggagatgaagaagacaaatctttattataatattgatcagttttatgccgcattgttcgtgggcagtagaccacatcttgtttcgtcttgcacagcttttgaggcgatggttgtttccatcttgcacatggagggacccccattacagcctgtttttccacngttgaanaacccgagaggcatnatgggggtcctggcaagaacattttcnttagcaggaaacccgttcatgangggggtngtttgggagcagactttttgggaca

SEQ ID NO: 435030 - DNA, 559 bp, Homo Sapiens
  misc_feature (507)..(516): n is a, c, g, or t
  misc_feature (522)..(522): n is a, c, g, or t
  misc_feature (532)..(532): n is a, c, g, or t
ttttttttaactttaaaactgccgtcttctgctttattgacaggtaaattgttcaaaaatgttctcacaattcaataattaattacaaagactgagacttacattaaaaaagtaaaaaccagaaccccccaggtgcccatccagcagaaggcccaggagggcagtggggtggcagggctaggcggtgctgggccactcagtgccgacttggggaagtgcacgtcctgaacagccttgccaagcagccgaccggtgggaggacaggggaagcctggcccaagctgtggacaagctgtgtctgccgccacagttaatcacaagcctctgacgacacagggccacagagctggtcactcaacatctggtacaaagggtgaggtgaaatccacgcgcaggggattgctgtgccgtgggccggggccagtgtgcaggagtgtgttgggtgggtctacgtgatcatacgggctactaatcacgggggctccatgcgggggcaggactggtggnnnnnnnnnnctggcnaggctggtcntgttttgggtatcccagttgctgcttc

SEQ ID NO: 435031 - DNA, 824 bp, Homo Sapiens
  misc_feature (535)..(626): n is a, c, g, or t
aatcctatctcaataaaagtaaatacataaggattacacataaaccaaatctgaagtaatatagattgggggaacctcaagagggtcaggagataatgaagattatacctcaatattgggattatgatgttagttctttatttcaataaaagtggatagagatctttcatatcagggacagggcttagctgtaaggacgaaagtaatcttccgggaattatgcatacaggcttgacatcatttttattggatggctgatgaactggaaaactccaggatagccaggctttaatttgtaatcttaattttcatataaatcggtacatttcagggggaggcagagggggatgtggggacattgatgcttgccggccttgtggtaataagacagctctgaagcacaggcagcagtactaactcatccagtatctgattctgtcttttcctctatccatctgtcttccatctttgcatccatcattcaacgaaatttacagcctatgcagatgttctgtggtcttaaacatgttgtatnnnnnnnnnnnnnnnnnnnnnnnnnnnnnnnnnnnnnnnnnnnnnnnnnnnnnnnnnnnnnnnnnnnnnnnnnnnnnnnnnnnnnnnnnnnnagcagttctaattgatgaattttggagaagtaattgagtacatctggctcagcatcttctaggtccatctctttaagggccagcttgactgtagtgtgcaagcttttgggcctcttctctcatgtgatagttcagcaggtctactcctattccttcaaggggaagccggcagctctgccagcactttaccacaggtct

SEQ ID NO: 435032 - DNA, 289 bp, Homo Sapiens
  misc_feature (87)..(87): n is a, c, g, or t
ggtgggagaccagagttttaatcattactcaaatcagtctctatgaacattcggggagcagagttttaaaggataacttggtgggtnacctgtaactacctttacctcctgtcgttctcaggagcggaggctggaggtgaaggtagttactggtgacgggcccagggcctgctggcaaatagcaagcctgaggctgaactgggtccctggatacaactcggcgtgggccacagttagcctcagtttccccttcaatctccagacctccttcaaccttccggcttcggct

SEQ ID NO: 435033 - DNA, 1173 bp, Homo Sapiens
ttttttttgccgctgattatttttaatgattttgtgctatggtttgaccacagcattaagaacaagcagaaaaatctgatttcataactaacaaacagcacttagagcaacatctttctttaaaagtattgcaattacagaccttaggtctaagaactacaccattgctcaggtaaaagaggcagatacgtgacaggtggaaatctttttctgtatataactgggaattatgttgaaaagtaagcacgaatgtttgttaaaaaagactttaatgacttttgattatcatagctcacaaacaactattgaaaagttcaaatacagttgtacttttttagtagattgctttataataaaaattaaacgaactaaatgctgtgaatagtattgtacatattttaaaatagccttaaactagacaagtatacaattagcatgatttttgaaagctatgaaatgaaaaataggcaacataccaacaagcacattaaaatgaaccagtatcattaacagtaaagtttaagcctcaattcgtcctgtaggaaaggaaggcaatgatgtgggtaacaaattttagtacctctggagtctaggaacattctcatggctcaacagttctcccacaaggttgaacctggggggtggggagctttgtttctgacaacagtgagcctcagttcttaatgatgaatcccaaggggtgcaccctacagtatacgatggaaacaacacgtgggtctagacacgcaggatccacaacaacaaaagtgtcaactttttacggccctttcaaacagatactaaaagggctgacttttttaatccattcagcattaagggttgcattgtagagtcaatttcagtttaaagataatctgtcatttgtttcctggatgttaggggtatgattatagaatctgacattttcaaagtcagaacatacaccatggagcaaataaaaactttggaatttattagactcctactctggtggcagaataagctgataatatgggtcagatgggcaaaattccacgaactgctcttatggacaacactcgaaaggatgcccacacccaagattcaaccgtggttttagtgaacatggtgttataaacttttcttgttcttttgttttaaaattagggtatttgaagataaatgcagaggtca

SEQ ID NO: 435034 - DNA, 1686 bp, Homo Sapiens
ttttttttcagggtgtcataactgtagctttattgtaatatctcccattatttccagaacatcactggcaactagaaacttgtatgcaagggtgatttttataaccgcagagtaaataaaatataatagagaatagacttgtaacaataaatacactttaaatataaatatacacattgatatcccacacatataaaagtcatgctctgcaaatactttgtatacacactgtccttgtggggtatgaattccaggatgtgtcttcaaggatttacatgtgtcctattagttgtagatatttccagagaacttatgtagaagcaacacattacaaattttggggaaaaaaattaagtatcacagagcaatttttaaaatatttaatacatttttgttctacaaagaatgagcatttcttaaatattacaaacagtgaaacaaatatactagcttacagatatgtacaatttatgactttatacttcaaaaatgcaggaagataaattatatattttatatacatgtaattttagatagaatgaacaattcaatattgctcttgtgttggtcttgctgcattgtatgcatgcccatggcttgtcgctggatggaggaggggctcatggggatagaagggaagtcatggagccccatgctcatgcccagagcgccatcttcaaagcaatatttaattaaatattaacttattctgcctgggtcaaaaactgctatgcccatatgcaatgtaggatgtgttttcaagaacccacagctaccatatttgggaatggaaccgtacaaatgctttaaaaaaatctaattctgtgatactaactcctcaaactctgagtcaattggggatctcctaaaagacgattttgagataaccattgatatcctcagttcagctcatagaaaacgatctcaaaatgaagacccataattgaggcttcaatagccttcctagcctataaattcacagaaaaaatatgaaggaaaaaaatgtgtcctgaatgaaatcagactttcagtaattacaaacttctcatgctgatgaagccctgaacacttaaacatgtagaaactgatttgaaagggataaaagaaattctgacttacaatcagtagaaatgggatggtttgcaggaatatctcacattaaaaccttattaatagtacagtcagtggcaaagatcgcattctactgttaacaaagaacccaatcaaaatctataggtctactttggccatgaagttctgtttcttcttccatttaacctatacccaaattaaaacttgatcatctctctctcagaatagaaacagaaaaaaaatgtcgggacaagttgaaaaacaaatgttccagaaaatccgccaactaaagatctcattgcgaatgctgtgcaacagctttttagaacagaacaatcctgcttgaggaatctgaagggggccacgggactggcccaaatgctcttcacccccagctggctcccacgccacttctctgctttctcagctcagcatgagtgttccccctgtaaagtcagggcggttttgttctaggagatcatggagtcaagcagttctcaaaggcacctcccacgctctaaacacatcccaagggtgagttattgggagaccagagaggatgagatcaggacaagggaactgaaccagaaaagg

SEQ ID NO: 435035 - DNA, 437 bp, Homo Sapiens
  misc_feature (17)..(17): n is a, c, g, or t
ggaaagaaaaaattaanataatttaataatacatgttaaattttaagaatagaaatgaaacaaattcaaatattgcctccttgtgttgggtccttgcctgccattgtaatgccatgccccatggcttgtcgcctggatggaggaggggcctcatggggatagaagggaagtcatggagccccatgctcatgcccagagcgccatcttcaaagcaatatttaattaaatattaacttattctgcctgggtcaaaaactgctatgcccatatgcaatgtaggatgtgttttcaagaaccacagctacatatttgggaatggaaacgtacaaatgctttaaaaaaatctaattctgtgatactaactcctcaaactctgagtcaattggggatctcctaaaagacgattttgagataaccattgatatcctcagttcagc

SEQ ID NO: 435036 - DNA, 909 bp, Homo Sapiens
  misc_feature (683)..(766): n is a, c, g, or t
cacacttttcagttactcatcacggaacactcccacatgtgcgaacattgtccgcataaataagctcttttctcttactaatgtctttttttcagtttaatttgcaggctcctattgaaataacaaaagttggtagaggaaaaagttttttctcccctacaaaggccaagaacattttggctttatatttatatttatattataatgtgaattgatttataattataatgtgaattgatagaaatatatatattttttttctgcccctgcttggcacatgacagaacatgggcatagacagactggctattggtaatccagtcctgggagatgatcaggaggcagtactcaatcctactttcttctctacagcttcccatgggctaaagaatttacatgtctgcccacagcaaatgtactcaggcttctacactaacataagcccacggaaatgaaacagaaagggacagttcatatgtttctgaatagatccagttgaatagtctcattcaatttgagactgttgaacaactgttgttgttctacatacatttaaagtcagggcacatgcgtcactgcttatttttcttacttgacatattccctgcatttccatgtctgcctgtcctttagataaacagtaaaagtttccccatgtggccagtatttctcaaatggtttannnnnnnnnnnnnnnnnnnnnnnnnnnnnnnnnnnnnnnnnnnnnnnnnnnnnnnnnnnnnnnnnnnnnnnnnnnnnnnnnnnnagatagtttacttttccaagtttactaacaagtttgccaagttcccccagtttattaccattagaccatacctttttgtccaatcatttaaaacaaatttttatataataagttttatttgtatgtaataaatttgattatat

SEQ ID NO: 435037 - DNA, 314 bp, Homo Sapiens
  misc_feature (215)..(215): n is a, c, g, or t
  misc_feature (286)..(286): n is a, c, g, or t
gttttctgtgagtgaatattacttgcatcgttaatgtaaatcaaaggcatcaaagtattttactctttttgaaaaaaatttagaggagaaatttattatattaatattctacccctatatgagtttaatttgtaaattgtagcaaagcatgatgtgctttactaaattcctttataattagaataagcttttataagggtgaaattatgtctttnctacagcactaaaccaaaatggcaaaattgttttagtcggtaagctttgcttttttaaaatatgaaataancaggttttttaaaatgttattttaatag

SEQ ID NO: 435038 - DNA, 874 bp, Homo Sapiens
ttttaaggaccagaagcataagccatgaatttactatctcaggtagactgagcatttggataattctcattctccagaaatcccacaggaaggaaaaactaaataaataaatatatattcatataaagacttttatctattgtgcaaagagagggtcatctggctccccagaaggttctcaaccccatcaagactgtccattttacatctctagctccagttcttctcagagagtaaaagtgctccaaaggcctgtgatcatgggtactgattaagggctgcagactcttcagatccagttaaatccctggtgtttgagctgtgtgggagctgtggttgcttgcttcctggctttgcctgaggtcctgccgcaaaccctgcagcagctggtttaggagtgtaaggtggctgtctctgcgaggcagaggcaggggtgggaggcaattccctttatactcgatcactgccatcttggcccgatccaaactccgatttgggatctgcagcattcttgtgtagcccccagtttgatctttgtaccgaggggccagtacttgaaacagctttgggatcaaatccttctctgtgagccagaagtcagccatgcgcatggctcgttcgttagtgtctcccagcttcccatagtcgatgagcttctccgcgtagcccctcatttcgtccacacgcgcccatggtgcctcgatgcgttcgtgccgcaccagccctgtgagcaagttccgcaacagatggatgcgggactcgggaccgaggcccatacggcgaaatacgcggccatgggagatcgctgcagcgaccgacagccgcatgtttccaacttctgcccgcccttgatcctacgattccggccgtacca

SEQ ID NO: 435039 - DNA, 623 bp, Homo Sapiens
  misc_feature (15)..(15): n is a, c, g, or t
  misc_feature (22)..(22): n is a, c, g, or t
  misc_feature (71)..(71): n is a, c, g, or t
  misc_feature (76)..(76): n is a, c, g, or t
  misc_feature (101)..(101): n is a, c, g, or t
  misc_feature (136)..(136): n is a, c, g, or t
  misc_feature (467)..(467): n is a, c, g, or t
  misc_feature (585)..(585): n is a, c, g, or t
ggttgccttccgganatacctnccccttcttccaaaaaaaccccaaaaatttttttcataagctatttctnaaagncgaaacaaaaacggaacacaaacgnggacgagaagaagaaaccaaaccaacaaacaaaanaaaaaccgaccaaagagtttgcatgaaaagcaagcactcaggaggaaaatattaagcagcaaagtagtttgaagtgtggcctgctcagtcacgctctgtcccctccgcacgcggctaccggctgttgaagatgacctctagccagcacgggcagctgctgatgaactggcgggtgtagcactggccccagcccttcacaaagctgatctgcacggtaaagcccgtccacggctgctgcataaactcgtggtcattgggccgctgcaggctgtacgccttctcgtagtcgaaagccttgatggagaaaccggggaacaccttgtgtaccaanagcgtcctggagtccgggttgtccagtgtggcggacttgatgaagatggggtaactgctgcggttgtacacccacacaccatccacctcccgcgtcagctggatgccgcagccgattnttctccgcaccttctgcaccagctgactcttgttgtcc

SEQ ID NO: 435040 - DNA, 1173 bp, Homo Sapiens
  misc_feature (101)..(359): n is a, c, g, or t
gggttctccattgttcctttgagacttagtggttgtagctctaataatgcaggattaaccaaacctacagatcaagagactttgtttttattttttgtgannnnnnnnnnnnnnnnnnnnnnnnnnnnnnnnnnnnnnnnnnnnnnnnnnnnnnnnnnnnnnnnnnnnnnnnnnnnnnnnnnnnnnnnnnnnnnnnnnnnnnnnnnnnnnnnnnnnnnnnnnnnnnnnnnnnnnnnnnnnnnnnnnnnnnnnnnnnnnnnnnnnnnnnnnnnnnnnnnnnnnnnnnnnnnnnnnnnnnnnnnnnnnnnnnnnnnnnnnnnnnnnnnnnnnnnnnnnnnnnnnnnnnnnnnnnnnnnnnntgagccaccaagcccggcccgattaagagactttagaattccaaggtgatagagtaaatcttgaggaataatgttagtaataatactgaaactatattgaagatttttgtgccaagtcctgtgctaagcacatcctatggattaattcctttagtctcacgtcagtctgatgagataggtgctgtattatcttaattttaaaggcaaggtatatggagacctggagaggtcaagtgacctgtccaaggccacagagctaagaatgaggaagactgtaatttgaattcagacctccaggccagatggagtccaccttttgtataacccatgctgaagttttcaggtaagtgattcagtgtcccttgtctaatcatccatgaaaaaaggccttctggaatttggtaccaggtgctagaaagaatcctacttcccctcttatctacagggaaatagaataaggggccctgtccccaacatcccccaaaccttgtggcagtttttgcatctgtagactggttgggtttgtaggtccgagcacagctggggcttggggtccaagctgggtgatgtagttattggaggggcattaatcgtggaactcagatcgccaactcagaaagttctttgcataggagacgaggttcggcacgctgaccaagcggctgggcacgtcctccaccttctttttctgtttgtattaatggacaggttagtgcaatgcaatgcaaaaaacaaagcattattgtaaaagcaaataatgctcacccaatcaaaattgtatcggagaagaagcaacaatttcatttatacactt

SEQ ID NO: 435041 - DNA, 546 bp, Homo Sapiens
  misc_feature (442)..(442): n is a, c, g, or t
  misc_feature (529)..(529): n is a, c, g, or t
ggttaagaggttgtgaacatacatatttatttataatacaaaatgaagattggagggaaaagtgctttaaaaaatagcatgtaagtgtataaatgaaattgttgcttcttctccgatacaattttgattgggtgagcattatttgcttttacaataatgctttgttttttgcattgcattgcactaacctgtccattaatacaaacagaaaaagaaggtggaggacgtgcccagccgcgtggtcagcgtgccgaacctcgcctcctatgcaaagaactttctgagtgggcgatctgagttccaggattaatgcccctccaataactacatcacccagcttgggaacccaagccccagcttgtgggccgggacctaacaaaacccaaccaagtctacagatggcaaaaactggccacaaggtttgggggggatgttggggganaggggccctaattccaatttccctgtagataagaggggaattaggattcttctagcaccggtaccaaatccagaaggcttttttcanggaggttggccagggac

SEQ ID NO: 435042 - DNA, 1806 bp, Homo Sapiens
aattcctctggtgttcagtaaggtagaaaccaaatctaaaggtcttccccacatcgtacacatttgtagggcttcacatcagtatgaattttcttatgtagactaatttgagaacgaactcgaaaggtcttcccacattccttacattcgtagggcttcacaccagtatgaagtctctgatgttcagtaaggactgaacgaagcataaaggctttcccgcattccttacattcatatggtttctctccagtatgaattctagaatgtactctgaggtcaccactataactaaaagccttctcacacaccttacatgcaaaaggttttataccagtatggattgttttatgccgattaagctgtccacgcacattaaatgatttcccacactccttacattcataaggtttcttacctgcatgagttcttctgtgttcagtaaggtaaaaactaagtctaaaggtctttccacattccttacattcgtagggttttacaccagtatgaattttctgatgacgggtaagttgtccgcatacactaaaagctttcccacactccttacattcatagggtttcttacctgtatgaattctctcatgttctttaaagtagaaaataagttgaaaaacttttccacattctttacattcataagatttcttaccagtatgaattcttttatgttgagtaagttctaatctactaaaaaaacccttatcacatttcttacacatatagggttttttaccagtgtgaattttctgatgtcgattaagttgtgggtaaagagtaaaggtcttcccacattcttgacattcatagggtttctcaccagtatgaaatctctgatgcagagtaagttgatagctatgactaaaaactttcccacatttctcacatttacaggatttttcaccagtatgaattttctgatggagagtaagctgatagacattattaaaagtactcccacattctttacaatcatgtttcacatcagaatctattttcccatgttgaaccaagtgtgagtcacagcttttctcactattgtgaattctctgattcagagtaaaagagggacgttttctatcagttgacatttttttagagacgattttcttttgactgatagatctttctttaagtgccctgttgaccctcaaactcacttttgttctgccactcatttctaaaaatggatcctttcagacgaagagttttacttttttctattatactctctttggataaactgatttcatgaatgtccttttctgaagataatttcttggtcttatgcctggataacaaaccggggcactgtcttcctgtcacatccctcgccaccacgcagggctctttcccttgctccagtaaggtaatcacatctggctttgagccagaatatcccagtgagaccaagttattataattctccaacatcacatctctgtacaatttcctctgggtagtgtccaggcactcccattccttctgagagaagtctatagccacatccctgaacgtcaccaatgcatgggccatggttttacactcacaagaactgctcagtcttccgcaggattattctgctggagaagcaaagttctgagaagcctgacagccttttgcagctcttctagcccgggatgacattcccctgaaggcaccacggcaagactcaacctctttgtgtgagattctctggaatttctggggcgttacttgagtataatgaaatagggtaggctcggaccatagtagggtaagtcccacagttcgagcaaggatcccgggaat

SEQ ID NO: 435043 - DNA, 1513 bp, Homo Sapiens
gcagcatcctccacatcgaccccaagacgggtgtggctgtggcccgggccgtgggatccgtgacggtttactatgaggtcgctgggcacctgaggacctacaaggaggtggtggtcagcgtccctcagaggatcatggcccgtcacctccaccccatccagaccagcttccaggaggctacagcctccaaagtgattgttgccgtgggagacagaagctctaacctgagaggcgagtgcacccccacccagagggaagtcatccaggccttgcacccagagaccctcatcagctgccagtcccagttcaagccggccgtctttgatttcccatctcaagatgtgttcaccgtggagccacagtttgacactgctctcggccagtacttctgctcaatcacaatgcacaggctgacggacaagcagcggaagcacctgagcatgaagaagacagctctggtggtcagtgcctccctctccagcagccacttctccacagagcaggtgggggccgaggtgcccttcagcccaggtctcttcgccgaccaggctgaaatccttttgagcaaccactacaccagttccgagatcagggtctttggtgccccggaggttctggagaacttggaggtgaaatccgggtccccggccgtgctggcattcgcaaaggagaagtcttttgggtggcccagcttcatcacatacacggtcggcgtctcggaccccgcggctggcagccaagggcctctgtccactaccctgaccttctccagcccccgtgaccaaccaagccattgccatcccagtgacagtggcttttgtgatggatcgccgtgggcccggtccttatggagccagcctcttccagcacttcctggattcctaccaggtcatgttcttcacgctcttcgccctgttggctgggacagcggtcatgatcatagcctaccacactgtctgcacgccccgggatcttgctgtgcctgcagccctcacgcctcgagccagccctggacacagcccccactatttcgctgcctcatcacccacatctcccaatgcattgcctcctgctcgcaaagccagccctccctcagggctgtggagcccagcctatgcctcccactaggccgcgtgaaggttcccggaggatgggtctcagccgagcctcgtgcacccccaagatggaacatcccttgctgcattcacactggaacaagcccctccagaatgagtggcccggccccaggccagcttcactgccgtctcttcacacggagctgtagtttcggctctgcccattagctcattttatgtaggagttttaaatgtgtgtttttttcctttcaagtcttacaaagctaagactttttggctcattcctttttgcatggttgtctagggtttctggacaatgtgctgttgcatttttattttcctagccttgctaaaatctttcccttctcaagactttgagcagttagaagtgctctttagaagttgtccggagttgt

SEQ ID NO: 435044 - DNA, 459 bp, Homo Sapiens
  misc_feature (21)..(21): n is a, c, g, or t
  misc_feature (31)..(31): n is a, c, g, or t
  misc_feature (55)..(55): n is a, c, g, or t
  misc_feature (401)..(401): n is a, c, g, or t
cccccctcttgtccatcctanttcctggggngttatgcctccattgagaatccanaagtgatgctggtgtaggtcttcttttccctgatctgctctgctgcttccaggtgcaatctgactctggaatacaggcacggcaaactgtatcttttttgggactgttgggctccatggtaatgatgataattagtcagagatgtgaagagctcagaaagactaaccctaagtggtgtccgggatgtgtttcctcagacacactccactaagccacacagagtgcttcgtaataaatagctgtaattccagatcgagcaagtgaagatgccgaggtttgagtaacccccttcttcaacatccacggtgatgcctggcttgcctgttcccccaccaatcccttggancctctcagcacaatacagaaaggaacaatacgctaattgtgtgcctcttcactaatac

SEQ ID NO: 435045 - DNA, 980 bp, Homo Sapiens
tgaccaatttttaaatattgctttatggagattttatttgaaaacatatggtttcatagagaaagcacatttaaaacatcaggttttggtgatcagggtaggtaaagtatttttattataaatttcaagatctaaaaaataatttattacatttactaagataaatctaagatgacctttttaaaccaagccacgtgtgccctgcatagtgacgtcgtggccctcgggcatggaaagacacgggtctgcccttcctttagggctggaaagacacgggtctacccttcctttagggctggaaagacacgggtctacccttcctttagggctgggatcagccagaggaaagaaaattatgccgatgctcaactagcatatactgattaggactattttggtttattaccctggcattgaagaattcaggtgaagatgccaccactcttgaactctgaaagccaaactagaatctgcagagcagcctcagtcttaaaattcaagcttctttttcctactttttatttcagtgatatttaggacactctctatttcataagaattatgatctaactggctctataagcccaagaataaaaatccttaccccctagcaagagacccatagaactcatcagtagtaagactaaggtcccatattggaaaaaatatactagcccaaggttatagacagggaccatccagcaatagagatgttgctggcaagtaaccatggtggtgggtgaccactagcgaaaagggctgaagagacctcagaaggtcatccgggttatcctcctgccttgacacaagacacatgtgtctctctagccagagttacttgcagttgcactcacaagtggggaccccaggtctccttcatgtgattttctctgtgtacatatttcgaagattcccaaaggcagcatttttacaaggtggagcagcaggaagcttcggggacatgagccgacgtatccagg

SEQ ID NO: 435046 - DNA, 497 bp, Homo Sapiens
attcagcatggttttagcttcttggagatgattccaacttaactattttggctttttaaacataattttctctgaaaattaattgtggctcttatttgcatttacgaatgatcttcccatccctttttcccattcagcaaatattagtttgtcctcctttaattgtttgcccaaatcttccacccatcttttttcttccctcattttctggggattctcaaggaaagaaaaagtaacccattatcactctgagtttcgtcgtgccctgaggacatgatggggaatctcattcccacctctcataggcagagccaaacctttagtgttggtggtaggaggatggggagaggaaaaaagagctggcaaagaaatggatagggaatattttagttctttaaatatattaggcagatgcttctcttggaatccagatccatctggcttgaagctttttgcaagtaggctttgaaggggtgaaggagattggttggaggagg

SEQ ID NO: 435047 - DNA, 625 bp, Homo Sapiens
tttttttaaaaggtcccacaggctttttaatggtgtgatggctacttcccttccgagacccgatctaatcattgacagtggcttccagggtgttggggtggggtggacaggtgcaggatgggcagaggccatgcagtgactgggaagggcttggggaggggtgttacattctgtttggcatgtaaacattcttaggtggcttcccgagggaggggaagggcaactccctgctccccaccccatgcccaccagggctggtccctggagttcagaagactgagcaaaccaggcctctgtgaggagctgggaaatggggagcctggggcacagcccctctcctctcctgtgcccccttcgtgcacggtgtggctggggagggaaggcatgtgttggggtgagcagaccctgcatctgagtcagtgacataggttgttgtgatggggaagtgctgagggaggtggtttgacacttttacagaggaagggctcaggacctggaggcctggtggagagaatgaatgctcagggggaggaggctgcagctggggttgggggcaccgggagatgtggcttcctctgccctggatgcttcctggggagaggcacagaggcagtcccctaggtga

SEQ ID NO: 435048 - DNA, 478 bp, Homo Sapiens
  misc_feature (304)..(304): n is a, c, g, or t
  misc_feature (446)..(446): n is a, c, g, or t
  misc_feature (452)..(452): n is a, c, g, or t
  misc_feature (460)..(460): n is a, c, g, or t
ggttgaaaagataaatattatttataccagccacccgcctcacagccgacaccctcatcttctagtgccccccaaagccctgccctggctgtccagtccctctggacatgggcaggtcagtgggggctgcggccggttccacacctggagtgtaagcagcacgttgtcccaagagccacttgggcaggggtcttctcctggcttgcttagctagtggtcctgccccagaggccatccagggctacaagctctgccccagaggctgggactgggacacccctgggctcttgctcacaggccactntgccccctccagcccccatcttttcacaaaagaggaaaaggagcaggaggtgactggtatggggtggttaagtgaggggaagttggcctgggcttgcagggtattaaatttttcagggtgaaggcagcaaggcagggctttnttggtngcagtgcnaagttgccagtaaggttt

SEQ ID NO: 435049 - DNA, 413 bp, Homo Sapiens
  misc_feature (161)..(161): n is a, c, g, or t
  misc_feature (393)..(393): n is a, c, g, or t
ttttttttggttgaaaagataaatattatttataccagccacccgcctcacagccgacaccctcatcttctagtgccccccaaagccctgccctggctgtccagtccctctggacatgggcaggtcagtgggggctgcggccggttccacacctgggagtntaagcagcacgttgtcccaagagccacttgggcaggggtcttctcctgggcttgcttagctagtggtcctgccccagaggccatccagggctacaagctctgccccagaggctgggactggggacacccctgggctctttgcttcacagggccacttttgcccccttccagcccccatttttttcacaaaagagggaaaagggagcagggagggtgactgggtgtgggggtnggttaaagttagggggaagt

SEQ ID NO: 435050 - DNA, 1653 bp, Homo Sapiens
  misc_feature (41)..(43): n is a, c, g, or t
  misc_feature (49)..(52): n is a, c, g, or t
  misc_feature (54)..(54): n is a, c, g, or t
  misc_feature (65)..(65): n is a, c, g, or t
  misc_feature (67)..(69): n is a, c, g, or t
  misc_feature (71)..(71): n is a, c, g, or t
  misc_feature (76)..(76): n is a, c, g, or t
  misc_feature (81)..(81): n is a, c, g, or t
  misc_feature (90)..(91): n is a, c, g, or t
  misc_feature (93)..(93): n is a, c, g, or t
  misc_feature (98)..(98): n is a, c, g, or t
  misc_feature (100)..(101): n is a, c, g, or t
  misc_feature (110)..(110): n is a, c, g, or t
  misc_feature (115)..(115): n is a, c, g, or t
  misc_feature (117)..(117): n is a, c, g, or t
  misc_feature (121)..(121): n is a, c, g, or t
  misc_feature (123)..(123): n is a, c, g, or t
  misc_feature (155)..(155): n is a, c, g, or t
  misc_feature (183)..(183): n is a, c, g, or t
  misc_feature (209)..(210): n is a, c, g, or t
  misc_feature (230)..(230): n is a, c, g, or t
  misc_feature (234)..(234): n is a, c, g, or t
  misc_feature (254)..(254): n is a, c, g, or t
  misc_feature (258)..(260): n is a, c, g, or t
  misc_feature (265)..(265): n is a, c, g, or t
  misc_feature (268)..(268): n is a, c, g, or t
  misc_feature (277)..(277): n is a, c, g, or t
  misc_feature (293)..(293): n is a, c, g, or t
  misc_feature (303)..(304): n is a, c, g, or t
  misc_feature (313)..(313): n is a, c, g, or t
  misc_feature (320)..(320): n is a, c, g, or t
  misc_feature (323)..(323): n is a, c, g, or t
  misc_feature (343)..(344): n is a, c, g, or t
  misc_feature (364)..(364): n is a, c, g, or t
  misc_feature (368)..(368): n is a, c, g, or t
  misc_feature (372)..(372): n is a, c, g, or t
  misc_feature (377)..(378): n is a, c, g, or t
  misc_feature (389)..(390): n is a, c, g, or t
  misc_feature (398)..(399): n is a, c, g, or t
  misc_feature (410)..(411): n is a, c, g, or t
  misc_feature (463)..(463): n is a, c, g, or t
  misc_feature (467)..(467): n is a, c, g, or t
  misc_feature (472)..(472): n is a, c, g, or t
  misc_feature (474)..(474): n is a, c, g, or t
  misc_feature (483)..(485): n is a, c, g, or t
  misc_feature (490)..(490): n is a, c, g, or t
  misc_feature (496)..(496): n is a, c, g, or t
  misc_feature (514)..(554): n is a, c, g, or t
  misc_feature (558)..(558): n is a, c, g, or t
  misc_feature (561)..(561): n is a, c, g, or t
  misc_feature (567)..(567): n is a, c, g, or t
  misc_feature (577)..(577): n is a, c, g, or t
agatcacttatatatatatacattgaaaaaaactattattnnntctttnnnngngaaagggggtntnnncnacagngcttngtgatattnngngacantnncccatattnctgtngnattntnactttttagtagaacctttaaaaactcaagtnagctgtacaacgccccgattgcattaantccagtgaaccacggaggtataaagnngctagaattctttgtaattnttcngtgccaaaaataataaggtngggnnnttggnttnctgtttgantctactgtattaagtnatcagaatannattcctgtntggcttntcntcccccgcttcttggttttnnttcttgctttctttggtgtncttntgtngtttnntcttgctctgnncccctttnnttttgggtttnngcccacttttcatccatgtgattctgacaggggttagcgatggcagtgcggntggntgggncnggggtgggnnnggtcncggggncccgtcccctcttccacnnnnnnnnnnnnnnnnnnnnnnnnnnnnnnnnnnnnnnnnncggngtncttttntgggtttggnttgtgggcgctgaaaaaggaagttctctctctcccttttgaatcatggatagtaaggatgtggacttggagctgacactggcccattatgtagagcgggccagactgaaaatgaaaccaggaaacaaaaacagtccgaagatgatggtaaagagcctgggcaacacaatctggggcctagcatcagctatgcctgtggacgctattaaagtgctgaggttattacttcagtgaatcagagcacaaatgaagtatttcttctctaaggaatcaaacacaattcattttagaactagacaggaaaagactgaactaaagaaaaagttttatcctaaactttcccaacagacaccttctggataggctgcatgttatcgactgtgtcagtcaaatcagtggcctgtactaattgggtaattcaattgaagagtcaagtttgcaaataacagtctttccattttctgtgctttagaacaattctcaaaacacatttattatgctcccaacccatacctgttcaattaggtttttcttctaaaaataacttggatcaagagaatcatttactttatacatattcgaaaacaactcatccactttcttcagtgttccacggaggggaaatctggtccaaccaaacagatgtagtaaaaagtatgtttcctgttttggcttctttgtgttaatgaccagggaaaatatttgttgttttccatgttggcttcaacataatgcatcaatatccttttcttcctctgaatcttgccctgttatccaacactgatcttttacactcaaaaaatgcgtacttcaaagagttgcagtatccttccttcaaacactgccgaggtgattttccttcctggaccacacagtccgactgcagcagacacgcgcccaggtcctccttcaggcccgcgcacgcgccgccctgcggcttgtcctcataatacttaggcatgacggcgcttcccctccgatgcggacgcgactttctcccaccgcaacacttgcaaccgggtcgggagcgagcgaggccccagtctcaggggaccggaagccagcggaaaccccgct

SEQ ID NO: 435051 - DNA, 515 bp, Homo Sapiens
acattttagatttgtttacttttattaataaaaagttagatcacttatatatatatacattgaaaaaaactattattgtccctttcctggtgaaaaggagtatacacaacagacctttgtgatattctgcaacaatgacccatattgctgtggaattctcactttttagtagaacctttaaaaactcaagtgagctgtacaacgccccgattgctttaactccagtgaaccacggaggtataaagacgctagagttctttgtaattcttcagtgccaaaaataataaagttggaaacttggattcctgtttgactctactgtattaagtgatcagaataaaattactgtaaggctaatcttcaaccacttcatggttttcattcttgctttctatagtgaacatctgttgtttccacttgctctaaacccctttccttttgggattcagcccactactcatccatgtgattctgacaggagttagcaatgacagtgcagatagatagcccaggcc

SEQ ID NO: 435052 - DNA, 451 bp, Homo Sapiens
  misc_feature (91)..(91): n is a, c, g, or t
  misc_feature (173)..(173): n is a, c, g, or t
  misc_feature (365)..(365): n is a, c, g, or t
  misc_feature (372)..(372): n is a, c, g, or t
  misc_feature (406)..(406): n is a, c, g, or t
  misc_feature (420)..(420): n is a, c, g, or t
  misc_feature (438)..(438): n is a, c, g, or t
acattttagagttgtttacttttattaataaaaagttagatcacttatatatatatacattgaaaaaaactattattgtccctttcctggngaaaaggagtatacacaacagacctttgtgatattctgcaacaatgacccatattgctgtggaattctcactttttagtagnaacctttaaaaactcaagtgagactgtacaacgccccgattgctttaactccagtgaaccacggaggtataaagacgctaggagttctttgtaattcttcagtgccaaaaataataaagttgggaaacttgggattcctgtttgactctactgtattaagtgatccagaattaaaatttactgtaggggctnaatcttncaaccactttcatggggttttcattcttgctttnccttagtggaacancgttgttttccacttggntctaaaccccttt

SEQ ID NO: 435053 - DNA, 556 bp, Homo Sapiens
  misc_feature (16)..(16): n is a, c, g, or t
  misc_feature (28)..(28): n is a, c, g, or t
  misc_feature (46)..(46): n is a, c, g, or t
  misc_feature (55)..(55): n is a, c, g, or t
  misc_feature (61)..(61): n is a, c, g, or t
  misc_feature (67)..(67): n is a, c, g, or t
  misc_feature (92)..(92): n is a, c, g, or t
  misc_feature (98)..(98): n is a, c, g, or t
caataacggaatgtgnccagtccaaaancagggccctgtaccaaangggggtaantccaantggaangagtccaagtttgccaaaataaacngtcttncccaatttcctgtgcctttaagaaacaaatcctcaaaaaacaacatttaataaggctcccccaaccccataccctgttccaattaggtttttccttcctaaaaaataacttgggatcaagagaatcatttactttaatacatattccgaaaacaactcatcccactttccttcagtgttcccacggaggggaaatctggtccaaccaaacagatgtagtaaaaagtatgtttcctgttttggcttctttgtgttaatgaccagggaaaatatttgttgttttccatgttggcttcaacataatgcatcaatatccttttcttcctctgaatcttgccctgttatccaacactgatcttttacactcaaaaaatgcgtacttcaaagagttgcagtatccttccttcaaacactgccgaggtgattttccttcctggaccacacagtccgactgcagca

SEQ ID NO: 435054 - DNA, 1474 bp, Homo Sapiens
aaatctttatttatccttttattcctttatcccaccaatgcaaattgcggagaacagctggaagccacgtcagagcggcacaggccagctggctgagtgatgctgaccgctggctccgagcatcgagcatcgcagagatcacaacgggcatcagctctggagctcctagcggccaggcacagggctgctggaggcccgcagggagggccgcctcccagcttccacagtagtttggccttaaaaacactaagaacagttgcattcattgtctttttgttttcttctgtgttggtcctttaataataaaaaagaaaaccaaaacctcctataatttataagctatgtttgactatctacattatatagaaaatatagactctgtttactttataacacacatctttttcccttgataaataactctttaaaatatctagtatacatgccttgacttcttatatatataagtttggttttatacatatacatacatatatactcatgtttgtaaaacacaataaatatatactcgacaatgacagccaaacaaatgccattttggttaaaacacacaacaacaacaataaaaagcagatgaagtactataaaagcaccaggcagcagacagaaagccacatttgctagaaacttctccctcccctgggcaaggcacatggcagaatactaaatacgtccaggtgcctgaaagagaaggaaggcagcaaaggaatgggtcagatcacaagcttttgttttgtttcttagcctgggattagaccaagaatcacaagtaagtcattgcgtttataaggaaaaaccaaggggctcattcaacagcttagcccttgtggtggctgcaggggacagtagagatctggaaggggaaggagagagacagtgacctggtgacaactccatgactattgtctagcccctgcctacatctgcccaggcaagcttttgattgccacactaagcatcaagccattgcatataatatgttcttttcatgactctattcactgctggtgtaaacagaaaggagtattcagtagtgcaacactttgggaggctgaatgagagccacagtttcggtggccccctcaagggctccagcaaatggggactgtgacgtgggggagaaaaaggccagtgggccattgccttccactcctgagacagtaccggcttcacctccagatgccactgggaacactgagcccatcaccttttaaagaagcgcaggaggtcttgactcttcctatgagaagtcccagaagccccagtcagtctgggtggggggtcccctgaaactcagagcacgctccagctgctggctcctgtgcctggcggggagaaggtggagaggcggcatgcctgccgctgagaaagacataataacgctctagctgcacaccccttttcttccacggccctcctctttctccccaaaaggaaactaaaatgtggggtt

SEQ ID NO: 435055 - DNA, 420 bp, Homo Sapiens
  misc_feature (219)..(219): n is a, c, g, or t
cggtgggctgccaagtagtggggaatggaaggcgggacaggggctctgaaagtcaatgtctccagcaagacgctaaagaaaccgtggcgtcaactgcgcggttatttttggctccagccgtgggctgcagccgtgtgagccggcaggggcaggggcacagatttatccagttatttctgtcaaccctctggctggctttgcccgtggaacctcacaacncgctgccgccgaaagccgaaagccgaaagccgggagactcaccattgactttacgagcggcccagcgcttcccaagacctccgctccagcctaggccggcctctaagccgccacatatatgagggttttcaggttttgtaattcagtgcttcccaaagctgcggattgcagaaacaaaatttcgaaactatggggttgtca

SEQ ID NO: 435056 - DNA, 847 bp, Homo Sapiens
cttttacaggaatgttcataaacagcaggttctcctaggctttgaacaaaatttagcttctgccaaggccaaaagcctcattgtgaagagaaagaaaggtatagcagtcttggcagttgctgaactgaattcctggctgaaacggcttacaaaatatacagatcttggtagacaacgtggctgcaggctgttgaattggaattccctgtggctgtccgaaggcagggtgtccggagagcggtgggctgacctgttcctacaccttgcatcatgccagctttgtcaacgggatctgggagtgacactggtctgtatgagctgttggctgctctgccagcccagctgcagccacatgtggatagccaggaagacctgaccttcctctgggatatgtttggtgaaaaaagcctgcattcattggtaaagattcatgaaaaactacactactatgagaagcagagtccggtgcccattctccatggtgcggcggccttggccgatgatctggccgaagagcttcagaacaagccattaaacagtgagatcagagagctgttgaaactactgtcaaaacccaatgtgaaggctttgctctctgtacatgatactgtggctcagaagaattacgacccagtgttgcctcctatgcctgaagatattgacgatgaggaagactcagtaaaaataatccgtcttggtcaaaaatagagaaccactgggagctaccattaagaaggatgaacagaccggggcgatcattgtggccagaatcatgacaagaggagctgcagatagaaagtggtccttatcatgttggtgatgaacttaagggaagtcacgggataca

SEQ ID NO: 435057 - DNA, 978 bp, Homo Sapiens
  misc_feature (835)..(835): n is a, c, g, or t
  misc_feature (871)..(871): n is a, c, g, or t
  misc_feature (917)..(917): n is a, c, g, or t
  misc_feature (926)..(926): n is a, c, g, or t
  misc_feature (962)..(962): n is a, c, g, or t
ggctgtacggtccggagttccgggatatcgtcgaccacgcgtcggagcccctccactcacctttggattcatctcggagcactcggcaccatgggctggtggaacgggtgcagcgagatcctcgaagaatggtgtccccacttcgccgatacacccgccacattgacagctctccctatagtcctgcctacttatctcctcccccagagtctagctggcgaaggacggtggcctggggcaatttccctgcagagaaggggcagttgtttcgactaccatctgcacttaacaggacaagctctgactctgcccttcatacaagtgtgatgaaccccagtccccaggatacctacccaggccccacacctcccagcatcctgcccagccgacgtgggggtattctggatggtgaaatggaccccaaagtctttctctttcaagtacctgctattgaggagaacttgctagatgacaagcatttgctgaagccatgggatgctaagaagctatcctcatcctcttcccgacctcggtcctgtgaagtccctggaattaacatctttccatctcctgaccagcctgccaatgtgcctgtcctcccacctgccatgaacacggggggctccctacctgacctcaccaacctgcactttcccccaccactgcccacccccctggaccctgaagagacagcctaccctagcctgagtgggggcaacagtacctccaatttgacccacaccatgactcacctggggcatcagcaggggcatgggcctggggcagggcttatggatggcaccaggggcgttccccctgggattaccagttaaantgttccacttgaccagcggtttacccccattacccntaacaggttccccaagttttggttcttgccttacccagccccacancccaaagtnttttacaggcaggccaggggtttccctttttcagtntttgtttcagttgcag

SEQ ID NO: 435058 - DNA, 908 bp, Homo Sapiens
  misc_feature (782)..(782): n is a, c, g, or t
  misc_feature (809)..(809): n is a, c, g, or t
agcgggcccggcggcccccgcgcgcaacaggtcagggctaggctggggccgggttcgcggcgctagctgaggcggcggtggctacggctggaggagccgggccgaggccgcggcggaggccgcggctggtactgggagggtggcagggagggacggggaaggaagatggcgacgtcgggggcgaacgggcctggttcggccacggcctcggcttccaatccgcgcaaatttagtgagaagattgcgctgcagaagcagcgtcaggccgaggagacggcggccttcgaggaggtgatgatggacatcggctccacccggttacaggcccaaaaactgcgactggcatacacaaggagctctcattatggtgggtctctgcccaatgttaaccagattggctctggcctggccgagttccagagccccctccactcacctttggattcatctcggagcactcggcaccatgggctggtggaacgggtgcagcgagatcctcgaagaatggtgtccccacttcgccgatacacccgccacattgacagctctccctatagtcctgcctacttatctcctcccccagagtctagctggcgaaggacgatggcctggggcaatttccctgcagagaaggggcagttgtttcgactaccatctgcacttaacaggacaagctctgactctgcccttcatacaagtgtgatgaaccccagtccccaggatacctacccagggccccacacctcccaggcatccctgcccagcccgacgtggggggtatntctgggatgggtgaaatgggaccccanaagtcttttctcttttcaaagtaccctggctatttgaggaaggaactttggctagaatggaccaagcattttgcctggaagccaatggggggatgcctt

SEQ ID NO: 435059 - DNA, 1250 bp, Homo Sapiens
  misc_feature (548)..(559): n is a, c, g, or t
  misc_feature (601)..(601): n is a, c, g, or t
  misc_feature (605)..(605): n is a, c, g, or t
  misc_feature (611)..(611): n is a, c, g, or t
  misc_feature (861)..(861): n is a, c, g, or t
  misc_feature (1193)..(1193): n is a, c, g, or t
acgaaccaccgcacctgggccaatcagcaataaatttcttttctatttaccccatttcttattaattcacacttcaaaaaagcatttcctggaagtatttctaagtgtgatggtttgtaatatataacaaatgaaaagatgtaattagattataagggaaaagcatctgcctgtaaaatatgaaggaagaaaggaagtaatggactcctcatggggcccacagggaaccaggaaggacccagaaagggtgccgggcccttcccctgtgctgcagctacagggccccatttcttcagaaggagcgttctgggtattccatcgtcccctggaagtctggcaggtacaaccccctcaacactccagggagggagggaatccacaggaagccatgaactgctggtttcagcggggagaggtagtgctgacagctctgataatctacctgaagccctttgtgaggaatactgtaaaactgcagtaagctgtcaatattcgacattaagtcatcatttcagaagagaagcctgtttgaagtaggaaaggtttgnnnnnnnnnnnngatgccgtggttcttgcaagtctgccttgtttggtaccagcncagngcatcnctgtcactaagtgtgccgggggagaatgctgagctgcttggcggtgtgtgtgcgcctgtgcgaggccaggtctcacagtcccagagacttctggacgatctgcttggcaatcttatagaactgctccccggtcatcgcgccacattttggacgcatccacgttagctccactttcgtcattgggctctgccagcatgctcaccaccgacagcaggatcttctccacactctgcacaggactcccaccctncgcgctgctctcgtagcccatggggtcatcgcctggcgcgtggaggatggaaatgcagactctcccatcagggtagatgttgggatgaaacatctcacaggtaaatctcatctttgggggacttaacgggtaatcaagtgggaaactcaggatggcaggaaaaacaccaaactcaaagcaggtgtcttctgggcccatgatcaatgcctcccattcaaaaaagttctcttcattcatggggcctgctacaattccttccggaggattcagtgttaattgtttgtactcggccatcagcctcttgagcgcggtccccgccatggccccgcaancagtgcgccgagcgacctcgcctcagccgcgcgcgtgcctcctgccccgatcccggg

SEQ ID NO: 435060 - DNA, 899 bp, Homo Sapiens
  misc_feature (37)..(37): n is a, c, g, or t
  misc_feature (49)..(85): n is a, c, g, or t
ggatgtatacgactcactatagggcgactggattaancgcggtggcggnnnnnnnnnnnnnnnnnnnnnnnnnnnnnnnnnnnnnatcaggccaaatcggccgagctcgaattcgtcgagagcggagcggtccccggtgtcggggcaggaggcacgcgcgcggctgaggcgaggtcgctcggcgcagctgttgcggggccatggcggggaccgcgctcaagaggctgatggccgagtacaaacaattaacactgaatcctccggaaggaattgtagcaggccccatgaatgaagagaacttttttgaatgggaggcattgatcatgggcccagaagacacctgctttgagtttggtgtttttcctgccatcctgagtttcccacttgattacccgttaagtcccccaaagatgagatttacctgtgagatgtttcatcccaacatctaccctgatgggagagtctgcatttccatcctccacgcgccaggcgatgaccccatgggctacgagagcagcgcggagcggtggagtcctgtgcagagtgtggagaagatcctgctgtcggtggtgagcatgctggcagagcccaatgacgaaagtggagctaacgtggatgcgtccaaaatgtggcgcgatgaccgggagcagttctataagattgccaagcagatcgtccagaagtctctgggactgtgagacctggcctcgcacaggcgcacacacaccgccaagcagctcagcattctcccccggcacacttagtgacagtgatgctctgtgctggtaccaaacaaggcagacttgcaagaaccacggcatcttttttatttttcaaacctttcctatttccaacagggttctcttctggaagtggtgcttgtgtcaatttggagtttg

SEQ ID NO: 435061 - DNA, 386 bp, Homo Sapiens
tgttccctaggttctcatttctcccttcgctctcctcagacattagaaatatctaatttaccgggtaggaaagcactcaaagaggtttcctcaacactacctaggaggagtgacaggtggcactgttcaaaaacccttttccttcattagagggaaagccaaaatctgacctttcaaagctccaccaacgagcctttccccttttaacgcatacacttttccctcctaattccgcagcagcaagtcaggccttcttcctcaagctctcactgcacgttctcaagggtttgtacttggccatcagcctcttgagccggtccccgccatggccccgcaaacactggccgagcgacctcgcctcagccgcgcgcgtgcctcctgccccg

SEQ ID NO: 435062 - DNA, 574 bp, Homo Sapiens
  misc_feature (557)..(557): n is a, c, g, or t
cctcgtgcctggggtttgagcctcagattcgtagaatagtcgaacaagatactatgcctccaaagggtgtccgccacactatgatgtttagtgctacttttcctaaggaaatacagatgctggctcgtgatttcttagatgaatatatcttcttggctgtaggaagagttggctctacctctgaaaacatcacacagaaagtagtttgggtggaagaatcagacaaacggtcatttctgcttgacctcctaaatgcaacaggcaaggattcactgaccttagtgtttgtggagaccaaaaagggtgcagattctctggaggatttcttataccatgaaggatacgcatgtaccagcatccatggagaccgttctcagagggatagagaagaggcccttcaccagttccgctcaggaaaaagcccaatttttagtggctacagcagttagcagccaagagggattggacattttcaaatgttgaacctgttattcatttttgacttgcccagtgattatttgaaggattttgttacatcgtatttggtcgttacgggncttttagggaaccttgg

SEQ ID NO: 435063 - DNA, 591 bp, Homo Sapiens
cttggcaagcattcatttattcacataacataagccagacactatgccaggggctggcgatacagaaatgagtaagacatgatccctggcccctcccatccctggaatgtctactaggaagaagctgctagaaaaagacaacatgctactttaaagccaagaggggccagtctcccattccagcttggtacacactgaacacatttgaggcttatgactggttcttttacttacaaatattgtttagacacattttcaaatgtcacaccaatcaataataataaggaatggattttatctatattgacagttctttcaaccttaagagtgaactgctacaggtaagattcaatcacatttttcaggagaaagctattgagaccaatatgctttggttatctaataagggtggaatgacttataatgctatttactccaggcaaagagaaaatacaacagacataggatcttgatttcaacgtagttctcctccatgtgcatttctctgtccgtttaggtcaatgccaactggtccaccagtgaacatgtccaccggccctgagctaactcattggtttattattcctgacc

SEQ ID NO: 435064 - DNA, 544 bp, Homo Sapiens
actatttaaataattttatttgtttcatcctttggtagatgagaaaaatacattacaaaatacattatacagaagacagctcacagtacacattactaaaaacacaatctacattccagccagggctggtggtaagttcagaagaaagccacagaggccttgaaaaccagatttcagctctatggaatgaattttccccttatgtcccgtctttatctcaacctcagcatgttttattagcacccctaattaggtgggtgtgggtagagttagagcagcattgagtgggactggtggactctccatccacctaaagcagcaaacattaaaagtccctcaaaagaaaaggggtaggggaggggaaagaatggccaatgtgaaaattgctgtgtctcaaagcattacagaactgctctagcatcctagttcccaggcagttgtcccaagtctgggttttctgagacttgggtcttcacttggccatctttggcctctgtcatttcactgttaatgggagctgctggcatcgtaggtcctaagaggc

SEQ ID NO: 435065 - DNA, 566 bp, Homo Sapiens
  misc_feature (43)..(43): n is a, c, g, or t
caagttgtccggaatggaagtggttaaaaaaccccccggcccnttgttccatgcctgttaattaatttttggcctcccctggtgaaaagcatttattataaggaatcctagcatctccctatcttttattcttttaggaatcccagtgtcactgaggacaacgaagtgatctttgttcatccccaagcttttgagatagaaataagagggagggcagtgatggagccagaggtcaggatgggagaggcactgactggtggagacccaagccccaggattgaggggtggaaggctggctcaggagaggccaggctgggagtcttgtgttcttagagggaatcagagaaagggggaagcaatatggataagcaactgccatgtgttagacgccgtgctcagtgtttgggattcataatctcaggaaccgtgtgcgggagctcatgaaccagtgtttgtaccatcctagaaatcatgccccctctttgttacaacacctgagccaatcaccatgactctccttcccttactaggtatcggtgtgggaatagccatgtgacccagttttg

SEQ ID NO: 435066 - DNA, 787 bp, Homo Sapiens
  misc_feature (28)..(28): n is a, c, g, or t
  misc_feature (41)..(41): n is a, c, g, or t
  misc_feature (69)..(78): n is a, c, g, or t
atacttacattattcacacatatatagncggaatcatccangaacataatcaactgccaaccccccttnnnnnnnnnntcaacaaatcagtttttatttgcatggccaattatcatttgtactctttgcaactttatttaaaaatccctttaacatgttctaatcttttgttgccagagggaataaaagctgcaagactgcaaacttccttcaacagccacacccacaacacctagacatgaaacagatgtaacaaataacaacaccacaaacagaaatactgatttccaccattcaacacagttcatgacagtgtctttagggttcagttgaagagggggtaaacttttaaaaagagggtcagtctgctttccccctgttttataatgttggtggttttaatccgtatttctttgcaacttctgtctgggcatgggcggcatcgcaaagtgaatacagatgggccatctccatttccgatttggccaggttaatagctttgttgaacatgtcaatggctttctccatgtttcctctttgtacttcaatagttcccatggtttcataggcaaaatcacatttattgtcaatttcaatagccttgctgataagttccaaacctctatccagatcttgcttccactgaagttgaagtaaacctttatgaacatatgttgtagcattatctggttccaaatcaatacatttatcatacatttcatcagctttaccaaactgttgttgatctgttaatgcctgggcgtatagtgcatagccttcggcaccc

SEQ ID NO: 435067 - DNA, 1431 bp, Homo Sapiens
  misc_feature (91)..(91): n is a, c, g, or t
acagcggggggtttttcacagccatgcaggggggccctaaaggccttagttatacggagccaaagggccaaaaaaggggttaaaggggttntgttttcccctccctcccctttttcccaacatgccccggccttccttgggcactagaaagttttgcgatgaatagcacgggagccatcctcttcatactcctttttggacacccacatcttcttaaaagtgtccagcgaggccaggatggagccgccaatccatgtggagtacagccgttcctgcggggctgagatcttgattttgatatcctttggggcaagcttcttcacttcactgagtaatcggtctccgaagcctttgaaaagcgttgagccacctgagagcacgatgttggcgaacagcgtccggcgcaggtccatgtcggacttgtgtatggcgaaggccaccacctcatggagcccctcactctcatcccccacaaggtccggctggaacagcagctcgggggcccggaatcgtgcaggccccacatcaagcgtgctgccgtctggcaacgtgtactgcaccttctccgtctccagagcctcatccttctgtgggttgatggacaggtagcacgctcgctctttgattgtccggacaacctcaaactcagccgaggtatggaagtcaaccccttccttgcgcagcaggagtcggaggtagcgggagacgtcgcggccggcaatgtccacccgcatgatggagtgaggcatggcaaagccctcatagatgggcacagcatgagtgaccccgtcccctgagtctagaaccactcctgtcgtgcgtcctgttgcgtacagactgagcacagcctgcatggagatgaacagggccggcacgttgaaggtctcaaagaacacctctgccgccttctcccggttcttactcgggttgagcggggcctccgtgaggagcacaggatgctcctccgagaaggtctgcagctgatccttggagtagacgtactgccagatgcgttccatgtcgttccagtctcgcaccacgccgtgctccatggggtagcggatggtcagcagcccccggtgctcctctgcttttggtccgatgaagaggtccccctccagggctccagccatcacccgcatgtgcttcggccgcccgacatagtttgggaaacagtatttgggaatctggtctcctgcaaagccagctttaatcacccccgaaccgttgtcgatgaccacaggctggttggcgatgatgtcgtaggactccatggccgggccgcgccggccctgcccagcaggcgggctgcaggaggcaccggatgggcgggcgggcgggaggaccgggacggcggcggctcccgacgcggcgccgctgccctccctgcacgagcctgcagcctaccctcgttttgatcgccacccaggc

SEQ ID NO: 435068 - DNA, 953 bp, Homo Sapiens
  misc_feature (775)..(859): n is a, c, g, or t
cctgactgaccaggggctcttgggctctcaatgcaatagaaactgacatggggccaaaagacttcccagacaaagcacgcgaagggtagaggatataggttagcatcatctggttgtgatgatcatctcgagtaatgggccacctggtggtctggccagcggcaacaaggctgtaaatcaattaattattcagcattccctcccaagatgggacactctgcaatcttggttccctatttggatctcctaaggccagttcctgggaattgtttaagtaaaagacatggtttaagcattatgagggcacaggagatcattacagaaaggcctttttctttgtatgactaaagcctcgaggttagcaggtatggtgtcaatgaggtagtagtatgggttttgtgatcagtgggaatgcatgaaaaaatgctctagtgggggtgagccaaagccaagcccccttcctactgtctcagaagaagccagacacaaaagcccacatatattgtgtaattccacttatatgaaatatcccagaatagaaaaagcccacagaaataaaaaggagaatccagtggttgcccagcggacaggtggaggggaagatagggagtgactgcctagtgtgtacaggcatttattttggagtgatgaaaatgttttggaaatagttaaaggtggtggttgctcaacatcagtgaatgcaaccaaattgttcacttcaaaatggttaattctatgttacgtgaatttcacgtcgattaaaaaatatatatannnnnnnnnnnnnnnnnnnnnnnnnnnnnnnnnnnnnnnnnnnnnnnnnnnnnnnnnnnnnnnnnnnnnnnnnnnnnnnnnnnnnattccataactgatctcatgccagaaatcacagtcaaaatgcagtcgaaactttgtttcatgcacaaaattatttaaaatattgtatcaaatta

SEQ ID NO: 435069 - DNA, 1352 bp, Homo Sapiens
  misc_feature (46)..(46): n is a, c, g, or t
aaccagatttgcccctaaatacaacctggataaaaattaattatgnaaaagggacagtcccctattacttccagttaagcatttttaaaaaataaaatcctactgtgattttatattttcctaattgtatacaaacagagaaaacataaaagggaaaagagagaaacagaaaacctgatgatcctttataaattggaagcatcagccctgcctatgggttgcatttaggctgcttttttgttgacattttcccaaattacttctgccattctgaattgtgcatcagtagtcagaggagttttccagacttcattatgccattgtgtaaccatagctgccacaatgtagtgccacaagaagtctgtccttgagtatttctttacttgggtattcaggtaacttgagcatgttgatgcatgtgcttgaagttggtaaaagatttggagtatatggcacagcagcgattgtaaagttttgcaatccacttccacccatgatattagcaaaacccacccatgtgggacccctggaactgcccgtaacaaactgtaagagaagaactctctcctcttgagtaatgtcttctacaacttcccagaaccactgaataactggatcttctctttcatagccacttgtgtattctgtattttttatccaatcactcacatcaatttctggcatgccagaaagcagtagctccaattcatattcatcaaaaagctgtatgagggagggtggaatgaacatatgaaagccctgtaaaaaagcattgatctgaggctgaatggctcttgtcattcgaagttcagtaacaagctggacgtactccgctttattattttgtgtcacaagaatactcccacccccaggtttcaaaggcacctcttccattgctccaaacacatcagtctcaacagaaaaagttagttctagacccagatcacttatcattatctaaaatccattgcaaatttttcgcatattctggatcaatggatgccacatcttggtaatttacaggaataccaagaatgtgcttgtagaaggatcgtgtgaagtaaatattgaccagctgcctgtggttcaacgctaatcccaagatctgcccagcaaaccgaaaatagttcaagtgatcaggatttacataagagttgctattaggctgaaaagttgttccatcagctgactgggtaaacaatgcataatcaggattgactatctcattggacagaatatcaaaccactcacgcacaacaccttgacccatgccttcttctccatggaaccgtacagcaatcccttgctttagctttgcacaatttgcttttgacacaacttccacacgtcta

SEQ ID NO: 435070 - DNA, 1258 bp, Homo Sapiens
  misc_feature (69)..(69): n is a, c, g, or t
  misc_feature (790)..(798): n is a, c, g, or t
gagttcagggacaggtggaatgttggacctggggtgtgacagaccctgggagagccatgtgaaggaggncagctggcgccatcgcttccggattagttggtttccataggaaaggcatgctttcagccagatgcttgccatctctagggattgggggatttgctagcctgggaggatcagtctgtccaggtcagcgaggccccagataccagagcatcaagagtacaggaaatacagttaatgcagggcctctgtgtggctggttcctccgtctccatcagatcagctctgattgatctattcttgcacgatttcctctgaacacagggttccagagtacttaaacacaacattttttaaatcgtgatttcggcctatttccttgccaggcctgtttccccaccaggaaatgagataggaggactggatgaggatgtcctgttatagttgctgtggaggaagttcctctggttaaattctcatcagcgtctgcagaaaagaaggaaagagggcacccttttcagttgggaagaaaggagaggggtggcgccatggacgtggccctaaacgctgtgggagagggaagaggaggctgggcctcgctgccctcttgtctctgctgacttcagcctggtcatgcttgctctgccacttgcgatttcatccctaatttcttcctccaccatgcctgcagacttttccctgggcttgttttttctcgcacatctctgaagagtttttaatcttcagctcatcatgtcccaggaagtggcatcataaaaggaaatannnnnnnnncctaggagcagtgttaaaatctgggtcacattcctgaccaaggacagcatcctgccttctgcccatccccttcagttcacaaaagctgacattttaaacaaatcatgactcacacgtattaattggttataaatatgttgtgtacactggttagataaaacttaaggccacaaggagggcccaggtaggcgatgtcagtgtgtgaaggggctggattgggcgtggtgaggatgttggcaaaccagtgcatgcacctggttggaagatgctcagcctcacaaaagctccaagccctttgggagccaaagtgtctgagagtgtgaccctctcctgtaaagtatttatcccacccattaatataatttctgtataataaacttgacctgaaattatttcattctttatattaaacttttaaaaatgtctttctattttcaccttagatatgggaagcagttta

SEQ ID NO: 435071 - DNA, 2325 bp, Homo Sapiens
  misc_feature (387)..(490): n is a, c, g, or t
  misc_feature (560)..(590): n is a, c, g, or t
  misc_feature (2096)..(2096): n is a, c, g, or t
  misc_feature (2104)..(2104): n is a, c, g, or t
ctcttggaggatcttgggtgttggtcttcggctctgcttttggcgtgtagatatgggtcttacgtttcgcgtcgtgggggtctgggcggttgcggtcctgtgtgatgtgttgtttgtcgttgttagggcggccgccgtcctgccgttgtgcggggcgccgtatgtgtgtgtctgtcctcttcttccttgattttgactgtgggccgcttcttgcttgttgttctctggcttcgagctgtgccttttctccatttcgcgttggtttttgtgttgatcggtctcggccgctcctagtgctcgatcttttttcattgatttgttgtccggggcccggccgggtagtgtgttcctcctgtttgtgtgtgtgcggcgcttttcttcctatcnnnnnnnnnnnnnnnnnnnnnnnnnnnnnnnnnnnnnnnnnnnnnnnnnnnnnnnnnnnnnnnnnnnnnnnnnnnnnnnnnnnnnnnnnnnnnnnnnnnnnnnnaaaacacagcaacaactttatctgaaccaggatggaaatctctccctttttttgtcaaacagagttggcnnnnnnnnnnnnnnnnnnnnnnnnnnnnnnnattttttttcttaatggagatttgatcccagcctggagtgacttcggttgggaattaaagagttttggcttctgggagtaattttgttttcccaattctcagtccaaatgcttacacactggaaaattccaaattaaaagccacagaaaaggaaaggggtttagaacacattatctctttgctcgtacaaagtacaaggcgtttgtttttggatagtacttcacattctgtttcttgtccatgagtcctccaaatatgatgagttcacccctgccttgtaccacggtatgcaggctggtttcaggaggtccaaccacagaactgctattaaatactttccatttgacccgccccttctccttggtgtctttaatgtccagcacgtacatctgcatgggcttgcagttcatactctggtataggggtttgccaacatttagggactgtggagggtggtggcccaggcggcgagcaatgggaggtaaggaatgtccatctccttgggcaggccctgggcgagggatgggcactgtttctccactgctcaaactctggctcccaggagagcctggagaagacccaagaggaggacttagtgctgcagaggccgaggggcctttgggggacatcgctttgatggcttccagactccgacgcagggcacctggggagacggcccctgcaagggcactggccacgtgaggtggggtatgcacaccatttgtctgttcaggagggtgtctcatacttcccccaactgtcctattgtccatgccatccatgggattactactggaagcgggtttcagatcccaattcagatctatggatcctaatctcagatctttctgatctggtagtgatcctcgtcggggggccaaagaaagtcctattttcaggtcgtatccttcaggagcagatggagtacttggagatatggcctgtacaggactgtccaaagaagagccacccacagctgccgttcctggagacaaactcccaccattgaggataggagagccgtctcctctggctggggaaaggctcccttcccgggaacctgaaggagtctgcctttgagccctgggtctcagtgttccccagcggccgttaacacaaggagcttcatccatgcttcttactggagactgagagcggtactctcgggtttcaggaacgagagctggaggagtggcactgataggtgatgggcgagagttcaaactggggctgagtggggctctcccactaggagcctggctgaagaccaccacacactgtcccacccggcaagctggatggcaccacagttctggggccccatgctcttcattttctaccttgagtggctgccaggcccaaggaccagaatgcatgtgcaacaaccaagcatccttgaatagagcattgggaccgccacaccctccgaggattaagatagttgcatcatctatgacaatctgaggaggggaagacattgaaaataaacctacaaagacacaggtntctgactntctatgcttcactggtatatgagaatagcctacctagctcccaaatgggaatattctagttaccataacctctccattctcctaaaaacatatcaattctgatccctgtgaataaattactgataattcacctgaaaggatacattctttgttgatcaaatattaacatgaatgtcaaccacataaaatgcaggattctcttgagaaatgacacagcaaag

SEQ ID NO: 435072 - DNA, 750 bp, Homo Sapiens
acatgtgtgaataaggatgcaatgtccagaagtgttggctgcctccaagtgacaggtaacactgcagaacctatctgaggacctgccagcctcccgtttcacgcagccactctgctgctctacaaagtttcacatcaggggtcagcggctttgtaaaggggactccgcaggaacacagctgtgctggggctgctgctgctgtactgcgcccagcagagctgagtgggacagtatttaccatctctggtcctttacagaacaagactgctgactcctctcaatgacaagacaaaaactctgcttctcgagactcttacttagaaaaatagcagatttttctctctgtgactgataaataattctgctaacaagacttctgaaggaaatcttcattttggggcttagctaagagaagaagaggtgcaagttttagccagaagtgagaagcataagataacaagtagtccagatccaagaacccaagaacaactcagggctttcatccttaaatctccataggatatctgtgattgtacaaaggcaaaggctagagacaaatgttaggagactataagaaatatttttaaaagttttttcttaaaacaatgtataaatgttaaggaagtaagcacacaaggaacagaatcattcctctgttcagcagtgtctcctgaagagtaggaatgaaatgaccatgacctcctgtgtgtcaaaagatgatgctactgacatgtcacaaattaggtctca

SEQ ID NO: 435073 - DNA, 278 bp, Homo Sapiens
ttttttgaatgtctcacgaaggtttatttgaatagagttacatctagagttctcatttcagtgtacaaacaactcagtgcagtgtttctaatacaagtcatataaaactggaacacactaaatgaatagtgcacttgatagaaaaataaattacactttaaatgctactgcaaagttttacacatataaaaggtaaacacaaaatagttagtgagaccctcataaccacttatcatatccagataaggagataaaaggggcaaaggaatctgtgctat

SEQ ID NO: 435074 - DNA, 1410 bp, Homo Sapiens
  misc_feature (867)..(883): n is a, c, g, or t
  misc_feature (892)..(892): n is a, c, g, or t
  misc_feature (896)..(896): n is a, c, g, or t
  misc_feature (918)..(918): n is a, c, g, or t
  misc_feature (981)..(981): n is a, c, g, or t
  misc_feature (1027)..(1027): n is a, c, g, or t
  misc_feature (1060)..(1068): n is a, c, g, or t
  misc_feature (1072)..(1072): n is a, c, g, or t
  misc_feature (1118)..(1118): n is a, c, g, or t
  misc_feature (1350)..(1350): n is a, c, g, or t
  misc_feature (1352)..(1352): n is a, c, g, or t
ggagaggaaactttgtctcatgccctgacatgaagtggcaaacacggaagttcatacttgaatgctgaattggccccgacagattaaatgcgtgttggggattggtttcctgtcatagctgctgctgctgccatgcgcagagctgctgtaacagctcttcctgttctgctcccctgagaacagtgtggtggggagaggcagggctgaggtggtctacgaatgtggcaggtagggaaggggagatgtctgtctcttgagaagagagaggcatgtgtgccggcatccttgatgggttcaaagggaaaggttggagatgatagtgggtgagaagcaggctggtgagactgggctgaggttggagaagggacagctgtgttcctgcggagtcccctttacaaagccgctgacccctgatgtgaaactttgtagagcagcagagtggctgcgtgaaacgggaggctggcaggtcctcagataggttctgcagtgttacctgtcacttggaggcagccaacacttctggacattgcatccttattcacacatgtggcagctgaacgaggtgctgttgtgggtgtctcagctctgagggtctttgtgagctcccactgttgtgggtgtctcagctctgagggtctttgtgagctcccactgttgtgggtgtctcagctctgagggtctttgtgagttcccaccaacttttaattattcatgcccttgaccatgtggttgcttggagacctggggtcttctgcagactgaagaagacacatttctagattatttgtcctttttcttttctcggaaatttaaacactgtacctcttcagtggtcagaagaaagttggaaacttttcctacatattnnnnnnnnnnnnnnnnngcacccccncctnaattataaaaatttgccctganctgaactgggttgtgttaacacattggtaaagctatgattccttcccagttctaaaagatacnatctgtaagtccctatgtcaccacattgcttgagatgatcattcanttacttgtcaggatttctcctcttcaaagagannnnnnnnnatancacagattcctttgccccttttatctccttatctggatatgataantggttatgaaggtctcactaactattttgtggttaccttttatatgtgtaaaactttccagtaccattttaagtggtaatttattttttctatcaagtgcactattccttttatggtgttccagttttatattgactgtatttaaaaaccctccactgaattgttttgtaccctggaatggaaacctctacatgtaactctatttaaataaaccttcttgaaacattcaatntnctttcttctccctcccctttctccccccttcctctcgggggacgggaacaagaagaaa

SEQ ID NO: 435075 - DNA, 705 bp, Homo Sapiens
  misc_feature (43)..(43): n is a, c, g, or t
tgccaggttttagcccagaagtgagaagccataaggataacanagtagtcccagatcccaagaaccccaagaacaactcagggctttcatccttaaatcctccataggatatctgtgattgtacaaaggcaaaggctagagacaaatgttaggagactataagaaatatttttaaaagttttttcttaaaacaatgtataaatgttaaggaagtaagcacacaaggaacagaatcattcctctgttcagcagtgtctcctgaagagtaggaatgaaatgaccatgacctcctgtgtgtcaaaagatgatgctactgacatgtcacaaattaggtctcactgattaatttacaagttctcaggcaaagtctagagcaggtaactgaaaccttcacgtcttattttaaaccatcctgtcaactcccacttcccctatcagggctatgaaatggactgagttgaggttcctctcctgtctgcccgcagggaggcagcactatctgctccccgccaccccaccgtgctccgtccgaggcgtgcacggcaaaccctcagcagtgcccccggctgccccttctccaacctcagcccagtctcaccagcctgcttctcacccactatcatctccaacctttctctttgaacccatcaaggatgccggcacacatgcctctctcttctcaagagacagacatctccccttccc

SEQ ID NO: 435076 - DNA, 1332 bp, Homo Sapiens
  misc_feature (327)..(327): n is a, c, g, or t
  misc_feature (1138)..(1138): n is a, c, g, or t
  misc_feature (1291)..(1291): n is a, c, g, or t
gatgaggttgcgcgggtggttcttactagagccacgtgagtgcttatcattccctgaacgggggctaggtgtggactccggggtcttctcggttgaacccaaggggcagggtatgccggcgactcgcttcagtgcgcaggggggaggcctcggagtgcctgggtacgatagtggggacgccgcgcacataaggtgtgatgttgataacgctgagtgtgttggtgactctgccgccccgccttgtggctttcgtgtgggtggtgtggtcgggaagtgttgggtctggtttttgtgcgctcgggtgtttgctgtcgcgctccctgtcgngggagtgaaatcaagtgcagttttatttaagaactggaaagaataatcagtatctgtgaaagaaaatccaatttagaatatttaaataaacatttatgtaaaaagaagagtagaataattactccgttcagttcctctccttgcaatgggataggctgcctctgctgcagatggctgggtcttccaaacccatgacaagtgccacggcctctgcagcagtggcccagagagtaggcacttcccagcatgacagagaggccgaggccttctaaccttgccaaaccactacaaaagcaaactagggtgggcaagcccaactacctaaggcaggaagaaagtgcagtgaagggacagtggtgtgctgtgcgtatcgtgggggtactcctaagcagctagctgttggcgagatcttacaaagcctgatcggctaacgcagcttcctggtttaggaacattttccccggtcgtatcaatcccccaggttggtaaatgaacagaagggatgaataaagcctactttttaggctcaaggagcagctcgtgaatgggtggcaggtgcgctgctgccttgttttctgtcctgctaagaggctcaccccgcgacctcttctgtaaactgccactcagcagcggcctgcaagccctcacgaaaggcttcactctatgctgtttccaggtagctttgttctgacagtacctattttccacttcagaatctccactttaaaacctgcaatggaaaaataaatctcttgacagttttttaaatcgagaaaattggtgatgtggccttggcaggaaatacccaganaagcctttacctcattaacctgattctccacgggccctgcgactgctaaatttataaagctaaaaataatctcaagatcatggaactaaaaagaagtcaatcacttaccaaatcctgtccttaaggagttcatcttggctgggcgtggtgctnacggccgtctgtctggttttcaaaccaatcaatgaacccgt

SEQ ID NO: 435077 - DNA, 429 bp, Homo Sapiens
ggacattaaataggtttaatgaatccacttcctttattgcagtaacctctgtacaaagcagcaactgcaatactcaaggttaaaacattagaaaagcatttgtgtgacaggtatattacagtattatcaaaatattacattttcagacttacttagcagataatcatccaccagagcttaaatctttaaattatttccatagtcttaaaaaatatgtaatgtcagaatgcatataaaaagaatgtaaaaggaaacctaaaatacaaatggaataatgtaacaaataaatatttgatttcagtaactgttaataatcagctcaacaccaccattctctctaaactcaatttaattcttataggaataatgaactgtcaaatgccatggcataatttatttatttccaagctatcatcaatgattagaact

SEQ ID NO: 435078 - DNA, 2161 bp, Homo Sapiens
  misc_feature (582)..(591): n is a, c, g, or t
  misc_feature (1145)..(1211): n is a, c, g, or t
  misc_feature (1250)..(1250): n is a, c, g, or t
  misc_feature (1258)..(1260): n is a, c, g, or t
  misc_feature (1265)..(1265): n is a, c, g, or t
ttagcggttagtcacacgaggagcggcacaagacggattgggtgacgaccgcggcggcgcacaactctcgccggagttgcgattacgatcacccggatgtggggagaagggggattaactaaaggttagtgcggggagcaggcgcgggggcctggagctccggggccccgagtgaacggcgccaagcggactaggcccgaaaggcgcggggcgccgcggaaaatcgaggaatagcccggagggcgttcgcatctcgagcaacgcgccacggcgctgtgagagaggatgcccccggttaaacgttgcgccgtcgcagagggaggcgcaccaatggccgagcgagcttattggtgtccaaaagaagcccgccctccccaggggtaagccgccccccgcggggtgggggtttcgttttacttcgcgctggaagagaatcgccagaggccgcctgatggtccattgagcccccggggtgctccctctggggaatccaaggggtgtggagccagggtttcagtttgacgttgaacgggggccccgcgcggcccaacccggaatgggtcttagaaagcgttctgggannnnnnnnnncgggctggacaaggatataacgggtggaggtgtgaaagtggggtgggcgtagttattattatcatcatcagcacagtgcggggcacatggtagggcattcagggatgatggcccttgtgtcacagccgacactcttgaccagtgagtcctctctcctccctttgttgactcctgaccgtccacaaatgaggttcagaatcctccatccagcatcttccctggtcacatggtcccaaccttttgctccacccccttctctgttccccccgcagtccatgctccagccatcctgactctgtccctggatttctggcttactgacacctgagcctgtgcacaggccctcccttctgtatagagcacgcttcccatcttgtggacttgcttcccatcttgtggactcggagggatccgagcagccgttgaggctgagctcctatgacacctcctccgtgaagcctcccttacttttccattaccgagtgaggcctgtcacagcctgatttgtactctgatcctggcacgcatgaagccgtgttgccatttgtcaacannnnnnnnnnnnnnnnnnnnnnnnnnnnnnnnnnnnnnnnnnnnnnnnnnnnnnnnnnnnnnnnnnnagacaccactaagcacagagtcgagcccatagtggccancagcacannnctagncccatcctgccacccacccaccactcacttgggggctggaggcattgcacgcatgcggggcatgtgggacttgtgggggcagctgagcagcgaggtttatagaggaacccagggcggcagcaggaaggatgaaggatgagtgtctgaaactgggttggcaggctcagggcatagccagcctaagctgggggtcaaaggcccctggccccttcactcccccaggggcacacagtgtcggcggcacgatgtgggatgccccaggaagggcaaggccatggggctgggctttcctccatcgacccaggacagagctggtgctgaaggccccatcagcatgactggggtggagatcttggggacctccttggggggccacagttggggggaagggcacagcccatccaacatgtccatctggtgtggctgtgccagcagggagtgtcccacatgcagagctccctctgggctgcaggaggtggggacctgggtgggcaggtgggcacagcagcagggggccccagggagcctaatccagcgggccctggaaaatgaggcggacgcagccatgctcgccggttagcccagcccccgcaaaggggcaggcggtttggtaagcatggttgccgtggggcattggtgtttgggtccagttgcggcccttcttctcatagcagacttgggccctaggtgcaaaggcctggttgggctgtccacgggttcagtctgaggccggtcctctggtcccgcccttggggctcattaggtctcccagggggttggggagaccttttcccttcctggggccccctttcccgcggttggcccgatcccggtggccttgggccgccccggggggtcgttccccccgctctcttttttttcgctccccgcgggcc

SEQ ID NO: 435079 - DNA, 500 bp, Homo Sapiens
tccaccagggggggaaccaggtctgattgcctctgtgtctccagattccacttagcacagagtcgagcccatagtggctatcagcaagtgctaggctcagcctgccacccacccaccactcacttgggggctggaggcattgcacgcatgcggggcatgtgggacttgtgggggcaagctgagcagcgaggtttatagaggaacccagggcgcgcagcaggaaggatgaaggatgagtcgtcatgaaactgggttggcaggctcctgcccagtccacaaatgaggttcagaatcctccatccagcatcttccctggtcacatggtcccaaccttttgctccacccccttctctgttccccccgcagtccatgctccagccatcactgactctgtcactggatttctggcttactgacacctgagcctgtgcacaggccactcccttctgtatagagcacgcttcccatcttgtggacttgcttcccatccttgtgaacct

SEQ ID NO: 435080 - DNA, 345 bp, Homo Sapiens
tggagtgtcactgtgtggacgccctgctagaatctttctctcctggtcattctcctttcctctgtgcccctagagccccttgccctacattggaatcccccaggaatggggcccaggctcccttgcctctgccccctggtacagatgggcatggcctggttcagctaatgcccagattccctttcctgtggggctgcccctgccagctgtcttgaccaacctcagtgagtatcagcaactgctcctgcagacggactgtgtcctgagcctgggcaggggtctcagctgctggcatggagactctgggtcccgaagcttctgggccctgcctccatcccagctctg

SEQ ID NO: 435081 - DNA, 753 bp, Homo Sapiens
atgagccaccgcgcttggccagactgcgtcctttttaagcgaacattttagggcctgggagtttgtcaagtaaggaagtctcaagcccaaagagcagcgtcctgaccatggtggtttcattacgagcccttctgctggctctcaggcagaagccccacagcaccgggaccattcatgaggtcactgcccagctcatgatgtccgtgaggctgtccttttggccagtagccgtgtgcagctgtgtggcacagatggcttcgttcatcctgatcaaggccccacctcagccacagcagtccccccaacctgtgttgtccaccctattattcatgtacctgccaggccctgctagatagcaccccgtggcattacataacacttcttgagtggctgtgtcttgtaattttggggacaggtttctctctttccctctctttttttgtcaaaagcccagagactgacaaccagctgcagtgtctaagtgttcctcactgacagggtggggcctcaccacccctggagggagcagcgttggcagggagacagcctggcccagtgaccctgggcccaagccagcccctccagggctttcagggaagcgccatccattttcaaagatgtcaaacgtcacttcttcctgtagggcccgagtcctgcctcctatcagggccagatcatagaaggctattttctattctggggaacgattataacttaaatgattgttttaataaaaattctaagctggaaaat

SEQ ID NO: 435082 - DNA, 597 bp, Homo Sapiens
cccactgacttgttatattttcagaaacacttcctctgttttcactcatgactgagctttccatcggccgtggcccccacgtgtagcaggcacctgcaggctgcccatcttcaccacatgtgctccccacctaagcaatgcagagaggccgctgtgggggtcgtccctactcaaggaaaaggactgggctggaggctggagccctgagttagagctccacgttggccgtggctgtgcggtctcctcttgggtagggtgttggccacttctcagggcacccggctggagcctcattcactgtgaagtgactgcagatgtctgaggaagaggcacctgctccttcaggtccctctgctcaccaggtactgggcacctctccggagctggagctttcagtcagcagacacttggcggccagggacggtcaggcctcagagcagagctcggaatttacctcttgaaagtccaggcagttcagcggcatccggtccacccccactgcggtgcagtgccagggtgagccagccacccccggcgggagaaacaccatccccacagccggcgctcctgtgccccctcctcccagccctggcaggc

SEQ ID NO: 435083 - DNA, 2005 bp, Homo Sapiens
atgaggctggtcttgtcggtttcagcagcaccatacaaccctgagcttgggtctgctgttcccttctcctggagcctgctaggactactcagccagtgaggaaccagatctgtgaacaatcaagctttatttttacaaaaatgaaaattgtagcatgtctcaacagccagcctgaggtagggctggctcagaactcactcagaactgctgggttccctttgctctttcttggtttcaaagcaaaaccaggccacagtgccccaggaatgaacccccagccccgagaggttggtcaagggtgaggtctggctggtgccaggaggctattggcagcctcacctttccttccaggaaggggcagaaaggaaccatctgggaaggtgggagcacctcacctcactctgtaggctgtcatggctctaataaggggtataggatgggcctctccaggccagatccttgctctggccaaacagggacgcaaggcccgggttcagccgcactctaaagcagcaggtcctgcctctccaacaggttcctgggagggactgcatctctggtaagctccaaagtcccaggagtcagaagcctctagtgcaaggtgcctgagcactggggtcacaggcccaggagcacagtggggcagtgaggaggagctatcactgcaccctccaggcaagagaagtccctgagtagctggtttccctggcccagaggcaggggtggccctgacggtcatgggttttgaaaatccaggacgtggaggttgtaagacagggcagcatagagatgcttggtggtgagacgcaggcagtacacagggctgctgaggggagtcgacgtcagcgggaaggcgtgcaggcaggccctttgacgccggtcccacagccgtacaacaccgtagtaggaggaacctgtggccagcaggtggttgccatctgtctgcaggcagtacagggtgctgtcgtggggctcctcccactccatgacacatttccggacgctggtgcggaggtcccagtagcgaacataggtgtcatagccacaggacagcagtgtgaaaggggactcatacatgacatccagcaccccagcccctgggggaaagtcactgcccaagtgtgtcatcagctgcccactgttgaggtcccagattctcaggggtgagaagtgcccgcaacaagccgtccctgtcacaaaagagctgagtaatgggctgatagcaatggaccagactcggtcttcagtctggatggtgtgtaagcactgccccagccggcctgaggccaaaggccacaccttggccgtcctgtccctggagccactcacaatgatgccccctttgcaatccacacagttcacctcctgttcatgagccgagtacttgacagtgaaggtgctgtgaatcttatgaatgccaatcttcccatcccctcctgcactaacaatatgcgagttggccagcacaaagtggcaaacgtcctcatcatgcccagcaaagactcccagaggccgacgattcaagctggcaccatctggacggaactggtaggccaggatgaaattagcctgggatatgtacagagaatcatcctctagctgcatccagggcatctgactgcatctccacttcagcagaatcccctctcggcagcgccccagtctccagttctgagacaccttcactcgttccttcactgggacactggtcatcaggtcggtgccgagccgcgtgaagccggagttgagcgaggcccgggctatccggcgccagagcagatcgcagctggtgaagcgccgcagccagcggcacacctgggccaggcggccgagggcccgcatgtccaggtaggagcagatgagcagcagcagctcctccggcaggcgccagagcgcaggccccacggccgggcgggcagccgactcccgagccgcctcctcctcctcccgacgcgtgggcgacgcgtgggtcgacatatcccggaattccggaccgtaccgcctt

SEQ ID NO: 435084 - DNA, 1045 bp, Homo Sapiens
  misc_feature (19)..(19): n is a, c, g, or t
  misc_feature (924)..(924): n is a, c, g, or t
  misc_feature (991)..(991): n is a, c, g, or t
gaactagtgcgatccccgngctgcaggaattcggcacgagattctcaagccatgattattggctatcatgcactgcaatatttatccacaattctagacattttccatttttgtggaagagttgctgttaccttaattataaatgcaattgtgtggttaatgagagctaatgctagtagttaaccttttaaagtggattggctacagttgagggagaaatctcttttaatataaatcacatcattccttaactgcctctcttggaaagagattgaaaccttttttttaaagcacgatttagcatcctaagcttcctgagggtagagattgtatctttttgcgtctgcacaatggctagcacatgtcagcatttgacaattgttaaatgattacaagtgtgccccaattaaaacgtttttcctgggttgttttgttaaatttacaaagtaagccaagccttacggttaacattctcctctacaaccaagtattaaagccacatttaaaaagaccacatgaaatgctgattctaattgtgtgtaggtcttgaggattaagcacacaaatttcacaaacttctgtttgagtaaacaaactcagccttctgtaaatatacatgcaagtttggaaacagtaatactgtacctataaatatatgctgtctgttttgtgtacagtatgtaaaaactccttttctgccacactaaaaatgcaagccatttatgggaatcctaaaactagtattgaactaaaactttgctaatgatctttattagaggatcgtccaacttttcacttaccttgggttttcttttcaattcactcttacactagtctgcttatttccagctgtttattttattgagtcctgaatttaatgttgtcttttaaatactccaattttcattctaatatgaatgttgntatattgtacttagaaactgtacctttaatattacattacctttattaaaagtgcattgaacacatncaatttagatgtgctttatgtactgttatcctataatacttcagcttctatgtt

SEQ ID NO: 435085 - DNA, 1021 bp, Homo Sapiens
  misc_feature (229)..(238): n is a, c, g, or t
  misc_feature (550)..(550): n is a, c, g, or t
  misc_feature (958)..(958): n is a, c, g, or t
ttttttttccattagaagctgaagttttattataggataacagtacataaagcacatctaaaattgatgtgttcaatgcacttttaataaaggtaatgtaatattaaaggtacagtttctaagtacaatataacaacattcatattagaatgaaaattggagtatttaaaagacaacattaaatctctcttttttgtacagcttgtatttacaaaatgaatcaaaatannnnnnnnnnaaattcaggactcaataaaataaacagctggaaataagcagactagtgtaagagtgaattgaaaagaaaacccaaggtaagtgaaaagttggacgatcctctaataaagatcattagcaaagttttagttcaatactagttttaggattcccataaatggcttgcatttttagtgtggcagaaaaggagtttttacatactgtacacaaaacagacagcatatatttataggtacagtattactgtttccaagcttgcatgtatatttacagaaggctgagtttgtttactcaaacagaagtttgtaaagtntgtgttaaatgtggctttaatacttggttgtagaggagaatgttaaccgtaaggcttggcttactttgtaaatttaacagaacaactcaggaagaacgttttaattggggcacacttgttatcatttaacaattgtcaaatgctgacatgtgctagccattgtgcagacgcaaaaagatacaatctctaccctcaggaagcttaggatgctaaatcgtgctttaaaaaaaaggtttcaatctctttccaagagaggcagttaaggaatgatgtgatttatattaaaagagatttctccctcaactgtagccaatccactttaaaaggttaactactagcattagctctcattaaccacacaattgcatttataattaaggtaacagcaactcttccacaagaatgganaatgtctagaattgtggataaatattgcagtgcatggaagccaataatcatggcttgagaatc

SEQ ID NO: 435086 - DNA, 872 bp, Homo Sapiens
aatatttcgggacatcctatggatatagtctgattgtgtgaccattgcaatgtgttagtagaatcttataaccgcactttcacctctcgcatctgatatttgatagttctccttgtgggtatgactctgttgacttaatcccaaagaaagatcgcctttctggttcttagctatgccactcccagaactttttcagcaggcatttgttcagcttgacttagttgaggtataaatgatgctgtagagaataaggtgtatctgcttgcgtgcctgctttccccaaatcctcaaactgagacttccaaataagggtaatcctcttccaagcagatagtgtggaagctggacattggttcgagccacagtgccacaaatgttctgatgatggatattggtgacaaaattgatgtaattcatataaggctcacccatgcaaaacgaccaaaaaactgtccttttcttattgctggaacattactgcttcttgggagatgtgaccttgggttttcttttccattcactcttacactagtctgcttatttccagctgtttattttattgagtcctgaggtcacaaccaagtatgtttgggtctttccagtaccgcacttgtcgcttgtccgccttccgatttatcactcccctcctctccccgacgaaggtcgaggactttctaggaaaacacgcagtctccaaccacttccgcctggcgagcccagtctcggcacttcgctgccagaaccacagcgagcgcttgtggcgggaggaaaggaggggagcacccgtcccgctcatcgacgaattcgagctcgcccgatttggcctgatccctcacttcgtataatgtatatacaccgggatcgctcccaca

SEQ ID NO: 435087 - DNA, 475 bp, Homo Sapiens
catcaatcacctcctcttcgagtataatcccggggtgaataccacctcacgaaatcttccagggagcaacctggattagctgccttaaaagactccatatctgagagcagacaggcactctgcatgcgtgctcgaaggtgagccccctctgccgatgtacctaatttagctaaaacttcagactgctcttctagcagatcttctgtcataggtgctggttcctgggttactggaatgtagagaggttctccattatgcagcagtgtaagtttcccatgctgatagagccgtccttccggccttaaatttgccatctccttaggtcctcctttcttgccactctcttgtccatttcctttaagttcttcagtatcacttaggcattccaaaaaattcttcttcgctgtcactccaggaatcccaagattttcctacctctccctgttcctatctcagcgctcctacgtttaccctc

SEQ ID NO: 435088 - DNA, 1126 bp, Homo Sapiens
  misc_feature (81)..(81): n is a, c, g, or t
ttaaatcatcaacattatttcataaaataagaatttgttctgtgttatctaaagatgtatcagtatattgtcacagttgtnctgttaactaaaaatgctgagacccctttttatagaaaaacaaaaagacatcaagtcttcttaattcaacccataatcattaagtacttaacaaagaatattttacaagtgatagtatttcaacaatgtgtaattaatatttttgatacagtgatttcatattggaatcattatttgtgcaaagggacagacagatcacttagattgctatactagtggacataggctaaatgtttgcacattcacattcttatcacgtgtagaatacttcacaaaatagtcaacatctaaggccctaatttatgttttgaaagatcatgtgttcccaaagtattccctattgttgggctccacagccttaaagtgctatagatttaaattccattgattagttttaatttttaattttagactgtgtatttccataaataccctacgtactggcatatttgaaactctttttccaggttaggtccttttctttctcattgaatcatcttaaatagttcttggccctgaatttagctgatttaaaattcttaatattcaagaatttatacttattttttccttaaaagccacaggggacagttaaatatcttaaaatatctaaaacattttttaaagcacttagattgtcttacgtatgtgcctactataccctttaccgcgtttattgtcttgtctcttgtcagtagaccttccgtacaccgaatgtgggacatgtcagtcaaagttggtcctcccccgcaatctgtccagctgttcagcatattgggcatcccttacaacaccttctcctatcccagacatggggccaaagccgcccgtatcttgaagggaagggcctgcactttttcatttaccctgccctttaaaggccaccccgcaaaaaatacccccagccttcacctcctaaattattgacacaatgcaattaatggctgggcaagcgccccctatattgggagcgcgtcttcgccaccctctttcgcgaaaaacacctctttgagacccccaataccacccttcgctctctttcctc

SEQ ID NO: 435089 - DNA, 1233 bp, Homo Sapiens
  misc_feature (40)..(40): n is a, c, g, or t
  misc_feature (67)..(67): n is a, c, g, or t
  misc_feature (98)..(98): n is a, c, g, or t
  misc_feature (1174)..(1174): n is a, c, g, or t
ttaacaaccaatggtggttaggtgcctgatgaacccctantttggaaatttgcctgaggaacctttncaaaacgaatcctttggaaataagttccatncaatttcctttgtcctggaacccttggatccaaagcattaatccaattgaagttgcttgtccttgttgatttcagtgccaccccatttgatgcctgatgaacacggagtcaacaaactaagcggggaaaaatgttgtctgttaaagttagcagctgcgggtgctcctccaaggggtgccccaggtccgtacatctgacctcctgaaatgtttgaagcaaagtttcccaaatgtgttgaagaaggtgttacagaaccatatggcgagtccatattgacaatacctgagggacttggagcaggtctctgtaatggtggtctaaaacctggagctttggaagtatcagactgatgtaaaggatctgaatttggcaaatatgaggattttcctgatagcatagattctggtgttgactgagatgaaacaacagatcctccccagaaggcatgagcagaagtaggctgttttcaaacaatgtgctaaagggcccaaatggtaagggggcactgaaattgggagcaataggcttatttgctggatgtactgaattctgacaagcactttgtgtacttaaggtcgaaggtagctggacagaagagggaacactgtgaggtcttttaatgtgattgacactgaggactgcaacagatgaattttgcactgaagctgaattcttgtgaggggcagttgtgccatgagggggtggtctaatagcaggggtttccattttaggagtaggctgggggcatcccattggtgtctgaggcatagggtaagtcactggggcagtagaaggcaccgccactggagcagaacttgttgctaaaggaggaacagtcattctaacttccgggggaggaacctgagactgctgaagaggtggtcttggttcctgagaaacagatcccggaggttgttgctgattagaatgagctgatgaactcccagaagaactgctgctgtttggaggtctagtgtttgttgtttctactactggtggactacctgcttcctgttcggaggaagatgccactttatttggagatgctgatccacaatccaaagggctgtttctanaaacccctcctggctgggctggtggtgatggggaagatggggatgatactggatagtgt

SEQ ID NO: 435090 - DNA, 1939 bp, Homo Sapiens
  misc_feature (689)..(718): n is a, c, g, or t
  misc_feature (858)..(868): n is a, c, g, or t
  misc_feature (1926)..(1926): n is a, c, g, or t
ctttttaaattctcagaaagtttaaacattttataattagaagaaaccactggtgatgatgaagatggtccatctctgtagcagccattacagtgaaaatcttgacagaaccttttcactatcagaaagataattttactggtattagtggtaaaggtaaggagagaaaaaggagtgaggagataagtctgtattagttttaaaagtgagaaaaggtaataaaacaacatggaaaagccagaaatttcttcttctatatgtgccttgctacaaataaaccaaaaagaaagcaagatgggtattttaaaagccaatgtggggaaacatccaatgataatgcccattattttactttatacttaaattacaccagtagaaaaagttatgcttattaatagtttaatgtatgaaggaaacatccagatttctgaatatgaaggtacatatctcacattaatttaagtctacataaagtagagcctctatactgacatattgaaatttactttctgcttagccttttctgttatgtaaacaattgtacatttatttgccattctaaaacttcaggatcaagtttacataattttgctaaatttccgtgtttgctcagaagcagtttacagtactaaaaccaaccagccaaagaacagcttcaacagaaagttatgtccaaaggggaagagggnnnnnnnnnnnnnnnnnnnnnnnnnnnnnngctaactaaggtaaaacggatgatgatggggaatgggcagtcacaaatgttcacagaaaataggtcagttagtaagatcttctgcaaaaagcctacacacttcagtcaagcacatcagtagaatgatttgggagcataannnnnnnnnnncggccacttgtgatttcctccaaatgaaaaggaatctgcaggctaacaagctgatcctcatcagccaagctggttcatatgcacactgttcatgtgaggtgcccagggtccagtccacaccgtttgagggccattattttccgtggagctggaaaccatctttatcagtgagttccaagaagggtctgcagcatgagggccattaaatatgggtcctccagcaccatcagggataggtgctactggaggaatcattgcattcccatacacagaaaaaggcatacccccaactttaggaaagtccatgtagcctgcaggaacatgctgatggaatgtaccagaaggagttacaattcctgtactatctcgctccattgcttgatgttgtgaaaatactcctgggtcagacatcggtctgtggatcataggatttcccatcccagggttacaccagtctactttgtcttgattgccaccaatcccttcaaaggaccagatgccactatgtcctactgatgtagacaaattgctccccaataacagatggagctgacgttcccagtttgccctgatacgtgcagaacgtttcagtcccaatagggactggaactttcctgtcctgagacacattgctgggcttttctgacctaacggtactgatgatggggcaggagatggtgcacgaactcccgaggatactgactgtgcagaagaatcatttgatgctgatgaacacggagtcaacaaactaagcggggaaaaatgttgtctgttaaagttagcagctgcgggtgctcctccaaggggtgccccaggtccgtacatctgacctcctgaaatgtttgaagcaaagtttcccaaatgtgttgaagaaggtgttacagaaccatatggcgagtccatattgacaatacctgagggacttggagcaggtctctgtaatggtggtctaaaacctggagctttgaagtatcagactgatgtaaaggatctgaatttggcaaatatgagattttcctgatagcatagattctggtgttactgagataaacaacagntcctccccagaag

SEQ ID NO: 435091 - DNA, 500 bp, Homo Sapiens
  misc_feature (20)..(20): n is a, c, g, or t
  misc_feature (394)..(394): n is a, c, g, or t
  misc_feature (415)..(415): n is a, c, g, or t
  misc_feature (455)..(455): n is a, c, g, or t
  misc_feature (464)..(464): n is a, c, g, or t
  misc_feature (471)..(471): n is a, c, g, or t
  misc_feature (490)..(490): n is a, c, g, or t
aatggggtattcagttcttnttgggggtgggatgcagaagaaattgcaggcacagtgagtgctgtggcagtttgagatgttgatgacagagctacagttgtcattttaattcccattaaggaagtgttagcagcagtggtggtaggtgctgatgaccctattttggaatttgctgaggagcttttcaaacgattctttggaataagttcatcaatttctttgtctggctccttgatcaaagcattaatcaattgagttgcttgtcttgttgattcagtgccaccccatttgatgctgatgaacacggagtcaacaaactaaggcggggaaaaatgttgtctgttaaagttaggcagctgcggggtgctcctccaaggggtgccccagggtccgnacattctgacctcccgaaatnttttgaagcaaagttttcccaaatgttttgaaggaaggtnttacagganccatttnggcgagtccttattgacantacccgaggg

SEQ ID NO: 435092 - DNA, 470 bp, Homo Sapiens
  misc_feature (38)..(38): n is a, c, g, or t
cagacttgaacccaggctgcctagcaccaagagtttgnagtcttaccaaattctccatattggctcagggcttgtgctatgttttcagcctaagctttgtccactgcccttcttcaccttccatccttccccatacccttgtaagcctcccgcccccaaggttcattaaggcagactccagagccacgtactgttcacagctccagaaaagtacccaaggtttttcacgcctggctgtatttgtcatgatagaacctctgcatgaaaggcaagggggtctgtggggcagacgactatccatgacattattgtccttacagcccagaacgataaaggctaggggattgaagaggcggagaaagcggttagagactctccatagaaattgtctcagccccgccccttaaattcactttctagccgcagctccttgaatttacgtccgagccacgcctccaattaaactgtct

SEQ ID NO: 435093 - DNA, 409 bp, Homo Sapiens
  misc_feature (12)..(12): n is a, c, g, or t
  misc_feature (21)..(21): n is a, c, g, or t
  misc_feature (372)..(372): n is a, c, g, or t
tttccaattgancgttttttntggatttgtataaaaattctcccactgccacaaaaactgaaagcaccaagccggctgccagaacaatgaagatgccaccaatattctgaacccccaggggactggcctctttgctctcctcttctgggcaaccattgcccctccaccatttctccttcatcatatgcagtttgccttcctcttgcagctgaagaattgctatggtaattttgtctcgatatggagaacccatgggagtgccaacgccataacctttagagtctataaggccgccaatctgtgtcaggttacagttccgctgggtaacaaactcgatggttgttgactccattaggaaagcataatcagagntgaggactcgctggattccttcttcattacttttgac

SEQ ID NO: 435094 - DNA, 2676 bp, Homo Sapiens
  misc_feature (320)..(354): n is a, c, g, or t
  misc_feature (506)..(584): n is a, c, g, or t
tagacccactatccccgcgccccccctgcgcaagagcgcgcgcccctcgtagagaaaactatacccctccccgcacgggagataagagaagatcttctgcgcccgccaccgcagcactattttctggtcctcctccaccgccgccccgctctcccactggagcagcaggatactgcataggatggcggccggcgcgccggcggccgcggttgtactaccagcagcgaggaggagtgagcgcccctccgtgagcctcccgtctgtctgttgttccactcagcgcgccgcgatcgcgagcgggtgggagaaagacgaatgannnnnnnnnnnnnnnnnnnnnnnnnnnnnnnnnnnaaataaagaacgacgcccactagcagagagggcggagcgcccgctgatagaaacagaaaagagcgcggggcggcgaggaggggactagtagggtccgccccacgcagggagagagacgatactgatgaggacgcgcgcgcgcgcccctctcnnnnnnnnnnnnnnnnnnnnnnnnnnnnnnnnnnnnnnnnnnnnnnnnnnnnnnnnnnnnnnnnnnnnnnnnnnnnnnngtttcttgactgttagttgggccttggcctatgtcatacccatgggctgccacatgggggtggagggatcaggacgaagagaggggaccagagcagggatggaggtccagactcagggagtcggcgcttcttgcagggggttgggggagaggacacggaagcctctgccccatgcaggacatttccttgctgtggcagcagggcagctgtgccctgactaggctgggctgcagagagtgtgagtctcaggtcctctggagccagagccatcaggatgactgcttttcaggggtcatcagtcgctccacctcccgcatgaaccgcagacacaactcttcttgccagggcagagccacacactgcacggccaccggcagccccacactcttcttcatgcccttctgcagcatcttgtcccagatatccccaaagtagcccctgtaatgttccatctgggcctcgtcctcagcagtcaccgtggtgacaggcaccacccctgcagggaagtccaggcagttgtacagcatagtgtagctgacggcccctgtggccctgcctggggcattcaagtccagagcaggggccagcatgggggtcagcaccacatccaggtccagcgccctccactgggcaatcacggttttgcggtacacctcgatctcgtgctgcagttcccagagttttccagccgaacgagacttcatgttgctgaggaaagctgacagccttggcagcagaggcttcaccaggaaggccagcagtcctttaagccattggggaagcttcagaattgagaccaggtcccccaggcaggggtccacgaaatcacctttgaagttctgtaggaaggtgtggccaccatcactgaagagcccacctgttgacagggtctccagagcatggggtatgttgcttggcaagaagggaaccagcgtgtgccccgcagcctcaaggctctgtttggtctccagcacggcccgcctcatggccggggagggcatggtatagttgtcagtctcatagtaccccacacgcaggggctgagagctggtgtagacctcttctctgaagggcaagggaggcacagtggggtccaagcggaacatgtcctcgcacagcagggctcgcaggcacagtgccaggctctccacgtcccgggccatggggcccacggagagacgcactgcctcctgtccatagacacagcccttcaggccactcttgctgaggcggttccctgtgggcttgaggccgcagatgccgcagaaggaggaggggaagcggatgctgcctccgatatcagtgcctaagcccaggggggagcctccagacccgatgagggccccttcaccccctgaggagccccctgggcttttggaggacttccatgggttcacggtctggccaaagagggggttactgcagtcatagctgaacatggactgtggaacattggtgtgcacgaagggcacggcaccctgcagcttcagcacatgcaccactacgctgtcgcactccgccggcaccccttcattcaggctcaagcccagcgtggagtcctggcccttgtaggtgaagcactccttgaggctcacagggacgccatagagcaggccctgccttggggcctgagacagctgagtctcacagtcagccagataggaggtcacacagttggtccctttgttcacttcccaggcctttcccacataggtgaagagcacggcctcaggggccagctctctactgtgtaacttctgcaccagctgaggcaggggcagggctagcagcgcctctgagtccaggtctgggttctggagccggaagcgctgcgccgccctgtccatgttctccaggcccgctcgctgcctctgtcgcgcccggaccaccgcgccccgcgccgtccggcgcccggaccagcgcagggccacggccgccgccacgaagcagcaggccagggcgaccccggaggcgccaggcagcgcggcccacagctcgtactgcaccatgatcccttcagcctgctgctgccgtacccgcgacagttgaagccgccgcacgcgcagcccgcccgctccgccgcaaacccgct

SEQ ID NO: 435095 - DNA, 311 bp, Homo Sapiens
aaggctagaggagaaccaggcacccagataaacagcataaagggactggcagtgttccagttctgaagttggccagagagtttcttgggtatacattttattatttcaaattcatgtgaactgggccacgatcttacagtctatgttattctcatgtgcagaggttcaactgatgtaccaagttctttattagtgacacactaaaaatttattgcttatgcattttataatctaatgtgctttgtccagagcatagaaagtgttctattccatttagtcattcggagactgaggatccctctgtttttgtg

SEQ ID NO: 435096 - DNA, 1081 bp, Homo Sapiens
  misc_feature (9)..(9): n is a, c, g, or t
  misc_feature (19)..(19): n is a, c, g, or t
  misc_feature (33)..(33): n is a, c, g, or t
  misc_feature (37)..(37): n is a, c, g, or t
  misc_feature (40)..(40): n is a, c, g, or t
  misc_feature (42)..(42): n is a, c, g, or t
  misc_feature (45)..(45): n is a, c, g, or t
  misc_feature (49)..(49): n is a, c, g, or t
  misc_feature (52)..(52): n is a, c, g, or t
  misc_feature (57)..(57): n is a, c, g, or t
  misc_feature (59)..(59): n is a, c, g, or t
  misc_feature (61)..(61): n is a, c, g, or t
  misc_feature (64)..(64): n is a, c, g, or t
  misc_feature (66)..(66): n is a, c, g, or t
  misc_feature (69)..(70): n is a, c, g, or t
  misc_feature (76)..(77): n is a, c, g, or t
  misc_feature (79)..(79): n is a, c, g, or t
  misc_feature (82)..(82): n is a, c, g, or t
  misc_feature (84)..(84): n is a, c, g, or t
  misc_feature (86)..(86): n is a, c, g, or t
  misc_feature (97)..(97): n is a, c, g, or t
  misc_feature (110)..(110): n is a, c, g, or t
  misc_feature (116)..(116): n is a, c, g, or t
  misc_feature (119)..(119): n is a, c, g, or t
  misc_feature (121)..(122): n is a, c, g, or t
  misc_feature (133)..(133): n is a, c, g, or t
  misc_feature (135)..(135): n is a, c, g, or t
  misc_feature (139)..(139): n is a, c, g, or t
  misc_feature (153)..(153): n is a, c, g, or t
  misc_feature (155)..(155): n is a, c, g, or t
  misc_feature (159)..(159): n is a, c, g, or t
  misc_feature (172)..(172): n is a, c, g, or t
  misc_feature (182)..(182): n is a, c, g, or t
  misc_feature (227)..(227): n is a, c, g, or t
cccccagantttttttatngctatttaagaatnattnaananagngttntanttttncnanccntntgnngagctnncnccntnantcattgtgccnagccagaatgccncccagnatnannaagtcagctcntncccnaaaagcctggccanancccnaggacagctgcancctccatctnaaatgatgtgcctttgaggccatgagcagcatctgcacactccantcactgcgctgagctgtgataccccactccagttttcttccgagtagtacacacagagcctggcccaattcccactttgatgatgtcagccccagaaaggatgagctcttctaccatctctcctgttaccacattccctgccatgatggtgtgctgggggaagcgcttccgtacatcttttacaaattcaacaaagtgttcagagtagccatttgccacatccaggcatatatacttcacctggggaatagcttccaggatctgttccagctgctcaaagtcagaagagcctgtgcctgagctggcagccagatgctcaagacagtcaggattctggccagcaaactcttgccactgaacgaggctatagtgcttatggacagcagtgaagagagagaacttacagagaaccttggccatctcaaaggtgcccacagtatccatattggcagcaatgatgggaaccccagagtatgtctgctttgagttccgaaatgaaaaggatcttgtgagatccacctcacttcgagacttaagggtactgcgtttgggcctcaaaaggacatccttgaagtccagtttcacatcgttgtcaatatgaggcatggcgcttagcctcggggtagcgatgaatctgagggttcctgttgccttggtccaggcggcagttgaccaaagaccaccttgcttagcaactaacctcgtgcaatcccgctaagccttctgggccacgccaacaggttcctctagttgccggcgagaactactagccgacgaattccagcttcggcggcggcagggcgaggccttctggataacagagttcacgcactgaggttgctgttggatccgag

SEQ ID NO: 435097 - DNA, 1611 bp, Homo Sapiens
ttttttttacagtcaatgagctctctctttattgaggtatttcaaatatacaaacacttcagagctttttagatatgtgaaggtccaatttagtgaagcggattaacaaaacatgattctaaaagcctgcctcctctagaccaaggccatgtaaaagatttatgtaccaatcagcatcttttccttttaataatcttcaggatgttgtgttgggtccccagattcccatttgattttcttgcatcattttctcagactgtttgcttccttgcttcctccccagtgagtgccttgggcattttgtgtgtgcagatagagaagtacagagttactgcaggagccctcaggagtgagacaacaggaaatgacaaagtaatacagagctgcagtagctgggatgggtgaggaccccacttgggatgccccatggtagagtactggtgccttgggagggtagaactgctcaggtctagcacgcctcactgaagattggattcacctgctgggtgactcggatgaaggtagttctcctgctcaactctttgagcttagctgctcccacataggtacacgtagagcggatccctcctaggatgtctcggatggtatgttccacatctcctttaaaaggaacttccactgtctttccctctgaggctctgtactcagccacgcccccagcatacttcttcatggccatttcagaactcattccatagaagagcttgtacttcttgccatccctctcgatgagctcaccacctgactcactgtgcccagccagcatgccacccagcatcacgaagtcagctcctgccccaaaagccttggccacatccccaggacagctgcaacctccatctgaaatgatgtggcctttgaggccatgagcagcatctgcacactccatcactgcgctgagctgtggataccccactccagttttcttccgagtagtacacacagagcctggcccaattcccactttgatgatgtcagccccagaaaggatgagctcttctaccatctctcctgttaccacattccctgccatgatggtgtgctgggggaagcgcttccgtacatcttttacaaattcaacaaagtgttcagagtagccatttgccacatccaggcatatatacttcacctggggaatagcttccaggatctgttccagctgctcaaagtcagaagagcctgtgcctgagctggcagccagatgctcaagacagtcaggattctggccagcaaactcttgccactgaacgaggctatagtgcttatggacagcagtgaagagagagaacttacagagaaccttagccatctcaaaggtgcccacagtatccatattggcagcaatgatgggaaccccagagtatgtctgctttgagttccgaaatgaaaaggatcttgtgagatccacctcacttcgagacttaagggtactgcgtttgggcctcaaaaggacatccttgaagtccagtttcacatcgttgtcaatatgaggcatggcgcttagcctcggggtagcgatgaatctgagggcccgctacacttccttcttctacccctgcaaagagcaatggggcaagaggctgatttagg

SEQ ID NO: 435098 - DNA, 935 bp, Homo Sapiens
tggataccgccacctccagttttcttcccgagtagtacaccaggagcctgtcccaattcccactttgatgatggtcagcccccagaaacggatgaagctcttctaccatctctcctggttaccacattccctgccatgatggtgtgctgggggaagcgcttccgtacatcttttgacgaattcaacaaagtgttcagagtagccatttgccacatccaggcatatatacttcacctggggaatagcttccaggatctgttccagctgctcaaagtcagaagagcctgtgcctgagctggcagccagatgctcaagacagtcaggattctggccagcaaactcttgccactgtacgaggctatagtgcttatggacagcagtgaagagagagaacttacagagaaccttggccatctcaaaggtgcccacagtatccatattggcagcaatgatgggaaccccagagtatgtctgctttgagttccgaaatgaaaaggatcttgtgagatccacctcacttcgagacttaagggtactgcgtttgggcctcaaaaggacatccttgaagtccagtttcacatcgttgtcaatatgaggcatggcgcttagcctcggggtagcgatgaatctgagggctggaaggcaggaagtcataaggaccaatcttcccctgggctttaacgccctgttacggctggtggcctctcttcgcttaagttgtggaaggtcgggcaaaggccgaagtgtggtccctgaagcctgtcacctcgacccatcccgtggctgcgattaccctagggctccatcccaggtactgtttgttggggaggagagctgggaaagggttgtgagagaccctgacggtgcattccttaccccgctacacttccttcttctaccctgcaaagagcaatggggcaagaggctgatttagg

SEQ ID NO: 435099 - DNA, 308 bp, Homo Sapiens
gttaaatattttactgggaataggaaaatctaagcaatttttgaaggctttactgagtgagaaaaaaatacttattctttctccatagttctatacattttaaattttaatattctttagttgattattgctaagaccttgaaacacccttttccccttcaaatctctgttaatcttcaagttaaaattttctgtttatatgcattcttgaaagtatatgtattcacttcctattacagtatcaattaccacaaatttagtggcctaacacaaaaggaattcttatccttaccagttctggaggtcag

SEQ ID NO: 435100 - DNA, 1578 bp, Homo Sapiens
  misc_feature (1434)..(1434): n is a, c, g, or t
gggtaaagcccggggttaagcactggatttgggcaagagggcccataaaagaaagtatccagggccagacattaaacaccctgggttctgactttggcacaggcctcagaaagcctctgagatgacacagcttccctatttcttcaggtgtaagagggaggttaaaataagttatttatagggccccttcctgaaataactaatttgaatgcagttctaagatttttatccagcttgctctgcaactctgtctattaattcctttaataacagcttgaactcttttagtaactatttctgccagtttcctttacaaccacccctcaaacatccaaggttccattaagctcactcagcccagatactttaaaaacataaagtaaaataaagctaataaggaacaaaatttaaggctttttctttttatttcagccaaggaatgatgcatgctacagattaatctttactttttcccacttggtttttcaaagaacaccaccacttcaacccccaatgaacatggcacttgtttgtttcttccccttctaatttattccagattttcaagtgttttcttcagtaacgctgctttctcctgcagttcaggtctgctgtctggctccatagtagctaaagactcaattaggagcactctgcattcagatgtcaaacattcccactgtttagattcttcaagttttttaagcagcaattctatcacagataaagcttctgttctcacagatgagtaggtcttattttctaaagaatatgtgattgatttacaagtttcaagcagaatttcagccaaagcctcaggatcggcatgttcttcttccaaaagcattaacccctgaaaaaaggcattcattgattgcaggactcctagctgcactttccacgtgctgagttttagccgttcacacatcagtttgcacagctcctgacgataacaacgttgggtctccgcgtttcgcggccaggctttgcccaggctttcaaaggcacccagcagatattccagctggagctccttttccttttcattctcctcttcatttttggttgtccggaccccactgctttcaagtgagttcttcttgatgagaggtatgacaatgttagagaactcctggaatctgtcctctttggtggccttcaagatatcagctgcacagctgattgctacaatcttgtatttgacattctctttgctacattccttcagaacagcttgaagaatttcatttgtgctgggttgattgggcacagacttttccagctctgcactgcaagctgtcaccacacaggcaatggctttcaatagctcctcctttcctgcccacgttcttccagccaggccttgcagcaatgcggtcagtatcattccgagatatggaggtactagagagctagtctgttttgcaattgatngccatgcaattgcaccctgggctttcattttccaggactgagactgcaaagccttctgggtaatagtaattaactcctgcaggtataatcgaatgccaccaaaaggatccagtacggtttcctgccacactttcggccataaat

SEQ ID NO: 435101 - DNA, 1881 bp, Homo Sapiens
  misc_feature (241)..(243): n is a, c, g, or t
  misc_feature (245)..(245): n is a, c, g, or t
  misc_feature (294)..(307): n is a, c, g, or t
tgggtggcgaattcggcacgagggtgagggagggtaaaggggcttagggaaaagggggcataccaggtggggtatttggtttctattttttaattttataccaccactcccccctgaagttgacttacacttccctgtggatttgtggattaattaggaaaaccaatagtaatcacgtctgagccaaggagctggcccattggtcattcacttctgctaaaaacaggtttttgtgactttnnntntttttaaatttaaatcactgtgtttggtatttttctgacaaaattaagnnnnnnnnnnnnnnttatttgtgggcaaatgttaaatttttttgtttccccttttacctcaattgtatcatagtactgggtttttttgtttgttttattgtgtggccaatgtctttgggcatgatgctatctaatcattgttaatgtgagaacatttctgaagatgggaaagacaaattatgtagctcacaaactggtttattatatatatggataaaaaacttttttcattgtggtcttaacacttttatataaaattgaaaatggaaaaaaagtcccactgaactctctcttccttctccttttctttccttccctctccagagatgttggtttctacagcaaccctagatataaaattgtggctttaaaaatgcatgaaaccacctttaattatccagaatgaatagatttgtcttttcctcaccaccttccctccaaaacatgacataaacaatattttttgcacttgtgatccttggcccctttccccattctcaacaccatccatccctctggacaaaggatcatacaggtgttattagcaagcaagagatactgaagcgatcaaacagttttagggtggaagccattcccagtttgagtcttcatcctgtaagcccccaggggcagtccctgctttactgaacttcatcctgttagatggagagcatgcctgtttaagggattactggtcctacagccaggagctaattgttcaagaagtgttgaactttaaaaagacaagaccacttgttgaaatccagcgtgctctgtggctttcccctatttctcttaatacttagggaagaatctgacaggaagaagcgcacaggggtgtgcacaaagaaaatgacatgaatctttatttttcactgccagcttcaaggaaagaaaattttttctacaatttgcatgagggatttcttaattgtatgtactcatggttgtaaaccaaaacgtactgtaccgtacagagaacaaggagcaaaaaccaagtcttctgtttatcctgaggctttccacaatgtttccccctcctgtgagccaaggaggcaactgcacaagcttgtaaatggtcgtctttaaatgtacataagtggaacatctaattacactggacgggacaatggagttctaaaactatgatacaatcataacgtgaccctgtctaacacggctttcacaagactgcgggaaatgtcaaacaatgtgattggggccgggttgtcacacggtgtcgacacttgctttccagccgatatttgttccgtagccaacaccgcggaacaataaaactatagggagtagaaccagaagacacagaccccacagacagcaagcatgacgtgaaactacggtcaacaccgtcggaaacaatccaccttctatctaaaacacacagtagcccggacaaatgcgcgaaaacatgtaggcgcggcggaaaacaaccaagatgaccactggaagagaaactgacacaccacagtaggcggagaccatagagcagaaagaagcaaccttgatgacaaatacttgcagacaaagaaacaagacaggatgacagcgaacacgtaagagacgcacc

SEQ ID NO: 435102 - DNA, 2841 bp, Homo Sapiens
  misc_feature (104)..(120): n is a, c, g, or t
  misc_feature (128)..(129): n is a, c, g, or t
  misc_feature (138)..(139): n is a, c, g, or t
  misc_feature (143)..(333): n is a, c, g, or t
gggggggagaaaccgcgggttttcgtgtcgggtggttcctttggaaaacaaaagaggcccctttttctgtttttttcggggccgcccggccccccccgggtggnnnnnnnnnnnnnnnnngggggggnntggcctccnncccnnnnnnnnnnnnnnnnnnnnnnnnnnnnnnnnnnnnnnnnnnnnnnnnnnnnnnnnnnnnnnnnnnnnnnnnnnnnnnnnnnnnnnnnnnnnnnnnnnnnnnnnnnnnnnnnnnnnnnnnnnnnnnnnnnnnnnnnnnnnnnnnnnnnnnnnnnnnnnnnnnnnnnnnnnnnnnnnnnnnnnnnnnnnnnngttgtgtagtctcatttattatgaagattcttccagtatgtacatacgaaccaaaagtatcagtttatcagtcccactcacatcccacccccacaggcataccaacagggtcaatcttccttcatggtacctagaaaaactgtctttttccttaggtaaatggctaaaaatgtattcatgactgctgcagtaagagcatccacctatgtatctttacatactttgagacagtgtgataaagctctttcagcacagcagtctattcattcaaagtcatctaaccaaataccttcccccacagctaagaaagaatcccagtgtttccctagtttagagatgaagatactgaaattgcaaaagcaaaaaggctaggactaagatccaggtcagtagttcagctataccagcagtacacattagaattacgaagagttttaaaatatacctgtaggggcctattctgactcagaacagcctgggctgtgtgtccttaaagagtacttgagatgactcagttgtgtgactaaggctgcaaaggaggtagagtgttcagataacacagacaaaaggttacatcattcttagtttttagttttatataaacacccccatttttagttttatataaccagataaatatggttcacttttatttaaattcaaatgggtgctatactgtcacgtgcctaatccccactttacaacttcatgctggatgctggtagcaaactaagatatttttctcttttatgtattaaattccacttgtgcttcatgaaacagactataagaacaacaattcaccataatccccctttgccatgaggaaggtaattctggtcagtttgccaggtattgataaagtaaagtaagagaagacagggcagcaaatcagcagaccaaaaacttatggtagaaatgccaggctgaatcaccacacccacagcgcacaggaacaccagcccatatgaatctacagttctacttagaccagcagggacagcaccaagtcacgtgttacaactgaaagcatcacttgacgacatcctgaaaggtcataatcagttgggaatgaaagtcatttttcctttaaaatacaaaaatggcagtgtgtacaacccctccttcactaaggctaaattgaggaaacctgaatatcaaaaacgacagatttaagccattgatcgggtgccacagagacaggaatgatagctattcttccacattactagacattattctccctacacaaaaatggatttagagcttgacagaatttgtcaaaggtctacttttctttgacagctcagccaactcttccctgatgtgttgtacagaaatttcatcttttttcagctttgcttgcttcagtgcttcctggtagatctcttttgcttgtgtatatcgttctctgtgcatcaaaactgcagctagattactgagtaccatgtgtagctcaggatgatttatctgtcttgccagatctgatgccctttgcatataaatataggcctcatcaaagcggccctgtgcatccagggtagtagccaggtcactcatcagcacaatggtctgtgggtgtctttctccttgtatttcttcagaaatctgcagagctttttcatacatcctttgtgcctgtgacggctgcttggagaacagaaggtagcgagcacaggcgtctaagcacatgcccaagaggaggtgggtattggctttctcttccactgacataatgtcttctgctaattccttttctctttcaattttttcctctagagttgaaatgcagaattcatagccagcaacagcaaattcctgtctgttctgcgcagcatagatactggccagctttagggaaatttcaattattgcattgtcctcctgcttcatgccccctccaaggaggtaactcattgttgctttaaaaagttgttcagcattttcaagctgaccccgtataaatgctaagttggccatcaaatcataagtgtaagtgatggccttcttgttatcagtctgataggcgagacgaagagcgtcatgcaaaattaactcagcctcttctggctcatctttcataatgctcaacttggctcgcttcagcagctggatgatctctgcctcggcctcgtccgccccgtcctcggcagcggccccgtcggctccctgctgctcctcctcctctgccgcagcgggcctcgagaaccaggcgagcgctgccagcagcggcagcaggcctgggccccggccgtgcggcgcgactcgggatggcggcacctgcacctcgggccccggacctcctgccagccccgggagcaggcgcgcggagcagccccggcaccgccgccccgcggcccgcaggaagcctcggcccaggctccagctcaggagccggaacatgctcccgccgcgtcctctgcgcactgcaggccagacgcgctcctggcccccgaccacgcgccgagcgccctccggattggccgggccctgacgactgagcaggac

SEQ ID NO: 435103 - DNA, 746 bp, Homo Sapiens
  misc_feature (19)..(19): n is a, c, g, or t
  misc_feature (606)..(606): n is a, c, g, or t
  misc_feature (658)..(658): n is a, c, g, or t
  misc_feature (713)..(713): n is a, c, g, or t
gcccagcggagttcctggngtgtttcatgggagcacccgccctgtcccctggaggaacacactgagggttggtgggcaggtgacccaaagatatggatccccctgacttggtcgacattgcttccccctttctgcaacccctgaaaaggggccctagcctaacttccacctagatgtgtacctgtagcatgaagtgccaggtactgtttctggggaatattcttttgggtgtgaggtggcagacaggcctgcccccatggggaaccctcggcctgagaaccaagcactgggcagcttcagtctgtgggcccagaggcttctcaactttcacccagtcccttccaaaggccacgtgggccagaagactctgcctcagaccctcctgggcccgcagctgaaccctgatcctcatgccagattcgagggtcaggaggcatccagaaacaaggactggaagggcctcagaggtcatctagatagtccagcttttccatcccattttatagatgaggaaatttgaggcccaaagacgaggggagaacttgtccaaggtctcagagctcagtggtggaccctggccagcacctgagtgtcctgctgcctctntccctggacccatgcatcgtctacctggggggatctgcatgggtcccaaatnaagggggcagagagagtcgggtcagctctcttgcccagtctaggggccgtgcctnagcgaggccctgcagggttagaggatgaggcag

SEQ ID NO: 435104 - DNA, 1138 bp, Homo Sapiens
  misc_feature (885)..(885): n is a, c, g, or t
aactcaggggcgagctgccgaggggcttgccggccattccattatggtcggccactcccagcccacgcttgtccacgtccaccttcttttccaggcagagcgctcatggcctgatcaagattcatattgttactctttcaaggcctcctcagctggctctctcgggaagcccatgtctgtgagttgtttgatcagccggctcatgatccaggcctcatcctgcttgccagacgtcttcatgcccttttgaagtccttttttgggggcgttcccccaggagctgcaggaggaggtgctttcttgggaagcagcattattccacacgtccccttcttcatcctcccactgcctggtactgaggatcattttatccccaccactgccccagccttcttgcatagattttgaagctggtttgcacagggctgaggcagcaacaggtgcgccagctcttccaaatgccaccggcggctctgcagggtgatctccccacccgctgccactgctgggtggcttcccccatgctgctgtgccattatccaccagggtagaaggggaggatggttctccccaagagttttcagtctttgagtgaacattaggcatttctccccagcctgatggaactggaccaagcaacggtgatcgattcagctgagtaccggcctggtgcgggggcggcgtctcgaccctgtgtgtggtgttgctcgtggtagtggtggtggtggtggtggtattgttcagagtactgctctggatgaccgggttgattctatcccacatgtttacagttttattgttatagttgcttggttccccccaagctgaggtaccatcatcaatttcccaattttgcggcgaatggacggtggatagggttcttcnccagccagttgcttcactgctgtccttctgtttgaccggtaccggccccccgatccaccctgttcctgtctgtttcaaagaagcagctcctccccagttactcacattgttgtcttggggtttgctagcccagttctgttgggggccaggttttaaagtctccccccagtttgtacctggattggcctttgtatttgtgctgttgccccagccactgttcccagatctcgtggtgtcattccaaccagaccct

SEQ ID NO: 435105 - DNA, 2479 bp, Homo Sapiens
ttttttttggttaaaacacctttaatgatagagggaaagacactaatatctcccgtctgttcttgacattttactaggttaggaagctctggagcctacagcttgaggagaagccatcgttcaagtcagtcaatagcaaaaccctcactctctcctcctcagaactcctgttccaaatgatcctatgttaagagtaaatactacaactcattacaagacggagaggcagggaggacgccacctggagctggtctcccaaagtctgggactcttaagaaccagacaatgacaaagacacaagccccagcctacggataggcaaaatgggtaggggtcttgaaagaggaagataaggaaaatacaaggggccagggaataaaggagggagttatctaaaactagaagcatactagtgctaggaaatcccccatgatccctggtacacctctgcacactatgtcactattagcccaaaagaatattaacgagaatgtccacattcacaagaatttgaggccttttcccttacatcatgtccctttcttagtcacataggtaccagcaagccctatgttctagcaacattccttaactctctcatcattagttcatcaaccatgctgaccaaaaatgctccttaaagatacgaacttcacatttcccaaatatctcctgggagacctcttggcaagaaatcagcttgtttcccaactttgagaggtcatcatgaatgagaagctggagaggtcttggcacactgaccagccaaaacctttaccttaatgtgaccatcaggggatttactgggaaaattttcctatgcccttccttcatttctccctacttcctagggttgggtcaccaattactggagcatcttcagtaccggcaccttctggagcagggggaggaagaaggaatgtacagtttgctacttcttgtctatgatgggcttctcaggcactgccttgggtgcaggaggctgaaataggaggggggctgtcttctccttggcttccctggatcccattgttggaggcaccttcccagccacagttcctaggccaaacagcactggtggggccaggcttggagtggtagtggaggtggagctggaattccagggcttcatgggcaggccatttgacaggaatgccacatactggttctagaaagataggggacccatacccaccagctgagcagaaaggtcaccccagaggagtggcactgggccctccagagacagctgccagccctttttggctaggctgcaatgccaaatgtaggtgctcaggtgcacctaccaaagggaaagggagaggagagaggagggggaagaagggtcacaccagggaagctggagagggttccccttgagaaagctgcagagaatctatgttcctcaggtacaaagaatgaggagggaagaaaaattccttagggggccatccccttgtaagcacagtaatttccaagctcagggactacagaaaagccactagggacataacatgttaagaacttagagaaaaagacaaaatcagggctcataactcttgggaggtccttttgtgaaagctgtttctgcttctgtgggacaaagagccgcaggttcagaaaaacaggctcatgggatcgtggggtcatcttttcggggaaagggggagagccctgtggaggtgatggaaggcgaacagccagggactagagaaagagcagcaatattctgagggccatggggggcaaagggctgtacctggtggtgtgccaggagcatatgcttcttgagggtagcccgctcaagaaagccctgcctgcagaaaacacaagtgaagagcggcccctccttggggtgggtcttctgatgctcctccagagctgcctgggagggaaaggcctggccacacacttcgcaggcctttctgctgctgctctctcctggctcctttctcattgcctcctgcaggctcagctcctctaccaaggtcacgctggtggctttcccttctggggtgagtgctgatgccggacttgagcttctctccggtttgcccccctcttccttgcctcctaaaacaccactgcttccctgctccattggctgaggctgatccaggctgtcaggtggtggtggtggtggcaaagaagactgttgagtagttttctcattactgtccatctccttcccaagctgtaggcttgctgccgccacagtccccacctcctcctctgccccagatgcctcttctgaatcaccatctcactgatattgccttctcacctccactctctgagcctcatccctgccagggaatcttcatcagtcacatcttcctcttcttcctcatcctcctcttcctcctcctcagacaacccctcttccggtgatggctgctgggactgctcgctgggggaaactccctgccccggagactgtagattgctcggagccattctcctgagcagcccctccgct

SEQ ID NO: 435106 - DNA, 953 bp, Homo Sapiens
  misc_feature (46)..(82): n is a, c, g, or t
cgatgtatagatatatgggcgactggagttcacgcggtggcggcgnnnnnnnnnnnnnnnnnnnnnnnnnnnnnnnnnnnnnatcaggccaaatcggccgagctcgaattcgtcgagagcgggcagaggctgccgcagacccagcggccatcgcctccctcaatcacaatatccattgtctcccaccccacctggccctccacttcccccacaaccatggcgcacgaatccgagaggagctctcgtctcggggtgccctgcggggagccggcagagctcggaggtgatgctagcgaggaggatcacccccaagtctgtgccaagtgctgcgcacaattcactgacccaactgaattcctcgcccaccagaacgcatgttctactgaccctcctgtaatggtgataattgggggccaggagaaccccaacaactcttcggcctcctctgaaccccggcctgagggtcacaataatcctcaggtcatggacacagagcatagcaaccccccagattctgggtcctccgtgcccacggatcccacctggggcccagagaggagaggagaggagtctccagggcatttcctggtcgctgccacagaaccagtatgtggcattcctgtcaaatggcctgcccatgaagccctggaattccagctccacctccactaccactccaagcctggccccaccagtgctgtttggcctaggaactgtggctgggaaggtgcctccaacaatgggatccagggaagccagggagaagacagcccccctcctatttcagcctcctgcacccaaaggcaagtgcctgagaaagcccatcatagaccaagaagtagcaaactgtacattccttcttacctcaccctgatccagaaggtgccggtactgaagatgctccagtaattgggtgacccaaacctaggaagtagggacgaattgaaggaacg

SEQ ID NO: 435107 - DNA, 2795 bp, Homo Sapiens
  misc_feature (91)..(143): n is a, c, g, or t
  misc_feature (2163)..(2171): n is a, c, g, or t
  misc_feature (2430)..(2430): n is a, c, g, or t
  misc_feature (2587)..(2587): n is a, c, g, or t
  misc_feature (2674)..(2674): n is a, c, g, or t
  misc_feature (2700)..(2700): n is a, c, g, or t
  misc_feature (2725)..(2726): n is a, c, g, or t
  misc_feature (2753)..(2753): n is a, c, g, or t
agcgggcttttacaatgggagctgctgaagcgtagggaagaagctgaagaaaaaaagggggcgtctcccctttaaagacttgcaaagattnnnnnnnnnnnnnnnnnnnnnnnnnnnnnnnnnnnnnnnnnnnnnnnnnnnnntctgctgtctctgggagaagaagaacactctctgctgtcacagtgatgtgcgctgggggacgaggcatcaagtggcttcggacccaagggggagacgagaccaggtcaccccggttaagaccaagtgagcgttgcccctccctctcccaactctctacccgggaatgtctcggcgaaagcagcggaaaccccaacagttaatctcggactgcgaaggtcccagcgcgtctgagaacggtgatgctagcgaggaggatcacccccaagtctgtgccaagtgctgcgcacaattcactgacccaactgaattcctcgcccaccagaacgcatgttctactgaccctcctgtaatggtgataattgggggccaggagaaccccaacaactcttcggcctcctctgaaccccggcctgagggtcacaataatcctcaggtcatggacacagagcatagcaaccccccagattctgggtcctccgtgcccacggatcccacctggggcccagagaggagaggagaggagtcttcagggcatttcctggtcgctgccacaggtacagcggctgggggaggcgggggcctgatcttggccagtcccaagctgggagcaaccccattacctccagaatcgactccctgctccccctttcttcttcaccacccccttcgtccccaggggtaggcagtggccactctgaatatccccctgatcttggaagagctccgggtgctgcagcagcgggcagatccatcagatgccgatgactgagcaaatctgcaggcaggtgctgttgcttgggttccttaggccagacggtgggtgcccctgccagtccctcagagctacctgggacagggactgcctcttccaccaagcccctactacccctcttcagccccatcaagcctgtccaaaccagcaagacactggcatcttcctcctcctcctcctcttcctcttcaggggcagaaacgcccaagcaggccttcttccacctttaccacccactggggtcacagcatcctttctctgctggaggggttgggcgaagccacaaacccacccctgccccttccccagccttgccaggcagcacagatcagctgattgcctcgcctcatctggcattcccaagcaccacgggactactggcagcacagtgtcttggggcagcccgaggccttgaggccactgcctccccagggctcctgaagccaaagaatggaagtggtgagctgagctacggagaagtgatgggtcccttggagaagcctggtggaaggcacaaatgccgcttctgtgccaaagtatttggcagtgacagtgccctgcagatccaccttcgttcccacacgggtgagaggccctataagtgcaatgtctgtggaaaccgttttaccacccgtggcaacctcaaagtgcatttccaccggcatcgtgagaagtacccacatgtgcagatgaacccacacccagtaccagagcacctagactatgtcattaccagcagtggcttgccttatggtatgtccgtgccaccagagaaggccgaggaggaggcagccactccaggtggagggggttgagcgcaagcctctggtggcctccacaacagcactcagtgccacagagagcctgactctgctctccaccagtgcaggcacagccacggctccaggactccctgctttcaataagtttgtgctcatgaaagcagtggaacccaagaataaagctgatgaaaacacccccccagggagtgagggctcagccatcagtggagtggcagaaagtagcacggcaactcgcatgcaacttagtaagttggtgacttcactaccaagctgggcactgcttaccaaccacttcaagtcgactggcagcttccccttcccctatgtgctatagccacttgggggcctcatcctctgagacatcatagctggagcaactgggtagaaaagattgaccgcgcaaaggagctgtgggccggtgaacttccgccgccctcaggaatnnnnnnnnnaccgcctggccccttgaacccttccatccctcaagacctctttctgggaaccttaaacgaggcggggctccttcccgggcaccccgaaaagggagcttaagccctggagccatctcgtggcgcccatttagagccccctgtctaatattatagaggggccgccagcccagtaggcgccaaagtgcaggtaaaagaagggggcgaaccctcgcttttcgagagaagtaggggagataaaaaaagtcccgtcacgacgatntgtgtggacccagagctgaaagaccccactcccgtatgattggggggatctcgaacgggggagaattgaaggaggagagggggaggggtcccttatggctataaaaatctcccctggaggatgccaggacaagaatgggatcccgaaaaaaatattnttttctttgtaaacccacccctgggggggcgagggaactccgcacaaaacacataggcagggcggcgcccaccgccgaagtactatntccccccacattagattttctgaggnagccacgaccaaggcgggtgcagannaacgaacaagagggaaaaaagggaatngttcaaccatgttgtggcccttgcggcaacaaattaacgctg

SEQ ID NO: 435108 - DNA, 2665 bp, Homo Sapiens
attttataatatctataataaatgcaaagaaatcaatacaaacaaaacttggctttacaaactgtacatacataaatatctttcttttttactataacattcaacttttttcacataaagccttccatgatcttatttattacatctagtttttctttatacctctaaaaaaaagtgccttttagatttacagcttgtgcttctaaagcaaaggttaaaacatcatgccccaaaggaaaacaaggtaaaaaggaagctgccatataagctcttaaaaattgtatgttacaaggttctaaaatctcttcagcactggttggttggtagattgtacgacactgacatggtgcttgggagggtcatttatctgatggttggagcagcaccatgggaaagctgcccagatggtctactgaagtccttggctgtgcacagaatgggccaagggcccagaattcatgagtccggggaactttggaggtccttactcaatctccttagtgctaaggttcagagtctcaaaccagatttcttccaaaccttcttgttgtctgtttgttcccccgtcactgtttatcttccacctctgaagccataatttgcacacatgtgatctggaggagggctaaagctgccacaccgatggctttcgccaagatcaaggtcctcttgttggtagtttgggattgcttatgacccgatcctccttatgctaccagcacttctgcagatggcatctgcttagttcagagtggaggagggccattcgtgtatctgagcatggggtggaatgaccgggcaaagttgttggagagggcacagctgtagtcttcctctgacattggtacaaggcatgcaagcccgatgaggaggagcaggagaagctgaaggggaagagctgctcggaggactctgaacaggaagccgcggccggaccgacctggccctggctcagaaagggaggaatcggagccaccttttgtggaccgttttctgtctgtttggggtgctccttcctgatgtgggactcacagaccctgaggtgtccagttcatcagcagaagaccaggaagacaaatcctgctgcctacttgacacgtctaataacttctccagtttccttgatatgacgactgacctccttcaagagaagtttgagccgatttccaataacatggactttttctttggcttctaaacagtctgttccttcagcattcaccagtagttggcaagacatgtcttgcaaagaggctactctgagttgggattccaacagctcatgctttatttgcataagctgtttgtgatggtcctgaagtatctctgcatcaaggttagaatcaatagggacaatttcatttttccttctgtcaatgttctccagcataagaagcaaaccatggctcatttcatggaaaccctggcactgcatcagggcatcctgcagcaggccccgccactcctccagcagagagcacactcggtcccagcgcccattcatctgcgacaagcgatcctgcaggtcccggctctccttgctgtcagcctgggtgaactcagggctgcagagattgatggagaggatgatggctttgcggtggtccacagctttctggagctccttgagctttttgatctggagctcgatggtctggatgtcagtgctgagttccagacgctggagctgttccaactcctcctccgtgtcccccagccaggcccagatgctgttcaagtctgagttaaactgctgccacttctggaggttctgcttcatcctcaactccttgctcaatgcctgggcctggagaagctcccatcggtcaatcacaccagccgtttgggtttcggtactatgcaggttaacaaagccaggaaggctctcctcttcctccttcagtttgtgctccagtctcttcacggagtctatactgctactgcattcgcccagcagtttcatgtagcctttgtagctggtgtctagctccggccccgtgggagttttgctgcgaatgatattttcggtttgctgtatctgaaagcggctatcatccagggctttgcccagttgtcggatctgtgactctagggcactgtggtcccctgataaggcaacagctccccggaggtagaaatctttgtcatcctgaccttcttcatcctcagagggcagagctctggacattgcagactccaggtcccgactgaggtcatagtcgtgatcccactccagggggatggagtccacactagccggggtgtctcgtcctgaaccgctcgctccggaggggctgaagcgaagcgaagagggagagattggaggaaggctgtggagaaagcaggctgtctgcagagcggtcgtgccagtgcaggtccgacagagctgcagagtcttccagctccagctccctgtctgagaggtcgtgctcatcgtctgggagaggcaggcggatcagtttcttatggtatctttccacacgcccgaagacctcctggcagtaccgtcggagctcatctagttcctcctcgatgatcgctgcatccaagggctcactcttttctatcagctgttctccttgggcaattatctgctcaatcttattgtggttcagtgaaatttcctgctggaaggccttgagttgctttattttagcttgaacat

SEQ ID NO: 435109 - DNA, 637 bp, Homo Sapiens
  misc_feature (34)..(34): n is a, c, g, or t
cgatgagtaaatcttggcgatgagtaaatcttgntcgatgagtaaatcttggcatctccaaaaaggcattttaaatctgtatttcctaattgttcgagaaacataaaagaaatttttggagatgccaagttcaaatatgacaagactctaaggagaaaaactggatattaaaggtttaaaaaaacaagttgacaaggagaacagagaaggcaggtcttgttatctagagctagacaccagctaatatcttggtagtcaactacttgatagagttgctttgtcatctatcagtggagaaagaaagtttttcgtctctgtctgtgatctctctctccagtggaaagaaggtgcaggcagagttgctggtgttatcaagggtgtgggagtggaggttactttcctttctgagttaacacttgatgttttggagcagtggcattgtaaagtgtcctaggaaaaagtccagtctagaaaggacagattaggggaatgaaaagcagcagttggttgaattttacacgatgaggttcttagggggcttagggtactaccactcagaatgcactaggcacgatttactcatcgaccaagattactcatcggccacgatttactcctcgggcaagattactcatcg

SEQ ID NO: 435110 - DNA, 478 bp, Homo Sapiens
atacatcagctcggtcccgatgagtaatcttggcgatgagtaaatcttggcgtgagtaaatcttggccgatgagtaaatattggccacccaggctgacagcaaggagagccgggacctgcaggatcgcttgtcgcagatgaatgggcgctgggaccgagtgtgctctctgctggaggagtggcggggcctgctgcaggatgccctgatgcagtgccagggtttccatgaaatgagccatggtttgcttcttatgctggagaacattgacagaaggaaaaatgaaattgtccctattgattctaaccttgatgcagagatacttcaggaccatcacaaacagcttatgcaaataaagcatgagctgttggaatcccaactcagagtagcctctttgcacgacatgtcttgccaagatttactcatcgccaagatttactcatcgaccaagatttactcatcgccaagatttactcatcg

SEQ ID NO: 435111 - DNA, 506 bp, Homo Sapiens
gggaaacccggatcacagttgtaccagggacagagaacccttggccccacagatctaccaagccaacagcatctgcttccagagtccctatgtgattacagtggggccaagatttactcatcgacccggatttactcagcggccaagatttactcatccgaccaggatttactcatcaggccaagatttactcatgcgaccaagatttactcatcggcacaagatttactcatcggccaaggatttactcatgcgaccaggatttactcatcgggccaagatttactcatcggccaagatttactcatcggccaagatttactcatcggccaagatttactcatcggccaagatttactcatcggccaagatttactcatgagcgccccgatttactcctcgcacacaacgagtctactcatctgctcacgagatttactcactcgcccgagacttgtagatcgatcacccaagattctcactcgggccacagatatacgttatcg

SEQ ID NO: 435112 - DNA, 598 bp, Homo Sapiens
cattgcttcctcttttatttcaaaatggcttaagtcatttttaaaaaagttgatgatttcatatttattttcagtcctcactaagccacctctcactccccagatcctgtgtaccaagtctgagaatgccaggcttgtggtgcagatcgacaacgccaagctggctgcggatgatttcagaaccaagtaccagaccgagctgtccctgcggcagctggtggagtcggacatcaacggtctgcgcaggatcctggatgagctgaccctgtgcaagtccgacctgggaggcccaggtggagtccctgaaggaggagctgctctgcctcaagagcaaccatgagcaggaggtcaataccctgcgctgccagcttggagaccgcctcaatgtggaggtggatgctgctcccactgtggacctgaatcgggtgctgaacgagaccaggagtcagtatgaggccctggtggaaaccaaccgcaggatagtggagcaatggttcaccacgcagaccgaggagcttgaacaagcaggtggtatccagctcagagcagctgcagtcctaccaggcggagatcatcgagctgagacggacagtcaacg

SEQ ID NO: 435113 - DNA, 348 bp, Homo Sapiens
  misc_feature (37)..(37): n is a, c, g, or t
  misc_feature (76)..(76): n is a, c, g, or t
  misc_feature (101)..(101): n is a, c, g, or t
aggaaccatggggtgggtgtgtgagtgcccagtgttnaagaaccgaaggggagggagtggggtagggggtgggcanaagcacattctcaggccttccctgnacaatcctgccctgtctgcgagctccagggcccattttcaggcaggaagttggagagggtgaggtggtttccttagtgggaccagcacattcgactgtctgagagggtctccctcttcacatgactcggcccctcccctagtgcccccttagtctggggtgggggaacccatggccctcctgccctgcgccatcccattgtgggggccacactcaccgtagcaggcaggcaggcaggcagtagtgac

SEQ ID NO: 435114 - DNA, 1293 bp, Homo Sapiens
cccagtgccgccgcctttattcacagaccctcgagctccacagccacacagacacttagctttcagagggcacaggaaggaaaagggacctggtgaccctcccagcacaccccagagccaagacagacccagcagcagcacctcagggtcagcctgggtgcccctgcccaggggccactgtgaccgcagacaccaggaggccaggcctggttgctggggacccccttggggggcccggcagtatcctaggcccaaagagctggtgccatcttgaagctgattcagggaagaggccaggctggacggtaggggtaggtgtgagaagctccccagcgtgtccaggccacgggagcagcaagggtctgcggggagcccaggctggatggggtggggctgcccttgtcctgtatcctgaccacttcaaggacaaaaccagcccagtcccagcagcctgggaggcagcagaggctccttcttctcccctcctgatcctgcagtggccaggggcaggagggtgaggggagaggagagaggtcaggtcagggcccctgggggccaggcagcttcaaaaatgcagccaggtggctgggggagggcaggagggtgggcagggcccagacccccatgatgggggcagcctgagacccccaaggatgaaggaagggggcttgggaaggagaggcaggcctcagccgtcagtcacgccagtgctgggatctgcagcccgctggagcaaggcacccccatcccaggggcaggaccacaggacaggagggaaccgacacctcgcaccctgatcttccggaggccggggaggggcaccgggcgctctaggacttcttggcatcctgcgtgctccggcgcttcaggtcactcaggtcgatgggcttgaaggtcttcaggctggggttagggaccttctccacatactcctccaccaggccccgctcgccacccggcacctggcctcgcaggtctcgctccacaccctgccaggcttcgtaaatgaagcggacgttctcctcgtgggctggggtgaagatctcgctgctgctgggtggggagcgggggctgctggtcctcttgccgttgtacacgactctggagacgggggagctggtcatcgcgggggcgtctgatcctagcgctccaccgccagatcccctcagcctctcgccccgacccgccgccaccgcctccgacgcgtgggtcgacgatatcccggaattccgaccgtaccagcctgcattaaatacccaggtttcatattaacctatgcttcttccttgcttt

SEQ ID NO: 435115 - DNA, 744 bp, Homo Sapiens
  misc_feature (205)..(206): n is a, c, g, or t
  misc_feature (218)..(218): n is a, c, g, or t
  misc_feature (223)..(223): n is a, c, g, or t
  misc_feature (293)..(293): n is a, c, g, or t
  misc_feature (307)..(307): n is a, c, g, or t
  misc_feature (327)..(327): n is a, c, g, or t
  misc_feature (335)..(335): n is a, c, g, or t
  misc_feature (387)..(387): n is a, c, g, or t
agccctccccctcaactcccagtgggctgtcccgactaatggttcttgagatgtccccaaagccttttagccgtgttgctcttttgtaagcagtaagatgaccccatagggtcctaatggaactaaatgccttaagcaatgcaacagggtcccaagtgcttgcctctgtgaaaaggctgctgagcatgctatagttcccattatnnatcttcccctcnaatgnagctctggggcatgctgtctcaatggcccatatccctgttggaaaagcacacagaaagcaaatctgtttntgcgtttgtaaagnatgtctgtgattctttctanctggtctntgtcctgacagagaaagaacagggtccccttgggtcctgaaggaggggcccnaggctcactcaggtatctgtagaggttctggttgaggttcattcattcaccagatatatatgaaaaatgtaatttatgcagtcacttttccagtggcttggcataatttagtaaagaaagcagattgacaatgcctgggcctcaattctacttggaagtgtcagatacttccagtagagcgcataagcaggtcatatccacagaatgttagatgtgacagcctcatggcctcctctaggtatggtggcatcttcccaggttctgggactaggatgacatagcccaggaacaagtataaactgggtggatttagggttctgaagggtcttttgacttccaaacatacgtggaggaaat

SEQ ID NO: 435116 - DNA, 800 bp, Homo Sapiens
gagccacaggagagggaccttgcaccctctttgcttcctcggttttttcaaaaatatatatacacatagcaatgtcctcctccccatgtcctccctgccttgggacccgtcctctcacccccagcagttgccatggggtttccttccagattcgaggatccttgccacttgaagcctggactcagggtgctccagcggtggggagtggtgagggccttccagagatcctcgtactctttctcccgtcttcttcttccgcacttttcccgtggaggtctagctctgtggcctcagacctctgggcctgtgtgagctctctgtgagctctggctggcggagaagggcaggtgtccggagctgtcggggtgaaggcttccctggggctcctctggccgtatggggctaggagagcgctctgtagagttgtggccaaacttcagctggcttggccctctctctgacctcagggcctggccacacacttccatgtgtctttttgcctgctggaggacacggaccattgatgcacttggtgggtgggaccctgcttgtgttggccccacgtggggcagtgcttcctctctcgagccagtctatgccctttctccagtaggccccagcccagacctcttcggcttcaggaacttgcctcgccctgcaacgttcttatcctgatcaaagtccagacaggttttggggggggctcaggtctgggatgagaagggcactggcctccctcacccatatttgatgccccccggcatttccttacacctgaccaggcttcagttgctgacggg

SEQ ID NO: 435117 - DNA, 1666 bp, Homo Sapiens
ttttttttcatatttcaaatagtttaattttaaaaatattctattcagtgctaaaatatgtcttcactcactgttgcccatttccattttcttaaacttttttgaaacaaaaaataaaatcacaaagttcaattcaacatgcagatttcaaagaaaagggagctttctagaaactgagctgaaggggtactgtgggggatgggtactgttgtcagaacctcaaattcttgctggggcagtttgtgacaagaggcagggatgctggaatgacaggtagaggtgagaacaaagctgcgtgtgtgcagatgtgtgtgctgagggcaggggatggggacggcggccacaaagggctgtcagcagctagggtgcccgtgagaggtaggaccacctcaggcatgggcagagctggcaggacagcaagaaatctagacggactctctgcccttgtgtggagaaaagcccttcccttccctccaatgtctctacccagtcctccaacagcagcctacagggcccccagtcctaggggaaagtccgggagtctacagtctccgttcaagttcaagtaacctgaggcacgctctcttctagaaggtgccttccacatctctctcttctcgcagaagctgccagcagctccgtccagagattctggagcagagactgctgcctggaggtcacagatgaatcttggggtggccgatgctccagccaacttggggtgcaaaaaagacatgagcgctcctcttctcgggagcaagtagacacaggtgccagggtcaggaagatgatgctacagccccaagtcctacgccagccttccagcccggaaggctcatgtgtgcaggctcttgaccccagtgcttgcccttaccccagcaacgcggcgcggccagaaccagaatgcaataaatagaggcagggccaggaggcggagggccgggatggtgctagctttctgacgccgtctgcggcactgtgggttggtccacacagaagcgcttcaggggcggggcacctgagtcttcctcttcctcaacgacctgtgtctctagtggaactggttcttccttggtgagggtaggaggttcatcagcaacttccgaggagggcagggagggctcctccaggatctcctggcccagcgttgggggctgggagtcatccgtgcggaagtcggaggtgtgtgctgggctcagggactcactctgctgggggctggggcttgagttggtgctgctgtccaccttaagctgatagacgtcagacacggaactctggttgctgttttcgtcctggaattcaagaaggagagaggaattggctgaggcatcagaaggaaagccattaggttctcgggctgctgaactgttcgattttgacttttctttctccttgctgtctgtcacaggaacccacttaaatatcctcagggacgtgtcacccacagtcacccacttcttctccccaacttcaacgcctgaatacgcagagcgctcagcctggcgggctgacaccactccagggctactcgctattatcaagaggaagcctggaaacgcaggcggggccactgcccaggaagaggggagggcgggccccgggctgggccgggcgcgggcaccgacgccaggcagctccagtccgggccggaagccggaatccc

SEQ ID NO: 435118 - DNA, 993 bp, Homo Sapiens
  misc_feature (842)..(842): n is a, c, g, or t
ggtccggaattcccgggatggcgggcgggcggcggcgcgtgaggcgcgcgatccccggtgtcttgggagcagtgccccggcccccgccgctcccgccgccgccatgtcgggccggtcggtccgggcggagacccgcagccgggccaaggacgacatcaagaaggtgatggcggccatcgagaaagtgcggaaatgggagaagaagtgggtgactgtgggtgacacgtccctgaggatatttaagtgggttcctgtgacagacagcaaggagaaagaaaagtcaaaatcgaacagttcagcagcccgagaacctaatggctttccttctgatgcctcagccaattcctctctccttcttgaattccaggacgaaaacagcaaccagagttccgtgtctgacgtctatcagcttaaggtggacagcagcaccaactcaagccccagcccccagcagagtgagtccctgagcccagcacacacctccgacttccgcacggatgactcccagcccccaacgctgggccaggagatcctggaggagccctccctgccctcctcggaagttgctgatgaacctcctaccctcaccaaggaagaaccagttccactagagacacaggtcgttgaggaagaggaagactcaggtgccccgcccctgaagcgcttctgtgtggaccaagccacagtgccgcagacggcgtcagaaagctagcaccatcccgggccctccgcctcctggccctgcctctatttattgcattctggttctggccgcgccgcgttgctggggtaagggcaaggcactgggggtcaagatgcctgcacacatgatgcctttccgnggctggcagggctggcgttaggacttgggggctgtagcatccatcttcctgaccttggcccctgtgtcttctttgctcccgataagaggagcgcccatggtctttttgcgccccaagtgttggagcttggcaccaagatttctgtgcctcg

SEQ ID NO: 435119 - DNA, 917 bp, Homo Sapiens
aaaaaataaaagccaaaataacacttttaagatcccaggttttagacaaggcagctgtagtctctccatcatcctcactgtccatttgcttcttcctgggacagacactgtggcccagtgaagctgaggggaccctgggattcaaagctggtggaatggaccctccctccccccacaagctgtaataacctgctggaatcccacacaacctgagggcttcacttgtcaacagctcccttccctcagaggctattttgaggcaggcattcggtgttttatgactgagctacccaggagaatggtttgaggccacactcaactgttccaaggagcagcactggaccaaaggctgcttggttccctgcggttcctgatgccaccccttctcttcagggtggttacctagaagacaacagtacattgaggcttccagcccagccctaggagatccatcccaaagaccccacagagacctgcatgggaggtggggccacaggtctggtatcaggcaaacctaggttggaacactggctccataaagaggaagtcacttaaccttctctggggcatggtttcttcatctgttcccacctctgaagactatcgtaagacagaatgaaagttaagcaacttaacgcaacgcccaggataccagaattattctaaatggcagaatcctacttagtctgtcatcttgggagttctctaggcaggcaggttgccaggggtggggctgagatccagatgtgctctaggtccctgtctgctgcagaatcatgtggctgctggacctgggggtcccccaggttcttgcaggagctgagggtaggagactccatttgccaaacaacttagaactttgggcctcagtttccttgtctttaaaaggaacaggtaaagaattataaaaacaattg

SEQ ID NO: 435120 - DNA, 411 bp, Homo Sapiens
  misc_feature (45)..(45): n is a, c, g, or t
tggcagaggagagcgagccaggagagactgctgggtggcacccgnacttccccatcaatgatgccaagctgaggtctccctggaggcttctcgtgccacgcgtgtgctctttctccctgagactgaggccacacaggctggtgggccccgaatgtcctatccccgaggcctccccctgtcccctccctgcagagcccccagggcagctgctgcctcagaagatatcgacacccaagtcctctttttctcaactgccacgtgcagggtggtgttacccagcccccacaagcctgagtgcagtggcagacctcagctctctggacccctcctacagcactagagctaaatcatgaagttgaattgtaggaatttaccaccgtagtgtatctgaatcataaactagattatcat

SEQ ID NO: 435121 - DNA, 2304 bp, Homo Sapiens
  misc_feature (174)..(212): n is a, c, g, or t
  misc_feature (252)..(252): n is a, c, g, or t
  misc_feature (260)..(312): n is a, c, g, or t
aatccagtgtcagactctgcagcaagacgtcaggtggggggaccagcaagggaggcgggaggtaaaaatagctccggccagccgaccctcggagccttgtcccaggctgggccttgggcttgggtccaggagctattctggggcctgggaaagtcacattccctggaggaaggnnnnnnnnnnnnnnnnnnnnnnnnnnnnnnnnnnnnnnnggaggcaggcagccactgtgggtccctgccttgccggcanaggaaggnnnnnnnnnnnnnnnnnnnnnnnnnnnnnnnnnnnnnnnnnnnnnnnnnnnnncatggcgtgagcagggctggttctctgatgcctgcagctccaggtccagggacagcctctaggaggttcttggctcagcactcgtctccgaaacccccgctgccacccctggctcctccggagcacctcccatgagaaaggccggtctgctctggttgctccgacccccgagtggttcagccctggctcccctggcggcggagcccccttcttcccgccgctggcggcagcaggggccccctttgcgtctcacgcagtagaagacagcaacgacgaggagcaggaggcccacgctgacggccacggccatgacggccactccagcctgggaggtctgggggctcacggtgccgaagtggaagacatggcgcttgttcccgtgggggttggaggcttcacaggagatgccatcgcggctcagggcgctggtcactttcagggtcagagagctgctcacccaaccctgccgtccggggattggctctgcggggctgccccccaattggctccagctgagtttggggtctggatggccgcgggcagagcagatgagtgtgacttcgtctccttccctccagctgccatctgccttgggctctatttccgctgtctttagctctggcgagccttggaccagcagcgtgaagttctgggtgcggctgaggaccgggactgtgggcagggaggcctcacatacgtaggtgccattggaatcgaaggtgatagaactgagcgacagcatggggccatcgcccaggggagtggagtccttggtccagcgtagggcaggggtgggcaggccgtgcacggagcagttcacgactgcactgctgtttagaggtaaggaaagcaccttcccctcgctgagctccagggggtccagataggccacgcgcagctccagcgtcttggagagctgcacgtcatctgccgcgtcgtaatcctccactctgcagccataggtcccgctctggccccgggtcactccctccagggtcaagttcccctcgagattcacattcagcacttcctcctgctcatcctgaaggcggaaaagcgtatactccgggctggggctgccgtccccccggcagagcagctggacagtgtcaccctcgcgtacccagcctgctggggtggacgggctgcccacccagaactgcacgtgctccgtgggatagtgcagggtgaggtggaaggtggggctgtccaggcggccgtggcggccctcgggcaggctgtagtgggcggcgcagtggaagctggcgtctcggtcatccttgcggagccgcaggtagagggtgctggtgagggagagcaggcccgaggcctcccggaccgtgcggctggtcatgtagccctctgggttcatctctacgggcacctccaggcgctgcccgttgcgataccacgtgatcttgggggccgggttcccgttccggctgttgcaggtggcgatctcctgggcagagtcctccatcacagacagtgtccctttgttgggggagacctcagtggcctctggctttgcaaacacgttgagccgcgcagtggcctcagcagtgcctgccgcccctgccctcaccacgcacacgtagtctcgctcgtcgcccacctgggcctcagccagcaccaggcgtccctgggagtccagctggtatgggggactgcggccccgggtgtcgtgcattgtgacctggagctcagagccctgcatctcagccgaggctaggcgggggcgagctcccgagcggtcggtaaggaaccattccagcatataatggtcgtgggttcccgtaggggtgcagtccagaatgacagactttcctcgcatcacctccaccagcgggggtacagacaagcgcacctccgcctgggcatctgggtgcgccgccagcaggactgcgagcaacagcagccgcggggccccgcgcgcctgggccggtgcgtccgggggctccatttcaatcccgggaattccggaccggtacc

SEQ ID NO: 435122 - DNA, 745 bp, Homo Sapiens
  misc_feature (70)..(114): n is a, c, g, or t
  misc_feature (363)..(416): n is a, c, g, or t
tttttttgatgtgacaaacagcatttattccagactccagtgtccacagatgatggggtggggcggaggnnnnnnnnnnnnnnnnnnnnnnnnnnnnnnnnnnnnnnnnnnnnnaatccagtgtcagactctgcagcaagacgtcaggtggggggaccagcaagggaggcgggaggtaaaaatagctccggccagccgaccctcggagccttgtcccaggctgggccttgggcttgggtccaggagctattctggggcctgggagagtcacattccctggaggaaggccccctcccacccacccaccctccctctccttccctcccggaggcaggcagccactgtgggtccctgccttgccgnnnnnnnnnnnnnnnnnnnnnnnnnnnnnnnnnnnnnnnnnnnnnnnnnnnnnncgggggcggccatggcgtgagcagggctggttctctgatgccttgagctccaggtccagggacaggctttaggaggttcttggctcaacactcgtcttcgaagcccccggtgccaccccttgcttctccggaggcaccttccatgagaaggccggtctgctctggttgcttcgaccccgattggctcagccctgggttccctggcgggggaagccccttcttccggcggttgggggaggaggggcccccttttcgtcttaatcattagaaagaacctcacgacgaagaagcaggaggcccacgctgtacggccacgccatgacgggcac

SEQ ID NO: 435123 - DNA, 1536 bp, Homo Sapiens
  misc_feature (31)..(31): n is a, c, g, or t
  misc_feature (73)..(75): n is a, c, g, or t
  misc_feature (472)..(480): n is a, c, g, or t
caagggggaaaatgaacactggggatctagnacctgaaagtatctctaagggtattttcactatgctcactgnnnagcttccaatgctccagaagggcttgaaaaaatactttttcttgctggtgtgagctgactgggtatcattattagggtcacgaatacgaatgatgtatacatataaatgcagagaggactggaaagattcctatcaagctgagtaaaaagaggagtatactgggtgaggagatgagaagggactttgttttcttctaatacaggagtaccaattgcttgaagtgaatgtgggcagtctggctccaggacctacactcttggctatgggacctcttcatctgtctgcatccctgctgccctcgtgccaccgggattggccagcataataggcaaaccataaagccatgtgatctttgtagttcctccattaactaaatttctatgattatcttacagnnnnnnnnnggaaatgccaaagggaggagtaaaaaggaacagacatatccagtttcaatacattctccttaaaccaggtttccttgcagaatacttagtttctgttttttatcggttgtttgcttttcctgatgaaaagtttcttacgtaatgagctgccctttcttctggatgaaaggaacaaagaagttggcgaacaatgatgccatgaatctcactctttgcagagtttctaaaacaggatctaacttttgacccaaacaagttgacaaggtttctataagtcccaatttccctggcagatttagaggcgaaagtttaaagaaaagataaaagggtaaggagtaaagttctaaggaccacatgaacaattctctgattgactctgactctgggtagcaggcctttcctgctaacaaagctaagatggagccaaaggtcagaaagctttggcagagaaagctattttgccaatgacacatgctgacagaatcagggtatgtgcaacgatagagccattatctggaaaaaatcaagccttggggcattacaagtttgaggaatttaacagagtagtgattagagccctggaaaaaacagattttaagcagagttttactttcaagagacatcttggagaaactggtccactggatttcaataccttctaatggaagaggggatgtcagatctcattaagaaccaaatttggagaatgatgaaagaaaagtacctgtttattgacatagcaaacattatccccactgtgaaacaaaccttaatctaagaggtccatacaaacccttctggctaagcctcaacttaaaaaacaaatcatatctaatttgttctggtcttgccccactgacctttttctgctgttaaggaacacatgggtttgcaccctgaaggaacacagtttctaggttcctgaccttctgtaggagatattgaatgagttgccaacttgaagatctgtattatttcttgctgtagttgtgtccaaaaaaagaaaacggtcattttaaaaatttaagagtcctggtcaggcacagtggctcacac

SEQ ID NO: 435124 - DNA, 216 bp, Homo Sapiens
aattttaaggcctgaagtcaatattaaaaatatgagatatgagaaactgagttggctctgacaagtagtttttatagtgtcacaaatggttcatatatttcagtttccattttagctatttttgggacagaattttattttaatggaaaagatccttccactcagctactaaaataaggattaaggaatatcccagagtaattggagtttttcttt

SEQ ID NO: 435125 - DNA, 240 bp, Homo Sapiens
  misc_feature (204)..(204): n is a, c, g, or t
tgtggcttagggtgacatagggacctacacacagaggagtgaacttagggttctagggactatggccgggtcaccggtggccaggggcagagatgagcacctgtccatgtaagccatatgccacccccacagggcctggcaaggtgcagagggtgcaggtttcggccatgtacccctttgcccctttctgagaggggcagatgnccagcccagtgacccagagcctcaccccaggaagcg

SEQ ID NO: 435126 - DNA, 1005 bp, Homo Sapiens
  misc_feature (921)..(957): n is a, c, g, or t
tggagaacttgaacatttaatatggtcagcaccttgtaaggtgaaggtgtgttttttacacaaattataaataatgaaaaatatgcatttagaaaaagaagcagcagtccccttggcgggccggctcgaggactctttggttgagtggcaggtgaggccctgggtccagggtctgtcagagcccccctaggtcatctgccaggaaggccagcaggtagcggctgacatgtctgtcgatgatgacaggcgagaaaccgaggacgcgccgggtccctggcaggcccttggggtctggcggatagcagtacaggagcagggccagtcccacagcaaggcccaggccagccaggaagctcatgggtcccctgttactcagctcgccgctctggctgcccgagtctagctctgtgcaatctgagttctgcagagcgtggcggctgggcaggcggctgtgcaggggctgggcatggatatacagggctcggtagaactcctggcagtcccgctcaccgctccgctgcaggtggctcaggaggtcacaaagccgcacacgcaaggatgccttggggttccggaacttttccgcctccttgttggtaaggatctgtgggtagtaacggttcagctggaggatgatcctgtccacctgctgctcactcaagcgcccatggcctgtcaggaaaggcgtgtcctgcaccaggcggtcacaataggtctgatctgtcatggcgacggacacagcgccgcccgcagtccccagcggtctgccccgccgcgcgtccgcccctcggtcagccgcccggtccaccagctccagcgaacgccgcccgcgggccgtgctcgcccgccccttttggctaggccagccccccggcttttccgctctcgacgaattcggagctcggccgatttggcctgatnnnnnnnnnnnnnnnnnnnnnnnnnnnnnnnnnnnnncggccgccccgcggtgaagctccattcgccctatagtgatctatactc

SEQ ID NO: 435127 - DNA, 1829 bp, Homo Sapiens
  misc_feature (175)..(286): n is a, c, g, or t
  misc_feature (707)..(707): n is a, c, g, or t
ggcggggaatgttttgtgggagttatagaccggggggggttgtgaagagaaggcggcggagtggggaagcggaaaaggggtgggggggtacatggcgagtgcggagggtggaattgggtttggggggctgagaaggagaggtaaacatgtacagggggagaagggaacgtatgtnnnnnnnnnnnnnnnnnnnnnnnnnnnnnnnnnnnnnnnnnnnnnnnnnnnnnnnnnnnnnnnnnnnnnnnnnnnnnnnnnnnnnnnnnnnnnnnnnnnnnnnnnnnnnnnnaaggtaggcgagggggttaggagaggagctgcatggaaccggacagggcggaaacatgggttttgcgcctggaggctagccgtggtcagggaagtatgcccagttggggtcttattcgtttgctgcaattcctgggacgggcttaaaggcacccgggagccccagagggtgctctacctccagtggggccaaggcttggccctgcctggttttgaaagccccctgtggcatactcgtggctggggagggagagccagtcccacctgcagggctgggcctcccctcgagctctccccgcccaccgtctgcactgtgttctgtgaggcgtggggaggcctccagggggtcagagaccacagcccagtagcctgggacaagccgcccagtccctctggtctctgtcctgttgtctaagggccanaggggcagtagcccctcctccaggggccctgagcacagaggcgttagatcagagttgccatcttcaacttgatatgccccccacatcccagcagctctgtgggcccaggctactggcatccacatgactcccagggcctgagtccacactgcctgaggacaggagcctcaaaactgaaatgcacgtgcttcggaccagccatccgtgcctgacaatgtcctatggaaacacccacacgtgtgcagatcgctgcaatgaaagggtccgtcatggggttgggtaattcccagctgggaccgcctaggagcgccattgcagctgtgggaacaaggttgctgtccacacagacatgaagggatccccgtggaatgaggttagaaaaggaagggcaagagtggacgtataagatgccccatgctgtgtgaaaactgccatgagagagtagtcggaggaaggggggagaaagtgggagacagagaccatacatctgcactgcctgtgcctgccacactctcccctcggggccagaggtgtggcctctggggtaggggctgaggcgagaggggatgccaggcctgggcttgcagcagacttgggtggtcatggaggacatccatgccatcaacggcaggctggggtgccctccccgggccagcaccaagcatgcatggttggtgatgtggaacttacgcagagcgtggcggctgggcaggcggctgtgcaggggctgggcatggatatacagggctcggtagaactcctggcagtcccgctcaccgctccgctgcaggtggctcaggaggtcacagagccgcacacgcaaggatgccttggggttccggaactcctcagcaccttttccgcctccttgttggtaaggatctgtgggtagtaacggttcagctggaggatgatcctgtccacctgctgctcactcaagcgcccatggcctgtcaggaaaggcgtgtcctgcaccaggcggtcacaataggtctgatctgtcatggcgacggacacagcgccgcccgcagtccccagcggtctgccccgccgcgcgtccgcccctcggtcagccgcccggtccaccagctccagcgaacgccgcccgcggccgtgctcgcc

SEQ ID NO: 435128 - DNA, 577 bp, Homo Sapiens
  misc_feature (469)..(469): n is a, c, g, or t
  misc_feature (547)..(547): n is a, c, g, or t
cagttttatcttgtatacatataatgtggaatgatgaagaggatctaaaattgtaccactgggatgcatcttcacatactaattgatgaaagccactcaccggtatcagcatgtgtctatgctgggctaaccatggtaacctaattatagtacagaccatcaactcaaaggtattgtttgatttggccttttccataataagagcactacgatcaatgatactccattttcaaattgaactgtgtcttttcaatgccatgccaaagccactgctgccccattaatttttaatctcactcttcatgtatcttcaggaacactacaaccctttggttttcaccagtaactctagccaccatctcctttaatgggtcttcctcattttctcaatatctaaatgctagagcatccaaagcatggtctcagacacatatgttcctactcccacatacactctatctctagatcntcatcctttcccacagcgattaagtattatctctacctccaaattcccccccagctcaagcttcctatttacactttnaaaaccaaaaccttaatctgtgggtttaat

SEQ ID NO: 435129 - DNA, 181 bp, Homo Sapiens
agggagggttggttttctctgagtgcatgattttttataaaaatgctattttgccagttttagatccatattaaacccacagattaaggttttggtttttaaagtgtaaataggaagcttgagctggggggaatttggaggtagagataatactaatccctgtgaaaagtagtaccggcct

SEQ ID NO: 435130 - DNA, 425 bp, Homo Sapiens
gtttatcggatgccacctgttgattccaaaaacaaaacaaaataataattatctttgattattgaagagaaggggtactttctcaccaatcagaactgaagtgtaaaattaatatatctgacgagactgatactgtagatggagtttggcacaaaaatgtgcaaattttcaaatgatttgatatttctacagcaagatattacagataacagttctacagcttaaaaaaacctacgatttggaaataaaaaaatgaagagttatgtaacttttttaaaattcactttatcgaatgatacattttgttaaaaaaaagtttacacagttagaaatgaagcacaggtcagcagtatctttacaatactaaaaaactaaatcaaggactttctttttaaacattccctcccctttccccctaaaatgtt

SEQ ID NO: 435131 - DNA, 586 bp, Homo Sapiens
cggaagcacactgcaacacaggaatgtccactaggggcgatttctcatcaccccctttgacttggggtggcctcttcaccacctccttcaccaggtgcagcagcgtgtcagtctgcagggtgctgagtgcacacaccaagtcgacaagggttagctgggatgcacttgccgttgggataatcttcatcttactgtgacgctgggctttctttctgctccacactgccgcaacagccgctgtcaactgaaccccaagatgggccgtcaaggggtttaagaagtctaaaattttttgtcttatggttttggtggttttaaagtaaacggaagaggatcccttcgtggcccctaggagatcgacaggtctcttttgagtctcctcctttctgagaacattccagagaagggccatggtgttaacagttcgaggcagctcttccaaaatggcatttctggcattcctcaagttggcaggatcacctgcagccatggtctttttgttttggttggcttgttccaaaagacaaaaatgactaatggtcgttagaccttctagaagggtgagtgcgagtgatctgcagaaata

SEQ ID NO: 435132 - DNA, 495 bp, Homo Sapiens
  misc_feature (91)..(91): n is a, c, g, or t
  misc_feature (99)..(99): n is a, c, g, or t
  misc_feature (459)..(459): n is a, c, g, or t
ttaagatgaagtaccaatgctttttattacacacccaattgttaatgagaggaaatgcaatcagtaactcctttccaacactctacatggnaatcaagnagactgctgagtccagaaaagatgcagccattgatggagccccaggaaacttctccccaccccctctgcctgccccctaccaccaatcctcctcttgggtgtggggaagaaagagagagaagagttgcaaatatgatgagagtatcatgtctgagaatccactgttgccacagggttacttgcagcaaaggcctggggctgaaatcttcactgaacagcatttaactcttccaagtgttgcattttctggctgatctggctcatgcgagaggaggacactctcttcatacactttcttctcaggtgaagcagacagagaaaaaaggttgaaggggcgtaggggagtagatgggaagaggnacagaaacaaagagaaggcaggcaggaggcccaaat

SEQ ID NO: 435133 - DNA, 1756 bp, Homo Sapiens
aacaggaaaaaattatttaatagtataacaaaatgcaaaataaagtacccaagttacaaaacataaattcctttggttcatgatcacaccactatttttaccttccacatagctacagacatcacaccctcaaagtgaagtcaaactgtccccctcatactgaagatgtcatgccaaaaccatcacataccccactgttcagtgaaactgttggcaacttacatggaacagagctgtggggtaggaaaaaggggaaagggttgcgttaaaaaaaatggggagactctacacatgcagaacaagttagtgggagggagtgctctgctgggtcaacacgccatgaaccacacccctattcgtgctacatgaggctgagtccttgctacaaccacacagaaatacagacaatcaagtgaacctgagcacccccagggataacagaagaaaaatacagagaagcagaggagagaaagaatggcagcaagaggcagatcacagaataccagggaacacctagtccaaaccctgttttacagatggggaaagtgagacctggagtagtgaagtgttttgccaaaatacatagtttatgggagcattagaactccatgcttccttttaatgtgagcaaggaaaaaaagagattgacaagaaattgataggcctgctaaggcaggagacagacccaggcctctcattccagttctgttgtctttttggaagagtgcctatgaggtcattaaggcctttctgggtgttttcttgattctcaagagtcagggttctgggtggctctgggacagagggatccaaagaaatcagcccaggccacctgatcaggacagaagacaatggcctctaatctgttccccaaactagatctgaaacagtcacaataagctaagaatagaaattcagccatctctgaatcaaacaccatcacctaaatggtggcagaaagaaaagtcaccgagctgataatctgctgtaggctgaaaactggaataaatttccaaagcgcactctcttttctctctagcttgaggcaggtattcaataaatacttgaatgaacaagtgaataaatgaatacatggagaccatcgatgaatgttcagttccatgacagatactggttctgttcaagatccatgccgaggacacttttggggtctaaattctttttgtcccactgtgctgggactgcagatatgtcacatcgtgcccctggcaaataaaatagagagaggtgcagatttaaataataaaatgtgtctgattggtagagattagggggaaaaggtggaaaaccattcttaaagcagctgctttctttcactttttttctcctctcagttttatgagaacagtataccagatcctggagcaatgaagacagaattgctgaatctccaaacatctcaaaacatgcatttgaagtgagtcaggtagcctcacccactacctcctcgcctctcaacagtcacttcttggacagggaggctgtggtagactgtgacagtgagatctgactgcacttctcgaagacggcctcagcagagagtttaggcagcccctgatctagagggcactcatccaccaagctgttcatgggcgtcgggggcagcggagggtcctcctcatcttgactcagtccagaaatcagggagttacttgccctgtccaattccttgtccacttgctccctggacacatctgctgtctcaggctgtcctgaagggatcttcatggagtca

SEQ ID NO: 435134 - DNA, 1584 bp, Homo Sapiens
  misc_feature (77)..(128): n is a, c, g, or t
  misc_feature (358)..(421): n is a, c, g, or t
  misc_feature (548)..(629): n is a, c, g, or t
  misc_feature (661)..(674): n is a, c, g, or t
cgaggaatatcccgggggggcagttttccccccccgtgtgcattttgagacccgtggcccaaaataggggagaaccnnnnnnnnnnnnnnnnnnnnnnnnnnnnnnnnnnnnnnnnnnnnnnnnnnnnaagggggcgaaagggggggtgaatgcccgcgtggggcggatttccgggtttcattcattccccgcttgggggatggggtctccccattctgggagggaagtgctttcaatgaatttttccccccttgttcttccgaagagagggtcaagggccccgggggcttaaatttgaattaatggaggctcccgcttggggctccctgttggttggatccccgtgatggcccccannnnnnnnnnnnnnnnnnnnnnnnnnnnnnnnnnnnnnnnnnnnnnnnnnnnnnnnnnnnnnnntcccagccctagtcctggcccggatttccttgggaacaggtatggccaaggtccctttccttctgggccccggccccaaaagaatggtttagaaaagtttttgagggccggggcggcccacaaggannnnnnnnnnnnnnnnnnnnnnnnnnnnnnnnnnnnnnnnnnnnnnnnnnnnnnnnnnnnnnnnnnnnnnnnnnnnnnnnnngggatataaaataacttttatttacataattnnnnnnnnnnnnnnactgctttctttagaacaagaaaatttataaatgacatgatattgctttttctgtcaaagacttcttcaagcaagatagtatacatggtcacttttgtttcaaataacatgatggtaaacagtggatattaatatttttgtcatgcctcaaccatttaccaacaattaggcgttcaaatcctcatgttgacccacttgcctaagacataagtgttcaggagaaaaagtcaagaaaagataaaaacttttactcatatctcctttaaaatttgtgaaataaatcctttgcaacatcttcttcacatgaatcagacctaacatagttctttccaacatgtaaggtaaatacattgattaactttctcttttccaaaattaggtttaaggatttaacagtaggatactttagctggctgacttgattctctaatacaatgagtctctgtattctttatatagtaagaaattccattttccataaaactagctcattatagattaaaaagaaacagatgttaaagttaaaaactaatattacacaaggataaataatagtttaatcatggcaatctaactcccaagctaacactaagagaatgaaatcttttcagaatatgagttttaaaaacttacaaaaacagggtattcaaatagcaatgtgatttactaccatgatttctgtgacatatcaatcatgaaataaatgcctacttatagacaatttccgctccaaattatatagcctcctctctgacaaagtgttacgccataaatttcactaaaagacaatgaataagaagtgctctaacagcagtagtttcaataaattagcattactgttatatgtgctgagacataattctcttctattaaggaacttaaaaactggccaccattttttcaatataca

SEQ ID NO: 435135 - DNA, 1062 bp, Homo Sapiens
  misc_feature (16)..(16): n is a, c, g, or t
  misc_feature (26)..(26): n is a, c, g, or t
gtggtttccctgcaantcgatctttnatcttcggctagaaatgtgctgtttgagttgaatttctgaattaacatgaacatcacagatttcacaatgaaatgtcttgttctgtagtcctgaccccttactgccattctgcatctttaatcttgatccaggtctaggataggatttaattggaccagccccattacgagcttcaaccatggtcttgtgtttagatcctgtgttgtgtgcctctagctgtgacagggagttcacagccactttgcatagtgaacaataaagtaattttttggctttttcttcttctgattcaacacagtaccgggagctccatttgtgctcttggagggagaagtggctgctccaggtggcatgggtgtttgtgccagatttgaggagaaatgagccagctttcagagcttgatggctgactggaactgctggcttttaacttccctttatcttctgatttgtcagagttgttgcctgtgattggagtgatggagcagctgggattagcctttgcgctgtccttggaaggaaccattttgggtttatttttcgttgcgtctagtgctttgaccttcttggcatgtttacttcctttgtagtgggcctcggcctggctatctgagttaaagcgaagctgacagacattacaagaaataacttgtttcttctttgggggaatggatactccaaatgtatggttaataaccgctttttgcacaggatccattgtgttaaaatttggaaagagcccaacagcagaactactgtccactggaaaagacataaatggtttgatatccagtgaaggctgcatcatcagggtaggtgtgcgcacaagagcaggaagggtagtagtgtggcatgtactgcctttgtttttaaggttacagtccacgttcacgtctgcatttgagcactgtacgagatgttacatttaaaagtaaataattccatcatctcaacctggtgctcccgtgaaatgtggtgcttaggaaacagccggcaggcagtgcttctgaacaatcatacgtcctgtaattgccg

SEQ ID NO: 435136 - DNA, 462 bp, Homo Sapiens
aagaaattcaatttaatagagaaaacagacacaaataagtgcagaaattgctaaaagaagtgtgtccagaatgcaatctggactccagggaaacagagttaagccaccagagtcggggaggctggagcaggcttcagagaactgactcggcttagcaggaggtacctgccagttacaggcagtggccctatgtggcagcagtgctgggaagaggcaggcaatgaggtgtgtagttgagagtggtgtgggaaagaatgggagtggtagtagcttgctgatggcttctccccttcttctgtaggaatttttcacagacaacctatgggacacactcccttgctcatggcaggaagcattggatggactgaaaccaccacagctggccacaatgctgctggggatgcctggggaaggggaggtcgtcaggtatgggctaagaggtccctgtgctggggaactcaa

SEQ ID NO: 435137 - DNA, 1245 bp, Homo Sapiens
  misc_feature (1141)..(1142): n is a, c, g, or t
tgacgtctggggggcgcctcaaatcttccactccagcatcggatcccggaaaggcagcgtcggagactggacccaaaactcttcctgttctgcctgcagagttgagccccgtccgggtcctggacccgcgttagtactgaccctggatccctgttcactgcgttctcgctccccgcgctccctgctggaccccgggatgccgggcatctccgcccgaggcctctctcatgaggggaggaagcagctagctgttaacctcacccgtgtcctggcactctaccgttccatcttggatgcctacatcatcgaatttttcacagacaacctatgggacacactcccttgctcatggcaggaagcattggatggactgaaaccaccacagctggccacaatgctgctggggatgcctggggaaggggaggtcgtcaggtacaggtcagtgtggccactcaccctgctggccctgaagtccacggcgtgtgccctggcctttacccggatgcctggctttcagaccccctcagaattcctggagaaccccagccagagctcccgactaacagctccattccggaaacatgtcaggcccaagaagcagcatgagatccggaggctgggagagttggtgaagaagctgagtgatttcacaggctgcacccaggttgtagacgtgggctcaggccagggccatctctcccgcttcatggctcttggcctggggttgatggtgaagagcatcgaaggggatcagagactggtggagagagcccagcgcctggaccaggagcttctgcaggctctggagaaagaggagaagaggaacccgcaggtggtccaaaccagccctcgtcactccccacaccacgtggttaggtgggtagaccccacagccctgtgtgaggagcttctgcttccactggagaacccgtgtcagggcagggcccgcttgctgctcacaggcctccacgcctgtggggatctgagtgttgccttgctgagacacttctcctgctggtcctgaggtggtggccctggcctcagtgggctgctgctacctgaagctgagtgaccctggcggctacccactgagtcagtgggtggctgggctgcctggctatgaactgccctaccggcttcnnggagggggccctgccatgcccctggaaggatattgctgagccgcctacagaaaagcttgggcccttggcctttcgaaactccactgcctacccgtttcaagat

SEQ ID NO: 435138 - DNA, 1396 bp, Homo Sapiens
  misc_feature (303)..(316): n is a, c, g, or t
gagcatatggcaaatctacttttagttctttaaggaatctccatatttttttccataccagcagggtagtgttcccttttcaccacagccatgccaacatctattatttttggattttttaattatgaccattcttgcagaagtaaggtggtattgcactgtggttttgatttgcatttccctgataattagtgatactgagcattttatatgtttgttggccatgtgtatatcttcttttgataattgtctatttatgtccttagccaactttttgatgtgattatttgtatttggttggannnnnnnnnnnnnngtcttgtgatttgtttgattgccttgtagattctggatattattcctttgttgaatgcttcgtttgtgaagattttctcccactctgtgggttgtctgtttgctctgctgattgtttcttttgctgtgcagaagctttttagtttaattaagtcccatctatttatctttgtttttgttgcatttgcttttgggttcttggtcatgaagtctttgcctaagccaatgtctagaagggtttttctgatgttatcttctagaatttttatggtttcaggtcttagatttaagtccttgatccatcttgagttgatttttgtataaggtgagagatgaggatccagtttcattcttctacatgtggcttgccaattatcccagcaccatttgttgaatagggtgtcttttccctactttatgtttttgtttgctttgttgcagatcagtttgctgtaagtatttgggtttatttctgtgttctctattctgttccattggtctatgtgcctatttttataccagtgccatgctgttttggtgactatggatttatatcataggttgaaatcaggtagtgtgatgcctctagatttgttctttttgcttagtcttgctttggctccatgcggctctctttttggttccatatgaattttagtattgatttttctaactgtgtgaggaatgatgttggtatttttatggggattgcattgaatttgtagcttgcttttggcagtatggtcattttcacaatattgattctacccatccatgagcatgggatgtgtttccatttgtttgtgtcatctatgatttctttcagcagtcaaagaacacctctttaaagcaacttgataaaggccattttagttatactaggaacatgttgtcctattccggctgccctgaaactctttttgcctgtggttccaggcaagcagacaggctcaggatgagatctctggactcaggtagccctgcctgatgcaggatttgtcagtatccaaactccttctccaggaacatgtgaacgataggggacgcatagcccccgattcgtctagcgcctccctccccc

SEQ ID NO: 435139 - DNA, 1349 bp, Homo Sapiens
  misc_feature (152)..(258): n is a, c, g, or t
  misc_feature (1314)..(1314): n is a, c, g, or t
  misc_feature (1316)..(1316): n is a, c, g, or t
  misc_feature (1321)..(1321): n is a, c, g, or t
atgagccactgcacctgcccagctccccaactccctgccattttttaagagacagtttcgctccatcgcccaggcctgggatgcagtgatgtgatcatagctcactgtaacctcaaactctggggctcaagcagttctcccaccagcctccnnnnnnnnnnnnnnnnnnnnnnnnnnnnnnnnnnnnnnnnnnnnnnnnnnnnnnnnnnnnnnnnnnnnnnnnnnnnnnnnnnnnnnnnnnnnnnnnnnnnnnnnnnntgggcatgagctgctgtgcccagcctccatgttttaatatcaactctcactcctgaattcagttgctttgcccaagataggagttctctgatgcagaaattattgggctcttttagggtaagaagtttgtgtctttgtctggccacatcttgactaggtattgtctactctgaagacctttaatggcttccctctttcatctcctgagtatgtaacttgcaatgggcagctatccagtgacttgttctgagtaagtgtgttcattaatgtttatttagctctgaagcaagagtgatatactccaggacttagaatagtgcctaaagtgctgcagccaaagacagagcggaactatgaaaagtgggcttggagatggcaggagagcttgtcattgagcctggcaatttagcaaactgatgctgaggatgattgaggtgggtctacctcatctctgaaaattctggaaggaatggaggagtctcaacatgtgtttctgacacaagatccgtggtttgtactcaaagcccagaatccccaagtgcctgcttttgatgatgtctacagaaaatgctggctgagctgaacacatttgcccaattccaggtgtgcacagaaaaccgagaatattcaaaattccaaatttttttcttaggagcaagaagaaaatgtggccctaaagggggttagttgaggggtagggggtagtgaggatcttgatttggatctctttttatttaaatgtgaatttcaacttttgacaatcaaagaaaagacttttgttgaaatagctttactgtttctcaagtgttttggagaaaaaaatcaaccctgcaatcactttttggaattgtcttgatttttcggcagttcaagctatatcgaatatagttctgtgtagagaatgtcactgtagttttgagtgtatacatgtgtgggtgctgataattgtgtattttctttgggggtggaaaaggaaaacaattcaagctgagaaaagtattctcaaagatgcatttttataaattttattaaacgattttgtgataccaactctgncnaggancctaaagtttgtaacatcaaatatctgg

SEQ ID NO: 435140 - DNA, 877 bp, Homo Sapiens
  misc_feature (164)..(173): n is a, c, g, or t
  misc_feature (175)..(357): n is a, c, g, or t
  misc_feature (690)..(700): n is a, c, g, or t
ttctcatttggaggtttttttagagggtggggggtgtttttcccggtttctgggtccacgggggggtggcccacaattccgccatgtcaagttccttccatgggccaatattccaggacaaagcaagggaagaagttaggggggtattccctgcaagttttttnnnnnnnnnntnnnnnnnnnnnnnnnnnnnnnnnnnnnnnnnnnnnnnnnnnnnnnnnnnnnnnnnnnnnnnnnnnnnnnnnnnnnnnnnnnnnnnnnnnnnnnnnnnnnnnnnnnnnnnnnnnnnnnnnnnnnnnnnnnnnnnnnnnnnnnnnnnnnnnnnnnnnnnnnnnnnnnnnnnnnnnnnnnnnnnnnctatttatcaggatataaaatctatgtacacatatcagtagcagtgctatacaccaacatctaccaggctgagaatcaaatcaaacccttttataatagctgtaaaaataaaacacttaggaatatacctaaccaaggaggtgaaagacccctacaaggaaaactacaaaacaatgttgaaagaaatcatagatgacacaaacaaatggaaacacattccatgctcatggatgggtagactcaatattgtgaaaatgaccatactgccaaaagcagtctccaaattcaatgagttcctatcaatgtaccatcatcattctttatagaactagnnnnnnnnnnntgccaaaattcatttggaactaaaaaagagtctgcaaagccaaagcaaaactaagcaaaaagaaccaatctagaggcatcacattacccaacttcaaactatattacaaagctatagtcaccaaaacagcatagtgctggtataaaaataggcacatgaccaatgggacagagtacc

SEQ ID NO: 435141 - DNA, 146 bp, Homo Sapiens
gtcctacttttcacagggcacagggctccttcggcggccagaggagcggggaaaatgccacagtggagaaggaagtctccagcgagctctgtaacaactggaatccagccagagcctcctggccagaactccggggagggcgcgaa

SEQ ID NO: 435142 - DNA, 551 bp, Homo Sapiens
  misc_feature (335)..(343): n is a, c, g, or t
gaaataaacccaaatacttaaacagccaattgatcttcgacaaagcaaacaaaagcataaagtggggaaaggactaattatagaagataacattggaaaaacccttctagacattggcttaggcaaggatttcatgaccaagaacccaaaaacaaatgcaataaaaacaaagataaatagctgggacctaattaaactaaagagcttttgcatggcaaaaggaacagtcagcagagtaaacagacaacccacagagtgggagaaaatcttcacaatctatacatctgacaaaaggactaatatccagaatctgcggccaactcatgtcagtaagnnnnnnnnngataaagtgtttgtacacattacttgcacaaactgtttttgatttgtcccttactgaaactgtccttatgcttaatcatttttgtctttctttcatatctattagtttctctctaattgctttgatctgtatttttagctacattcactgttattttcctaagcctttcttgtattttgaagtgtccattttgtttccacacgtcata

SEQ ID NO: 435143 - DNA, 712 bp, Homo Sapiens
atctccacagtgttttccatagcagctgtactagtttattttcccaccagcagtgtagaagtgttccctgttcactgcatccatgccagcgtctactgttttgtgattttttttgattatgtccattcttgcaggagtgaggtggtatcgcattgtggttttgatttgcatttctttgatcattagtgatgttgagcattttttcatatgtttgttggccatttgtatatcttcttttgagaattttctattcatgtccttagcccactttttgatgggattgtttttttccttactgatttgcttgagtttgttgtagattctggatattaatcttttgtcggaggtatagattgagtttgttgtagattctggatactaatccattgtcagatgtatagattgtgaagattttctcccactgtgtgagttgtctgtttactctgctgactgttccttttgccatgcaaaaactctttagtttaactaggtcccagctatttatctttgtttttattgcatttgcttttgggtttttggtcatgaaatttttgcctagccaatgcctagaagggtttttttccaattttatcttccagaatttttatagtttctgatcttaggtttaagtccttaatccatcttgagttggtttcttttataaggtgagagatgaggatccagtttcattctacatgtggcatcgataaac

SEQ ID NO: 435144 - DNA, 1752 bp, Homo Sapiens
  misc_feature (121)..(121): n is a, c, g, or t
  misc_feature (503)..(571): n is a, c, g, or t
  misc_feature (916)..(961): n is a, c, g, or t
tgttttgttgctagcactgtatttagtactgtagttgaatgaggtatgatgtctcccttcaaggaactcagaatggaacagaagcatgagcaaaagattgtattacagaggtatgaataanatgccatggggaacacagagaaaggttcacccgggagagatggcctagccacttccttagtgactgtttggtatatgtaggtccccctgccattactctttcagccttctgcaatctagttctacttagtcacacacttctctaagaccactcatacgtaaacactacgtagaggcccctttttgcctcattttacattgtttagttatcattttgaaacttttcttcacatatgtaacagtgccggagtttttctgcttctctgtgtttgttcagtaactcttctttaggatacacctaaagatgagaagcttcatacccagtactcctcttcattcactcatatgtttttgggatcagtcccttctgctggctgtgcatnnnnnnnnnnnnnnnnnnnnnnnnnnnnnnnnnnnnnnnnnnnnnnnnnnnnnnnnnnnnnnnnnnnnnggtgcaaaggtcttgaaaaaatgatgctggaataattgggcatcagatgcaaaattaaaaacaaattgatccatatcttaacactggcaaagattaaagtccaaatggattatagttccccaaaactgtataatttctagaagacaacaaggaaaacgtgttcagccttgggttaggaaaagatttcttaaatccaacaccaaaagcacaatccatgaaggaaaaatcgataaattgtactttatcaaaattgagaacttctctttgaaaggtaccataaggagaacaaaaagacaagctgtagagtggcagaaaaatatttgcaaaacatttctgataaatgannnnnnnnnnnnnnnnnnnnnnnnnnnnnnnnnnnnnnnnnnnnnncccattgtttacttaatcgctgtttctcctgagcttgctgcctctgcccctgctctctctccttttccatttgttttcaacattgaatccagaatgttcttcttgagatccaagtcagatcacaccaaccctcagaactctccaatagacgaccatggcactcaaaagtccacaatagccttcaatgctgggcaaaacatgaagcaccccttttctcccttctctgaccccatcacctctgtgttcaccctgctcctgccgtcctccctgcctccaaaacaggtcaggccttcgtgcctttgcacttactatttgcaatacccaaatgttcttcaggctctttagcctcttcatttctttcctgaagtgtcattctcactgaggcttatctaaagctgcagctactggggcattcctgtctcatctccctgctgtattttgtactcctggctctcttttgtacttttaaacatactatatggtttacctttgttgtttatatttgcatgttgtttcccacttgaatgtaagctccaaagattttatttttttaaactgaattattactgtattcccagaacaattccctggcaaatatttggtactcaatagtaatgctaagttagtaaataaatgatgaatttagaatcaaaataacgtgtctatggccaaaataaaacctgaaatccctgtcctatttcccagaggtaactgctgttaatagtttagttgtgtgcttccagacataccttcacagaatcatttatcacaataaaggtgtcatactatgc

SEQ ID NO: 435145 - DNA, 680 bp, Homo Sapiens
  misc_feature (173)..(218): n is a, c, g, or t
  misc_feature (563)..(631): n is a, c, g, or t
ttgacttttgagtgccatggtcgtctattgcagagttctgaaggttggtgtgatctgacttgatctcaagaagaacattctggattacaatgtgaaaaacaaatggaaaaggagagagagcaggggcagaggcagcaagctcaggagaaacagcgattaagtaaacaatgggnnnnnnnnnnnnnnnnnnnnnnnnnnnnnnnnnnnnnnnnnnnnnntcatttatcagaaatgttttgcaaatatttttctgccactctacagcttgtctttttgttctccttatggtacctttcaaagagaagttctcaattttgataaagtacaatttatcgatttttccttcatggattgtgcttttggtgttggatttaagaaatcttttcctaacccaaggctgaacacgttttccttgttgtcttctagaaattatacagttttggggaactataatccatttggactttaatctttgccagtgttaagatatggatcaatttgtttttaattttgcatctgatgcccaattattccagcatcattttttcaagacctttgcaccnnnnnnnnnnnnnnnnnnnnnnnnnnnnnnnnnnnnnnnnnnnnnnnnnnnnnnnnnnnnnnnnnnnnnatgcacagccagcagaagggactgatcccaaaaacatatgagtgaatcc

SEQ ID NO: 435146 - DNA, 497 bp, Homo Sapiens
  misc_feature (23)..(23): n is a, c, g, or t
tttggggggaaccaaaaccccantggggactttaaacctttggcccagtgttaaagataggggaccaatttgtttttaaattttgccatctgaatgcccccaattattccccggcatcattttttccaagacctttgcacctctgtcaaaaaccagttgtcccacatacatgttgggttatttctggactctattctgttccattagaccaatgcacagccagcagaagggactgatcccaaaaacatatgagtgaatgaagaggagtactgggtatgaagcttctcatctttaggtgtatcctaaagaagagttactgaacaaacacagagaagcagaaaaactccggcactgttacatatgtgaagaaaagtttcaaaatgataactaaacaatgtaaaatgaggcaaaaaggggcctctacgtagtgtttacgtatgagtggtcttagagaagtgtgtgactaagtagaactagattgcagaaggctgaaagag

SEQ ID NO: 435147 - DNA, 926 bp, Homo Sapiens
agctccagtcctggcatctgcccgaggagaccacgctcctggagctctgctgtcttctcagggagactctgaggctctgttgagaatcatgctttggaggcagctcatctattggcaactgctggctttgtttttcctccctttttgcctgtgtcaagatgaatacatggagtctccacaaaccggaggactacccccagactgcagtaagtgttgtcatggagactacagctttcgaggctaccaaggcccccctgggccaccgggccctcctggcattccaggaaaccatggaaacaatggcaacaatggagccactggtcatgaaggagccaaaggtgagaagggcgacaaaggtgacctggggcctcgaggggagcgggggcagcatggccccaaaggagagaagggctacccggggattccaccagaacttcagattgcattcatggcttctctggcaacccacttcagcaatcagaacagtgggattatcttcagcagtgttgagaccaacattggaaacttctttgatgtcatgactggtagatttggggccccagtatcaggtgtgtatttcttcaccttcagcatgatgaagcatgaggatgttgaggaagtgtatgtgtaccttatgcacaatggcaacacagtcttcagcatgtacagctatgaaatgaagggcaaatcagatacatccagcaatcatgctgtgctgaagctagccaaaaggggatgaggtttggctgcgaatgggcaatggcgctctccatggggaccacccacgcttctccacctttgcaggattcctgctctttgaaaactaagtaaatatatgactagaatagctccactttggggaagacttgtagctgagctgatttgttacgatctgaggaacataagttgagagtctccgtcgaact

SEQ ID NO: 435148 - DNA, 598 bp, Homo Sapiens
ataattttgttttcctttttaagagaggattcttttcatcctaaatcttttaccttccaatctttgtatctattattacacgtgctgctgaagggagcatggtttttatctgtgatacttagttaacatatatattacatttatagctatgtagtagttcccctaaattcttgtaaaaataaatttttatttgatatttcatatatgtttgaaatgtgagaattcagatgtaattttttaccttgttttggcatctttgtatgttactttaaagaggatgtgtgttctaaaggaggacatgagctgtgtgttttcaagagaacaatagagtgcgtctcttgtggaaacataataaaaatgaacttttctcaccttcacagcaattgtgatcatattggtctggattgattatttgctgcccagtgatatttttccttaatggggttgtggttatttgaacatatttattagctctggaagataatcctgtgctgttttttatgtagaaaaaaacataaggctgggtgcagtgctcacacctacaatccctgtggttttggaggtcatggcgggaggatcacctgaggccaggagtctg

SEQ ID NO: 435149 - DNA, 1063 bp, Homo Sapiens
ctctaagttgggagaagaacattcttttcaatggagctcatcttctatctctagggtctgttcagcctttcatctatccatccttcctctttattggtagaagaaacagtggagagtagccacttctggttctagcacttctcttttgttaagatagggtttggatttagtatgaagctttggctaaaacccttgggtttgccttagaacactgacactaagaacctggaatgacatggggaggacaaagagagctcaagaggaatgctttgtgagaagtggattctctccgtgtccctgccccccacccaaacttgaactatacctattacatttccaggcagtatccctaagatgagatcctggagaaaggactaggggaagtatctttctggatgcttgtggtcccagaagggtactttctgtgtcataccatgccacttctttaagctcttcagggcagccaaagccagcccttttctcctactgcccccaggagaaatagcactcttctcccttcccccagatggcagggctctggcctccctacacctcataccctgcctgcctcctccaggaggaatctccggggccccttcctgactctccccaccttcgccacttgtctctaggctatgggacaatcatcccattcaccacttgacatccttgacatccttgactttcattcccccaacctccagcaggttggccccaatcctcttcacctctgtgttttcttctagaagatgcattttgggtctgagaggagcattttcctggaaggccatcttttaaggcccctgcttgctgtcatagtgcagagcagaaacttgcacactatttagagagctcccttcccacctctctgcccagccttgttacctcacttctgctctggccatggctgtgaagggcccagccagctccctgttttgatgttctgtgcaacagctccgggggtcttgtgactggagatcctcaacaaggccctggaagccaggactgggagtcttgggcagctggatgagcagccaccttggccggcccagggaaggagctt

SEQ ID NO: 435150 - DNA, 188 bp, Homo Sapiens
taggccggagccctgccatctgggggaagggagaagggtactttctgtggtcataccatgccacttctttaagctcttcagggcagccaaagccagcccttttctcactatctgcccccaggagaaatagcactcttctcccttcccacagatggcagggcttaccctccgacacctcatacccagct

SEQ ID NO: 435151 - DNA, 776 bp, Homo Sapiens
  misc_feature (597)..(597): n is a, c, g, or t
  misc_feature (601)..(714): n is a, c, g, or t
gactcaagtggaccctacaatgaagcctactcatcccaatagaagccccttcttatgctgagggaagcagccctcagaacatgatagcttgtatccagcagagtggcacgtgctggcactcctcacagaagcaccctggccctggatgcctgcatcctcagaagagtgcagctcccagagggaggcagccatccatctgggatggtgctaagcatggaatcctaactcctgattccgtctcctatttcttgcttggctacgccagttcccaaatctggtagatgtccatgcccatgtgctcctgctgggactcaattcaggctatgtatgactatgaagtcaggctcatctgcttactggctgtgtgaactttttgtatcttggttttcttcatccatgaaatccaagtaatactacctaattgttactgtggagattaagttcaaatgcaatgtatagtaatattaagcaatttctagttattattctagccagtaatggacttcagaatcttttattacacaatataagaatatgtatgtaaagacattttggaatttcctggatgagaaggaagtctgggctgggcatgggtgntcannnnnnnnnnnnnnnnnnnnnnnnnnnnnnnnnnnnnnnnnnnnnnnnnnnnnnnnnnnnnnnnnnnnnnnnnnnnnnnnnnnnnnnnnnnnnnnnnnnnnnnnnnnnnnnnnnttagctgggcgtggtggcacccgcctgtggtccagctacttgaggctgagatgggaggatga

SEQ ID NO: 435152 - DNA, 1514 bp, Homo Sapiens
  misc_feature (753)..(753): n is a, c, g, or t
tttcatactaaagtttatttttctttacacaattatagaattcaggcagacaaggagacatatatggagttttccatttttaatatttggttaaacaaaatacatcttttgtaaacaaacgcagcacaaggccaacaacaaaaaggaataaaagcaagaaaaacaaaaagcctagggttgcccgttattgggcatcagggtcaggcctgttcacttccttaaaggaagtggggctttttgcccttgggcatcagcatgggtccctgttcctaagcaccagaattggatatgaacagagaaaccagccctgaaatgtttaagcgtctttgcatatcccattggctcatggactccaagtgcatggggactctttcaagtgccatttgcacaggcccaagtggatttgtggagaggagtttcctcctctacccaagaaatggcttactatctgacagtgccagtggccccaaggtcctgcttgtgacaatcagcaaggttggctgtaatgtctggctggtggtggttggaatgtcattgtgcagggcaggaaaagagctccctgtggtgccaagcaggtctggtgtagaaaatggtgcagaagagactgcggccggttgctgagaagatataacgcagtagccgcttggtggcctgttactcagcattaaaaaaacggccttgttggattgaagatacatgtgcagaaaaagtgctggtgtcaacatgcactccagtcacaggggggagagagcncagcttcaccccgttaagcttgctcaggatcaacatgcaagccccaggctggctttgctgctggagagaagtctggccagtgggacagctctcagacctgccacgaccattgatctgagggccagcaggtcacccctgcctgccacctgccttgaggcaaccacatccactttggagacacgcatatggtatgatacttatttctcctcttttgttttccaaagttacaagagaaaagtggcctacaactatctgaagaggtaggggcgggttgaacttccattgatacagagaggaaacgacatgaagatgaccagcccaggtcctattccatccatacagcacagaaccacccaacctgagcttggcaactacagtggcagcctccgagcctagagtgtctactgaattgtggctgcccctactccaagaagcctgtcttcacaatactttcctcacccaacgctgccccaaattagtggaatttgatgtcaaaagcagacttttttttcctgattttgccagagtgagtgaactgggaaaactgctctttggcttctcttttgtcccagagcctcctaaatcaatgctgcgaaatggtagggacaacactggagtgaagaaaccaagccaccccatggctgtcccaggttggctttagccacatcctgttcagtatcctcctcacttcatactagaatattagttaatttttcattataaaactctgccgggtgcggtgctcacgcctgtaatcccag

SEQ ID NO: 435153 - DNA, 432 bp, Homo Sapiens
  misc_feature (330)..(330): n is a, c, g, or t
  misc_feature (341)..(341): n is a, c, g, or t
  misc_feature (396)..(396): n is a, c, g, or t
  misc_feature (415)..(415): n is a, c, g, or t
gtcattaatatgatctttaataaacggaataacgcaccattttacagcaagcctttttaaacctaaagaactgccttaaaatctccttctccaatgtctctgtatcaatacaatctttttatttaggtttatatatatcaaagcatttacttacacttattcatagaaaactctttagtggcttaatgtcagctttcatagtggcatccatagataatacaaaagaaaagtgatttgctttattttatactcacactgatccatcaaacacaacttatacaggcatagcaaggcttcagacagcttatacaaaggcaaattaactggaanttattcataanggtcatatatggataggtctatctgtaatgttaggggcaaaacacaccaacaaanggtacccgttaaccagggnagggggttccgagggag

SEQ ID NO: 435154 - DNA, 916 bp, Homo Sapiens
  misc_feature (23)..(23): n is a, c, g, or t
  misc_feature (85)..(85): n is a, c, g, or t
  misc_feature (215)..(215): n is a, c, g, or t
aactcccagccattaaatacatnatatgcatataatcacccctgagccattatccctgacaactcagtttggaacaatggaaatnttttaagcaaaagacctgaagcttctctgtctgctcttttcggttcctccccacaattcagctctgatgccaggaaagcgaggagccagggagtggtggaaaaggcccggctgccggcttcagtgccacnacagctgcgcttcttcttgcatggtccctgtgatgacctcactcttgctttggtgcagagatggctcccctactcccatctctccagcagacatgggctggctgcaggcagctgacggtttcagcaggttctaaaatggcaggtgcagggccgtggcaggatactgctactttggatttggtggcccttgtggccacagctccctgactagaattaggacatgcatttgtaccacattttccactctacttgttgttacagtggaacaatggacaagtcaatcaccctttttgggctggcctcatctataataaccaatgtttttatatatttcgtacttcacagcttaaaaacattttgtgtctaaatctcacaacaacactataggtagaaattattaccctcattttatggaggaaaatggaagctcagaagtgaaacaacttaagatcacacaggaagcaagtgacaggcttgcacctaggtctcctggcttctgtgccctttccactagccccactgcagccccgttcacagtgattctagcccaagagtaacctggaaagctgaggcttctgtgcatgcagggaatgtgaagttgttcactgaaaattgtgctgctacaaaggttatgccttagtaagcctgaggccatcggcacttacctctaatagaataatttacctcattcattcatttta

SEQ ID NO: 435155 - DNA, 977 bp, Homo Sapiens
agcggcctggtaccggtccggaagtttcgggatatcgtcgaccacgcgtcgtgctgctggaagagcagcggccgagccggggccatggcgaagctgctgagctgcgtcctaggcccccggctctacaaaatctaccgggagagggactctgaaagggccccggccagcgtccctgagacgccaacggcagtcactgccccccattccagctcctgggatacgtactatcagccccgtgccctggagaaacatgctgacagcatcctggcactggcttcagtattctggtccatctcttattactcctctcccttcgccttcttctacttgtacaggaaaggttacttgagtttgtccaaagtggtgccgttttctcactatgctgggacattgctgctacttctggcaggtgtggcctgcctccgaggcattggccgctggaccaacccccagtaccggcagttcatcaccatcttggaagcaacacatcggaaccagtcttcagaaaacaagaggcagcttgccaactacaactttgacttccggagctggccagtcgacttccactgggaagaacccagcagccggaaggagtctcgagggggcccttcccgccggggtgtggccctgcttcgcccagagcccctgcaccgggggacagcagacaccctcctcaaccgggttaagaagctgccttgtcagatcaccagctacctggtggcgcacaccctagggcgccggatgctgtatccaggctctgtgtacctgctgcagaaggccctcatgcctgtgctgctgcagggccaggcccgactggtggaagagtgtaatgggcgccgggcaaagctgctggcctgtgatggcaatgagattgacaccatgtttgtggaccggcgggggacagctgagcccccagggacagaaactggtgatcctgctgtgaaggggaaatgttgggttttaataagggggggctg

SEQ ID NO: 435156 - DNA, 1817 bp, Homo Sapiens
tttttgatagtagaaaaaatacctttttattaattattaggaataatccattcatgtaatgcaggatgtatgttggagaaggttaagtacagccacatgaatgaggggaaacgtgcaagaggaacagtggtgagaagggggatggtcccccactttccacaaactataaacagcaacatgaacacagagaatcacaaataagagggtctttcctcatgtctcctctcaccccattcttccataatgagtcccagttggtccctagaggtgccagggcatctggaagttctgggctgggagtggggtgcagtgagtggcctcaaagttgtgcagatgcttccgagccagaaacaaagccagctgccgccgtccatctgcactcatgtcctcccccacgctccaggggaagtcgggcccgtgttctgcctggtaggagcggaggacagacagacaccagtcctcttccacctcccatcggctataaattgaggcttcctccagctgtgaggaggcctccaaccactgcctcaccactcgaagaccctcctctgccatcacccggggataccgatgctgcaggagcttcagcaggaggtcattgcctcggttggacatgatgtcctcaggaaccgtggtggtgatgatctcatccttggttctccggatcagcagtacaggaccctggtatctgcacagctgctccgcgttgtttagattgagatgctgcctcacggtcctggtcaccaggcccctccagctgtctggcatgaccttcaaggccaagggcaccaggtcatcaaaggaggcatccaggatcatggcactaacatctgggtaggacatggctgcccacgtggcagtgaagccgccgatggaccaggcgtagatgatgatgtcctggggctggaagcccaggcggtggatggcaaactggaccaccacatccatggcattagcctcattctgcgggaatggcacccccgtgcttccagcaaagcctggatgattccagcccaggactgaatatccagcttccaggggcgtggagacgcagcccacctcataaaacccagcattcccctcacagcagatcaccagcttctgtccctggggctcagctgtcccccgccggtccacaaacatggtgtcaatctcattgccatcacaggccagcagctttgcccggcgcccattacactcttccaccagtcgggcctggccctgcagcagcacaggcatgagggccttctgcagcaggtacacagagcctggatacagcatccggcgccctagggtgtgcgccaccaggtagctggtgatctgacaaggcagcttcttaacccggttgaggagggtgtctgctgtcccccggtgcaggggctctgggcgaagcagggccacaccccggcgggaagggccccctcgagactccttccggctgctgggttcttcccagtggaagtcgactggccagctccggaagtcaaagttgtagttggcaagctgcctcttgttttctgaagactggttccgatgtgttgcttccaagatggtgatgaactgccggtactgggggttggtccagcggccaatgcctcggaggcaggccacacctgccagaagtagcagcaatgtcccagcatagtgagaaaacggcaccactttggacaaactcaagtaacccaggagctggaatggggggcagtgactgccgttggcgtctcagggacgctggccggggcccctttcagagtccctctcccggtagattttgtagagccgggggcctaggacgcagctcagcagcttcgccatgg

SEQ ID NO: 435157 - DNA, 1099 bp, Homo Sapiens
ccgggatgattcccagccccaggacgggaattattccagcttcccagggggggtggagacgccagcccccccttcattaaaaccccagcattcccctcaccagcagatcacccagcttttgtcccctgggggttcagctgtccccccgccggtcccccaaaacatggtgtcaatctcattgccatcacaaggccagcagctttgccccggcgcccatttacactcttgccaccagtcgggcctggccctgcagcagcacaggcatgagggccttctgcagcaggtacacagagcctggatacagcatccggcgccctagggtgtgcgccaccaggtagctggtgatctgacaaggcagcttcttaacccggttgaggagggtgtctgctgtcccccggtgcaggggctctgggcgaagcagggccacaccccggcgggaagggccccctcgagactccttccggctgctgggttcttcccagtggaagtcgactggccagctccggaagtcaaagttgtagttggcaagctgcctcttgttttctgaagactggttccgatgtgttgcttccaagatggtgatgaactgccggtactgggggttggtccagcggccaatgcctcggaggcaggccacacctgccagaagtagcagcaatgtcccagcatagtgagaaaacggcaccactttggacaaactcaagtaacctttcctgtacaagtagaagaaggcgaagggagaggagtaataagagatggaccagaatactgaagccagtgccaggatgctgtcagcatgtttctccagggcacggggctgatagtacgtatcccaggagctggaatggggggcagtgactgccgttggcgtctcagggacgctggccggggccctttcagagtccctctcccggtagattttgtagagccgggggcctaggacgcagctcagcagcttcgccatggccccggctcgggccgctgctcttccagcagcaggtccccctgccggccccgccctccctgcctctgaggtgttgtgtgcccttgacgtcagcccgtaccggctccgcctccgggcgagttgcgacattttcag

SEQ ID NO: 435158 - DNA, 757 bp, Homo Sapiens
  misc_feature (292)..(301): n is a, c, g, or t
tgtggcccttttttttgcctttgaattgtttacaaatgtttattaaatgtcagtaatttttacaaagcaaatattaatagcaagaggcaaatgttttgcaaaatatgtacaaaagtaaaaagctgtaatgaactagcaactcattttataaaatcaaaccattctttccacttttagacctcctttagaaataatttattgcccatcctgaactaaagcactgacaaaaaaatttacaacaattatcagataatgtgcttagttcctggaaagttataaaaagatatatgtnnnnnnnnnntcctaagccacaaatattttatagagctaatacgagtcatgttttgttaggtacagtatctacggggttattacaaaatatacttttttataaggcttcttgtggtaaatgagctctcaccagagtagagtagtttagaaaagccatttcaaacgttttgcgattctgccttcaagtaagaggtaaaaggtaaatggcatagtttgttgcactgttgcttatactgtgcaagaattaatctctacccctttctttcctagtaccatcaaacaggcatgattaaggacaatttctcacttactatggcaaaaaatattatatacaagctttcttaacacaaaccaaagtcacataccaagtagtatatgacgttcagtgatattcactgactgaaattttatgcacactgagttccagcatactctgatccacctgtaaactttcatcatcaacacc

SEQ ID NO: 435159 - DNA, 729 bp, Homo Sapiens
  misc_feature (166)..(166): n is a, c, g, or t
  misc_feature (333)..(333): n is a, c, g, or t
gttttaaatttaatcccgtgtagtcaaaaatactttaatatttaaaatgtttagccaaacgtttttcatttaataaatgaaaaattcatcgtgcagtaaatgatatgttcggtcttcatttgtattttaggtaggtgaatacaatcacagaacagcaaagtgtacntcctgcaaaggtcagacttaaaagtagcagggcagtttctagtggcatttccattccatgtctgttgtatgaggaaatatatagaacctacttcaggatatttaatctggatgttgaattaactcatgcagccagcataagataaggattgctgaataagagaatcnacaaactttagttcaaaattttgatgttttaaatatacttatttagtgagtggctataccagtgaagggtaacattaatgaaagtaagaatgaagttttaagcatgaaacagtaactataaaaacaaactgctacatggagactcactaatatagctttatattgttttcattttgatagtgggtttaaaatctgtgttcagaactatagaaatatccagagtcaaaaaatatttatctcaaggtctctttctaaaagaatgaatttccaaaatagttttattatataaatttttttaaagccacttttcctgcaaaaaggtaagaacaagataaaaccgcttgctttcctacccccctctagttaaccagtacatatttaagcacctatgatgcc

SEQ ID NO: 435160 - DNA, 362 bp, Homo Sapiens
caggggaggaagcttcttaagtgcctgcagctgggccagttctgggacgtggagaggaggggacagaccctctcttttagcaatgcaggattactcaccctccccaggcacccttgaccctaacccagctgttgtcgatacattctgaaggtgctttgctggggagatcctcaaagcactttacagacattggtcggatggagcctcccagccccaggggagaggaaggaggcaaagggctccggactcagggcaggcgacaagccccaggggcccagaccagtcccaaggaaggtcccaggaaaggcctcccgcagcccctggtcacaatggctccttttgccccagtcactgtatcacct

SEQ ID NO: 435161 - DNA, 1288 bp, Homo Sapiens
  misc_feature (20)..(20): n is a, c, g, or t
  misc_feature (51)..(51): n is a, c, g, or t
  misc_feature (203)..(203): n is a, c, g, or t
  misc_feature (1163)..(1163): n is a, c, g, or t
  misc_feature (1199)..(1199): n is a, c, g, or t
  misc_feature (1204)..(1204): n is a, c, g, or t
  misc_feature (1216)..(1216): n is a, c, g, or t
  misc_feature (1239)..(1239): n is a, c, g, or t
  misc_feature (1249)..(1249): n is a, c, g, or t
  misc_feature (1269)..(1269): n is a, c, g, or t
  misc_feature (1271)..(1271): n is a, c, g, or t
aacaaggttctcggaaatcnaaaactcccggcccccaagtggtgggctcanggctccctgggcgcccatgggtctcaaccacagcctcgcccagggaacaggaccatagggagtccttctccccatctctagccacccacaggccagcagagcacacagccccaccctcgcacaggcacctgtggtctcccagtaaccaagcncccagcccaggggccactgcagacagcagctgggatctgcagagggatctcagcagcgagcaggcagctggcgaggagaggtgcgtgtgagggaggggtggccctctcctcagtaggaggaagtaagagggtatctaggccaatttattcagctggaaatcaatctgtccagggctggaccaggcgcctccccctcgatacagctcctggctgaagaggtcatcagagcagcagctgtccccaggccagtgtcacgtcactgcgtacagttcctcccgatcgttcttgcagatctgatagtggcaggggaatttctgcgagcaggcccagggctcggcgggctggtcaggtggcggcagcagcaaggctgcgctcccggccagcaggatgtgccagatgctgtgggtgtagtagtagttgtcgctagtcatcatggaggtgtagatggcgatgcccacagaggccatagagacgccgggcaggaggtagagggcccagcgctgccacgaggtggggtagcactggcgccggtgcccgcagcggtaagcccacatggaggccatgatcacgaaggcaaagaggcagggcccccaggatgttccacatgcccctgcggtccagctgcaaggacatggcgatgaccagtgtacccagaagaaacagcacgtatttcaggactgtcttgagccgtgccatgcacaggatggtgacccagatggccgccccggagcccaagaagtcgcagtactgcagcgtgtcgtagctgaggatgcacagcaccgcctccccgggctggtcgcaggcgtggtagaacgtggagaagaacatggtgtaggcgtagacggaggcctccaccaggaagaatcgccgcactgagacggcgatgggggccaggaacatgaggttgctgagcgatgacagcagtgtggccgcctctgctgggccaccgtctgggctgtntgttgtcgtgcagctcaccacgccagctgcttgcantgcantgcatacagtantgtgtctgcgacagaggcactgncataggtcanatcgtcaacaggcacagtanangtgtctcacgtgacaca

SEQ ID NO: 435162 - DNA, 985 bp, Homo Sapiens
  misc_feature (73)..(73): n is a, c, g, or t
  misc_feature (173)..(183): n is a, c, g, or t
  misc_feature (243)..(268): n is a, c, g, or t
  misc_feature (918)..(936): n is a, c, g, or t
  misc_feature (949)..(949): n is a, c, g, or t
cctttggcactgaaacgtttttggataccaccgccattgcttcataattcctgagatgaagctcctggcaaancgggttaataatttgatccaatgtccggccattcaaccacccaatttttaaactggaaaggaaaaaaatgtgtcaagtcagaagtaaaaacatccctagnnnnnnnnnnntgaatgtttttaaaatcatgaacaagtctgatcttttctccctatcacgtcaagagagcnnnnnnnnnnnnnnnnnnnnnnnnnnctcttccatgttccagacatgacttcctatcaaagcaagatgcgctacaatcacaggagagcttcctttcccttgggcctgcagttttgctgggcccggaagacaagtcaagtttatctcaagcagtcccgctgacacagggttaaatgtttccatgttaccatgtgactaattcaaactcattctaattcctgctgttgccgcttttgatcggttacaaattttcaaggctgtgttaacagcacctcgtggaatcctttttagactcaacttggcttgagttattaatgaaggtttcatcaataacttctaattcaaacatgctaactaaatgactcaaactagcttttctggcttaacgtggatacaatatctcattagtggaaagcctgaaaaatttcaattcagtaagaggggataatccaatttgtactctcttaagaaaattgcttctcaaaagtcacggtggaataatgacctggaatgaagaaaacagaaagaaagttgaagaggcttggaaggaaatactaattgaactgtgaaggcttttaattcaaagcttttgtttggcattcatttctgtaaatgtattaactaatatgctgatacctgactacataaacagacaagtacttgtcatgccactgtcnnnnnnnnnnnnnnnnnnngagacagagtctnactctagcctcagtgacgtgagtgaaattccatctc

SEQ ID NO: 435163 - DNA, 1604 bp, Homo Sapiens
tttttgcctttggaagcccttctttattgggaaataaatacagagttaaacaggtgggccggccaacatctgtggctttggaggccaaaaggaaggagtctgacttgctcagaactcagatctccatgagctggtcattccccacgatcacctcattcactcgtttagctttggcttcaatcctctggccacttccaatcaagcagtccttgatgtctgcacccttctcgatcacagcattgttgcagatgacactgccttggatattgcttccttcctccacagtgactgagttcatgagaaggcaattggtaatagtcactctatcttttatgagacaggatgagccaatgactgagcgcttaatggatgacttctctccaatctgtgtctctggcccaatgaggctgtcaactccaaccaggtgtttgctgacaatctgggctgacgaatggactggtggttcttctggacagagagcagacagcaatttgggcacctgtctgtttgcttccatgtagagtcccagtgtgctcactcgagagcagagcccctctttcatgatgtggacatagcagcgcacctgtgatctggacaagtcttcccacctgtctcctcgacaggcattccagcaggcatcatagggagccaggttcagtgtattggcttcttttataaaactgtagatatctaaggacttcagctcctttttctttagatcctcctctttttcttcttgtccctgttgtgaggaagctgaggaaaactgttttctcactaaatatggaatcagttcactccggatagaagttattgacccattttccattaggaaatccacgatgtattttttcaaacagtagaggtgggcatccacaagacccgtgtggaaacgtattctaggatgcttctgtaggatggatcccttaatgaccagctcttcatccaagtctgcttcattagccatgaagagcagcctctttcctgtgctgtccactccaatgaagtcacgctgctccactgcttttttttttccccttttgaccgggaacaggttctatgctatcttggccttttctcatcaacatagcaagtgatgcatcataagctctaaacaggtccacaacctcatgtaaggcaacgtctgttatcagatcacagctcagcaccagcacatctgtcttaagttttggatatatgtagcgcaaagaatctgcagttcccatgtcagcgtcatcaggaatacacacaatatctggcttcattttcatcttgaattctgcacatagagccttttgaacatccctggttgtaaccacaatgacttcttcaaatccaacacgctcaagcaggttcaatgggtaccaaattaaaggtttgttcccaactggaagcagaggtttgggaatgctggaagttaggtctgtcatccgagatcctccacctactgccatcactactgcttgaaattccatttttacaaaccgggtcagccagcttgtgtgcggcctggcagggcagaagtcacagctataactcagctcccggcacgccgcaaccgctcccagcgatctccacgccgcctctgacatcccgggaattcc

SEQ ID NO: 435164 - DNA, 1221 bp, Homo Sapiens
  misc_feature (1042)..(1119): n is a, c, g, or t
catactcagaaagaagagagagacaaaagaggtgactggcaatttgatggcatacatctcctggggagaaggtgtctgaatcttcaagtcagacgatgacaaaaatgagagcagaaacaagtctattttttctctaggtcaccacagggaaccaatctaacctatttacaagtggtctcaggggaactatctttaaatagctatcttgtcaccatccttttcgtcatcttccacgattgctttgggtctctcatccctgagcaatgtcacacctgctgcaaagggggacatgtgcagggcaggtgtgtcttttctccttggctttttctgttccaggtcagtgttatgaagaacagggatcattttgccctttggatgtctctcttgaacatcgtatcttttaattaaatgttctgaaaacacacctggtatgaaaggtgggatgtgcagcgccggtgtatctttcctccttggttttttttggtctgactcaacattcagggtggcctgtacattttttccctttctaggcttctttttgagatcacagtccttaatgaactggtctgaaagatcatctaagtggctgcaacgagggtctagcttgtccagtctgtcttctgagagttccagtggctgcatttgctcagtggacatcatcaaaggagggtgggtggatgtatttcttctccagcacaatcagcgcagatgcagggaagcgaaggcgagagacagggagggcgtgtgtgctcaccgaggctgggcctggctcctctgcggcagtggctgctgctggccggctccagctcctcttatctagggaccagctgctgctgttgccatggggatgctctgtttcacaggcaccagggcaagggggatggagaaggaaagaggactaacatctccatcgctgctctccacggcaatcattgtacattacaaaagtacagtatagagtcgtgctttgagtttccggtgtgcacaccagagaaattcagacaaaccagctacatcattgaattcccatgcaatcgatttnnnnnnnnnnnnnnnnnnnnnnnnnnnnnnnnnnnnnnnnnnnnnnnnnnnnnnnnnnnnnnnnnnnnnnnnnnnnnnttcgactctcaaagctatttaagtttaaatccggagtactttcaatcactattgctgcttctcaaagtactatcatgaggaggaagagaagggtagctactg

SEQ ID NO: 435165 - DNA, 1129 bp, Homo Sapiens
ctttgtgtaggggaagcagcgtagcaataatgaatacggaatagggcatttttttgcgtaattatctagaggatcgtatactctgatacacggagtggtgataggctcgttttttgcgtgtgggcgagggaattggtgatttgccggatagatatcgttggcgggcgctagcggcccctgtgtgtcttacgaattcaaggtttctgttaatcacggacttgttgttacgggatcggcacgtatacattttatattgaggggggggcgggctatagcttatggggatcggttctagtttttagacggtagggtccactaggggaatttgcggtgatacccgtcgcaatcccttatctgggatgaagggtttttagtactcgggggccttcggtggcgactcacatgacctggggtggggtcggacagggtgaaatcaaagtggagcctacgggggggctgttcactttgccccccaggcctggtcccttactcacagtgtgatccgtctgcagtttgggctgttttctgtggattccggtacaggttgagcagcactatggtctgcacagaatttaaaaggggcggggcttgagctcagagggcagggctgcatgaacagagagtgaggcatgaaggttgggggtggaaccttacaccccagcctaagcatcatgagtgcatcggcgatcctttgcccctaagaaaccagaaaagggatggaggggactggcaaggatgaacagcgggatggaagggactggcaaagatgaacagccgccgtgtgtagcctgtacgcatgggggcgcgacgaagttcccgggaaaacggcacgaagaccggtgggaggagcctgcagaaaggtccaatgagaaaaaaagccgggcggtggggagggactcaggaacccggaataggcgggacatggtgacgacggccccagaaggggaagggccagggagccgttaacccccgaggctccgtgccgggtctcacctggctgaatgtcggcttgttgtgaagccgggagcaccggtccccgtgccggcagaccccgatttgtccttctcagtcccgaatatcgaagctaaatattcagccatttttacccaagccctccaggtctggctat

SEQ ID NO: 435166 - DNA, 906 bp, Homo Sapiens
cgtgcgacacattcatctcttcaatctccccatacttctcctgcagttctgtgaacacctcctgtggaagacggggaggaactcagctgagctcccacaagaaatcccatctgcccctaccaaccctcacctcgaagaagctatcatagtgctcctgcacctccacgtcactcacatgacctggggtgggggcgggcagggtggaatcagagtgtagcctactgggggctgttcaccttgcccccaggcctggtcccttactcacagtgtgatccgtctgcagtttgggctgtgttctgtggattccggtacaggttgagcagcactatggtctgcacagaatttaaaagggcgggggcctgagctcagagggcagggctgcatgaacagagagtgaggcatgaagcttgggggtggaaccttacaccccagcctaagcatcatgagtgcatcggcgatcctttgcccctaagaaaccagaaaagggatggaggggactggcaaggatgaacagcgggatggaagggactggcaaagatgaacagccgccgtgtgtagcctgtacgcatgggggcgcgaccaagttcccgggaaaacggcacgaagaccggtgggaggagcctgcagaaaggtccaatgagaaaaaaagccgggcggtggggagggactcaggaacccggaataggcgggacatggtgacgacggccccagaaggggaagggccagggagccgttaacccccgaggctccgtgccgggtctcacctggctgaatgtcggcttgttgtgaagccgggagcaccggtcccccgtgccggcagaccccgatcttaaagtaaaaagagcagttaaccttgtccttctcagtcccgaatatcgaagctaaatattcagccattttacccag

SEQ ID NO: 435167 - DNA, 696 bp, Homo Sapiens
cgccgaagtgaaacacgcagctttattaagacaggggcggtagaagaaggtctccatgctgaacagattacattatggagcccgggagcctgggaaggatggggcaggagagtgaagggggctttgaggagaggtcctgccaggaacatctgtccctgttgggggtgaagggtaagggggccagggcctcagaagcggccatgccagtgatcaggggaacaccgatggttcctctctcggggatggtggccagtatggaacctcgggggtgacctgcgcctgggtccccgcccatagagctgcctctggaggttctgggaaatgggccgcagatgcatgaagttgcagaagccacctcgggtacattcccgtgcacagcctgcccgttgaaccagcggttactgagttcagccacggcccgctctccatcctcctccctccggaacttgacatagacgttgcccacgacgtggtccccaaggttgtcgcacacattcatctcttcaatctccccatacttctcctgcagttctgtgaacacctcctggctgaatgtcggcttgttgtgaagccgggagcaccggtccccgtgccggcagaccccgatcttaaagtaaaaagagcagttaaccttgtccttctcagtcccgaatatcgaagctaaatattcagccatttttacccaagccccacgct

SEQ ID NO: 435168 - DNA, 1310 bp, Homo Sapiens
  misc_feature (1234)..(1234): n is a, c, g, or t
  misc_feature (1262)..(1262): n is a, c, g, or t
ggtcctttgttgctccttccatcctattcaagcgtaatgcagctgtcatagaccctcttcagtttcacatgggagttgaacgtcctggagtgacaaatgttgccaggagtgcaatgatgaaggactctccattctatcaacactatgacctagatttgaaggacaaacccctgggagaaggtagtttttcaatttgtcgaaagtgtgtgcataaaaaaagtaaccaagcttttgcagtcaaaataatcagcaaaaggatggaagccaatactcaaaaggaaataacagctctgaaactctgtgaaggacaccccaatttctagtgatggaacttctgaatggaggagaactgtttgagcgcattaagaaaaagaagcacttcagtgagacgggaagcccagctacatcatgaggaagcttgtttcagctgtaagccacatgcatgatgttgggagtggtggacaagggatctgaaacctgagaatttattgttcaccgatgaaaatgacaatttggaaattaaaataattgattttggatttgcacggctaaagccaccggataatcagcccctgaagactccatgcttcacccttcattatgccgccccagagctcttgaatcagaacggctacgatgagtcctgtgacctgtggagcttgggcgtcattttgtacacaatgttgtcaggacaggttcccttccaatctcatgaccgaagtttgacgtgtaccagcgcggtggaaatcatgaagaaaattaaaaagggagatttctcctttgaaggagaagcctggaagaatgtatcccaagaggctaaagatttgatccaaggacttctcacagtagatccaaacaaaaggcttaaaatgtctggcttgaggtacaatgaatggctacaagatggaagtcagctgtcctccaatcctctgatgacttcggatattctaggatcttccgggagctgccgtgcatacctgtgtgaaagcaaccttccacgcctttaacaaatacaagagagaggggttttgccttcagaatgttgataaggcccctttggctaagagaagaaaaatgaaaaagactagcaccagtaccgagacgcgcagagggtccagtgagagttcccattcttcttcctctcattctcacggtaaaactacacccaccaagacactgcagcccagcaatcctgccgacagcaataacccggagaccctcttccagttctcgnactcagtagcttaggcatggtaggagtntatcagtgatccattgcacctttattccctcagcatatgcctgaggcg

SEQ ID NO: 435169 - DNA, 1978 bp, Homo Sapiens
  misc_feature (178)..(192): n is a, c, g, or t
  misc_feature (601)..(623): n is a, c, g, or t
  misc_feature (771)..(771): n is a, c, g, or t
  misc_feature (896)..(920): n is a, c, g, or t
  misc_feature (1013)..(1033): n is a, c, g, or t
aaggcgttttccgcatgggtgtttaagcaggatgaattcctttctattagggattttggggttgggaggggatgggcagagatataaaccccagcctttaagactttgacaattgtacgtaaatacagatgtgtataaatataggcacatgcatatttttatgtgaaagttgattttnnnnnnnnnnnnnnntctaaactgcactcttattgataccatcataacgcaagtgggaaaaataagagtacgcagtctaatttaatttcatgcagtgggaaaatatatatgtgtgcttctgtaacatcctgaaaacatagctttccatcccctgttggctttgaatggtgggccgagcacccaggtcgtctgtattttggttttcttttgctaagcagagatcttgaattcttcaaggtgctgatagcaactgctggctcctttctgtagtcacacacctaatgctagtttagtgattcaaaatgcatcacatttttaggcaggacctagattttccctgtcaacctaagatgaaaataatttcagtgttgattcagaactgaacattaagtaggccctcgtcctgcagttggccacttgagtnnnnnnnnnnnnnnnnnnnnnnnaaggtgggcattttcctttaacctctactttttcaaaagcaacaaaggggcctcaacctgagtttcctatgggcctctcttctgcatccccaaagcggccaagagcaaatcctgggggataagaaaaaagtgtaaactaggtaggatntgtgatgctcaaaataaccatctagcaatatcttggagcttgagaatagattttgtgggcttatttcttcttgcctcttccccatcctttcaagagagaacttatttttgaaaagtatctatatnnnnnnnnnnnnnnnnnnnnnnnnntattattatttaggtttttataccatactgtattggcgagaataccactatcattgtcctttacagtctatttcttcccccaagtcttggtcnnnnnnnnnnnnnnnnnnnnncatgaaccacacaggagactttaacatcctgggtcttttctgtttcttctttgtttccccaagtttgtctgtccccctttgccttccctgagtgttggaacatcagggtagtaaaaggctaaacgcaatttcttgcatgtcaatctattctttttctatgtttgactctgatgcagtgtgtttagcgtgtctagtagctggctactcctatttaaaaactcttcctggtagaagacaacccaaagacccttttcgatgaggtggtttctcattctacatcctctgatctctatagactgtaggatgctttgctttcaaagataactgggttagagggtggggtgtgcaataggtgatttatcatggtttttttcattatcaatattacatggatgattttctcagattcttctgaaagaagaaattgacaggcactgctagattcagctattgaatggctgaagagattgagtatttgaccttttctctcatgtgagaatttataaggcacccaatgttaagatttatccagatttttacattttgatttcttctctctgtggggtggcaagttgagggagcattcttcattttagcttttacctgacaacccaaacttgccctttacccccatcccctagaattggtgcctcttggaatattgctgttacccatcatttttggggggccatcttcctaatgctacacacagcctgacaggggagcagcagatgaaagggtatgctattctgtttccagatgtttctttatgtaaatatgacgccaatgtaaatcctgtgtcaagatcatagagaatggtgctttttactacagttagcacatgcatttttagaaactactacatgttttagagaatctttgctgtgtatatgtaaactgtattgttcaactgttaacaaataataaaatatttcattattaaag

SEQ ID NO: 435170 - DNA, 1418 bp, Homo Sapiens
  misc_feature (1393)..(1393): n is a, c, g, or t
ttgaaggagagaaaattttgtgggcacagtatcagtgtcggggtgacattcgtctgggcactgaacaagggttcaaatacgtggcgtgaggacacgggtcgcagaatcatagcatcgcgacccattggactctacattaccagtttcggaaatgctcaaacgagttatctagggttgtggggtaccccagcgtactcaagaccagcaggaaatctgctatattaaatttcttccaatgtggccacccattccaaccttattaggggtcaaatcataccaccagaatttctttacacctcatttgtaaattgggagaaaaaggagtcagtattttggagttgcttttaagcgcaagcttaatataataataatcatcttgctaatcaagtaaaagtgttctttcccagaagataacaaaaccaaggcattaattttttaaaagttttttcccttaaaggggcccccctaatcaggcaggtacctaagtgtttgatgcaaaggttggtgggagagttagtagacagattttagtgaaagtatgaagacttaaacccctacatcagttacacatgtgattctcctgggtgactggctcactcctgttaaagatgtaactctatctcctctgcccaaatctgtattgttttccgttggttttctcacttcagctaggaaataaagcaactagttattaactggaaaatattttaagaaaatggagcaggggttggagaaaaataaatattaatacatcataggaaaaaaatgaaacaagatacatactattaaatatccccacatccatacaaaggttgcttttctactttactcaggacatttcagaaagccaatgaagaagtactaatttaacagctgggagaggggcagaagacactggttgaatggcattcctattagtgttcctgataggcactcatagataaacagtaacattaagtaacagaatttctttgcattaaattatatgtaactaaataaaaccaaattttgacatggttcaggatgtgggaagctagcaaacatgtgcactgcaaaatccagcttggtttctttcagatttaaagacgtgtttagattctcaagatacaaaagctgatgaactgaattatgaagttgaatttcattcatttaattttttcccacagaatttaatgaaaatagaaatggatcaattccttagatactgcaaatattagattttcagaggaatgttttgtacagagtgcatcctagcaaaggatgaaaaacactagaatgttttgaaactttcctggatatttggctggttaatctcttctaaatgaaattcaagagaagagatgcaattctcaaatatatctcaaaataactaaaattaaaactaggagttacntcatgctgggatgcatgagttttcc

SEQ ID NO: 435171 - DNA, 1762 bp, Homo Sapiens
acatgacaacactgcttgtggacattttattcactttaaaataaatattgtgctgtaaactgttcagaagtgaaatccatattacagtaggcaagtacaagggatagacagcacagtgttttgttagagtaaaccattctgagtctcagaagcatcaccaactgtctacatcagatagatactctgagagtaaacatactcataagaagaaaaaagtaatagataaaagttctgagagagaagcaacctattataaataagagtttcttgagattaacaagggtgaggacaactcccatgtgagcctctaccatgtgcccagtttctagtttaactacttgcagagagcagttgctatataaaaatctgttgaaaggatttcaggtactagaatttacatattttacatggtctctcatttacacctatcaatttctttcttcatgatctttacttcattagctacttacatatactataatttacataataaatctattatttaaaaactttcaataggtacaacaattatgacatttgattaggctggactctaacttgcttggatgagatttattttggaatcacagtatccaagcaaagaaaaacagtcagtttataagacacaacaaaaatgaaaaaaagcgagacaaatgtctgcctcagaagtttatcaataacctcttatatacccatatgtattcacaaaggggttgagagtcattttataccatcctttaaaagaggtccaatggctgagaactctataatgagacacagtggggacagaaattatcatgactttcaatgatcttttctttcccctaactttaatatcctttagttggggagagaaagaagtccattttcatctgctgtatctaagattttacagatcactggagattcaaccccaagaatatattgacaggagtgaggctctagcatatatacagtaacagcatgaggtgaatctgattctttgcactttagttttacagtcacctgtcttggtttgtcagttatatcacaaatatctccatttccataaaaatgtgacaccatcctgactgtctgggtaccatcgtcttgaagatgataagctctagcagtattcttcttagcccattcaatatgctcttcttggttccatgtcccgacaaccacagaggttttcccactatccttgtcctcatggtattgatgtacatgtttgccatagcagaattcatatttccaccaaccgacacccccacgaaagcagtaagaaccactaagaaactcttttatgagttggtcatctgtcaatttggatatgtgggttgtcccaacagtgagcactggctgagagccaatagcaatcgacttgtggatcgctggaaatctctcttctttagttgattgcaaatcttccctctttatttctcctaaaaggcacccttagtatttcttcctgctgctccagctgcctcagggtgaggggcttaaatggagatcctggcagtgattgacaaaatatgtcattcacaggagatgctctgaacctatatttaggatgactgcacaagagtggtgtcaaaatgacaacttcatattcacaagttgtaacttcagctactgaaagaatttcatgcttagattcaggatgacatatgtacatcacaggtacttgatctgggccggttctgtttcaaactacaaggtgtaccatttcccattcccacaggatagtatggtgtcatctgaccttcgatatttttag

SEQ ID NO: 435172 - DNA, 1000 bp, Homo Sapiens
ccttgcagatgaaatgggcctaggaaagactcttcaaacaatttctcttcttgggtacatgaaacattatagaaacattcctgggcctcatatggttttggttcctaagtctacattacacaactggatgagtgaattcaagagatgggtaccaacacttagatctgtttgtttgataggagataaagaacaaagagctgcttttgtcagagacgttttattaccgggagaatgggatgtatgtgtaacatcttatgaaatgcttattaaagagaagtctgtgttcaaaaaaatttaattggagatacttagtaatagatgaagctcacaggatcaaaaatgaaaaatctaagttgtcagaaatagtgagggaattcaagactacaaatagactattattaactggaacacctcttcagaacaacttgcatgagctgtggtcacttcttaactttctgttgccagatgtgtttaattcagcagatgactttgattcctggtttgatacaaacaactgccttggggatcaaaaactagttgagaggcttcatatggttttgcgtccattcctccttcgtcgaattaaggctgatgttgaaaagagtttgcctccaaagaaggaagtaaaaatctatgtgggcctcagcaaaatgcaaagggaatggtatactcggatattaatgaaggatatagatatactcaactcagcaggcaagatggacaaaatgaggttattgaacatcctaatgcagttgagaaaatgttgtaatcatccatatctctttgatggagcagaacctggtccaccttatacaacagatatgcatcctagtaccaacagtggccaaaatggtggttttagacaagctgctccctaagttaaaagaacaaggttcacgggtactaatcttcagtcaaatgacaagggtattggacatttggaagattattgcatgtggagaaattatgagtacgaggttggatggtcgaacatgatgac

SEQ ID NO: 435173 - DNA, 700 bp, Homo Sapiens
tatcgatgccacggtgggttactagatgcatatctgtggtataagggggaccaggttcgtgctccatcaaagagatatggatgatatacaacattttctcaactgcattaggatgttcaataacctcattttgtccatctggcctgctgagttgagtatatctatatccttcattaatatccgagtataccattccctttgcgatttggctgaggcccacatagatttttacttccttcttgggaggcaaactcttttcaacatcagccttaattcgacgaaggaggaagggacgcaaaaccatatgaagcctctcaactagttttggatccccagggcagtggtttgtatcaaaccaggaatcaaagtgatctgctgaattaaacagatctggcaacagagagttaagaagtgaccacagctcatgcaagttgttctgaagaggtgttccagttaagtaatagtctatttgtagtcttgaattccctcactatttctgacaacttagatttttcatttgtgatccgtgtgagcttacatctattactaagtatctccaattaactgttttgaacacagacttctctttaataagcattcataagatgttcacatacatcccatgctcgggtaataaacgtctctgcaaaagcggtcttgtcttatctcctatcaggaacggttaggggggccctcttga

SEQ ID NO: 435174 - DNA, 461 bp, Homo Sapiens
cactgtatgtaaacttgagggtagtctggacagtttcatcattttctccagcctcagacgtcacagtaatggtgaagctgggtggattttctgataatacttagcaggaccttgtcaagtgaagcactactgaaggagaatgtggtatcaggagagtccatttatattttggaagactagttgttaggagggttggatcaatgtgcaatcaagccagttaatgacactctcaaacccctcttcactcatccccttaacatcctcacagcacagatgtactgctggtgagagagaacatgaacaggactggagctatacagggatagctgagagacatctgcctgtgaaggagtcagggtagatggactccagggcctccagctcgttgcgctgctcctcgccgtaatctgtcatcgtggcccttgctcttgcccatagatcgcccagacacctaggcggcg

SEQ ID NO: 435175 - DNA, 1031 bp, Homo Sapiens
  misc_feature (483)..(543): n is a, c, g, or t
gaaattttaaggtcagtttattaagttcaatgatgaaagctatcagaagaatattctcctgaaaataattttttcttagaaaaaaagaaaggaaaatcataaccctctgagcatagccacagatgctgtggcagtcaagcctctctgcagatggggacagtccattagtcagctgagtcactctctgggtcagcaggattatagtctggatcatcttcatcatcctccagctccaagtcatccatttcttggaacaaagactcatctacctccacgttgtttccagcatcctccaagaactggatatcagatgtgtcaagattatgatctgtttcaaatagttgtttcccacttaatttattttttcctgcttgttcttcttctttcatccttttctttttaatttccaagagttctgcatcaaacttggctttccaatttaagaaattctcaattgtaactggagtaccatggaataattgnnnnnnnnnnnnnnnnnnnnnnnnnnnnnnnnnnnnnnnnnnnnnnnnnnnnnnnnnnnnnatctgatctactatttcatttaatttttcttgcacagctgtcactagagtaaaaatcatcaccataccaagattttcttcagcctgtaatgctagtaattttaaaatgtctgagacatcattatcttctagattttcctgggagaatatttcataaaggggagcttcatctgggtatttttcactgtatgtaaacttgagggtagtctggacagtttcatcattttctccagcctcagacgtcacagtaatggtgaagctgggtggattttctgataatactgtgaaggagtcagggtagatggactccagggcctccagctcgttgcgctgctcctcgccgtaatctgtcatcgtggcccttgctcttgcccatagatcgcccagacacctaggcggcgcgcagcagcccagacagctgccgcgccgggagagcgggcggcggccagccgctctcgacgaattcgagctcggccgatttggcctgat

SEQ ID NO: 435176 - DNA, 578 bp, Homo Sapiens
  misc_feature (38)..(38): n is a, c, g, or t
  misc_feature (87)..(87): n is a, c, g, or t
  misc_feature (176)..(176): n is a, c, g, or t
  misc_feature (178)..(178): n is a, c, g, or t
  misc_feature (193)..(193): n is a, c, g, or t
  misc_feature (233)..(233): n is a, c, g, or t
  misc_feature (244)..(244): n is a, c, g, or t
  misc_feature (247)..(247): n is a, c, g, or t
  misc_feature (279)..(279): n is a, c, g, or t
  misc_feature (566)..(566): n is a, c, g, or t
cgagaggcagagacatgaaggacagaaggatggaaggnaagtacggaatgcatattttaacataagaatccgcaaagcaaatgcagnagccctaaccacaatgaagaacgcaacaagccttgtattccttagatctcacagcaccctgtactgaccacgtccgctgttcaactaananccttggtactcttcnccttggcaattcccagatacagtggagaggtcggtaggancacaggagctnggntggcaccgagaggctcctgccccatgctgggnactgctgagccctgactagcgcggccgggttgatctccaacacggcaatcttcccgccaaagagggaggccagcaagcacagcaccttttgatccgaagtgcggttcctcagggcacacgatccggccagcaggatgctgaggctctggaaatccttgtaatacaaagcagcttccacttccaggtttgccaggttaaatacgaataagcccactgagcttccgatccacacacatcgggtgttctcagaagaaagacatccacatgcagaatttgggatgagtganagatcacagggt

SEQ ID NO: 435177 - DNA, 1666 bp, Homo Sapiens
  misc_feature (114)..(130): n is a, c, g, or t
  misc_feature (1352)..(1352): n is a, c, g, or t
gtaggaaggaactggtttcggggagccctgggcggggcggctgtggggaggaaggtgacgtgcaggtgaccagaggctctgcactgctcctaggacagctcatctgtaatcagnnnnnnnnnnnnnnnnntacagaacgctgactcctccgtgagacagatcggggaccttagcactttaatccctcccttctgagcgctcggtgtgcacttttagactatagctgtttcattgacgtgtcactctccatccagtgtccttgatgtggcttttagagacttagcagaaaattcgacacaagcaggaacttgattttttaagaaaaaatattacattttgaggacattttgacaagtaggggaagagagggcttctgttgttttgttttgttttgttaactaaacctgaagtattaattccacaaagacactgtccctcaggaccactcaggtacagctctgccagggacagagtcctgctagtgggaggtctcaggtggggcggtgtgttctgtgccatgaggaggcgacaggtccagatggatgtcgtcaccaccttcctcagctctcatcacctggtcgtacgccaggcccacctcttcccagcaagggacgccaaagaactgcagtttttattctgagtcttaatttaacttttcatcatcttttcctattttggagaattttttgtaattaaaagcaattattttaaaatgtgcaagccagtatctcacaaggcatggatttctgtggaatttatttttattcaaataaccatatttatctccaggctgtggaatcgccactttctttgtgaagacagtgtctctccttgtaatctcacacaggtacactgaggaggggacggctccgtcttcacattgtgcacagatctgaggatgggattagcgaagctgtgggagactgcacatccggacctgcccatgtctcaaaacaaacacatgtacagtggctctttttccttctcaaacactttaccccagaagcaggtggtctgccccaggcataaagaaggaaaattggccatctttcccacctctaaattctgtaaaattatagacttgctcaaaagattcctttttatcatccccacgctgtgtaagtggaaagggcattgtgttccgtgtgtgtccagtttacagcgtctctgccccctagcgtgttttgtgacaatctccctgggtgaggagtgggtgcacccagccccgaggccagtgggttgctcgggggcccttccgtgtggagttctagtgttcacttgatgccggggaatagaattagagaaaactctgacctgccgggttccagggactgggtggaggtggatggcanggcccgactcgaccatgaacttaatttgtaaggggtgtgtccggctttttccagtctccatgtgaaaaatccctccctgtctctgggcagcactggtctggcacttttctttgttttacttggtttgaaagggacctaattaccaaagccccacaagaaacactttcttttttggcccaccagccataagcctgaatgggtattgttaagggaaaccccaatgggggcccatttaaaacaatgaaaacttggaaacggggtttaaaaaaagccccaggttccttatggggaaaacccccttaaatggggaaatt

SEQ ID NO: 435178 - DNA, 457 bp, Homo Sapiens
attttttcttaacatccaagacaaggccaccagtcaaaactatcaagttttagtagtattttcctgcttgattatataatagcctggcttagagatacaacttttaaataaggaatcttaagatgatgtgcagctgttctttgccttatttgtttgtttgttggttagtttgtagtttctaagaatctgctctgttcagctgtacagttccttcttctggagttaacctgtggcaaggattatgtttcacctgtcacaaaaatgagatctgtgccttcctctattataaagttagggcatgtgattcattcttcgaaatacttcaaaatgtactttggtatgtttttgtcttgaaaagaggttttctagctagaaattcggggcccagaaggtcaaggctccagagatccccttcttcatcatccttcagttgtctgaggagacagagggtccacag

SEQ ID NO: 435179 - DNA, 513 bp, Homo Sapiens
  misc_feature (467)..(467): n is a, c, g, or t
  misc_feature (495)..(495): n is a, c, g, or t
gaattccctggaacactggtgtttacagagagagatactttgtggaatggagcttacatgatgaatgaaaaagagaccgttaaaaagtactagccgttgtttacaaataactaccaggtaaacaaagaaatcactttctttcccctttctaaggataagggagaataaaataatcaccaagaggcatggagtttgaaaagtatataacagatttctttattattatttacaatcaagttctgttggccaacataatgaaataaataaaagatgtgccctggcctgtgaatttcaactctccttgacttaagttctctgaagggcaaattggaaagcggtgatcaggcagggaagagagggcaggtggaggccaggaccatcggtgggaaggccgcctgactcctctctcaccagctctaacactcacatccccaaatgtccagagaacaagcatggaagaaaaaaantaaagtgcaaatttaaaagtgataaaangggtgtttcgcacaccca

SEQ ID NO: 435180 - DNA, 517 bp, Homo Sapiens
  misc_feature (230)..(266): n is a, c, g, or t
  misc_feature (456)..(456): n is a, c, g, or t
gaaaagtatataacagatttctttattattatttacaatcaagttctgttggccaacataatgaaataaataaaagatgtgccctggcctgtgaatttcaactctccttgacttaagttctctgaagggcaaattggaaagcggtgatcaggcagggaaggccgcctgactcctctctcaccagctctaacactcacatccccaaatgtccagagaacaagcatggaagnnnnnnnnnnnnnnnnnnnnnnnnnnnnnnnnnnnnnggtgtttcgcacacccaatgaactaaaactttatacgtaggtaaaatagtaaagataaatgtttttccttggccttcatcacaacccctgaaacggaaagatggcgctgctgtgcttctgagcctaggcttcttgcactaaagcaccaagggcatcgcacacaggcttggcagaggggccatggccagantcaccaccttcagacaagtatgttggaggtctcgaatcccttggcacccccaagcatgcag

SEQ ID NO: 435181 - DNA, 282 bp, Homo Sapiens
atgaataaaattttatattatttgagccacactcatttgtttaagtatttcatgctacaaggtagggttaaacagttacaatagacactttatgacccacgaagcctaaaatatttactatctggtcctttgcaggaaaagtttgtcaactcttgccttaaggtatccattgtatataataaattaacttttttctatgcatctagaagggtattagctgtgtatcatcctagagaaaaatgagaaaataagatacacaaattattttattttgggcttaat

SEQ ID NO: 435182 - DNA, 953 bp, Homo Sapiens
  misc_feature (457)..(457): n is a, c, g, or t
tccattgggatatctgattgacccagcatcattttctaaaagatgcctttcctcattgcactgcggcgcctcctgtgtgcttttgacagggatgacagggatgaggatgataaagaataggcatagcgtgtctttctcttgtgagacacagggattccaactcctattctcaatcttaaaaagaagttatttttcctcctccaagtgggaattttactagtgcttctgcttccagggataccaagggttcgagttttgggaggatgaagaggggtcgaaggacattgaattgttcagatgacccttatgactgcatacggactaagtgtgggagaatgtcccctgcattgtcactctgtgcaagattggctatcggcatgtggtggatgctactcttcaggaggaggcctgctcgctggccagcttgctggtgtcggtgaccagcaagggagtctgngacgtgcatgaggaaagtggggaagggcagcctggacccagagagcatcttcgagatgatggagactggccaagcgtgtgggcaaggtactgcatgcctccttgcagagtgttgtgcacaaggaagaaagcctggggcccaagagacagaaagttggattcctgggatgatttgcacatcaactgctcaactgtggattgttttttacttttccttttaaaccggggaactgaaactcctaaatcttaaaacaccctggggaaggagctgattcacgaaggagagcgtttcaaccgtggcatttgctctctgcattccagttagcaaatgggtgactatctacaggcaccatgacagtgttcccaacaaggcagaaatcagcctggtctctccttccctgctcctggttgactgcccgtgacatgacaaaacattggcagtggtggcgcagagatgcaactcgagtgtgaataaagtttagaagcatttgcttttg

SEQ ID NO: 435183 - DNA, 442 bp, Homo Sapiens
ttttttttcaaaagcaaacgcttctaaactttattcacactcgagttgcatctctgcgccaccactgccaatgttttgtcatgtcacgggcagtcaaccaggagcagggaaggagagaccaggctgatttctgccttgttgggaacactgtcatggtgcctgtagatagtcactgaagaaacataaaagatgaaaacccaggctatgctctcaacagggcagaagctcccccattaagcccaagtctaggcagctgcttctctccacagggatggacctgggccttgctgggaggaacgcccacaccaggacctctggaagcagtcccaagggcttcagcttcacattatgttctttccatttggtgataaattcctaaacgccttaccccatttgctaactggaatgcagagagcaaatgccacggttgaaacgctcttct

SEQ ID NO: 435184 - DNA, 899 bp, Homo Sapiens; identical to SEQ ID NO: 314735
  misc_feature (270)..(270): n is a, c, g, or t

SEQ ID NO: 435185 - DNA, 1562 bp, Homo Sapiens
  misc_feature (431)..(491): n is a, c, g, or t
gttgtgtttatgtcccggggtgaatatattgctaagtggtatgggggtaaaatgggtgcgaaaaaaggacggggatattgggtatggaggcgatggttgtgcggatatgatctttgacggtggtgcggggagggggaaaataattgatggagttttggggcggtggaaaaacgggaccgggaaaagaatgggaggccggaaaaggggtattgcttaaagaagcataggggaacggggcaagatcgggaatagaggggagaatataagggggccgggatcaaaaaaagagtatgtttaaaatggggggtggggtcaagacgggggataaggtccactgtcagaggtatattatgcagtagctcccaaggatacttaatgtaagggtggtaaggggcgatggcgggtggtaaggcggttgatatagatgaggnnnnnnnnnnnnnnnnnnnnnnnnnnnnnnnnnnnnnnnnnnnnnnnnnnnnnnnnnnnnnccagaaaatagcctttaattttacatgtacaaatgctgctgtaaattcgtaacagcgaagaaaaatatatacgaaccggtttaaaaggaaaagtaaaaaacaatccacagttgagcagttgatgtgcaaatcatcccaggaatccaactttctgtctcttgggccccaggctttcttccttgtgcagaacactctgcaaggaggcatgcagtaccttgcccacacgcttgccagtctccatcatctcgaagatgctctctgggtccaggctgcccttccccactttcctcatgcacgtcacaactcccttgctggtcaccgacaccagcaagctggccagcgagcaggcctcctcctgaagagtagcatccaccacatgccgatagccaatcttgcacagagtgacaatgcaggggacattctccacacttagtcgtatgcagtcataagggtcatctgacaattcaatgtccttcgacccctcttcatcctccaaaactcgaacccttggtatccttgtattgaagagagcagcctttacagcaatggaaatggcatcaaacaaatttccaccacattccagaagcagcacatccacatagagaacccagcagtgctcccgaggactaatgcagagggtctttaagtcgacactgcttttattgttaaatatccgatagagggtgttagcgatctcggtgccaaggtcatcacctcctctaccttcaaattcaggggtagcactggctgaacagtcaacaaagaactccaagtagccttcatttggtttctccagcttcggcgtccccatttctgctttcactcccaccaagatgtctgtgtgacccagcttgaccctggcggacccactagtgttggacaccacatcagtttccacttcgacacatcggtagtcctcacagccacggccatccacacggaggtcttcctggacgccatgcacgatgtacaccttctccgcctcgctcagcgccacggacgccatgctgccgagctgccccacgagccgcacgtcatctgcgccctcgtgccgaattcgccacccaggcc

SEQ ID NO: 435186 - DNA, 992 bp, Homo Sapiens
tttcagtaatagactcgtttatttctcagaatttagtttgctgcttgatattacctgcaaatgtgaggcaatcacacaatgtccttgaggctctaatcccagacttgtctgagcaccgtccacaggcagctcggcccatcagaggtctgaaacaaacctcctaacttgggccaggtattttggtttcaaatagtcacccagctcatccttagtgacccacacatgatggcccttattcccagcctgggaaaagtctccagttaatagcagtgctttgaagaagaacaccttggctccgaggttactctctgtccgcattgcctgggggaacttgaatgtgtagtgcccacagggtgcatttcctaggaacttggcttccatgttgttttctgagagtgtggccagggttcgttcagctgttcctcgaagggtctccccaggctgccactctgcctggggcagtatccaaacatcctggtctccaaacttctctctgactaacaggacaaggttcctgtctagcttcctgttcagggatgttcggtcattcttttcatcagcttctgttatgcgagctccaagtttgaactgtagaaatttctgctcccacatatcttccaaatcttgcgccagcaatatatcctgttcatcttcttcatcatgaaggtcagctttcttctttgccagtcgctggttttcatccagagcacgaagctcgtggtctgaatacaggcttctctctatctcaatctgctgcagtagagacgccatctcttcctgcaatggggtcaacggcttggagactacaggtggccgctgcaggcacaacgcgcccaacaagcgccatggggatccgttgcttgagggtgcggctgcaagagccaggctgcgagagcttagactgccggcccagagcctctcgaaccgccgccaaccccccgccacccctaacagcgtccgccttacgggcgccgccatctttcgttctcccc

SEQ ID NO: 435187 - DNA, 764 bp, Homo Sapiens
atctcccgcttaagagggatttcacatagacacaggaattagtgggaaaaaggcttcatttgccccactctcagtctcaaacttggagttaaacacagataacattcacaaagtttaactgagagaaaaggctattccaatacccttacctctcacccgaaaataagacagactttttaagtcgtattatggtagatgtgagcaacaaagaaaagaatatgaaattatttgttacttaaaacacaaagcaggggccaagcaactgtcttttatttgggaattcaaataccccttttcccttccttctggctggcctaaaaggatcacaacctgttatgcgagctccaagtttgaactgtagaaatttctgctcccacatatcgttccaaatcttgcgccagcaatatatcctgttcatcttcttcatcatgaaggtcagctttcttctttgccagtcgctggttttcatccagagcacgaagctcgtggtctgaatacaggcttctctctatctcaatctgctgcagtagagacgccatctcttcctgcaatggggtcaacggcttggagactacaggtggccgctgcaggcacaacgcgcccaacaagcgccatggggatccgttgcttgagggtgcggctgcaagagccaggctgcgagagcttagactgccggcccagagcctctcgaaccgccgccaaccccccgccacccctaacagcgtccgccttacgggcgccgccatctttcgttctcccccgct

SEQ ID NO: 435188 - DNA, 297 bp, Homo Sapiens
tttagtcatttattattgctaccacagtggataaggccaacatctatatttcttaaataaatacctcaatcatctatatctgaatatgtttcacatgtcaaaactgcttataagatataccaacctcaaaataaatatccaaatttagataaatctgtgtaaaataaataaaaaatgtataactattaaagactaatggagggttattacttgaaatatacaatccatatctgttccaaaaacaagctacctgaccttggccaaccaaaacaccgtctgtattaattttaccttttg

SEQ ID NO: 435189 - DNA, 1646 bp, Homo Sapiens
  misc_feature (9)..(9): n is a, c, g, or t
  misc_feature (14)..(14): n is a, c, g, or t
  misc_feature (25)..(25): n is a, c, g, or t
  misc_feature (29)..(29): n is a, c, g, or t
  misc_feature (31)..(31): n is a, c, g, or t
  misc_feature (45)..(47): n is a, c, g, or t
  misc_feature (49)..(49): n is a, c, g, or t
  misc_feature (62)..(62): n is a, c, g, or t
  misc_feature (64)..(64): n is a, c, g, or t
  misc_feature (73)..(73): n is a, c, g, or t
  misc_feature (80)..(80): n is a, c, g, or t
  misc_feature (87)..(87): n is a, c, g, or t
  misc_feature (98)..(98): n is a, c, g, or t
  misc_feature (116)..(116): n is a, c, g, or t
  misc_feature (133)..(133): n is a, c, g, or t
  misc_feature (138)..(138): n is a, c, g, or t
  misc_feature (151)..(151): n is a, c, g, or t
  misc_feature (174)..(174): n is a, c, g, or t
  misc_feature (200)..(203): n is a, c, g, or t
  misc_feature (208)..(212): n is a, c, g, or t
  misc_feature (266)..(266): n is a, c, g, or t
  misc_feature (295)..(295): n is a, c, g, or t
  misc_feature (302)..(302): n is a, c, g, or t
  misc_feature (307)..(307): n is a, c, g, or t
  misc_feature (320)..(320): n is a, c, g, or t
  misc_feature (324)..(324): n is a, c, g, or t
  misc_feature (332)..(332): n is a, c, g, or t
  misc_feature (334)..(334): n is a, c, g, or t
  misc_feature (336)..(336): n is a, c, g, or t
  misc_feature (347)..(395): n is a, c, g, or t
  misc_feature (398)..(398): n is a, c, g, or t
  misc_feature (400)..(400): n is a, c, g, or t
  misc_feature (402)..(402): n is a, c, g, or t
  misc_feature (404)..(407): n is a, c, g, or t
  misc_feature (413)..(414): n is a, c, g, or t
  misc_feature (422)..(423): n is a, c, g, or t
  misc_feature (430)..(430): n is a, c, g, or t
  misc_feature (433)..(433): n is a, c, g, or t
  misc_feature (446)..(446): n is a, c, g, or t
  misc_feature (448)..(448): n is a, c, g, or t
  misc_feature (450)..(450): n is a, c, g, or t
  misc_feature (452)..(452): n is a, c, g, or t
  misc_feature (467)..(467): n is a, c, g, or t
  misc_feature (469)..(469): n is a, c, g, or t
  misc_feature (480)..(480): n is a, c, g, or t
  misc_feature (502)..(502): n is a, c, g, or t
  misc_feature (513)..(513): n is a, c, g, or t
  misc_feature (517)..(517): n is a, c, g, or t
  misc_feature (519)..(519): n is a, c, g, or t
  misc_feature (521)..(521): n is a, c, g, or t
  misc_feature (534)..(536): n is a, c, g, or t
  misc_feature (541)..(541): n is a, c, g, or t
  misc_feature (553)..(553): n is a, c, g, or t
  misc_feature (564)..(564): n is a, c, g, or t
  misc_feature (618)..(618): n is a, c, g, or t
aaatcaaanggatnttaaggaaagnatangnatgaacgtctaagnnntnaactttcccaganangggccaggnctggaanccctgtncgttgcgcctnctaagcagttaaccttanaccctccaaggacaggnatctnaaccaatccaggncccagggaggcggagtcgcaaancctaactctggggtgtattctgctcnnnntcctnnnnncctccccagatagctctcccagcctggggcacggacagcacagactttgcaganatcacccggggaggtttctcagtgcaganaggagcngaggnaggggttggagangctnaactcganangnccccaagggcnnnnnnnnnnnnnnnnnnnnnnnnnnnnnnnnnnnnnnnnnnnnnnnnnttnanantnnnnaagggnngaaaaaannaaaaaanctnccctcggcaggantntntntctgggcccagggangntaaagaataantaaagaaaaacaggaaaaaaancccgagaaagnaggngntnatcaggtgctggnnntcctncctcctcccctnccctggctgtnagtctgtagcttcacaggtctttgctgattttcctcaccagcgtgtttccaggntttttcttttcccctcggcctggtagccacagccctccagcatccctcccaccccccaggcggccacagccacggggacaccggcaggaggagggccagggcgaaggaagccaggacaaagcgcaggccgctgctggccgccgccaggaggagcagggccggcggccgtgtcaaggcatggagggccacgcggttttccgtgtccttcacgccggcctgtgggcaggaggggtggctcagccatccgaaacgctagggcctcctggacaaagagaggaggtagaccctgcccggggcggggtgagagctcccaaatgggaagggaaggcagcacagtccgatgttcagtgtggcacactgggtatggagtgaatgaatgaacgagagcgaatgatggatggatgagtgaattaggagctgtgggggcactcaattcagtagcaatgccgcagtgaggccccagggaagtaaggacagggaggttgcctcaggctggagtggaggctggagggaggctgctgggctaggttggggtgctgggctgtgctttgaagagttggggtccgaggcacagagctggctgttgtgctggcgtgcacagccgactggagatgggagaccagggagggcgttggtgctggggtcccagtagggctgggggggtgagcccccacctgccacacctgctgtggttttcagcagcagggcggctgaggctcaggaggaaaagatcccgctccaggggtccaggctggctcaggtgggtgggagggggtggctgaatccacttgcaattcccccactgcagccactcccaggccccctggggcccctgcctctcaccttcagcatctccagcaccaggggcttctcatcttccctcatctcccgcactgacaggtggctgggggccatggcaacccccaggccccggccccccagaagggagctggcgtcgtgcacctgcaccggtcgcctttggtccttcgacaaggtttcgggagcgggtctggaagggggatcccggg

SEQ ID NO: 435190 - DNA, 771 bp, Homo Sapiens
  misc_feature (615)..(674): n is a, c, g, or t
ggatctggaggaagggacagggctgcccgtctcagctctcaaccttcccagagaggggccaggcctggcagccctgtgcgtcgcgcctcctaagcagtcaaccttgtcccctccaaggacaggcatcgtgacccaatccaggtcccaggtaggcggagtcgcagtaccctaactctggggtgtattctgctcggcctcctctccccctccccagatagctctccacagcctggggcacggacagcacagactttgcagacatcacccggggaggtttctcagtgcagacaggagctgaggtaggggttggagaggctgacctcgagaggcccccgagggccaggaaggaaaaggagtcattccactctgagaagctcaaacacaacagacttcacactgctgacgggtggacagaggccaggctcctcccctcggcaggcctctgtttctgggcccagggtggttgaggactcactgagggagagcaggtaaaagaacccgcagacagtaggcgatcatcaggtgctggcgcccctccctcctcccctgccctggctgtcagtctgtagcttcacaggtctttgctgaattccctcaccagcgtgtagcccaggnnnnnnnnnnnnnnnnnnnnnnnnnnnnnnnnnnnnnnnnnnnnnnnnnnnnnnnnnnnngcggccacagccacggggaccacgagccgggcccggggctcccccatgcccccagcccaggcccgagcccgggcctccgcgaaggccagcagcctcc

SEQ ID NO: 435191 - DNA, 1358 bp, Homo Sapiens
ttttcacagcggtttcaggctttattaacaaacggtgtaaaaaaccagacggatctggaggaagggacagggctgcccgtctcagctctcaaccttcccagagaggggccaggcctggcagccctgtgcgtcgcgcctcctaagcagtcaaccttgtcccctccaaggacaggcatctgacccaatccaggtcccagggaggcggagtcgcaaaccctaactctggggtgtattctgctcggcctcctctccccctccccagatagctctcccagcctggggcacggacagcacagactttgcagacatcacccggggaggtttctcagtgcagacaggagctgaggtaggggttggagaggctgacctcgagaggcccccgagggccaggaaggaaaaggagtcattccactctgagaagctcaaacacaacagacttcacactgctgacgggtggacagaggccaggctcctcccctcggcaggcctctgtttctgggcccagggtggttgaggactcactgagggagagcaggtaaaagaacccgcagacagtaggcgatcatcaggtgctggcgcccctccctcctcccctgccctggctgtcagtctgtagcttcacaggtctttgctgaattccctcaccagcgtgtagcccaggcagccccagcccccctcggcctggtagccacagccctccagcatccctcccaccccccaggcggccacagccacggggaccacgagccgggcccggggctcccccatgcccccagcccaggcccgagcccgggcctccgcgaaggccagcagcctcctgcccacgccccggcggcggtgccagcgagagacagacaggcgggtgacccgggccccgtcccctgcatttgtgccaggggccagagccaggaccccacacacgtcaccggagccccgcacggccacccaggggccccccaggccacccggcggaggcagcgagccccatcgggcccgcaggcccagcttcacggcggccacagccaggaacaccggcaggaggagggccagggcgaaggaagccaggacaaagcgcaggccgctgctggccgccgccaggaggagcagggccggcggccgtgtcaaggcatggagggccacgcggttttccgtgtccttcacgccggccttcagcatctccagcaccaggggcttctcatcttccctcatctcccgcactgacaggtggctgggggccatggcaacccccaggccccggccccccagaagggagctggcgtcgtgcacctgcaccggtcgcctttggtccttcgaccctcgtgccgattcgaacccggcctcgacctagccattgattt

SEQ ID NO: 435192 - DNA, 871 bp, Homo Sapiens
  misc_feature (62)..(141): n is a, c, g, or t
  misc_feature (192)..(304): n is a, c, g, or t
  misc_feature (308)..(308): n is a, c, g, or t
cgttgtaaattactctttccttgctttctttttttaacttgagacccagtttcgctcttctnnnnnnnnnnnnnnnnnnnnnnnnnnnnnnnnnnnnnnnnnnnnnnnnnnnnnnnnnnnnnnnnnnnnnnnnnnnnnnnnagtctcctcagtagctgggattatgggcatgcgccaccacgcccggctaannnnnnnnnnnnnnnnnnnnnnnnnnnnnnnnnnnnnnnnnnnnnnnnnnnnnnnnnnnnnnnnnnnnnnnnnnnnnnnnnnnnnnnnnnnnnnnnnnnnnnnnnnnnnnnnntganaccttgcgcccggcctccttccttgttttcttaagacaaagtgctgtatttcctgacaaatgcatcggctagagctcaaggtttaaagagaaaacacaactgtcttcctcctccctcattcccggtgtcttatgccccacaactttctttgcagaagaaattttgaattcaatgctgtgatctaattaaagatgctattaaactaaaaaggttatccaccagaaatgaggccacgtgtctctcatgcccagaacctggaggtgcggcaaagcaaggaggccaaccgcggaaacgccgccaacaccccactccctgagctggcaccctacagctacaagacacagaaggacaaaacagccaggaagccacgaactaggcatcccccgaggcacgcaatgcccgcttatcactgcacatccacaacagaattgaggccagaggactaacttccctggaccacagatgctctgtcccaatctccagaaaagacgaatcaacagaaagatcccaggcaacgtcagagggattcaggaaagctttttctaagaaaccggacgcgtggg

SEQ ID NO: 435193 - DNA, 1563 bp, Homo Sapiens
  misc_feature (1470)..(1506): n is a, c, g, or t
atcttgtttggatacatctttcatcaggactctgccacatccatactttgtccttgtggtgagagaggataaaatgttatataatttgttattcaaagaacatggcaaccgtaacagacaaaaggaagcatggcatctagggagaggagagtggagagttttccatacacaaacacatttaaagcttccctgtacaaaaatacctgctgttgcttatagaaatcgttttccgtttatgaatagtcaggtcttgcagtactaatccaggtgcagtgccagcaagtatttcgaagataaatttcaactacttgcatattcaagtccaaactaacatatttaatagttttctttattgcaaatatgatgtctttgacctgaggtatagagttgtcctctagaatctttgcataaggcatagggacatcagccccagtgacacgaacagcaggagcatccaggaaattgaacgcaggaccttccatgatcctggcacagatttcagctcctactccaaactgtggccagcctccttccacagttacaagatgatttgtcttcatgacactggcttctatggtttccatgtccattggtctaatggtacgcatatttatcacctcacattcaactccttctttagatagcactgctgcagcttctaagcagtggcccacaggtcttgaatgggaaaccacagttatatgtgttccttgcctttctattttggcttttccaataggaatcagaaaatcttttgactgagcttccggaggaaattcaaaaggaaccccatacatcaattcattctctagcaccaccactggattgttatcccgaatggctgatttaataagtcctttagcatcctctgaattccagggactgaccacctttaagcctgggcagtgcccataccaggcagcaaagcactgtgagtgctgggcagctacacctgctgaggcaccattgggccccctgaagactataggcacaggctgaaggccaccagacatgtagtaggtcttggcagctgagtttataacctggtcaatggcttgcatggagaaattgaaggtcataaattcacaaatgggccgcaacccagccatagctgcacctacagcaattccagcaaagcccatctctgatatgggagtgtcaataatcctcttgtctccatatttcttccacagccctcgactaaccttgtatgccccatcatactgggcaacttcttctccaagcagaaataccttctcatctctttccagctcctcatccataccctgatttatagcatcacgaactgtcacctgcagcgcagccggcgcggtccagtgaaagcgcctcttcagcagcccggagacctcccgaaggggtctccgcaccaagccagacaccgccgccatcttggtcgtgtcctctatccccgctctcgacgaattcgagctcggccgatttggcctgatnnnnnnnnnnnnnnnnnnnnnnnnnnnnnnnnnnnnncggccgccaccgcggtaaaacccgattcgccctatgagtgagtcgattacatccggc

SEQ ID NO: 435194 - DNA, 752 bp, Homo Sapiens
tcagaaatctttgactgagcttccggaggaaattcaaaaggaacccccatacatcaattcattctctagcaccaccactggattgttatcccgaatggctgatttaataagtcctttagcatcctctgaattccagggactgaccacctttaagcctgggcagtgcccataccaggcagcaaagcactgtgagtgctgggcagctacacctgctgaggcaccattgggccccctgaagactataggcacaggctgaaggccaccagacatgtagtaggtcttggcagctgagtttataacctggtcaatggcttgcatggagaaattgaaggtcataaattcacaaatgggccgcaacccagccatagctgcacctacagcaattccagcaaagcccatctctgatatgggagtgtcaataatcctcttgtctccatatttcttccacagccctcgactaaccttgtatgccccatcatactgggcaacttcttctccaagcagaaataccttctcatctctttccagctcctcatccataccctgatttatagcatcacgaactgtcacctgcagcgcagcgggcgcggtccagtgaaagcgcctcttcagcagcccggagacctggcagggagagaggaagatgacggcgggacgcagggtgggcaggggtcgcgtgggaatacaggccgcgcgctgctgcctacactcccgaaggggtctccgcaccaagccagacaccgccgccatct

SEQ ID NO: 435195 - DNA, 1887 bp, Homo Sapiens
  misc_feature (188)..(196): n is a, c, g, or t
aattgggggggaggaaatccccaaaggccccttaggtccaaggaggccaggggaattttcccttagggaagccaaggttaatgggcccatgtttcacctttaccctagttgggggcgcgcgcggcccaaacggaatggttctagaaaggttcttggaaaggccgaggcgggccggacaaggctgtgcnnnnnnnnnagtgggggtttgatgaggttagaaattcctttattccttatcaaaacaaactaacagtaaatgtatattatatgctttaattttatacatataagttatcttgtttggatacatctttcatcaggactctgccacatccatactttgtccttgtggtgagagaggataaaatgttatataatttgttattcaaagaacatggcaaccgtaacagacaaaaggaagcatggcatctaggggaggagagtggagagttttccatacacaaacacatttaaacttccctgtacaaaaatacctgctgttgctttagaaatcgttttccgttatgaatagtcaggtcttgcagtacaaatccaggtgcagtgccagcaagtatttcaaataaatttcaacgacttgatattcaagtccaaactaaatatttaatgttttctttattgcaaatatgatgtctttgacctgaggtatagagttgtcctctagaatctttgcataaggcatagggacatcagcaccagtgacacgaacagcaggagcatccaggaaattgaacgcaggaccttccatgatcctggcacagatttcagctcctactccaaactgtggccagcctccttccacagttacaagatgatttgtcttcatgacactggcttctatggtttccatgtccattggtctaatggtacgcatatttatcacctcacattcaactccttctttagatagcactgctgcagcttctaagcagtggcccacaggtcttgaatgggaaaccacagttatatgtgttcctgaaaacagagtggtcacagatcagagatcaggttgaaactgaagatgctacaccactgtgccgccagctgtggctcttgttcattcataaagtcttcaattcaacttcattccagtgagctgaggaatgtggcagccttccttgcctttctattttggcttttccaataggaatcagaaaatcttttgactgagcttccggaggaaattcaaaaggaaccccatacatcaattcattctctagcaccaccactggattgttatcccgaatggctgatttaataagtcctttagcatcctctgaattccagggactgaccacctttaagcctgggcagtgcccataccaggcagcaaagcactgtgagtgctgggcagctacacctgctgaggcaccattgggtcccctgaagactataggcacaggctgaaggccaccagacatgtagtaggtcttggcagctgagtttataacctggtcaatggcttgcatggagaaattgaaggtcataaattcacaaatgggccgcaacccagccatagctgcacctacagcaatttcagcaaagcccatctctgatatgggagtgtcaataatcctcttgtctccatatttcttccacagccctcgactaaccttgtatgccccatcatactgggcaacttcttctccaagcagaaataccttctcatctctttccagctcctcatccataccctgatttatagcatcacgaactgtcacctgcagcgcagccggcgcggtccagtgaaagcgcctcttcagcagcccggagacctcccgaaggggtctccgcaccaagccagacaccgccgccatcttggtcgtgtcccgctctcgacgaattcgagctcggccgatttggcctgat

SEQ ID NO: 435196 - DNA, 473 bp, Homo Sapiens
  misc_feature (431)..(431): n is a, c, g, or t
gcttgtggtagacatacagatctttgttttaattaaaatttttccttttacagtttgtacattcatgaataggtattcataggcagattagattttcctagatacaaagattaacaggaaacaaaaaaggaaatggtattatggggataaggctctatttgtgctgcaatagctctgtaaacttgattatattacctgtttaggtgataaatatgcgtaccattagaccaatggacatggaaaccatagaagccagtgtcatgaagacaaatcatcttgtaactgtggaaggaggctggccacagtttggacgtaaggagctgaaatctgtgccaggatcatgggaaggtatttcaaagaaactcggtttctaagaataccagtccaagctatagtaaaacatcatgtacctggaataccgtaccaggatnaaagagattgaaagctaggaagtgggccaaaccgaactttca

SEQ ID NO: 435197 - DNA, 396 bp, Homo Sapiens
  misc_feature (368)..(368): n is a, c, g, or t
  misc_feature (376)..(376): n is a, c, g, or t
cagaactttcaattatgtcttttgatcagttttaccttgatataatttgtttctcttattccatctaaaataggaacttataaagacagagttaagtgaattaaatatacttagtaaatatataatggaagtttttttatgttagaataaaatagaaatgtgtcagacttaaaaattatggaagatactaataaatgtccatattatttctgtcctaattttttgaccattaaaacaagcttaaaatctggatacttaacatctaatttttgatcttggcaaaatataaatcaaattcatataaggttctaaatctacttcgggtttggcatcaagggctccatccaattatttcttaggcgtctccntataattnaacatccctggtaatctcgg

SEQ ID NO: 435198 - DNA, 2383 bp, Homo Sapiens
  misc_feature (175)..(185): n is a, c, g, or t
  misc_feature (211)..(332): n is a, c, g, or t
  misc_feature (370)..(379): n is a, c, g, or t
  misc_feature (404)..(420): n is a, c, g, or t
  misc_feature (428)..(582): n is a, c, g, or t
ctccccccctttttttcccccggggggggaaatattatttccccaaggggggccacagggggttgtaatcccccccggggaaaaacaggttttacactcccccgtttggggagggttcccaccgggcgggggagtttttattaaatttccccccccttctccaaagaagggcccnnnnnnnnnnnaaatataaaaaaaaacccccgggggnnnnnnnnnnnnnnnnnnnnnnnnnnnnnnnnnnnnnnnnnnnnnnnnnnnnnnnnnnnnnnnnnnnnnnnnnnnnnnnnnnnnnnnnnnnnnnnnnnnnnnnnnnnnnnnnnnnnnnnnnngggaaaaaattttgcccatttccttttcctttgggggnnnnnnnnnnaaaaaaaggttttaaaaaatttttnnnnnnnnnnnnnnnnnccaaagannnnnnnnnnnnnnnnnnnnnnnnnnnnnnnnnnnnnnnnnnnnnnnnnnnnnnnnnnnnnnnnnnnnnnnnnnnnnnnnnnnnnnnnnnnnnnnnnnnnnnnnnnnnnnnnnnnnnnnnnnnnnnnnnnnnnnnnnnnnnnnnnnnnnnnnnnncagatgtgcaggtctttattttcctctccctcactctgctccaacacccagcataaggcactacccccagatgggagggagggagggcgcactgtgaactcagtgtgagggggtcagctgcagcagacggagttgcttccatgtcactctcctctcaagagaagctgctatttcagggtaaatggagtctgctctcatccatggttaaaagtggattgagacgctctacagagaattccatcttctttttaaggaacacatccgaacgacttcagaagggaaattttgatatttaaaaatcagtgtctctcacttcccactccatccgccacctccctttctaagctcagagcacagcgctcctacggtccagccaggcatctctccagaaaggggcttgagagtttcgggcccctgatggagcggctcacttgctggccgtgaacgcctggattcccgtgatagctctcccaaggatcagggcgtgaatgtcatgtgtaccttcgtaggtgttcacggcctccaggttcatggcgtgccggatcacgtgatactcgtcagaaatcccattcccccccagcatgtctcgggcctggcgggcgatgtccagggctttcccacagttattcctcttcagcagagaaaccatctcgggggcagccttgttcctggtccttcaagcggccgagctgcaggcaggcgtgaaggcccagggtaatctcagtgagcatgtctgccagcttcttctgaatcagctggttcctggccagtgggacaccaaactgcatcctgtcgagggcgtactgccgggctgtgtgcaagcagaactccgaagctccaagcacgccccacgcgatgccgtaccgggcgttgttcaggcagccgaagggaccccccaggctggatgcaccagggagcacattctcctctggcacctccacaccgtccatgatgatcatgcctgtggctgaggcccgcagcgagaacttgccctggatcctgggggccgagagaccccgcatccccttctccagcaggaagccccgaatgcagccatcttcacaccgagcccacactacaaacagatcggccataggcgagttcgtgatccaggtcttggtcccattgagggtgtagctcttgttggatgagttgtagtgggctctgggtctccatgctgctggggtcacttccgctgttgggctctgtgagcccgaagcagcccaggagctcccccttggccagctggggcaggtacttctgccgctgttcctcgctgccataggcatagatagggtgcatgacgagggaggactggacactcatcgccgacctgtagccactgtccacccgctccagctctcgggccaggagcccataggccacagacgaaaccccagcacagccatatcctttgatggtggggcccagcacacccaactcccccatctccgaaatgatctcccgatgaaaaacttcgttgcgattggccaacaggatgcgaggcatgagtctctcctggcagtaggtgcggaaggtgtccctgatgaggatctcatctgtggtcagctgctcctccagcaccagcgggtcctgccagtcaaactcgggacgcgaggacttagccagttggctctgtgttctcccgcctttctcggtctgcgccgccgacgagacccacgtgcgaaggacgtgcaggccgggtccgcggctcagcagccgcacggagacgcctctcagggccatctctctcagagcgagcggagcaacgacggcgacctggatcccgggaattcggacc

SEQ ID NO: 435199 - DNA, 953 bp, Homo Sapiens
agggggttgggaatgccccccagggggagccaccattcctccctttggggccccttcccaacacccgttccatgatgaattcatgccctgtgggctgaggccccgcagcgaagaacttggccctggattcctgggggccgagagacccccgcatccccttctccagcaggaagccccgaatgcagccatcttcacaccgagcccacactacaaacagatcggccataggcgagttcgtgatccaggtcttggtcccattgagggtgtagctcttgttggatgagttgtagtgggctctggtctccatgctgctggggtcacttccgctgttgggctctgtgagcccgaagcagcccaggagctcccccttggccagctggggcaggtacttctgccgctgttcctcgctgccataggcatagatagggtgcatgacgagggaggactggacactcatcgccgacctgtagccactgtccacccgctccagctctcgggccaggagcccataggccacagacgaaaccccagcacagccatatcctttgatggtggggcccagcacacccaactcccccatctccgaaatgatctcccgatgaaaaacttcgttgcgattggccaacaggatgcgaggcatgagtctctcctggcagtaggtgcggaaggtgtccctgatgaggatctcatctgtggtcagctgctcctccagcaccagcgggtcctgccagtcaaactcgggacgcgaggacttagccagttggctctgtgttctcccgcctttctcggtctgcgccgccgacgagacccacgtgcgaaggacgtgcaggccgggtccgcggctcagcagccgcacggagacgcctctcagggccatgctctctcagagcgagcggagcaacgacggcgacctggtagtacctcccggatcccgggaattccggaccggtcca

SEQ ID NO: 435200 - DNA, 481 bp, Homo Sapiens
  misc_feature (382)..(382): n is a, c, g, or t
  misc_feature (393)..(393): n is a, c, g, or t
  misc_feature (430)..(430): n is a, c, g, or t
  misc_feature (447)..(447): n is a, c, g, or t
  misc_feature (459)..(459): n is a, c, g, or t
cagtgaaccgggagtactaccaggtcgccgtcgttgctccgctcgctctgagagagcatggccctgagaggcgtctccgtgcggctgctgagccgggaacccggcctgcacgtccttcgcacgtgggtctcgtcggcggcgcagaccgagaaaggcgggagaacacagagccaactggctaagtcctcgcgtcccgagtttgactggcaggacccgctggtgctggaggagcagctgaccacagatgagatcctcatcagggacaccttccgcacctactgccagggagagattcattgccttcgcattcctgtttgggccaattcgcaacgaagtttttttcattcggggagattcattttcgggagatgggggggatttngggtgttgctngggggccccaccattcaaagggatattgggctgttgntttggggtttttcgtcntgtttgggctanttggggtttccttgggggcccc

SEQ ID NO: 435201 - DNA, 525 bp, Homo Sapiens
  misc_feature (65)..(65): n is a, c, g, or t
  misc_feature (67)..(67): n is a, c, g, or t
  misc_feature (469)..(469): n is a, c, g, or t
  misc_feature (488)..(488): n is a, c, g, or t
  misc_feature (510)..(510): n is a, c, g, or t
tcgttgctccgctcgctctgagagagcatggccctgagaggcgtctccgtgcggctgctgagccngnagcccggcctgcacgtccttcgcacgtgggtctcgtcggcggcgcagaccgagaaaggcgggagaacacagagccaactggctaagtcctcgcgtcccgagtttgactggcaggacccgctggtgctggaggagcagctgaccacagatgagatcctcatcagggacaccttccgcacctactgccagggagagactcatgcctcgcatcctgttggccaatcgcaacgaagtttttcatcgggagatcatttcggagatgggggagttgggtgtgctgggccccaccatcaaaggatatggctgtgctggggtttcgtctgtggcctatgggttcctgggccgaggagctggagcgggtggaacagtgggttacaggttcggcgattgagttttccagtcntccttcgttcatggcaccntattttattgcctattggaagncgaagggaacagcgg

SEQ ID NO: 435202 - DNA, 605 bp, Homo Sapiens
  misc_feature (552)..(552): n is a, c, g, or t
  misc_feature (574)..(574): n is a, c, g, or t
  misc_feature (584)..(584): n is a, c, g, or t
tgctcctcgaatgacaatcagttttattgcatgagttatggtgtccaaatgagttaatttgcttttttcaccgtctgagtcaaaataggccacctgcaggcctcatgcaaaatgtagaaactggatagatgatttaagcctcaaaaacgcaagtgattttttggggtgcacgcaggagagggcggatctggggtgtggtcagcagatgaccagccgtggccttgaaggcagtttccagtctctgcagctgcgggatgagggtgaagccccccatttgctctgctcagcctctctgttgagtatttaagaaatcctgattctccgtgttctgccagggaggatactgcagaagagtggactggtgtggccattatttcagcatcttcaccatgtacgggccttgtaatctgtagccgatctttctataataattcctggtgccgacccctgatatcacagcgattttcccagacccatgttcttctctagctattctttctgcttcctccatcagcagcatgccaaatccctgatgctgaaatttagtaggancccggctgctcacagggaccanactcccatanacatgcagctctcgtactatg

SEQ ID NO: 435203 - DNA, 516 bp, Homo Sapiens
  misc_feature (475)..(475): n is a, c, g, or t
  misc_feature (482)..(482): n is a, c, g, or t
cagatgagaaaaattatgctacaatagttgttggttttccagatctcatgtcacccagtgaagtttattcttggaagagaccatcatctttgcataaacgaagggccactgatacatcattctatagaggaaagaagaaaagggggactccaaaacaaagcaattgtgtgactcttttagatacgaatcaggtagtgaggattttacccccaggagaagtccctctaaaagatatctacccaaaagatgttactcctccacaaacatctggttatatagaagtcactgatcttcaatcaaagaaactccgatatatccctattcccagatcagaatctctctcgccgtataccacatggctgttcgaccatttcagacacagatgcactgctggctgagtggggacaaaagtgggtgttgttactgttgatatggggaggtcacatcaggcttttggggaaactgggactttgancgtctgncaggcgattcactcctgggattggaggaacctgg

SEQ ID NO: 435204 - DNA, 415 bp, Homo Sapiens
  misc_feature (12)..(12): n is a, c, g, or t
  misc_feature (22)..(22): n is a, c, g, or t
  misc_feature (131)..(131): n is a, c, g, or t
ggctggggcaanactcttctgnaagaaaagacccatcgaccgtgaagcccttccccaaggtggcacagctgctccctggctcacggagctgccccagggactggcccctcaaccctgggctccccaggggnccccagcccagcctgggctcacacatgagcctagaggttctatggaggcaatgaggatttgtcactgccatgactgctacttgaggctttaagtagaagaccatacgcagccttctaaacgagtgggaacctgaggttgcgtgtcagtaggaattttatctgttgctagaatagtggactctttcatacaccctatgctgaatgtacaagaagccttggaatccaattgtggatcattcctgtgctattagcatgaatacatttttttcaacttcagtttttac

SEQ ID NO: 435205 - DNA, 1101 bp, Homo Sapiens
  misc_feature (117)..(132): n is a, c, g, or t
ccggggtgtccccctgggaaaaaaccatcccaccccgaagtggggatggagaggggttcccccggaaaattccccaagagggggggaaaaattgggttcacccggggagggagggtnnnnnnnnnnnnnnnntctggggtgggggttttgtccaagcaagggcgtccaacttccctggttggtggcccctgtcaggagaagggaacggagctccggacgtgttcccacgttgttacaggttttgccgtccggttcccagggaggcagttcacagctgggtttccccccaacccagccagttggaggcgatgacccacgccctgggtggctcttgagggatgtcagtgggacgcggatggtggggcagttcgctggacaccatcccccatcgagggtcgggctggtccttgtcagagcacttctacttcaatctttcccccagatatctgactagggtcagcaacaggctggggtgtcggcagctgcaccgcgtatctccagatatgagcagtctgatctccagaagcagtgagagccaactgctctgagggatgaaatttgatagaatttactgagcccacgtggcctgcgtacttgactaggcacttccctgtctctatgctccacagcaaagccgtgtgatcggctgatgcagtcccgagcaccactggctgtgtcttggccacgctgacatcccagatgccgtcccggtggccgatgtactccttcacgagctggcaggcagctctcgatgtcgtggtcttaaagctggagacaatcttgctggtggaagccttgtaagtggtcttcagtttctgggagagctggctggtgctgtgactggcttttgttttgagttggcccttactcagctctgctccatcaatcgcttgtccttcagcagctaaacgttcattaagagtgtcgatttctctacgtaattctaagttttcgatataaaggttttcaaattctctttctatttgaccaaacagttccagaagtgtaactgcccccaccacaggagtcctgccgcatagctctgctgtctcctaagtgctgtgtgaacggggtccacaggcccatcccgggaattccgga

SEQ ID NO: 435206 - DNA, 463 bp, Homo Sapiens
tctgaactccgtttctctctaccatatcacatgtgctttcctcagcttcatgatgaagagctggactatgatgaagagtatgaaaatgaggaaggacaccagcgtgagcagcaggatgccaacttttctttcttgccagtcctaaatactgaggatttgcttcggtggtcaagtcaggatcttgagtggtttgttctttctcttccttgtcaatctccgatgtactagaatcttccgttactgagacagtactggtgggctgctgtgggtcttgagaggatagagagtttctctccagagcatctgaagctgtctcttcatcagtaactaggaaaggggaaaaacaaaattctgctactatagagagcagttttacccacattgtgctcagtaaaagagattggagaatatatttagcggctacctgcttgtagaggttgtgcagaaaccccagaactgtgtg

SEQ ID NO: 435207 - DNA, 2657 bp, Homo Sapiens
  misc_feature (178)..(198): n is a, c, g, or t
  misc_feature (224)..(224): n is a, c, g, or t
  misc_feature (293)..(301): n is a, c, g, or t
  misc_feature (580)..(647): n is a, c, g, or t
tccgtcgcgggtgtagattagaggttgtctggtggtcgcagagtagctgatcatctgcgttcgattagttgctcctccatcgtcttttcagtctgcgtgcgcgtctgcgtatcgctttgtgtgtcgggcggtttgggtggttttcatccgccgaccgatgatcctgcgctcggtggannnnnnnnnnnnnnnnnnnnncgccctctcgtggggggtgccgttcncatagttatttgcgtcgctgtgagggggtggtttgtggtggccgcgcgaccttagtttgggtgtcgctnnnnnnnnntcgcgtgcggtgtggtgggtgggctgctctctgtgccacacgagtggtcgcgcctcgccgtgtgtgcgcgctgttggttcccgctcctctgctcgggcggcgttgtttgtttcttctcggctacgctcgctcgtctactatgctgataataataatggcccctccttatatgggggccgccccgtttttgtcatcgacaagtgtggtggggtggctgctattcgtgggggccgcccctccgcggggagattttatgtgctgcggcgcccgcccctttcnnnnnnnnnnnnnnnnnnnnnnnnnnnnnnnnnnnnnnnnnnnnnnnnnnnnnnnnnnnnnnnnnnnnataaccgtttttctttattctacttagtggggcacccagaaacttccctgggggaaatgcttgttcaaatagagaacacgcagaagatgcacttcaccggcctcctctggctgctgagcccgtactctctctttggctcaggctaggcctcttcttctccttggacttaacgtggcttaggtccctgagtcggccaagacctcccagaggagacctgcccagctgccaccaccaccattattgattggcttcccggtactggtgcagcaggtcactgacatctgtactttctactttcacccaaccatcttccttcatgtggtacatattgacaacgcctccagaatagctgtctctgtgagtggcataagcaatagccctgcggccaaggtcataggcctcttcagggctaagattaggccgatagccactgtccatgaccccgtaggcataagtgttcccactacccgtggagaacatatttcctgagagccgagtcccatgttcatccacgtagtagagtccaggacccttcttatcccagccacagatcatactgcccatagagaggcccatgccccggtactggcacatcatgttggacagcagcttggaggctgccgacactgaaatacgttctccatttcgcagatagtacagcctgcattccttggccagcaggcgctcccagtactgacagtctgctgcacagccagacatggtgccaagcaggtaagggttaatctcaatcaccttgttcacccgtaaggcactaatgtaggacccagctgaggcccgagaatccactgctgcaatcactccatgctggaacttgaaggcgagcgtggtggtgccatgggccatctcaatctgaacgttcctttctccgtccccacccagggactggaagaattctgtgggctgcattccccggggtaaagcgagctctggagatcgcatagagaaactgtagtgtcctgggtccgagcgacgcccgcttcccgcaaccgggagagccgattccggccgctgccctcggggggctccgcatacatctagtagcgccatgaccgcccagcacccagagatctgtccgctctcggaggaggaagtgaaagcgaaagccacagatcgaaggggagggaacaagactcttttccacatccccctgccttttccgagaaaaggacagttagtgcctggaccaggaccatcacactggggaccggcttctctgctctcccgttatgggggtcgggggaatgatgggtcaagggtcttccgaagaaagcgagaaaggaacaggcgccttcaaaagcccacttggcgatgggttacagtaagaggtacctccaggcccgggcatccgctggaaacaggggtgggtagggtcgtgtcatctaaaggcgcagcttcaaccagaagactagaagtcagccaggagctgggagtagtgtcacgcggggtgggggttcctatgagcatcactttacaaaaccaggagggacggaagtgcgagggggcagagtcttggaaacaggtcctgggccaactgcaacagaatatacccgccgcgtgtaggggaaggcggcgccaggagagggcgcagtctctgaatctttccacggggtccatcctagggcccctccaggttcaacggtctcctaacctgtagtcacccacaagagcgtgccctttctgcccgcccttcctagcgttgctccctgcttggctgagcactgcggagtttcacgcctctaaaccccgctcttcttgcaacctgtgttggcctcatctacccagcaactgtcgacgtcacacgacctggggcctccctgaatgggagatatatactaggcaaatcccgcctactgttctgaggtgtcccctccaggtgcagcttcagagccaggcgagccaggaaggaccagcgggcagaggtggtgagttgttgaggcgcgcccagtccctctgttcccgctggcacttgctctggccgcgccggcccat

SEQ ID NO: 435208 - DNA, 1080 bp, Homo Sapiens
acagccaggtccactgaccatctgtaacttttctactttccaccccaaccatcttcctttcatgtggtacatattgacaacgcttccagaatagctgtctctgtgagtggcataagcaatagccctgcggccaaggtcataggcctcttcagggctaagattaggccgatagccactgtccatgaccccgtaggcataagtgttcccgctacccgtggagaacatgtttcctgggagccgagtcaccgtgttcatccgcgtagtagattgcaggacccttcttatcccagccacagatcatactgcccatagagaggcccatgccccggtactggcacatcatgttggacagcagcttggaggctgccgacactgaaatacgttctccatttcgcagatagtacagcctgcattccttggccagcaggcgctcccagtactgacagtctgctgcacagccagacatggtgccaagcaggtaagggttaatctcaatcaccttgttcacccgtaaggcactaatgtaggacccagctgaggcccgagaatccactgctgcaatcactccatgctggaacttgaaggcgagcgtggtggtgccatgggccatctcaatctgaacgttcctttctccgtccccacccagggactggaagaattctgtgggctccaggcccgggcatccgctggaaacaggggtgggtagggtcgtgtcatctaaaggcgcagcttcaaccagaagactagaagtcagccaggagctgggagtagtgtcacgcggggtgggggttcctatgagcatcactttacaaaaccaggagggacggaagtgcgagggggcagagtcttggaaacaggtcctgggccaactgcaacagaatatacccgccgcgtgtaggggaaggcggcgccagggagagggcgcagtctctgaatctttccacggggtccatcctagggcccctccaggttcaacggtctcctaacctgtagtcacccacaagagcgtgccctttctgcccgcccttcctagcgttgctccctgcttggctgagcactgcggagtttcacgcctctccc

SEQ ID NO: 435209 - DNA, 299 bp, Homo Sapiens
  misc_feature (33)..(33): n is a, c, g, or t
tgttgtagtaacatgaagtggatctatccctcnggtcataccattccaaatctaaatttttatgcaggaaatagaggtacactgttttgggggatatttatcttaagggatctcaaacaattttttgaattgttaacatgagactgtcttctttcaaagagcctgtgtaccatccagaaagactgagtagggggccaatattatattccagactctatttttactcagatagaactgaacatatggggtacagtagtggtacagtttatcactagatacattttagtttgcctttttgt

SEQ ID NO: 435210 - DNA, 337 bp, Homo Sapiens
  misc_feature (274)..(274): n is a, c, g, or t
  misc_feature (296)..(296): n is a, c, g, or t
  misc_feature (321)..(321): n is a, c, g, or t
agcatgagccaccgcgcccggccaagaatttttatacatacataatccagcaggtatcagccttttttcctgcccaaacacaagaaagaacaacttgacagacacaacaacttcctctattaaaaccagttttattccaaaaggggggcaaaatgctgcattatacaaagagactctattacaggtaaaataagtgctgtgggttccctacatgagaggaggggaactgaattcagttacagcaacaattaagcatgcgggaaaatgctctccncaaagggaaaacgggaagaggntgcgtcatggaaaaccatggcagtntccggggagcttgatt

SEQ ID NO: 435211 - DNA, 3690 bp, Homo Sapiens
  misc_feature (85)..(96): n is a, c, g, or t
  misc_feature (302)..(311): n is a, c, g, or t
  misc_feature (545)..(556): n is a, c, g, or t
ccccgggctcagactagaggggtaggtcggggacataatcacacgcattattacaacggtgcggagggggtcgcgcaaatcaaannnnnnnnnnnncgatcatcatagtggttggaggggcgggtgtatacggggaatgagtgcgcgtagtatagccgggtggtggaattaggcggtatagggtgtgctcaggctgcaatttcactcttggtggtttttttagctgcccggggcccctgcgatctgggggtgtgaattatattcgtagccgaggggcgctttctggggggtaagccggtaannnnnnnnnntaagcaggagcaacacccgctgagactagtgggcgggcaggcgtaccagggcctcgccgggcttggggtatgggcaggcgctgttgtagggcgcggggggcatacatattgcgggggaaatataacgcgtcacggaaccggcccctctgggttatagataattggcaggggcaaaaatggattggtgaagtggtgttggccgctgaagattatccgaaaggaacccctgggcannnnnnnnnnnntcaccaaggggcgttgttcccaggcgcgcaatagcctggcttggaaagtcaggccctttgctttgtagcaggaggaaggtgattcttgggacccaaaacatgccagagaacctggcgccgagtgtcccaaggaggcttcgcttttggaacaggcttggtcctgtccaggtaggcacttcctcatgagtaaccccttccagctctcacagtggagccacatgcctgctgcccgctgacgacttcttcccttgcccgacctgtctgagcgggtgggtgtgagcaggtcatatttaccaggccctgccccaggagatggggagatagcactgacttcctctcttctcttacccaatcttcctcccacgccacgcccaaacacggcactcccccaaataggtctgtcacgagccaccttggaattgtgaggagactgctgggaggaaggggcggccaccttccccagccagcagagaagggtctgactgcaacacagatggcttcatcgtcacattgaaaataaccaaatatgaaaatgtgttttatttctcagtacaaagccagatactgtaaggctatgaaaaactgactagccagaggcagaaaggacaaaaagaagactatctctggcctggtgccctgtgatctggcgtggtgtcacaggaggtctggggacagcagcaaagacctggaccggtggaggtggatgagggaagcgatctgccagcccttccagcctcccgcggctggggcctgaggatcctgcctgcctttgggggccactggttgcctggcctggctggttccaggaatgaactgggagaggacaggaggtgcagggagggggcgggggtgggaggcgtgaccctttttgcacgggaagctctgttttcattccgtgccacaggtgagtgtgcagggctagagttgagaatgaaactagggtgctgttgcccccaaaggtaccttcagtccctctaccacatcccagttagaaagtcttgagcccttggacaggcagacatgggcctgggacttaaggctgtaggaggtgaggctgtagtgacaggggtgggaggtgaggccgtagtgacaggggtgggaggtgaggctgtagtgacgggtatggggtcggagctgagaggaatgtgtgcggcaacagacgtgagggtgtttctccaaggagttgtggatcctcttcagtgtcaggggagcgtgggcatgtgtgagggctcaggcctcgccctcctctccactgtcatgcacgctggcctgtctcaccaccttccggaacctgggcgtagaggaaatgcagggctctccctgcccctgcccctgcccctgctcctgctcctggaaggcctgggtccggttggccaccacggcactgcctggagggtaaccactgactgggcgggatttcagggcaggctgaggccccctgtcccacctgctggcctcccttggtccttgcaagctgtgggaagggctgcagaggctcttcatgtgaagactcgtgggaagagaagacctctggcatgtcactggtctctgaggtgctctccagctccaaggagggctccagaagactgatggacctcatgacccctcggaggtttatacgtggccgtggcccaggctcttctttcggggctgcctggctctcttccatgcctacaaccttctcctccccaccaccctcaggttctggcggaagaggtgggaatggtgtagagacttcaggggctgggtgctcctctggggagaccccacccactttctgctcccagacatggctctggcggctggccgtcaggatgccctggtagatctgcagctggcgcaggaagccagggttggggcgggcgatgggccggagctcctgcacgtggcgcagggcctgctccaggctgcattcgtactgcttcatggcataggccagcactgtggccgctgagcggctgacgcccatcttgcagtggaccagcacgtgggtgccctgtgctcttgcagcctcaatgaagcggtgcgtctccttccagtgcggcagcagctgggccgactcctcatcccagaggcgcacattgtggtaggtgaagcgctcagggtagaagttgtcaatctcccgggccatgttcaagatgtgggtgaccctgttcctctgcagctcctccaggtttgctgcgttccactctgagcccaggtagagttgggggaagatgcgggaggctcggtcccgctgtgccaccagcagcagcatctggttgtcgatgaagtcacggtactgctggagggggagccccaggcgcagctccagagcctggcggatctctttggaagtgacactctccaggtcactgacatccaacactttccacagctcagcacggatcgcctgctccatctgctcctgttctgaggaccacatggtctggatggagatgggcttgaagatccggctttgcccaccagacgtcacgctgaagcccccgtctccatctaagtacacctgggtgtcactccagaggggcaagaccaggcccagggtgcagctgggggagctgctgtcagggaaatccacgcccaggaggaccgtctcatcctggctcagaccttctccttctcgtgtagaaactaccagcaggtagcggagccggggaggccggggtgcctccagctgggctgccaggcggatgtcatcctgcggcctcagcagctgtaccatgaggtgcaggtgctgcctctgctcctcctgcttctggggactctgggatccttgcccgaagtctgtctggtccccgtggagctcctcctcactcggggccttctctgttggctcagaactggcctctgctgcatcatcattgtcccctccatcctgcagtcccaggacagccccacggagcaccgcaaagctctgccttcgctggagtcgactccttcgctggaccgcctggtcccagggccccacagggcgtggaggcgccgctgcccgggggcgaacggctcactgtgaccagggccatggagccaggccgcgagcacctgggctggcaccgggcacggccccttccctcaaccatcccgagaattccgggccggggcccgcccctggtagagttgtgtatcagtatgtg

SEQ ID NO: 435212 - DNA, 673 bp, Homo Sapiens
  misc_feature (544)..(544): n is a, c, g, or t
ggcattaaaatcagtttattgggaaaccagtcacttagagacattacattgtaaagagaatgtagagagaggtctgaacattttataagatactgtacaaaaatactatgtttctctgaatcctataactttttagcagtgcttctttttaaacagttctgaccttaaatattgttttcagaaacagaacaaaaatgtgtttgtcctccatttttattttcctttctaacagtttgaatgcgttcagtgaattccagattggggccgttaagttaaattctgtactgggtgccaaatggctttcagaatagtatttgaagaataagattttgaaaagaataaatttttccttgtattataattttagtatgtgcagctacatggtgatacgaaagcatcagtcagtggacaggaaataaacagaataccttcttccttgcgatttatgtggacagacataatcctaatttctcaggcaagtaaattgatattagatttgtctcagtgataccaagatgataatttctgggaggaaattcaaatnaaagggagaaaaataagttttccaaaataaggtttgcagagccttaaagaaggacaagagggccctaaaactccttgaaccaccttcctcacatagtatcagttggacaaagttttcagttgccaaaac

SEQ ID NO: 435213 - DNA, 983 bp, Homo Sapiens
gtgcccaacataaaccttgttttaattccttttctcccagccttggggagaataagagggaggagattttcacaattggaattggtacatccattggcatccttcaaagttgtgattgacatcagctggtgatggtctctgacttcccatttgtagcactgcggggaattgctggaaggcgagagccattttcatctatgaaatggccccctgcattgaggacccagcaatgatgaagggacatcaaagcatgccttgcagtagtagggttgtctttcccattctgactatcagcattctttagtggggaaaactcatcttctcgcaatacttcatataccacaaacttctttgcaaaactggaagatgtcaaagacaaatttttccatctttattccattgggtttgtctggcttaattaactgtccttgggtatccacataaggaatcttcttttgagccacatggtgctgcaactgaggttcataaacattgacaacatctctcagaaatggtacagtgaagaaatggttggcaatgttccccgcattgaacagcagtcgtccgtctgagcttcgtttttgagctgttgccagggaaatctcactatattctaccacctggtaaactccatccactcggcaaaccactccaactggttctgtagggttcgttttctctaccacctttgctccacagtctgctcctttctgaatgcaaaatccaatgaaccgtgggtctgccacttttactaatatgttgtcaacacaatagacatgaatgctccaaatgcctctttgctccatatcctccacaatattctgggctgcaagtgcccgataaagaccaccattcccatctggagccatagaaactttgttcttctcttccaaaataattttcccatcaaaactcatggcggggagcattccttgctgaaaaaagattacattctctttttttaaaccaaagtacttgtgctt

SEQ ID NO: 435214 - DNA, 1289 bp, Homo Sapiens
  misc_feature (36)..(36): n is a, c, g, or t
  misc_feature (76)..(76): n is a, c, g, or t
  misc_feature (814)..(814): n is a, c, g, or t
  misc_feature (941)..(941): n is a, c, g, or t
cagcctgggccattagctcctgatgtcatcgatttnggtgaggggacagggaagtcagaggaagctggccagtggntctcacgaagacttacagcagcggagtggtgcctgattcctggtacagctgctcccactgagtctccagggatctgtggttcaggaccccctgcaaccccctcccagacccctgtactggtgggaggagaggacctagaggaaaggtgctgggcagataagcagccgagggaggccctgggtttagcttatcagtcttctgggccctcctgccccaggaagggcagccgaggaccatggtgttgcccctgtcatcgttatcgtcctggccatgagcttgcaggactgggagggccggagtcagccaggcagacggcagcacagcatttgcctgttggcaggtggccttggtggcttcccaaaggcaatcgctccacgcagaacaaaactcacttttttggggggtgaagcaccttggttcatttgtttagttcgttaaattccagcagtctgtttttaaagggaaacatggctgcagcccgtcctgcccctccacccacccaccaggtgcccagtgttcccaagggccccgaatcccaaccttattcaggcgtcagcatctctgcaccccaaatgcctgttagggaggatagtgaaggctgagccctcctgggctcatcaaaagccagcagtgagagaacacccccatctctctgaggtgaccttgtagggcagtccgtgctgtctggctggcctgggtgaggtgggcagggacccaggcctggcgcctggggcctcnctgggctttgtctggcgggctgaacttcatcctgatagcacccttgatttttccaaccgggcgacttcccccttgtggccgaccttcctcaaccgagttttaaaaattcctgtaattgagacacccntgctcctaaggttcacctccagacgcctacctcacaagacagggtcctctccggccaaagtctgggcacggacggtcaatgaaattcgctgcgcccccgaagatattcctctcccatctatgcgattcccccacttcccacggggaggtgctattaaccatcctcttataccggcgatttgatccctccggagaatcggtacgttggctgttgcctctgagcgcgccccccccgacccgagagggaagccccacctctcgcctctgtattatgcgcgccgctcctccccgctgttgtgcttgattggtgttcttggagcatctgcaggagctatactggtcggcccgg

SEQ ID NO: 435215 - DNA, 407 bp, Homo Sapiens
gtatcagggcaacaccacacactgcagaggggcagggctcctccggcagttactcacttcccttgaaacagaagctcaaacatggagtagtcttctgtgactaaacttgttttccgccctcccaacttccagggagaaccttcttctgaataggatttgaggtaacttaggaaactgctctcaatacggaattttaaagttggtgaggaagtcgacagaaggggaagtcacagtaggaaaatcaaggtactatcaggatgaagtcagcacgcagagcaaggccagcgaggcccaggcgccagggcttggtccctgcccacctcacccgggccagccagacagcacggattgccctacaaggtcacctcagagagatgggggtttctctcattgctggttttgatgat

SEQ ID NO: 435216 - DNA, 1047 bp, Homo Sapiens
cgttctccttttcaacctgtcttgacatccctgagttggagtcactgccttgatgaagattgctccaggtcttgtcctgtgattgtaagggcaccccttatggatgtccaccccccttcccctcgcagcagccagccagccttacacgacatctggcttctccatggacacaggctcagccacagtccagtccaaagcaacagccaatgcagaagggccagaatccagaggcctaccatgttgagcagaggctcttggaagcacacccagccagcccgaggcaaggggcccagactcgttgcaccctctcccgtaattctccacccacccctgccaccagggaggcccagcccctgccccaggatggtgtgaaggggcaaggggccaagtgctgagactgctggaccctgggctttctgggacccctggcagagtttggttgttctttaagctcacctctttgcttcctgcagggtcagaccgggcaatctggcacagacagggttgcagcccgaggtgacccaaagcatggggaaggaagaagttctgttcaaaggcagtaaacagagactggggttgggacactgatgctgacactgactggtcactactacccaaggcgggcaggcagaactaaactctacagggtagctcatgccatcccaacgcccagaatccttgaagcccaccccactccctccgaagtccacccggactagacacatttgtccgatcctctgaactgagtcattatctttgtttcctgttttgctaaaattcacatgaaattgagtgtcgatgacaatgcccactgtcgtaccttgatagttttggagttaggggtggatgaaggtcaagctgttccccatcctgcttatttgctttatgtatttggggaggagggaaccacatggtaaagacgttttccatgctggtttcaccgtcagtatctttcccctctgtgagtctcacagtttaggaaagctcacaagtgctcagcccaggatctgaaatctaacacccaggtacacttcagcagcagcaaag

SEQ ID NO: 435217 - DNA, 610 bp, Homo Sapiens
ataattggtcttccctctatttatttgggtccccctaaaattttttaaaaatacttttttggggaacctggcttttggatttcagtcttcacagtaaaagtgaatgaataaggaggagacgctactgaaaaactaaccttgaatataaaccactttcagatttatgtagacatttatgtagacatttgtaaaagactgacaacctggctactaaccctactctttcaatatggaaagtcacacagaactatagactggggtggcatcaaacggcaataaactctgaacaaattaaccacttccattcaattagtacaagccaagaaaatggggtaaattatctagaagagaattatttccaacacaggctggttctttctaagcagcttactatccttttcttagcaatatggcttgttttctcttttgcattgtcattagctatttctattcagctattaattcgctgaatttaagttgaatagcagttactgatacgtttttccctacttggttgtattcgtattctaaataaaataacaggtgggaatcaaataatggataaaaatacatttaatttcatattacctgtatttccctactatttgcc

SEQ ID NO: 435218 - DNA, 461 bp, Homo Sapiens
ttttttttggcgaaacttttccattcattatgcttggctttaccaattttttatagctattgggaggcaggaaagggaattttggccccagaaaccatgagatttgggtcagaaaaaggcacacggggaaggggtcaaggcaggctgagagtcacatttccagacctcaggggccagcagggtgtggcactgaggggcggccaggggctggggaaacgtgtccactctgctgatggggcagtcctgggggcggatctccttggccagctgccccttcctcttcaacgtgcaggcctcctggtatggtggcgagatggggggctgtgtgggtggagtgtacttgtactctgagccgccctctaggtccagtgggtaactgcggtccgaatcataggagctcaggtccccacaggtcacaaaaggcacaatgatgcgagtgggaccatccagcaaattgaaat

SEQ ID NO: 435219 - DNA, 2021 bp, Homo Sapiens
  misc_feature (1935)..(1971): n is a, c, g, or t
ttacattgaattacaattattactatatattaaattgaaacaaaattgagatgcagtaatatatgggctttttaattaatacatcaacttacaggatctgctatcattccaagaggtgacaaatatgaacaatacttcaagatgccctttttatgttacattacagttgctgtaactggtttgtattggtgggaaaatcccaggtactgcttttactactgtgatttgttgccagcatttataacttgggagtaaggctaaatttcagtttcattgctgaaaataaagatgtaacattttcttccatcaagttcatggttacccctggcttctatccaggttaagaatccctgcctttagggaaaattctggacataatcaggacactcctgaagaggtttaaagaagaggtaagacctcactcaagaattcccactgcagtacagacagactttcatggtttctttccttgttgtcttcagggttgttgcagatccctcctcagggcttgtttgtccaggcctcgttgatgagatgatattttgaaaacaagttcatcaacaagttccggttttcctgacattgagcagtttctgagttgtatcagtttgccagcgtaatgggttaaggtgaacaactcatttcattgtcttccatctcaggggccagcagggtgtggcactgaggggcggccaggggctggggaaacgtgtccactctgctgatggggcagtcctgggggcggatctccttggccagctgccccttcctcttcaacgtgcaggcctcctggtatggtggcgagatggggggctgtgtgggtggagtgtacttgtactctgagccgccctctaggtccagtgggtaactgcggtccgaatcataggagctcaggtccccacaggtcacaaaaggcacaatgatgcgggtgggaccatccagctggttgaaatctgggtcgtaagaatggtccagcaggggtttgctcaggtccgggatgaagccctcgggagggtcatagccctgacagacagcgaaggcctcgatgctagagttccggctgctcctgggcttggcacacagcacgctggagaagaagacctgcagctggctgtagaggagcgtcacatcccggcctcggaatatcttggccacaaagcagccccctggcttcaggacatgtgtagcaatgttcagagcagctaggaggagctgggcctgcatatactcatcaacatcatggagaccggttacatcaggagccccgtcacacaccactaggtccgcagggcagcccttaaagtgctggatgatctccttggcagtggacagctgggtgatgtccccctggatctgtaccacacctggtagtggagccatagcctgcaggtccacagccaccacgtggccggacccttggcccccgatcttctggctcagcacctggctccagctgcctggggctgcacacaggtcaactgcccgtgtcacgccttggaagagttggaattccttatccagttgtagcagtttgaaggcgctgcgagcacgccagccattctccttggccaggcggtagtagacatcccgcttgtcctttgacgtccgtcccatttcacacaccagttgctcaaggacctgccgacagtccactgatgccggccagtatcagtaaccagatgaatgggctaccacctacctcttagttttcggagcagggtggtccgcgagcagcctgtgcctcggcgagagcgcaaacgggcgacaagtcctagggcttcagtttgtgttcgtagtccacccgaatgcccgggggggcaagcctatgggctgtcgcagcgtggcaaactcggcatcgtggatcgcccaggttccggcgggccgggacctgatccgctctcgacgaattcgagctcggccgatattggcctgatnnnnnnnnnnnnnnnnnnnnnnnnnnnnnnnnnnnnnccgccgccaccgcagtaagctgcagttcccctatcattgctcttgcatcc

SEQ ID NO: 435220 - DNA, 523 bp, Homo Sapiens
  misc_feature (56)..(56): n is a, c, g, or t
  misc_feature (483)..(483): n is a, c, g, or t
tggcgggaacccttggccccccgaatcttctggctcaacaacctggctcccagctnccctggggctggcaacacaggtcaaactgccccgtgtcaaggccttggaaacagttggaaattccttatccaattgtaagcagtttgaaaggcgctgcgaagcacgccagccattctccttggcccaggcggtagtagacatcccgcttgtcctttgacgtccgtcccatttcacacaccagttgctcaaggacctgccgacagtccactgatgccggccagtatcagtaaccagatgaatgggctaccacctacctcttagttttcggagcagggtggtccgcgagcagcctgtgcctcggcgagagcgcaaacgggcgacaagtcctagggcttcagtttgtgttcgtagtccacccgaaatcccgggggggcaagcctatggctgtcgcagcgtggcaaactcggcatcgtggatcgcccaggntgtcggcgggccgggacctgatgtgaacgtacaacgtgag

SEQ ID NO: 435221 - DNA, 2211 bp, Homo Sapiens
  misc_feature (578)..(586): n is a, c, g, or t
acagcagataaaatcagtgttactgctctcagatgttaaggttagcaacctttctggcatatgctaattcatcatgaactcccaatagctgaactgaatggcttttaagtacagctataaggtctcatggtataattccttttgttgatgccagtgacaggattttaaaagctacattccattaaaaattaaaaatacagcagcttttccaggggaactagatcccaaaattgtacccagaactcttgtctaagatattaagttaaatatcttgcatgtatatatcattatagtaaatcagtattcttgacaaccacagtgtaagaaattaaactttggctaattgttttccccatcatgaaatcagtcttttgctgtcttcataaataaattatgaccaaacattacaaatactttatacatgtttactgatttacagagaatatttaataatcagaactcaccagtttcaatagtattgtacattaaattataagcaatataaccactgctacaaaagttatctaagttaatccaagataaaaactgtgtctagagtttaaatacattgaaatagnnnnnnnnntagaaattagaaaatagtcttcaagttctgaaaatctagaagaattctccaacatctgctctcttatctcgacatttgcttctagctttggttcgagctttgaaggctgcagagttatataaatgcctttcgaaacgagaaatcttcatcgttttaagcgttgcagcatcaagcatcactgggggtccaagttcaaatacatttcgaaggaattcatttgactgcaagtggtactgcatccctgatccaagaacctccttaaaggtgtcataggtgtgtttttttacccagcaatcaatatacatgcgttcaggaccaaatttaatggtttctgttggaaaatcccgttcctccactgccctcaggacatctctgaaaactgaccgctgctttctcttgtccactttggcccggtgtttatttccatctgttgccaaggccctaagcatctgcgtcaaggactccatgtcttcataaaaaaagtcactctctattcctctggccaattcaaagagaagtgccaaagattcaccagcagctattctcatgtttacatcatcacacgagaggaggcttggaagcttatggaaatgcatctcaagctttttcttcacttcattgattgggcatatggtcagcagtagtgtccatgcaagaagagagctgatatgaagcactgtattaggagtgctgcaaataacagtagtgtctttctctttgagataggatttagtgaagatattttccaaacattccagagttgagtatagttcagtaatgtcatctgtggcaataaaacagcaaacaccaaagcaagttgcacaagtttgcctagcctgcatactagctgacccatcacaaatgattttctttaggattggtccaagagttttcaaaatctcttcactttcaattccagggcccagctgaatacaaagaacagatgctaacgctgcagctgcacgttgctcatcactcttaccttttttcaggcagcgttcaatgctatcagttaaagtcattctcctttccagaataaattcatacagcatttttgaagccagtgcatttttaataccttcaagagctgcttgccttgtcttcgcactcttatccagggttaggtcaattaatcccttcaacttgtactctaggtcttcttgagttccttcctcatcaaggacttctggtccatcttcagcaaaactggaaggatcgctataaccactgcaatggctcattgtttcaattgatgcatcttcatcactaaaaggctgaacatttcgatgctggccacctgctgtcgccgccgtcgctgcggctgctcctgacccgccgccgccagcactgctaccgcggtggggagtgttccgcttcttgttcttcggcatcgtgggacgcccggtgccgcccagagtcggagcttagcgaggatcagccgatggagctgcactttttactcgtgcgtctgtgcggcgggcggctgagaggcgagtcttcggctaacaacagagtcgagaagcggcgggggtaagagtgggcggtggcggcagcagaaatccccgtgaagagctgtgatcgaaaacgatacatgtttctctctagcgcgggagctaaggcccgct

SEQ ID NO: 435222 - DNA, 2220 bp, Homo Sapiens
  misc_feature (137)..(158): n is a, c, g, or t
  misc_feature (160)..(167): n is a, c, g, or t
  misc_feature (170)..(217): n is a, c, g, or t
ttgtctattgccccgggtttttctttgggaaaacacgctttgggcccaagtttccccttccctttcggggccccgccgccccaaaccgaatgtttttaaaaaaatttttttgaggggccgagggcggccggcccagnnnnnnnnnnnnnnnnnnnnnntnnnnnnnnaannnnnnnnnnnnnnnnnnnnnnnnnnnnnnnnnnnnnnnnnnnnnnnntttttacattagtatttacatttatttaacgtatgcagtttacacactcattattaaacaaaattggaatgcaaacaaatatacaaataccataagcattatcaaataaaataactggcactagtgttataagcatattaatggacctggtagggaaaagtgatggaagaagactgcagcccatggcatttttctttttaccaaaagaaaacgctcagtagcaccataatggtaatacttaaaagaaatacataagatagaacattttaactgctatcattgaggttaacctgcttttatttaagtgaattatacaggaaattaacagtacaggcagtattttggccaacttctgcttatgtcagctgaacattgtccataaacaaaagcaaaagaaaataatgctaatcatacatggaccttttgtacttggtacaagttctgcaccgtgctttgatttcatggttggagaagatatgcatgtgttaaaaactgaggttatgtaaagttattcactaaagcctgagtgtgtctttggtaggctaatactttttcagcattattaatcacattcatgtttatctatttcctgtatttttatatataatccaaggtgaccagagaagacatggaaaacaacacagcaaaatcctcaaataactaggccattaaaacccagtcgatcccaaaggcaccaagaatcaatggggtacaaacttccccttagagaaaggtggattttttgtaatacttataacctaatgggactttattttgtagttctatgtatcttatttgttgctgtcatatgcttaattacttacctttacattttttcctctaaagatggcatcgagcaataaagcaagattgggtgccaggtattttttatttcaaggttgtgcaaaaactgcccacaatcttgctcaaagtgtctaagtatccaaatggtagcaaatgagctgcattaagctttatataaccacattgcataggaagaaaaaaaatgaaatttatgccgatataaatagaaatgttacagagtatcatatactgagagtaacctatgcagttcttttaaacttatctctttagtggtttcaataaaatatcactaaccacttatccctaaagcctcaagttttcttcatttgaatgctgtagaattgcattagtattttatattgattatataaattaagaccaatttctatctaagtatgtgcttcaagcaatgttttgtggcaaacacacaaaacatgctttgctcttcaaatttattatccttaaaataatgcacttttaaagccttcagttcatagtttggtaacttgagatccacatgacacacaatgccttgctgaacacagggattgtatctgcattatgatagatgaaacccggcttttgctggtaacctgaagcttaagtagtcacatgtagttcaaccagctccaaacacggttgtacagtggtaattattctgcagcatttatgggcctaaatttcagtctgaattgcaactgtgtgtaattgccattgtctgatgtgagtggttgttatttgtttcttttagtgcatcgccgagaatatgagaatcaacattaggcttttattccattgttaccatgttcttcagcaatatgattcaactgtgaaacttctgaacaggaagcagtttgggtaaccacagaaatgctacactgatgtggggaattttccagacggtcattttctacctcaggaagaatgttaacagtagcaaagcgggtgtgataatcactggaaccatgactacaagaagttttcatgctttctaggtcagaacaactaaattcagaaaaatgactagagtgagaatctgctacagaaggcatactgtcactgagggatggagcctcaaattcacttgagttcgtgctttgttgttctaacaactgtgcatccatgtcctctctcgtctcatttatcttcatgttaccctttttcctcagtctaccgct

SEQ ID NO: 435223 - DNA, 979 bp, Homo Sapiens
ggggctcaatagtagattctacaaatataatggacctttcattagagctgcaggagaatatctggcaaggtgcatttaatatttggaaaaaagatatgacccagtaacctacttttaggaagaaaataagcatcacctggcatcaggtaggcatcggtaaggttgagctgtcctatctgaaaaaatatgcgatataatttattacagaagttactttatactaatgcttaacatttatgtttttagttacacaccccttccattttaatctgctgatagggtaggacatctaaagagagttttaggaatgacatctatttgatgaggtcagattttcaacagcaaaatgacttaaaactgagtacaactctccagaaatgaacacaggctgaagtattctgaagccagtgatattgtcactgatgatttgctgctttttgtgtatgtgtgagctcatcaaatcctatatgattgaactgatcattgttaagagataacatgagcagtgatttgggtattattcactgttgcatctttgggtacaaacttgcctttccaatgggataggttaatttctgctgaaagagacagtaactggagatagaaacaacactcatgtcatttttggctgctatggtgttttgttcttcggtcacttgtgccaaaatcactcttcatgaagatgatttctagtcgatcttctatacaagctctgcatcacttgatgactgaatactgcttcatgaaatctcgtgtttcctgcagcctgatagattcttctcatttgccttatggtccctgcctggttcgagagactggtctgcctccgctttgagattttgtagacccatgtaactgaggacctgcagatcccctgccaggtcgggcctgatgaggatactcaactgcacatgagcgacgatactgtgtatccagcaaaaatgattgtattgtgtgggcctggggaagatgtgttacc

SEQ ID NO: 435224 - DNA, 343 bp, Homo Sapiens
aaaaactcttttaaatgaacatactccaaagtttcatttctgacttggaaggtggcatattttcacattttagtaaaatttgcttgaggccataatctaaaccaactttgataactgctggatataaaggtaatcttgtcccaaagagcagtgaactctattctcctttgagggggtttcttttggaacagatagtaagtaaaaagcactctaagagaatattttaaaataaataaattgctaagagtttacgtgtttatgatgtcatcacaattcctggttgaaccagaattgcctatctatgaaggaaaagctacattgagaaaaagtagtctgagtttcc

SEQ ID NO: 435225 - DNA, 700 bp, Homo Sapiens
  misc_feature (244)..(313): n is a, c, g, or t
aaaaaaaaaggttggaaaaattactttatgaagccttaagcactaagaataattaattaaactgtaatccaggattagatacaatttaataatagttcaattccaaaataaaagttattgtaggtaagaccatgaaatttcctaacacttgattttaatacattgcgctaattttctaaaacaactcagaggaacccatatttacagtaggcagaatatttatgaaaaaaatctgggcatcagnnnnnnnnnnnnnnnnnnnnnnnnnnnnnnnnnnnnnnnnnnnnnnnnnnnnnnnnnnnnnnnnnnnnnncccgagattatatgaactaagaaacaagttgtgtatcttaacagcagtactagagcgcagagtttcagacttggatttataaatgctttcaacgtgtggtgtttggaaaaggagaagacatcatctgattttcaaaacctgaagtttttctcaggactgaagtcaaaatcgtaactgccacagagggaaaagggaagcttttccccttaattgttcatctgcgtcagaaagtccagtatccctgagataggaaccactgtaattagaagattggaatgaacaggtttctcccaaaggaagattgtttgttgctgaattatgcctactgccctgatcatcaggtataaactttgcatcttccaacctaatgcttggcagcacacgcga

SEQ ID NO: 435226 - DNA, 491 bp, Homo Sapiens
  misc_feature (182)..(242): n is a, c, g, or t
  misc_feature (468)..(468): n is a, c, g, or t
gcaggattagatacaatttaataatagttcaattccaaaataaaagttattgtaggtaagaccatgaaatttcctaacacttgattttaatacattgcgctaattttctaaaacaactcagaggaacccatatttacagtaggcagaatatttatgaaaaaaatctggcatcaggtatattnnnnnnnnnnnnnnnnnnnnnnnnnnnnnnnnnnnnnnnnnnnnnnnnnnnnnnnnnnnnnatcccgagattatatgaactaagaaacaagttgtgtatcttaacagcagtactagagcgcagagtttcagacttggatttataaatgctttcaacgtgtggtgtttggaaaaggagaagacatcatctgattttcaaaacctgaagtttttctcaggactgaagtcaaaatcgtaactgccacagagggaaaagggaagcttttccccttaattgttcatctgcgncagaaagtccagtatccctgaga

SEQ ID NO: 435227 - DNA, 2745 bp, Homo Sapiens
  misc_feature (185)..(185): n is a, c, g, or t
  misc_feature (531)..(531): n is a, c, g, or t
  misc_feature (536)..(536): n is a, c, g, or t
  misc_feature (543)..(543): n is a, c, g, or t
  misc_feature (548)..(548): n is a, c, g, or t
  misc_feature (555)..(555): n is a, c, g, or t
  misc_feature (564)..(564): n is a, c, g, or t
  misc_feature (592)..(592): n is a, c, g, or t
  misc_feature (604)..(604): n is a, c, g, or t
  misc_feature (614)..(614): n is a, c, g, or t
  misc_feature (626)..(626): n is a, c, g, or t
  misc_feature (632)..(650): n is a, c, g, or t
  misc_feature (683)..(683): n is a, c, g, or t
  misc_feature (700)..(765): n is a, c, g, or t
  misc_feature (782)..(812): n is a, c, g, or t
  misc_feature (825)..(1058): n is a, c, g, or t
  misc_feature (1068)..(1068): n is a, c, g, or t
  misc_feature (1874)..(1874): n is a, c, g, or t
tttttttgtagtggggagattcccaagcccttatgttcattgtcccagggattttcctttgggaaaaccaaactataggccccatttttcccttatccgtgaggggaaccccggcgcgccacaaacagagatatttttggaaaagcttttttcgaggggccagaggcggggccggccattttaanatatgtaaatgtgggggggtggtaaataaacgaagggccgggggcgaagtggcacggtttatttaacttttagtaaagtcaaggagaaatgcggtggaaacttcttgcttgtccacaaatcattcagatggggtttgggcaggtagcgggaggctggggcaggccagaggcctgcgaagaggagacaggctccagcgctctcacaccccacatctctgcttttcttgctctgctgagactctaatgacaaagccagatttcatcttaacctcaagcttctactttttaaaaaaattttgttttggagacagggtctcactgtcacccaggctggcctgcagtggcnttatncagctcnctgcngccttgntctcctggnctaaagggatcctcccacctcagcctcncaagcagcctcncaggcgctcnctaccatgcccnactaannnnnnnnnnnnnnnnnnnatagagacgaggtttcaccatgttgcctaggcnggtctggaactcggctnnnnnnnnnnnnnnnnnnnnnnnnnnnnnnnnnnnnnnnnnnnnnnnnnnnnnnnnnnnnnnnnnncatgagcttctacttcnnnnnnnnnnnnnnnnnnnnnnnnnnnnnnngagatagggtctnnnnnnnnnnnnnnnnnnnnnnnnnnnnnnnnnnnnnnnnnnnnnnnnnnnnnnnnnnnnnnnnnnnnnnnnnnnnnnnnnnnnnnnnnnnnnnnnnnnnnnnnnnnnnnnnnnnnnnnnnnnnnnnnnnnnnnnnnnnnnnnnnnnnnnnnnnnnnnnnnnnnnnnnnnnnnnnnnnnnnnnnnnnnnnnnnnnnnnnnnnnnnnnnnnnnnnnnnnnnnnnnnnnnnnnnnncttggattanaggcatgagccactgcacctggccacaagcttctacttcttgcagaatgcctttgtcccatgaaacctagtccacgagtgctatgacacttcctgaagtcttgggtggggtgaacgcacaaatcctgggggtgtagagaggaggaggatgtttacttaaaatgtcttaaggttcagcattgacagagaggcaatatccaattccctctaaagttttgttttgggtcctctgccaattgagtttccataatctggtcggctcagagcccccatcatgtgtggtatattcccaaatgcagccaaagaaaattctagaaagccaggggtgaaaaagctctcctttctcagacgattctgtgaagtctttgtgggctaaggagagaagaccaaaagtttctctgggccttggcctcttggggatcccttctctcattttctaaaaactgtttctcacaccaggctaaggaggtggtggggaaggtctcccttcccctgcccacctcagacagttctagggagatggaggtttcaccacttggccactagtctcaaatacctgccacggtcccttttttcctgaggtcatgaaatgttctggaaccacagcgcccccgccagccctccgtgggagcacagaggggcagcccttgattggtcttctcaccctacagccacttttttggcccaactctcgagcaagccttcatcaccatcagggtctcatgggcagtctgggtttgccagcccagtccttgaacttggagagggaggtgggcttggaaatgccttgtccccagggtggggggnacaccttgtccttggagctggctgagccctgtgcccatggctgggttcagtttgcaggtatagtgtagcactctttgctggtgggaatggagaggtctcgctggccttctttgcgtttttgttgtttttggtcccaagcgacacctggtccccattgagctcacctgacttctgcttctggactgtggccatgctggtgtgggtggtggcagcgacagccgagtcgacactggccaccttcttggctttctttttcaacttccttttcttctttgcctccttctccactgttccagggctgtggatggctgactcctgtaggatgtcggacgccgacacagctgcctcccggcaccgccgccactcctcgtcactgtcctcactgctggagctggagggctgtcgctttcggcggggttggggagactcttccttctcacggcctccagggacagatgtgaagaaaaggcggaaaccatcatcctccaaagcgactttctgtaccttagcttttgctggctcctttgctgcttctgagatggtaatgaagctgtccagcagggctcccagcttcttggctacgtgggctcggaattcaggggtggtctgaagctcgttgccatcttgttcatgctcattcaccttatgcctgaggctcggttgggaggttgacaactggctatttgcagcaccggctcttggcttccctgccacgtgcgggcgttgctccaagccccaagccggcattgccgcctcgcggcaccgctccagctcctccgcatcgctactgctgttactactttccgaatcgctcacagtgccactgggcgcctcgtgccgaattctacacccaggcctcgtacctagccta

SEQ ID NO: 435228 - DNA, 1073 bp, Homo Sapiens
  misc_feature (447)..(447): n is a, c, g, or t
tttagaaaagtccttgtggggaaaaaccaactgttaaccctccgatggccaagggactttggccaaagcattattcctcctaggggtaaaaaatgactgaaagagattggcgcaaatggagaaaaggggcttcgtttttgagaataccagttccactcaacactggatactctcctgcctatggaatcccacaggggcagttgcagagagtgctgcatgtttcatagtgttgggataggacaatgaaaaactaccatttacccaggtgcttgccacgggctattcctggggcttgaggctctaaagatgtccctttgaacaataacaacagccatctaggttaggtggtctttagctatggcagaaaagaggggactgaggcccaagaagctagtaagtggtggattccagtcttttcttccaatggattagtagacaccaatggcncaggaagggtgtttcttgatttttgaatactaacatcatgaatagcaaatgctggcatggcaataagggcatgccctgcatctggtcacattcaaatcatcagtcccttctctttctgcataaacacttgatcttacagaatcaggatatggagagatgctggccagggccacagatcaggtgcttctgcagtttgcaatttctttactctcctcaggacatattaaccctatcatactattaacccttttctgcctactgatagtgatatctgaaaaggttatcaaatcacctctcctctagaaataaataggttggtatctctaaacctggccatcagtaacacatacacatgaaattctgaaatgagcagtaattcactgctcacatgtccaagggaaaacaggctcttttcctgggacttgtacaggaggcttggagagagtcacttcccagggtctggctgtattgagtttgcagatttaggttgtaactcatccaaactatctggggaatgcaagttaaccgttggaaatggtcacacattccttctccccttagagcgaacactgtcataaccactgaagcgcgggccgaggagcgccacatcggccacaggctttgtt

SEQ ID NO: 435229 - DNA, 1203 bp, Homo Sapiens
  misc_feature (71)..(145): n is a, c, g, or t
  misc_feature (154)..(339): n is a, c, g, or t
gtggggggggaaaaaaaccccctcttattttcctccgggggttttttcaaagaaaaaaagatttacccccnnnnnnnnnnnnnnnnnnnnnnnnnnnnnnnnnnnnnnnnnnnnnnnnnnnnnnnnnnnnnnnnnnnnnnnnnnncccaaaacnnnnnnnnnnnnnnnnnnnnnnnnnnnnnnnnnnnnnnnnnnnnnnnnnnnnnnnnnnnnnnnnnnnnnnnnnnnnnnnnnnnnnnnnnnnnnnnnnnnnnnnnnnnnnnnnnnnnnnnnnnnnnnnnnnnnnnnnnnnnnnnnnnnnnnnnnnnnnnnnnnnnnnnnnnnnnnnnnnnnnnnnnnaaaattaataaaaatattttattgaatttcaggaacttggtacttttttaaaacttcaaatctttgcacacaaatcaccactatactttctagaatagtggaagttaggacttcaagattgtcacttatctccttgtgtcacacagcacagaaaccccaagtcctcacactgcccccaccccccttctggccatgactaccaactactctgttattctagcggaggacaatgacggaagtgggtagacgactgaaggagatcagctgtccaccgcgtactctactaaagtgagaggaggagcaaccgaggatcatgccgcacacactctgagtgcaccacgtgacgtgggtcatacgggagttcccttttgttttctcgtttggttcagggcaaagctactgaaattgttcctagtccctgaggagctcagaagttgggcaaaggtcacagcagacttcctgaaaagcagacactgaggaacacagtggagagcgggagttcacagcgacgcagctgaggacgacgcaggacctctcccaaaggtgctgcagctccagcaccaggggccagggctgcggcgacagcagctcagcaacccttgctgtgctcaagttcttggggattcagagctaagttcaaaatttagaaacagtgccttaaagacgggcaagaaaacccggtgtgggagtctgctcatctatggtttgttactgctctcgcttcgatattcttaaattcctaggtaccaatgaaaaagccaagtgaacgtggcagagtgaggaggagacaggagcgtgtgcaccttccatctgtgagaggcacacttcagtctgggttcaagatgcagaatggtgcctacagca

SEQ ID NO: 435230 - DNA, 1439 bp, Homo Sapiens
cacctcactgcaaaacttattgttaattttagtcaccaatggtataaagcaaaacctaggtttagagtgtgctaggatacctgaaacctgatggttatctttaaaattaatggtttttctcctgaaatgtttgtgcatggaagaactgccctgcttttttaccctgttgccatgtatgattattccttgtgagattacttaattacttggattgaagactagcctattgaagctgctgccaggcaacaccacttaacagtaacttaaaggaattattttctttagaggatcctcttcaaaaaggaagggatagtggaaaactgttcttatatcttcagatcccctagcagaaatgactgtttatttcaaactatgttttacttgtatatgatgtagtcaccttaactatctttcaattccatacttcccccgcccccattttaaaggcttatgttgtatttgtagcagcttcaagtgaccaaaagactaaaatctttcaacgtcaatgccaaaagccaaggggaattttgcagtgacaggattttagtctcttactatgaatactaatttcgaaccatagctttcattttaagcatcatcttgaatttctaaacttttttctatgtcttggtgttaaaagatttcaagattggcatttttacttaaacagacattttatggttgagttttctctttattatagagaattagtaatttttttttggctgacagatcagataaaattactttctattcattaatttttctctacaactttatgagtttatttaggtgaatagtctagactagaaacaagtttactttatctgctttgcctctggtggtacaaggtttttaacatggattgtaaacaattgtctagaaattctggcaggttctttgtattggagatctggcagtatcctgcataactttgggtgaggaaattgttctcttaaagatcacgccatgttcaggaaatgatctctgtttgaacctcactatcctgtaaggttatccaagtagcttagcccagctaagttctatcagagacccaaattatattttttaaaactttaacagctggaaacttggactagagcctttaataaaaaatcttacattctttgaaattcaagttaaaatactatatattctattacaagcagtgacaatgatgcctgcgtacttcgagttatcttactgtacacacatttcattataaagaaatgcacagtgagttctagtatgttgcaactggctttgacttgaaatggttattaaattagcttgcgcaataatactttcaatggactgttctatgcatttgtaagtgcggaagctgctcagctgcctctgttaccctgttcggccatccactaaccattggttggtcctccttaataattcggcacctgttattgactttaaaggtgttc

SEQ ID NO: 435231 - DNA, 1012 bp, Homo Sapiens
ggggagggcggggccggcgcgttgaggcaggagtgagcgcagcttcggcggtcaacgcgctttattccgaggggcttcagatacagatgaccccagccctgcatccgcccggaaggcgtccccttactcccatggggcacctcgataccagctgccctgccctgactcacttctcagcacccatcttacggcagtcggccctggcctcagacccttgggttcagatcccaggccctcctcctactcactgtgagaccctaggcgagtcccttagctcgggagcctaattccgcttcattaacatgggggtaatttaactacctagctagacggttgcaaagggatcagttcactaattctcaatgttggcagtgcatcacattgcaaactccctgcctctgctccagagctgatcagaatcaataagggtggggcctgaaaatactacatccaaatttccgagaagcacagtgtctagcatacccctatctctccatctggggttactgtcactctcaggaagaaataatcacccattattccttcaaccaggaaaagagatgtccagggcacagcttggggccccagaaagtaaccacggaggtcaagatcacaaacccgtcagtgtccagggcatggcctcgcacacatccgaggttttcaaggaccatgaagtgccatggcaagcatcctggcctgagggttaggagagctggatctcaggctcaactttagcctgaattcggtgcgtcatcttagacaaatctggtgagctctgagggctggggtaaggttgagaaactgtgggctcctcagggtgggggggtgcttagagaagatggggcctctgagtcctcagactgggggtcttcatcgggttcagcatccttcccaggcccaaggcctgccagccttttgctggcctcccatagccgatgggctgcccggtcgtctcgggcagctggaggcacctcttccacatggcagttggcaaaatatctcccactgaggg

SEQ ID NO: 435232 - DNA, 1027 bp, Homo Sapiens
  misc_feature (818)..(818): n is a, c, g, or t
  misc_feature (835)..(835): n is a, c, g, or t
  misc_feature (861)..(861): n is a, c, g, or t
  misc_feature (876)..(876): n is a, c, g, or t
  misc_feature (878)..(878): n is a, c, g, or t
  misc_feature (891)..(891): n is a, c, g, or t
  misc_feature (894)..(894): n is a, c, g, or t
  misc_feature (901)..(901): n is a, c, g, or t
  misc_feature (910)..(911): n is a, c, g, or t
  misc_feature (913)..(913): n is a, c, g, or t
  misc_feature (918)..(918): n is a, c, g, or t
  misc_feature (923)..(924): n is a, c, g, or t
  misc_feature (931)..(931): n is a, c, g, or t
  misc_feature (941)..(941): n is a, c, g, or t
  misc_feature (952)..(953): n is a, c, g, or t
  misc_feature (958)..(958): n is a, c, g, or t
  misc_feature (965)..(965): n is a, c, g, or t
  misc_feature (969)..(969): n is a, c, g, or t
  misc_feature (978)..(979): n is a, c, g, or t
  misc_feature (983)..(983): n is a, c, g, or t
  misc_feature (985)..(986): n is a, c, g, or t
  misc_feature (996)..(997): n is a, c, g, or t
  misc_feature (999)..(999): n is a, c, g, or t
  misc_feature (1001)..(1001): n is a, c, g, or t
  misc_feature (1007)..(1008): n is a, c, g, or t
  misc_feature (1011)..(1011): n is a, c, g, or t
  misc_feature (1013)..(1013): n is a, c, g, or t
  misc_feature (1015)..(1015): n is a, c, g, or t
  misc_feature (1021)..(1021): n is a, c, g, or t
tcctaggtagcgaggcctgggtggcgatttcggcacgagggcgcccatttcctctgctccgccgcggccggaggtatccgcatcggcgagctgcgtctcccgggtgtcggccccggcggctccccgaccgtgcccggctgtggcgaggcggctccagcccagcctgtggcagccgcgacccccggggcgctccggagcccactgcgcggcgcgcgtgccggctgcctgcatggacgcggcactgaagcggagccgctcggaggagccagccgaaatcctgccgcctgcccgggacgaggaggaggaggaggaagaggggatggagcaggggctggaggaggaagaagaggtggatccccggatccagggagaactggagaagttaaatcagtccacggatgatatcaacagacgggagactgaacttgaggatgctcgtcagaagttccgctctgttctggttgaagcaacggtgaaactggatgaactggtgaagaaaattggcaaagctgtggaagactccaagccctactgggaggcacggagggtggcgaggcaggctcagctggaagctcagaaagccacgcaggacttccagagggccacagaggtgctccgtgccgccaaggagaccatctccctggccgagcagcggctgctggaggatgacaagcggcagttcgactccgcctggcaggagatgctgaatcacgccactcagagggtcatggaggcggagcagaccaagaccaggagcgagctggtgcataaggagacgggagccaggtacaatgccgccatggggccgcatgcgacanctggagaagaaactcangagagcatcaccaagtccaagccttnttttgaactcaaggnanagtactatgtgcngcncgagcanctgaaaaanncngtggntgacnngcgggcnaaactgaccnggcaaaagggnntacanatggccngaanaaccttganntatntnnattagatccnngngngcgggnncantncnttgggnctcggg

SEQ ID NO: 435233 - DNA, 2810 bp, Homo Sapiens
  misc_feature (732)..(750): n is a, c, g, or t
  misc_feature (2496)..(2547): n is a, c, g, or t
tactatttttttctcaagccgtttttattacacttagtgtattaagacaagtacaaaataaccttgtaattaagatactgtatcagtcaaaaaagaagtcactattgtatgaagagatttacaaatgactaaaatatacaggctgtgacagaattaacagtttgaaagagggttgcttttttcttttagaaatgctaaattttcttaacaagacaaaaatacagtgctctaaatatgcattaccatgaaaacgttaaagaaaagcagtcttaacacttaactactattaacagcctttgccaacacatgcctgcctactccctttcctaactttaaagaactgtttcctctaaggaatactagtgcagcataacccttaaataatttcatttatttttaaagttacaacctacagagaaattaacatcttgtcaatctaataacagtggcaaccattcttcacatgcacttctcttagaataaatccccttggctggcaggataaggcttatgctgtagaaccttctcccccacagccacaaatccccttctataagtccctcctaccctcatccccccgcatccccactggcattcacctttcccaccccaaaaagtgcagctcatggtagccttctagaaaatggttttaatgggtatcccagcatacacgcttttttaaaagccccctctgaacaccagaggtggtgaaaatgaattgtgttcttggannnnnnnnnnnnnnnnnnnaagcctccactgggtcaaaaatatgtgctcttaatacttgagtttttgctttgtgtgtgggttttctttctttttcatttagatatcgtgggataaagtggagaggacatctccattttcccatacaaactgagggtgagaagagaaagagaagcaagctgttgcccccactttggcctggcttcccagccatcttcccagctctggttctttcataggaactagttattgcttccacaatgccgttatacggaatgttccacaaaggctgtgaacctagtcacagtctacccacaacaagaactctgctctgaaaaaccagcccaagagctcttacccagaagaacaatctttagccctcaaggtcactgaaacttcattagagcagtttagagtagacgtgtaagatttggcatatattaaatgattattggcacaatgttctccagttccatgtataaatgttgatatgcacatcggccagggcccaggatgaatcagccaatctgcaccatttttatgtcagcaataattccatctcttccctttgagcactgtagggagagctgcttcatccggttctccaaggcctggccctcaggggaggtgctgctttggctcttactgctgccaccactgccactgctactgctgaggccccggttgttgttggctttgtcacttgttttattctctgccccttctgccctgtctcctcgttctacttcacattcaggggaggaggccccgctgcattcacttcgagggcccaacactgggaacatcatcccaaactctgacagggacacagggctgggcagatccaggctgccaggcctcacaaccgcagggaactggtcaggcatctcagacgggcttgttggtcctgaactaaagctggacacggactgggtttccgagtcatcttcagacacaaagttgctacagctgtcatcttcaaaggcctccgaggccacagaaatggcatcaggctcaggtttgctccctggcagatcctccacagatgtgctgctgccctcagcaccaacaccgcatccccgaggccccatggcactggagcgccgccgctcgtggatctcatctgagatcatctccaggttcttcagggccatcttgtactcgccttttgccagggtcagtttggcctgcaggtcatccacagtctttttcagttgctcgagctgcacatagtactttgccttggagttcaaaataaggcttggacttgttgatggctctcttgagtttcttctccagctgtcgcatgcggcccatggcggcattgtacctggctgccgtctccttatgcaccagctcgctcctggtcttggtctgctccgcctccatgaccctctgagtggcgtgattcagcatctcctgccaggcggagtcgaactgccgcttgtcatcctccagcagccgctgctcggccagggagatggtctccttggcggcacggagcacctctgtggccctctggaagtcctgcgtggctttctgagcttccagctgagcctgcctcgccaccctccgtgcctcccagtagggcttggagtcttccacagctttgccaattttcttcaccagttcatccagtttcaccgttgcttcaaccagaacagagcggaacttctgacgagcatcctcaagttcagtctcccgtctgttgatatcatccgtggactgatttaacttctccagttctccctggatccggggatccannnnnnnnnnnnnnnnnnnnnnnnnnnnnnnnnnnnnnnnnnnnnnnnnnnnctcgtcccgggcaggcggcaggatttcggctggctcctccgagcggctccgcttcagtgccgcgtccatgcaggcagccggcacgcgcgccgcgcagtgggctccggagcgccccgggggtcgcggctgccacaggctgggctggagccgcctcgccacagccgggcacggtcggggagccgccggggccgacacccgggagacgcagctcgccgatgcggatacctccggccgcggcggagcagaggaaatgggcgcccgct

SEQ ID NO: 435234 - DNA, 1048 bp, Homo Sapiens
  misc_feature (112)..(121): n is a, c, g, or t
  misc_feature (295)..(295): n is a, c, g, or t
  misc_feature (325)..(358): n is a, c, g, or t
atgccaggctaggtttaacccccctttattcccccttaaaaaattttttaatattttacccttagaagcctttaaaatcttctgtagggtaggtttgtcccaaattatggtnnnnnnnnnnagaaagtaaaggttcccttcaacaaaagattcccaaggctaggcagtttttccccagtccacgacggttgtaaaaacgacgggccaagtgccctagctttataaatacgactcccttatagggacccattttgtacaagaaaagctgggggtacgcgtaagctggggccccctncgagggatactctagagccggccgcccttnnnnnnnnnnnnnnnnnnnnnnnnnnnnnnnnnnaagatttggcatatattaaatgattattggcacaatgttctccagttccatgtataaatgttgatatgcacatcggccagggcccaggatgaatcagccaatctgcaccatttttatgtcagcattatttccattttttccctttgagcactgtagggagagttgtttcatccggttttccaaaggcctggccttcaggggaggtgctgctttggctcttactgctgccaccactgccactgctactgctgaggccccggttgttgttggctttgtcacttgttttattctctgccccttctgccctgtctcctcgttctacttcacattcaggggaggaggccccgctgcattcacttcgagggcccaacactgggaacatcatcccaaactctgacagggacacagggctgggcagatccaggctgccaggcctcacaaccgcagggaactggtcaggcatctcagacgggcttgttggtcctgaactaaagctggacacggactgggtttccgagtcatcttcagacacaaagttgctacagctgtcatcttcaaaggcctccgaggccactcagtcccccaaatacatcctcatgtgcacaggaagaggttctagtcctctgtaacatatcccaaacaaagccagctggactcagccttctttcttatccacgggaattccggacc

SEQ ID NO: 435235 - DNA, 319 bp, Homo Sapiens
ctccagagggccacagaggtgctccgcgccgccaaggagaccatctccctggccgagcagcggctgctggaggatgacaagcggcagttcgactcccgcctggcaggagatgctgaatcacgccactcagagggtcatggaggcggagcagaccaagaccaggagcgagctggtgcataaggagacggcagccaggtacaatgccgccatgggccgcatgcgacagctggagaagaaactcaagagagccatcaacaagtccaagtaagtctggacagggccttccctggggccgtgcggctgtcctagtctgcatctt

SEQ ID NO: 435236 - DNA, 1235 bp, Homo Sapiens
  misc_feature (122)..(124): n is a, c, g, or t
  misc_feature (309)..(309): n is a, c, g, or t
  misc_feature (553)..(553): n is a, c, g, or t
aagcaggggaccaattggaggggccaggaatcccgcttttaaatggggttgggcttccccataacggtgtttttgggaggtcgcaaggggtgaaaattccggggcctagggggagtttttgnnncccccatcttttaaggggcttcgcgtgaagcccgctcattattcccccgttcccgcgtaaccagaaggatttataaaaccccaccattcagctgcggggcggggcaaagaaaatggggggggcagatcataacggaaagttaattatacacggttcaaatggtggctccgtgggctggaaatcanaatctcgcaggtgcatgtccgtcactggtgggcagggggtctgggtgccattctgctacaagatggggatccaattcgtggtcggcatttacacactacagagtctgtggtaacttaatttgcaagtaattaaaatgctgggttttcttacactgcacttcttttcaacctcttaattaatggaaaggattaaaatgtaaaaaaagttatttacaagcttgaccataccagaaactttgccaanggaagaggcaaagctttcaggacagaacctgatcgtagcatgccatactactggtgtgcagctgactccaagcaaagggagtcagggaaaagcaaaagcaaaaaacagtttaaaactctaagtccttcccaagtatgcatttacaattaaaaactctcttgggaagaagaccatagaactctgggaagcctggtggccattctggagtggtttaaccacatggagggaggggtcaatgtctccgtttccatctaggaaaacgagttagttgtcaacactgtcctcagcacttcacagtaaaccctcagggactcagaacattccatgatttgctaacatcagacagcaagttctagttaaatcacatttttttctaacatcatccttgaagttttcgttctcggtatgtttggtaaaatgatgcttttcccaaagccaaaaaaagaaagaagggagaaaaattaagatgcgggccgtttaaacacagcccagagaagtcctggcgacgcaccaagtccgccatcaccggtccatcatgctgaggatcatctcgggcgtgaggtctccgttgggggcatctgtggcagctggctgggcctcctcttcctctccctctgcgggctcagcatctggctctttttttacttcaactataatgttctcaattgcacctgtattctgg

SEQ ID NO: 435237 - DNA, 1127 bp, Homo Sapiens
  misc_feature (1097)..(1097): n is a, c, g, or t
  misc_feature (1105)..(1105): n is a, c, g, or t
  misc_feature (1115)..(1115): n is a, c, g, or t
gcttttcacagccgggctgtgtctgctccagagctgatttatacgcagaatctgcgctcgcttctccgctccctcccccgtcagcccggggacggcgccggaggcggggcgcggctgtgcccggcaggatcgggtttatttattgcctctagcccggagccggggcggcctggggactgcacagttccctctgcccgagcccctccccttctctccccaccccccaaagccggctgcttcccaggggcctgtcttccccaaacctcttaccagactctgggcggagccctccgacggtctggggtggaagtcggggacggaggcagagaggtggtaaggcgccccaaggggccgaattctgcactacctcgcacggacccagtggggagagggtggtggtggtggaggtcaccacctctgccctaaggtcggaaaggagccggagctgccagtctgaaactccctaccatcccagtagctctggaacccccttcctccaggggctatcctttctctccagggattcctctttccccagctccagacaaccccttactccaaggccccaggagccctttccctttagaataaattaaggaatctccagcttctactggatcccaggagaagaaaggtttgaaagatcacgtccctggcaagagccacagccctcagccaggtgatgggcacagggctgggtacaggtctatcacagtgccctggcttcacatctaaagagtccggatggccacagggtagagcagggacatgtgttcggctcccttaatgggtagcttgcggctggcatagtggtgcacaatttcagggacgctgctgaagggcgggctgttctggcccagcacatatttgtgttccttggttcgggacagcttcatgtgcatgaatccctggctgctcttgagggagagggagaagtcattcttgctggtctcactgttgcgcaccaggtagctggcctctttgcacagccggagcaggttctcggcgtcggttcggctgatggccccgtgataccagatctggtttttcagaggcagtgctggatctgttcactcccccagggggctgtgggctcnatgcttanggggttggtngattggggttcc

SEQ ID NO: 435238 - DNA, 1385 bp, Homo Sapiens
  misc_feature (21)..(21): n is a, c, g, or t
  misc_feature (50)..(50): n is a, c, g, or t
  misc_feature (53)..(53): n is a, c, g, or t
  misc_feature (56)..(56): n is a, c, g, or t
  misc_feature (74)..(74): n is a, c, g, or t
  misc_feature (78)..(78): n is a, c, g, or t
  misc_feature (92)..(93): n is a, c, g, or t
  misc_feature (125)..(125): n is a, c, g, or t
  misc_feature (136)..(136): n is a, c, g, or t
  misc_feature (142)..(142): n is a, c, g, or t
  misc_feature (152)..(152): n is a, c, g, or t
  misc_feature (865)..(870): n is a, c, g, or t
  misc_feature (881)..(883): n is a, c, g, or t
  misc_feature (888)..(889): n is a, c, g, or t
  misc_feature (948)..(948): n is a, c, g, or t
  misc_feature (967)..(968): n is a, c, g, or t
  misc_feature (977)..(977): n is a, c, g, or t
  misc_feature (1065)..(1082): n is a, c, g, or t
  misc_feature (1084)..(1084): n is a, c, g, or t
  misc_feature (1097)..(1098): n is a, c, g, or t
  misc_feature (1102)..(1102): n is a, c, g, or t
  misc_feature (1104)..(1108): n is a, c, g, or t
  misc_feature (1125)..(1128): n is a, c, g, or t
  misc_feature (1230)..(1274): n is a, c, g, or t
cttggttcggaacaacttcangtgcaagaaaccctggctgctcttgaagnaanagnaaaaatcaatcttgctgntctnactgttgcgcaccnngtaactggccctctttgcaacaaccggaacangttctcggccntcggtntcggctgaanagccccgtgaataccaagacctggttttccagaaggcagtgctggatctgtccaactcccccagggggctgctgggctccatgcttaggggtttggctgacttggggttccctgcagagagtcggggaggtagccgccccttctcctcccggccaggtgacaggcagctcttctccggtccttcaaactgggcgctgctgtcctccaggctgggctcagggaggggcgaggctggaccggagatgtccctgtccccatcaggcagggaggggctgctgtccagctgtcccacaggtggaggccaaggtaggtctttgatgaccttaatgtcaactgcaaaggctttggaaatccgctccttcttccactcccagggctggtcatactcctcagggggcctctcatcatcctctggcaggcgggactcccggggcccagggggccccctcaccttccggggtggccccatcctcctctggctcatagggtgtgtcatacagaggcaagggctgagttgctgtctccttggagccccggatctcggccatcatcttttgagcctcatagggctccatgtagccatcattttcagggaccttctctggggctcctgaagctcctgctgagccttcgccagtctcctgaacatcaaacgggtccgcatagtcttctaggatagctagcctatcgctgctggaggggggtccgaagannnnnngatgagcaggnnncggcnncgggggccccggggtctcgacccgaataaggcggtgtgggggagagccgtggcgcgggnacggcgtgggtccgggggnnacaggggtngtgagggtggtggagccggacgaccccccggagtaggggtcttggaagtggggctccgggtgcagcctgtaggcggccaggatgtcannnnnnnnnnnnnnnnnngngggcggagagggnncagngnnnnngtagtcgggctcggggnnnnccggcttgctgccccctccgccgccgccccccccgcggaagcccaggtgctcccggagccacttggctactccgccgctgccgcgccctcctgggccggctnnnnnnnnnnnnnnnnnnnnnnnnnnnnnnnnnnnnnnnnnnnnngcgctccctgcgttcgcggccccgggcgggagccagccggaggagctccgctcagtaacatggggcctcgtgccgaattcaaaccaggcctcgctacctagccagtaagtc

SEQ ID NO: 435239 - DNA, 1465 bp, Homo Sapiens
gggcttcagtgataacaatgaccaacatttattgagcacctaccacactgggtaatcctcacaccaccctgggacggaggtgccatcgctttaaatgtggggaatagaagaaacttgccaggaggtgcagagaggaagtggcagcgctggaattcaaacccaggcaaaggagcaccttttacctggggtaggagagagcttgctgggtgggcttcctccacgcggggaacagcagagatggggcttcctccccatctcccaggataaaggcagagacagctctggaagaggagctgttgccaccgttgttttacaaacaggacccctgggcttccctcttcctccagagagaaggatctggggccttgctcagtacctgacatggagggtggtctaggtggggttttagaagccctggggccaccctgggcactctgccctatcctcaggatggccactgcagacaggagggctctcgtcatggggaacagtggcaagcaagggtggctggaggacaggatgcaaaggcagactgcggccaccttggcctagagcagggggatacgggaggcctcccagaggcgccgggccagctggccggcctgctgcaccagcaggtcagtggggatgacagacaggtgcagggccagcagctcgtagcacctgacagcctcggttgggcggttcttgctgtagtagcgcaggagcttcctgtagtagtctcctcccagcatgccgataggcactgagtcgtcggagaggacgggcacctcgatcatctggagtttgtaccccatgtcattctcgaaccacaggaagtaggagcagtagaaatccccctcctggaacagcagcgtggtgtagcccttctgcaggtatctgcgcgccagctggatcagagaccagaccttagttttgacaaaggcagccagcggccccttgcccaactccgacgaggtcttttgactgcagttgagggaaggcgccaccatctgcccagtggtgcggtccacatagatgaagtgcaccaagcctgggaagtcttctaggtaggacaccatggtgatgttcctcctgctcttcaccagcaagaagtccttccagtccgtcagcttctcccgcatgagcctctgcacttggtcctgcaggtgctggggcaggtgtgggcctcccctgctgggggctgtggtcagaaagttcagccggtagatggcgcagagctgccgcttcagcttcccacatgcctggagcagctcccaggaggatccgggctcacttttggagaaagccttggccttaaactccagccaggtgctctgaatctcctgtgcccctcgattcttgacaaacttgtccatcctctggcgcaggtctcccacgaggggctgggagcgcagggaggccccgggctccggcccttccttcagcttcttctccacctcgtgccgaattcgccacccaggcc

SEQ ID NO: 435240 - DNA, 1558 bp, Homo Sapiens
  misc_feature (156)..(156): n is a, c, g, or t
  misc_feature (855)..(855): n is a, c, g, or t
  misc_feature (871)..(871): n is a, c, g, or t
  misc_feature (913)..(913): n is a, c, g, or t
  misc_feature (933)..(933): n is a, c, g, or t
  misc_feature (1031)..(1031): n is a, c, g, or t
  misc_feature (1072)..(1072): n is a, c, g, or t
  misc_feature (1106)..(1106): n is a, c, g, or t
  misc_feature (1371)..(1371): n is a, c, g, or t
  misc_feature (1375)..(1375): n is a, c, g, or t
  misc_feature (1429)..(1429): n is a, c, g, or t
  misc_feature (1459)..(1459): n is a, c, g, or t
  misc_feature (1515)..(1515): n is a, c, g, or t
  misc_feature (1523)..(1523): n is a, c, g, or t
  misc_feature (1534)..(1534): n is a, c, g, or t
  misc_feature (1537)..(1537): n is a, c, g, or t
aaactactggtaagtatgccctgtctgctgagggcattcctatgagcactaagagaagcccacccaataaccatgaagtgtgggaggcatgaaatgattagaggtataaaatattcccaagtttttattataaatttttattcataggttaaaacnatataagcataagtgattgtacaggtgtgactcccttttctaggagagaaaatagctttatttgaaaactccaaaagctacttaatcttaccagaggtttttaataggggaactgggtttacttacaatgaaagcatattttcattctgctatagaaaaacatatccctgctcattcagtaaatctaagattggaatgctttctagaactatgcaatatttgaataatttctagaaatgtctaagaaacaaccttttttattttaaatcatcacttacaaacgtagtctgagactgcaaactagttttcacttgactaatccatcattatagattagttaccatttgctctatataatctattgaagaaactattgttattcatattttgattaattttactagcaacaaatttttattttagtagcattgcatttaccttaaatatgtaaaaatgaagttgtaacaggatcaaatatggaaatggcaatggtaactctgcctagaacatagttgaatgtccttggttgtcggtaagatgcaaagatctatacaaattttatcataggtcaaaattatttctaaatatacaaacagtttcaactatttcttcctccctaaaactaaaaccaaaccaaacccaaatgaagaaacctaaacttcttttcatctaatagttatacccaactagataatagtngcttcttagacatcantaaaaagatttcattttaactgtctttttaatttgtaaaatntatgagtatggaattttgtntctaacttgaaatttcagatgttttaataatccaaatacgttcttctttagcatgtcaaagtactaatagttaaaaaatttctttagatttaagcatntacattacttgacttttttcaaaagtatcaaaaaattgatngctgcagaaatgccattatttgattttctaaaanacattgattcattcttaaatgtgtattctttaaaaaatagtaaatacctcaagagtgacagaaaactttccttttctgttctgtaatgctaatttaaactttgagtcttagtttacatggtcataggggttaaataaaatgtataactgtacaattaattgtgttcttgtgacctgatgattttttgaaaatttgcttttctctttaagaaatttaagttttcaagggccgtattagttatctaaatattttgggctaatgttgncttntaaataaataaaaatttagaaatatattcatgatgacaattttgttacttacantgcctattctttatttcttttttagttcanaaggtgaaattttgacctttgtattaacaaagcctaaagaaaagagaaattctgcnttttaaanattggttttcntgnattttttggtggtatgatttt

SEQ ID NO: 435241 - DNA, 1195 bp, Homo Sapiens
  misc_feature (6)..(6): n is a, c, g, or t
  misc_feature (25)..(25): n is a, c, g, or t
  misc_feature (49)..(49): n is a, c, g, or t
  misc_feature (53)..(53): n is a, c, g, or t
  misc_feature (71)..(71): n is a, c, g, or t
  misc_feature (86)..(86): n is a, c, g, or t
  misc_feature (1111)..(1147): n is a, c, g, or t
ccaccnctctgggctggcctaggtntcctcatctggccaccttgttttnagtngctgagctgagcactctntcctcttgccagctntcgcctccttcaggtccaaatttaagtgatggtcttcctgttgtgccacttggagctcagcctcactttgctccttgtctgcttgtacttctttcagttgcccaaggagcttctcttgttcccgagtcagggccttcactgtgtctctaagcctgtccagctccacttccttcgtcagcactttctcactgatggtctggatgtcatcctctagctccaggatgcgtgccacatggtctccctgttgccggctcaggatgtccctctcttctgtgatctccccatgggaccgggaaatccccttgtactgttccatcagctccgtgtgctcctgcctggcagttgccagagccctctcgagctcctgcactcggctcctcagctctgtcacctgtccctccagctgtagcttcagctgcatcaggtcattccgttcttgctggctctcatcgagctggttctgtaacacagttgccttggggacaaccagcaggatgtcagagcccccatcagcctcctccagggtcaccagttcatccatgggccttggctctcggaactggaaaggggggctctgcccacacacctggccctggcggttcacatatcggaactggtagagctgagctcctggtttgggcaggtagctggcttggaactggacactggtgtgaatgggggaaccatcagttgtactttcaggcacggaagaccacacaaatgtgtggtaatcccgaacacaggcagcctccaccttgaagatgccaatccagtcactggcactgggcatggtgcctgggggaagggtgtagtgacattccaccttggtgttggggatgtaggtccgggctacattgagaaagttgactccaccacgggatggtgcccggcttagtggtgattcttccatcctggccttgagatatctgtcctcccaacagacggatcagctgttcccctcacctttcaccaacaacaaactccccgctctcgacgaattcgagctcggccgatttggcctgatnnnnnnnnnnnnnnnnnnnnnnnnnnnnnnnnnnnnncgccgccccgcggtgagctccagtcgccctatagtgatcgtatcattc

SEQ ID NO: 435242 - DNA, 1038 bp, Homo Sapiens
  misc_feature (125)..(144): n is a, c, g, or t
  misc_feature (293)..(328): n is a, c, g, or t
  misc_feature (572)..(573): n is a, c, g, or t
  misc_feature (679)..(679): n is a, c, g, or t
  misc_feature (686)..(686): n is a, c, g, or t
  misc_feature (690)..(690): n is a, c, g, or t
  misc_feature (695)..(696): n is a, c, g, or t
  misc_feature (704)..(704): n is a, c, g, or t
  misc_feature (707)..(707): n is a, c, g, or t
  misc_feature (718)..(718): n is a, c, g, or t
  misc_feature (763)..(763): n is a, c, g, or t
  misc_feature (851)..(851): n is a, c, g, or t
  misc_feature (853)..(853): n is a, c, g, or t
  misc_feature (855)..(855): n is a, c, g, or t
  misc_feature (866)..(866): n is a, c, g, or t
  misc_feature (875)..(875): n is a, c, g, or t
  misc_feature (968)..(968): n is a, c, g, or t
  misc_feature (997)..(997): n is a, c, g, or t
  misc_feature (1007)..(1007): n is a, c, g, or t
ttttttttgagtgtgagagttttttattcaatttgtgaaggacagttttagaacaaaatgttagtaacactcttagaacactggtttgttcatttgacattttatctgcaccaatttttattacnnnnnnnnnnnnnnnnnnnnttcattacaatatttgcagagtataaccactagttgcctagacaaaagctaatttctacaaaatcaaaaacttaatgcagttttattaagagagtcaaaattctctcagttaactggatatacatagtgggtatatatcttaaagcagnnnnnnnnnnnnnnnnnnnnnnnnnnnnnnnnnnnntacatgtcaacagtcagttaaatattttgacctgacagtttctacaaatagtggttttcactacatataaaggaatctgttacatgtggtaaaactttcagagaccaagtaggaagtgtggaataaaaacaataaatgcaaactgcagccccaggctgggccctgttttccatgaagcccaaggcagtgatcttcatcatttaggagggacccactgtgtccacaaactaaaaccttcaaccanncatggtgatctgcaaagcttcatatgaaaaagacaaacattctctttctttcacacaaatcacctgcagaaatctttgtaaggcttgtaccttgcataggctcttnttaaaantgantgccnnatgtggcnaangggaattaaantaaccaggcaaccttgatttaaccaaccccaatttaaatcttggncatattaaatcctgttaaccaaaaaggaaaaattgggactaatcttggtgagcaagtttgaaaaaagagcaaatgttgagaatggcantncnaaaaaacttcncaaaggtgnacctttattaaaggggcaccctaactgtgtaaaacaccttatggcctcatataagccctaactaatgcccaaacaaacacatgtttcgggacncttgctaaacttcacacttttcacaaagntgtacgcttntataaaaaggccacattgtcgacctctcttc

SEQ ID NO: 435243 - DNA, 414 bp, Homo Sapiens
  misc_feature (73)..(73): n is a, c, g, or t
aaaggctgggtgttgcaactaatttctgcgcttgccttaaggcatctgtccctcctggttggtgcacccgtgncacacaggtacaagtgcatctgggcacaagcttttggatcccacacctctgcacaagtgtgaatacctctgcacatatgggtgtatctgtgtgtgctcgtgtatatggggtggggaacatgagacttcctgtgaccagtccaccctggctcccagctgtctgtatcctcctgccccgccctggcgagtgcctaccctggcagaacccagggaggagtggaggctgcctctgcctgggcctccacacagcatcctgtacatacgccacctgggctgggggtggggaggcagggccaggagcatcgattaaagatcacatcctggggcttccagggagctcac

SEQ ID NO: 435244 - DNA, 1380 bp, Homo Sapiens
  misc_feature (857)..(857): n is a, c, g, or t
ctcctcttcctacagtttatatattgggccgcgacaccggctggtaccggtccggattctttcgatgcactggctccttgaccctaaaaggtagctggcaggggcaagatgggggccagctacctaatggatgaaagccacaagtgaatacagttcttgtcaccagggttgccctgccctcactcggcagggagttctgacaccccagggcccgtgagctacctgcttgagcccctgtttctggggcaccttcgaggaggcgttgtggagggcatcgccccctgtttattcacaacaccctcaggggcaaacaggcctgggacccgctgacaccattttgggtagctggatgcacccgacagcagtggggtccacacactgagctccagctggcactgcccactcaagggctgagtgggaggggcccctccggccagttttgttccaccagccctgcaagttgatgcagggcgggggaagggctgggtgttgcactattgttgcgctgccttaaggcatttgtcctctggtggtgcacccgtgcacacaggtacagtgcatctgggcacagcttttggatccacacctctgcacaagtgtgcaataactctgcccttatggggcggatctgccagggctccctgcattatgtgcgcgcccgcgcgctctcgtacagtgggatgccagccggtcttgcgataccgctctgctgggccctcgacgcgcggtctctgacatacgcctaatctctttactgcccccagacccatcaccgggccatgagacgttcccgctcctctatcttgtatcacgaacagcaacccgagtagtatccgcccccggatacgaatatcccntgcttaggcgcccccctagcacctctcccaactctaacgactcatacctcccgacgccttcattgcccccttccgctcaaccataccgccactagcataaccaccactgagccgctaattacgatcatgaatcctccgtacctataattcgttccatccctgtgcgaaataaagcgcacacttaccgatcactcgccgcagcgttataagacacgcaggtctgtctccccccgtgctcttctcctttttgtcgcgctgtcttatgtcaggtacgtcgctcccgcgacccatctggcccgtcacctactccattaccctatccaatcagtggcgaaatatattcgacatcgggccccccagatctacatccgtgagactggggacccccgatcatgctgtaatagcctttagatcttatctatctttccatccccccgctccatcaacgatgtccgccccacacgcaacaacaaacacaaaacaccactaattcgaagaagatctgtatggaagtcacgtttcg

SEQ ID NO: 435245 - DNA, 1134 bp, Homo Sapiens
  misc_feature (176)..(206): n is a, c, g, or t
  misc_feature (1044)..(1044): n is a, c, g, or t
tttttgatggactttaagatgagctttaatttgtttgttttccttaagtgcatttatcgatgtaaacagagcatgttagagattcccggggagagcagactattgctgatatgttggttttaattgaaaagaaacgatgatgccaatggtttggattgacagcagcttaaggaggnnnnnnnnnnnnnnnnnnnnnnnnnnnnnnngctggtgacacccccctggccgtggttgacctggtcccagtcgcagtccctatgggacagcagagctgtcaaaacagaacccaatgatgacggctgaaaatcaagccagactgctgtgcggtcagcttgccgccgtggaatgccttgtgtcttggccatgtccagccaagggtacaacgtgcttgttcccgatcacccaggtttgccattggaagtcaaagacagaatcgcttcatggcactacagatgtggaaaaataaaaatctcagctagaaagaacgtccgatttggagatagcgggaggacacgaaggagtgggggccattttggtgctgagaggagggtgccccaacttcaggaggaccatgtgacggctgtggttgttttcggggtcacttgcacgcacacacagcgtccccttgatgctcgatggggaccgcagaagggcctgcagacctaacccctggctgtggacaggagaggctgctccaggcttctttccttctcaatgctttacacaggatttccttcatttgtgctttcctttggtttaacagttaaaaaagaagagtgagggggcaaaatggtttgtcacttgtccaaaactgagagaagaggtggaagtgggcgccaaatctcctgggtgatgcttcctggtcctggcgatcggttgccttgctcagggtttgggagctgttgctcctggaaccaccgctggccttctgggacctcgcttccgtggtaggggacgtgaaccagcctcctggtggagctttgtgttgcagtgaggccacaaagcaaaggcccagaggcagaggcctgacactggctgtggtcnacggtcacaccttgactccctctctctctctgaatatacaacgtgtgggtgggcccgttcagcagatgttacaggaaaaatagcaaattt

SEQ ID NO: 435246 - DNA, 2222 bp, Homo Sapiens
  misc_feature (106)..(336): n is a, c, g, or t
  misc_feature (359)..(376): n is a, c, g, or t
  misc_feature (2024)..(2065): n is a, c, g, or t
  misc_feature (2162)..(2162): n is a, c, g, or t
gggaatgaaacaccctgctgggtgacaccttcttcgaggcttcagttcccctttactaggaaaaatagaaccaggcccgggtggggtggctcaatcccggtaatcnnnnnnnnnnnnnnnnnnnnnnnnnnnnnnnnnnnnnnnnnnnnnnnnnnnnnnnnnnnnnnnnnnnnnnnnnnnnnnnnnnnnnnnnnnnnnnnnnnnnnnnnnnnnnnnnnnnnnnnnnnnnnnnnnnnnnnnnnnnnnnnnnnnnnnnnnnnnnnnnnnnnnnnnnnnnnnnnnnnnnnnnnnnnnnnnnnnnnnnnnnnnnnnnnnnnnnnnnnnnnnnnnnnnnnncaacacagcgagactccgtctcnnnnnnnnnnnnnnnnnncagaacaaacatcgacctcaggggcggctgctgggaatgtcaacaggagcgtgtgagactcctggcagtcccagccagagctttcctttggagcctgcccagggcacagaggtggcagggtggctaacggtgtgcagaccgctcactgagcaagcctttcccttgtgtaggacaccccagggcctcacattctctgaatccacacaaggtgatggatggctttgcctcttgtaaatgagaaaactgaggttcagagaaggtttgtaagcttgtcccgtgtcaccagctggtgagggagcctgaacacggaagccatgcctgcctgactgggaaagctgggctcctcacagcactgccctgctcccagctgtcgccaggggccccagggcaggcagagcaactgcgttcccgtggcagcacctccacctggaggggctgggcagggagcaccacactgtcaacttggaacaaacttttattttgaatgctggtctgatcagtccacggccaggggtaggtggtaactagaaacagctggaaggagggaaggagaggggaccagcagtccgcaagcaggaggaaaggaaagggttggggacaggaggaggcaaggctgaggaaggacccagccagctgggtgtctgccccggctagagaacgaaccacccccacccaccagcctaccctccatctgtggcttcagtgcagaagtcagtccaggtgggttcaggcccatgccaccttctctggcctgcacagtcccaccccaggcaggggttcttccagaaggctaaatgctctgtcctaaccctggaagtgtcctttcactaacccctgcctgcccgccccacgctccagttgggtctttcaaacctggagctcaggccttcactactgtgctcctgtagcagccacaggggtggcgtggtggggaagatggggttctagtctcagcctggctcagggaagatggggttctagtctcagcctggctcaggggaacatccctccacccctccaacaggaggtgctacaaaacatgatcctgagcagacccagacccccttctggtaaccagtgcctgaggcccaacaagaagcggggtgatgggaggctccaggccgggcagatcagcgaaagctgagggcagccagggccggcccaggcaaacgcaggattgtctccaaggggaaacccaccagctgtctttgggttggtggcaagggtcagggtcagggcccgagatggggagagtcctataatcccatcgccattcccctccacatgtctccaggttacaaccagagagcttttggcatgacctgaatctgtgggcttaaagggaaaaaggaggagagagagaaaagggaagccactactttctccctgttaaaatgcccaagtcctagactgggggttcctgctctggcagcagcagacaccaaatcccagaagcccctccacccggtctggctccatggaaggtgcccctgagtgccaagaggagcagcaagatagggagggcggctccttcccctcctgacatcccctgaccgccccgaggattctcagagacagatacgcaggcagacagccatggaggagaaaagagaggttgacagggccctgggggtggcactcctgcacnnnnnnnnnnnnnnnnnnnnnnnnnnnnnnnnnnnnnnnnnnatagagagagacagagacatataataaacagaattaaaactaagggcccagatgtacaaaaaatgtgtgagtgaggaagaaggtggggaggacagtnagagatggtcagtcctccggaagtctggctaccttcgtcagcttataaattacaaccccc

SEQ ID NO: 435247 - DNA, 1350 bp, Homo Sapiens
  misc_feature (634)..(867): n is a, c, g, or t
  misc_feature (890)..(907): n is a, c, g, or t
ttttcaggccttgccattggaggtgattggattaacaattttattctgcatccactacaaaagggctggtgttttgttccaaatgtttagctgggagggctgtagggacccctgttacccccattaaacacagtaaagcatggatccagtcagccccctgctggcaggtgtgggcctggcaactacacagatccaaccccaccctcctgggtgcggccagaggccaaggcagtcgcccgagctcctgaatcccaagaatggttctggcaagtactgctgtttgtttgtaggggcaaagagttaaaataaaacgaggttctgccatggctaagccttgtggaaaccagaccccaaagcccctgccatgccaggggtctcaacgccagacgcttgttatggaggcaccagcaggtagtggcccctgtaagcagggccagagtcgggacaaagagcaggagtgaagcagccaagagacagaggaccaggctggagccagtgggcacgcaggagcctgcctgggaaaagccggggggccaggctggcatgggaatgaacacctgctggtgacacctctctgagcttcagttcccttaacttagaaaaatagaacaggcccggtgcggtggctcatacnnnnnnnnnnnnnnnnnnnnnnnnnnnnnnnnnnnnnnnnnnnnnnnnnnnnnnnnnnnnnnnnnnnnnnnnnnnnnnnnnnnnnnnnnnnnnnnnnnnnnnnnnnnnnnnnnnnnnnnnnnnnnnnnnnnnnnnnnnnnnnnnnnnnnnnnnnnnnnnnnnnnnnnnnnnnnnnnnnnnnnnnnnnnnnnnnnnnnnnnnnnnnnnnnnnnnnnnnnnnnnnnnnnnnnnnnncaacacagcgagactccgtctcnnnnnnnnnnnnnnnnnncagaaccaacatcgacctcaggggcagctgctgggaatgtcaacaggagcgtgtgagactcctggcagtcccagccagagctttcctttggagcctgcccagggcacagaggtggcagggtggctaacggtgtgcagaccgctcactgagcaagcctttcccttgtgtaggacaccccagggcctcacattctctgaatccacacaaggtgatggatggctttgcctcttgtaaatgagaaaactgaggttcagagaaggtttgtaagcttgtcccgtgtcaccagctggtgagggagcctgaacacggaagccatgcctgcctgactgggaaagctgggctcctcacagcactgcctgctcccagcctcgtgccgaacttcgccccccaggcctcgctaccttaggtaccgttatgagttactgcctcttttatcaactggg

SEQ ID NO: 435248 - DNA, 262 bp, Homo Sapiens
tctcagtgaccccgactgtttcctgacttagccgaggtaaggttagtgcagcagacagggccagactggggtgtggggggctgagctgggcacatgagtgagggctctggcttactagggaaacagcgattgacctgtgcttctgacagcccccgagacaccttgaggaggccgctccttcccagacacacccccacgcccccactggacggcattggaggaagggacagctgcttgggttctaatgctcctgctctcttct

SEQ ID NO: 435249 - DNA, 940 bp, Homo Sapiens
  misc_feature (112)..(112): n is a, c, g, or t
  misc_feature (155)..(155): n is a, c, g, or t
  misc_feature (193)..(193): n is a, c, g, or t
  misc_feature (317)..(317): n is a, c, g, or t
  misc_feature (325)..(326): n is a, c, g, or t
  misc_feature (664)..(664): n is a, c, g, or t
  misc_feature (666)..(666): n is a, c, g, or t
  misc_feature (674)..(674): n is a, c, g, or t
  misc_feature (679)..(679): n is a, c, g, or t
gtgttcgagttaaaaacaagtgggcaaaagtcgtcaagccgaatacttcgtcacaagaaagcagaaaagccaggatgggtcaaccatgttgttcagcaacttcaaggcaagnaacaccttggagccgcaattggcaaacaccacccacaccaganaaaacaaggaggaaaaaacgatcattcaagtacagaantatcaagggaacggcatctcttactagtgcgctgcggcacgagtcatcggtcatgctatgaaggggcctttgcaaccacagaaaagtcttaaatgtctatagtggatcttcaagtcgcagttangagacacnnggatgctacaaagatttgcttgacaaggaaggattcactcatcaaagcacagagcacgcaatgttggtcttaacacaaggaaagaactaggcaccacctgaatgtccaccaatgcgggaatgattacagaaatgttaaggtccacggatacactggagcactctgcaggcactgaagatgacgtttcataagcctgttgataacatggaaagaagttcaatgggttgatttttgtttggttttagttgctgaaaaagcaggttaagaaacaccacatacatgaaccattctataacggtgtgttaaaagggaaggcggggtgggggtgagcaaaggananagaggganagaanagagcctggaaaagcagcacaccaaaaaggtaaaagtggttctctctggggagtaggaccaggggagcaattactctcttgtttcttccctcatctgatatccttctcctttctgatgattctaccatgaaattgtaccacctgtgcagtaaacacagagagaatgaaaatgctttttaaaccaaaccacagggagaagaggcagcctttaacctacaaatggcacagattagtaagctcgtgccgaattcctgcagcccg

SEQ ID NO: 435250 - DNA, 754 bp, Homo Sapiens
cagtttgactggtggaagcacggatccaggttgggaagagatggactctgccaacacttgtaagatgatgctccgtgatttaggtcctcagaatccttcggtttgcatttcagcatcaagagagcagtgtttgtatagaaatgacacaatttcattcaccccattccttaaagggcccccaagggaagctggccctgttggactatgatcaaggggagatatatggtctgggaaggtagtgggggtccattttgggtgtggttccatctgattaagaacactcttgctgtctcacctggatagcaaaggacccatttgtaggggtcagaagggcagtgtaagactgactggagcccaccatggagagatgtgtcactggggctctctcttaagtcaaattctgcacatggcatgtgaccatcctcgtgggctcactgttggtgcctgaggttccttgaaggtggtatcaggatctcaaggtcacctcctggacacagcatggatagaaaggggcagggttcatgccctggaggtggaaaggcaagcagctcatttctgagaagcagtgtggcctggggggctcataacaccaatggccccacatggtgtctccaattaacctactgtgagcaccattacctccccacactatccaggatgtcagaaacctaaggccacggagaaacttcccagcaatctttctttagaacagaaggtggcctgagttaaacatcggtgccagcacttcttggcc

SEQ ID NO: 435251 - DNA, 526 bp, Homo Sapiens
attgtgtcagaaggatgaggggcaagtggatagggaaaatgccaaagtttgggaaaaccaagtgaatgaactatcggtatagattttttaaaaaagatcagccaaacatggttttaactggtagttaaattaaagaatgttttcctggagggtcacccttagaaattagaaaagccacagttggtaatctcccaagatactggggagtctgttgagaggttcctaagagtcacgtggaatatttgaacaccttgggatccaataatatgctcttttactaaaaatcagtaaaactaaccaacatggaaatgcttcccttggtggaggggacatttaaaagtccctccaaagcctctgctagcctctcctatttggtactcactgacttaaaaattgttcaggcagtgctatgctggagctggctcatgctgtattggagccaacttatactggctcttgaaaacatattgttgcgacgcgtggcgacgcgtggtcgacgatatcccggtactccggcctgtaccag

SEQ ID NO: 435252 - DNA, 2442 bp, Homo Sapiens
tttttttttaagggtataataaaattatttttattgcattttgtgcagacgggagtctaaaaaagtaatacagtaaaagccataaagcattaaatgggagcattcaacaataaaggaaagaaccaaccctctccttttcatattggcacaaagaacacaagatcaatactgaggcaggatgcggcatactgaacacttacactgaaaattaaaggcaggcctaataataatagcagtaatagtaataaatactcttgatttggtttgcaacctctcctatttacaagggttttcaacttcattgcattgccctgcacatagatcatctaaaacaaaagcaacactagttatcactacaaggctattgaaatattgcactcagaataaaagtcacttgaatggacatgaaacatctaactacagtgattataaagataacttgatgaatgacttgtgataacattcataacaaatattgcacatgtagcacagaaaatttgggtttttgttgtgggatgtctgtttcatcaacggaaactttgctcttgccaaccagacaatctgggcccagatagtgcaactttggttccctaattgatgttgatacagcccccttctgcacagcccatcacatcagctctggaatattcaggcccccagaaggcaggacctggctgtggtgttcagagggaggtcttacctgaaggatgcagggggctggtgtctaacacctccagcttcctgattgagtacctgaaagaatctatccagtcccctgatcgaatctcagaggggacttggtgtaactggcagacctccaaacctaccccagccacacctgacgctgtctgggtggcgccagctccagctctgccttgggctcaaaggaaaagaggtggtgaggtccggattactcagtggcgccagctctgggaggtgcgtgagatgtcaagctaggtgcgcaggtcagggccctggggctggaggtactgtacccagtcccagatggtgctggaacgagcatgcagtgcctgacccccttagtaatgtgccctaggggaagggaacccggccaccgcgccttctctaaggacagagcacgcctcagaccaggctggtggagcggaagggccaaggatgagctggggaagccaaaggccctgggtcctagttagaggagagcagacaggcgctaaggacaaagcgcgtgcgactccagccctccctcaggcccaggtccccgggagacggagctagaggccgctgctaagcagcgaggcccggccccagagcacggagaaggcggctgggtccctcaggcgagacaggagctgccagatggggacgggggaggaacatcacgggcggctctggggcctctcagtgggtccggcccctaaaccagaatcggccccctcctccctcacttgtcccagggaggaaactccggggagggggcgccctccagctccacaatttcagtctttggcgaggagccatgggatacggggagcaggcgacaagccgactgaggagagacgcctgctccccagcgaaggcaccggggcggggcttcctcggtggggcgcgggcctctcggtttcttcctcttgaggagcacccctcccctatcctggccccaacttgcataagagccgatgagaagaggttgctcgcgtctctgcagccgcagtggaagctcacgtccgctgggaggcgaatccaggaaaagttggacccttgtctcacctcatctcggaaaaggactggagaggagggtgggaagccaagggcgcgcggaaagggcgaagaggcgagagcaggacggaggtgtcgagggaacgaggccacgacccccgcctgggcctaaagcactttcgctctcaaactcttggacgtcaaggaaaattcagcttcccgaggcctcgcctccccgcagtgcccccagcgggagagctcgactatggcgagaagtctgttgcgcttctagtcacataaatatggggacgttaaaaatacacgcgatgtctcctgtacactatgtataggctcggccgcccgcgccccacggctcggcgagaaggggcggcggagacggcaagcgcggccttcccaccccgcgggcctccgggccgccgggagccagggagcagcgccggaggagcgcagagcgaggaccgcggcgggagtgggaaggggaggaatgggccgcatggactacctgggggtccccaaggccccagctcctctcctttccgcgccttctcccaacctgttattgcagcgtctcctccggcgagacgaggccgggcttagaaaaagggcagcgaagacccaggggccaaactggcactgaggagctctggtctctgcgcggcggggcgccctctccgaatcagccccaacaggcgtggcctccgggcttcaggcagcggggtaagg

SEQ ID NO: 435253 - DNA, 459 bp, Homo Sapiens
  misc_feature (436)..(436): n is a, c, g, or t
aagggtataataaaattatttttattgcattttgtgcagacgggagtctaaaaaagtaatacagtaaaagccataaagcattaaatgggagcattcaacaataaaggaaagaaccaaccctctctttttcatattggcacaaagaacacaagatcaatactgaggcaggatgcggtcatactgaacacttacactggaaaattaaagggcaggcctaataataataggcagtaatagtaataaatactcttgatttggtttgcaacctctcctatttacaagggttttcaacttcattggcattgccctgcacataggatcatcttaaaacaaaaggcaacactaggtttattcacttacagggctattggaaatattggcactccgggtttaaaagttcacttggatggggcctggaaaccttctaactaccggnggtttttaagggtaacctggtgg

SEQ ID NO: 435254 - DNA, 1096 bp, Homo Sapiens
  misc_feature (136)..(144): n is a, c, g, or t
  misc_feature (163)..(163): n is a, c, g, or t
  misc_feature (242)..(242): n is a, c, g, or t
  misc_feature (319)..(319): n is a, c, g, or t
agagagaggggggggtttttgcccattttacaccaggggtggttttttattttccaggcctcaaaaggtattttgcaaccctgggccttccaaaattcttggtggttccggacatggagccccccggccttgcctnnnnnnnnntttttaaaaacaatattanctttccacaatatccccccttcccggggcccccttaaatttcccacttgggcagcagatatggaaaccaaccactgggnctaggcaagtttctgctgcgtgctccaggaaatctataatgagaagtcctggggtagccagcagagattctcttgancctgaagtccaagagaggggtgttgcccctgggggacattgggcaatgtctgatgacatacttgattgtacgtttggcaggacactgctacaggtacctcgtgatgggaggccaggaatgctgctcagcttcctacagtacccaagacggcccccacaagaaagaattacccagccccaaatgccaatagtgctaaggttgacagaccctgcgctacagtctcctagaacttaggagtcaaatctgggcacttcgatgtcctggagttactttctaaaagactacaggaagcagtgcatggaggcagatttgttcccgcctgccagggccatctcgttaataacggactgtgttttgggccagacgggcatagccccgcttgaccagaactgtttggatattttagaacaaaacaaactcatataaacatactaaggcatattgacagctgaccacctccctcgcacatggctttgataagtattaataggaaacagactctcgacagacactgctttccacgggtgaaagtgtacctgggtccttacatttggggaagggcagcttttcttttggggcccctttgccacaaggcagggactggcagtgggccaaggatagggagtgtgagataaagggcagaggccaggccaggttggcctccaaagtcaaatccctgttcatggggaacatctatgttgactccctgggaggcaggccccttccctcagaccctcagacctgtgtttcctcctcgtgcggaattcgccacccagc

SEQ ID NO: 435255 - DNA, 958 bp, Homo Sapiens
  misc_feature (21)..(21): n is a, c, g, or t
  misc_feature (34)..(34): n is a, c, g, or t
  misc_feature (45)..(45): n is a, c, g, or t
  misc_feature (54)..(54): n is a, c, g, or t
  misc_feature (72)..(72): n is a, c, g, or t
  misc_feature (137)..(137): n is a, c, g, or t
  misc_feature (948)..(948): n is a, c, g, or t
aacaatgccggtgccaaaacngaaggatgaaggngaaccccacanaggaaaganttgtatagcatttccagngaaagaattctggcccccctacacaaatctcctatgcaggggaattctagcccccataaataaancttcaaaaatttggaaaaattgaggttgttcctgttacctacagtaaatgaggtgtaaaattagcttttcaggaacatacatttgctctcagagatgactccaagactcagtaatacacaacttaggaaaagtaccagtcctctaattgtctctggtagaaaatgaccttgtcagtaacataatgttatttccatataaaaaagtagagctatcttgttgctgtcatctgtctgggaaaaaatgttatcactctaaacaagaagaggtcagaatgctctaggcatgtgaggattctttaaaaaataatagtttagtttaatattcacatctctgtggcaaacccgactcttggtagaaatttactcattgattctgctgtgtttttgcccaaatcatatagcatattcatttgcaggcaattttaagcagccatttgaaaaacagtattttggaaatgaaagattcagagatgctctctggcccatgttccctatagatgttggcgttctaaacagaactaagtcagggagcatgtgatttacagtatcatcttcttagttttcaatatgaatgagatcagtccattgttgatagaggaatgcagatgtgagagtaggacaaggaagcatcgaatctgcttttatttcacatgtcacattcactcgggtcctttgacttcgttaccagttttgttatgggcactgtgatccacttctcatctgtcgtctgtgggaatgaattccacaagctccaccttttgcagaaaaacaaaacaggaggggtgtttttcttcccctttacggtgcggangtctctgttc

SEQ ID NO: 435256 - DNA, 1360 bp, Homo Sapiens
gagcgtgctgcacctcgggagctggcggctgagctgccaggagcccagcccagctgaatcgagcggagccggtggagcaggggccttgtgggtacccggttgggcagggagaggtgcggctctgcgacggaaacaatcgccagagatgccggggctagccttccccaccagctgctgctggtggtgacaatgtcaaataacggcctagacattcaagacaaacccccagcccctccgatgagaaataccagcactatgattggagccggcagcaaagatgctggaaccctaaaccatggttctaaacctctgcctccaaacccagaggagaagaaaaagagggaccgattttaccgatccattttacctggagataaaacaaataaaaagaaagagaaagagcggccagagatttctctcccttcagattttgaacacacaattcatggtcggttttgatgctgtcacaggggagtttacgggaatgccagagcagtgggcccgcttgcttcagacatcaaatatcactaagtcggagcagaagaaaaacccgcaggctgttctggatgtgttggagttttacaactcgaagaagacatccaacagccagaaatacatgagctttacagataagtcagctgaggattacaattcttctaatgccttgaatgtgaaggctgtgtctgagactcctgcagtgccaccagtttcagaagatgaggatgatgatgatgatgactgctaccccaccaccagtgattgctccacgcccagagcacacaaaatctgtatacacacggtctgtgattgaaccacttcctgtcactccaactcgggacgtggctacatctcccatttcacctactgaaaataacaccactccaccagatgctttgacccggaatactgagaagcagaagaagaagcctgaaatgtctgatggaggagatcttgggagaaattacgaagcatagtgagtgtgggcgatgcctaagaagaaatatccccggtttgagaagattggacaaggtgctttcaggcaccgtgtacacagcaaatggatgtggccacaggacaggaggtggccattaagcagatgaatcttcagcagcagcccaagaaagagctgattattaatgagatcctggtcatagagggtaaactagaacccaaacattgtgaattacttggacagttacctcgtgggagatgagctgtgggttgttatggaatacttggctggaggctccttgacagatgtggtgacagaaacttgcatggatgaaggccaaattgcagctgtgtgccgtgagtttctgcaggctctggagttcttgcattcgaaccaggtcattcacag

SEQ ID NO: 435257 - DNA, 673 bp, Homo Sapiens
gcacgagtgtaaaatttctcaccattttggtggggtaagataagctattattaagatttaatccttataccatgttggacatttgcccctatcagttgctcctcatgaatcttctggtacaggttaacatcagcattttcattttgtatccagggaaaagcacccagaggtcatctgtgtgtcccgagaccctccagctttttcttagctgatgaaatatgagtcctcagcttggttcccagcctgctgattgacttgggctgctggtgccttgagtcccacagatgattcattaggaaaagccagatgtaccaaagcggtttactcagagtcaggggtgtagctctggctgcctgtcagctcccttggatactatattgtatgatttcttccttttccactaatatgcacatccagaaaaatttccatctgagattctagtacttcaaaatcatgcatagtaaatgagaaagctttaagtagagggcagttaaacagtgacatgttgagcacctggaggatttgttatgctatcagcaatgagccatgagggatttggacaaatattaagaacttcttggcctagatcagccccaatctgtttaatctgaatgttcagtaatttcatggtccttggtttttcataagtgctccaactttcacgtgtcttgtt

SEQ ID NO: 435258 - DNA, 656 bp, Homo Sapiens
tgctgttgctatggtgaaaacaaatcaatatcacatggctaccagccagtcccgcgctcagggagtgccatagaaattcaagatcaggtactcaagattccaagcaagaattgggaaaagaggatttagatgctgagcttaagagaattccttatagtagaataagtaggttcaatctctcatgcattttctcttccttttttcctgtactttcctaccgataacaagaaaaagatgaaaaggaaggtatactgatttgtttacatttccaaaatgacaaaacagattatcaacatagaaataggttggcaacattgcaaggggtgaaggattctgattcgggaaaaggtggataactacaagacatgttggttgttgaaaacatagttttgggggcctttaccatcttcaggtacagctacatgtcagagctggctgggttgtgccaagcagagaaacctggcaactctagggggcaggtgggcagtggagataaagggggttataaaaaggtagggaggtttgggcataaaaatcaacaagcaagaaagcccagagagagcttcagggtcaagagtcaggccaggcaagcaccggatccctggggcatggcagaacagggagaggacagtttcgccctgttcacgaaatctgtt

SEQ ID NO: 435259 - DNA, 1695 bp, Homo Sapiens
  misc_feature (154)..(166): n is a, c, g, or t
  misc_feature (858)..(870): n is a, c, g, or t
gcaaaatgcaatacaagcgggtatggtggcaggtgcctgtagtctcagctactaggaaggttaagccaggaagatcgcttgatcccaggggcagaggttcaagttagcctagggccattgcacttcagcctggtaacagggagactctgtctcnnnnnnnnnnnnngactctgagaaatgggttctgtatcaatttaatttggcttccattacatctactgaaatcagggctatacttgttaaacatgatactgtgttaatggctgttcctctccccccacccatttctcccccatctacatgctttttaggccaaacctctcccctttctgggaactgaggaatggagacacactctctgtcacagacctaagaggcacttcttgtggatatgtggatgtctggtatcagatactgcagcgacagcagttttgctcttcagagcagaggcctggcattttgtttccaccttcctgtgctaagagagtccagtaattaaaccacattcactccttggaaaaaactctatgttgtatcagaacctcagcgatggttcatgggcttccagcagaatatattcctcccttttatttatagaagagtatacagaaattcatttggacagaaggagcctctctatgtaacaggcacccttctgctactggtcacaatcaatcaatggtccagacggcaattatgattttccacattcctcaaagctgctctctcctgaaatcactttgcaaattttgttgaccaatttgcaaacaaagagagaatgcagtggcctacccaacctagaaatctgttctgcctaattcccttaaaaacaccattgagaatgcaaaataagtcccnnnnnnnnnnnnngcagaagcactacaagaaagcgtgtctaaaaccacagaactatgcacacacaaacacagacacgcgtgctcgcacacacagagtcgggatcaaagaatcttatctgatacatagttgggggagcacgggaaaaagctggcaagagaggatatggagagatctgatcagctaaagatgttggaatgttacagtatggcatggaagtggttcttgggctatacaaaaaagggggtgggcaggcagagagaatgataaatccaggctactagagagaggttcagtggccatgcatgagttaaagatagtagaggccagtttactggatgaaatgttatattatggagtggtcatttgaaggatggacttgcaatggtccaggggaggagcatctgcttagcaggacacctccatggtctggtgtctgtccaggacatcaggggactcacaggattcttgagttccatctgactgattgctggtgacagaccggctgaagggactttctccagagccgaggctactcgaggttgagtgggttcgtgatcgggcgagccgagtcatgctggcagatggtatgtagcccattccctgcaaaaagtacttgaaggcctcggtgagcttcccaggctgaactacctggggcagtcccccacagtccgccatctttagcaaagttgtatttatagggttcaggcgggaattgcattcgaccacagcctcaactgcaggcgaattgtcccctaccaccagtaaagtagaacactttaatgtttttgatttgttatcatttggcccatactggtctggcgatctccagtctctcta

SEQ ID NO: 435260 - DNA, 1052 bp, Homo Sapiens
  misc_feature (9)..(9): n is a, c, g, or t
  misc_feature (13)..(13): n is a, c, g, or t
  misc_feature (16)..(16): n is a, c, g, or t
  misc_feature (47)..(47): n is a, c, g, or t
  misc_feature (55)..(55): n is a, c, g, or t
  misc_feature (93)..(93): n is a, c, g, or t
ccaactganacanccnaaccatagaagccaccccggctctgagcacntgcgaccncagcaggacagcaccccagtagcacatgggcatcacantacgcgcacctgggcactcgcaggaccacacagtccccccatggtttgcttgagtgccaccaggacgccacctaggaagcccaaggcgccgtggatacggacagtgaacaggtagaccaggttgaaggaagccatgtaggtgaggaggtaggcgaaggcccccagcagccctacagacacattcaccactgagaagaagatgagcagctccaaggccccccagagggctccagcaaacgcccggccaccaccaccgttgtcaggctgatggccacgtcccacacatgctgctccatcagcccatgggtggccagggtccagatccagaagttgggaggaaagaggtagcccggggtgaccgccaggcagcctgtgtccacggcgaaggagagcaggtagaggaatagtaccgccgcacacagagccttcaccaccacgctggcgctggccagaatggcccccaagtgctggcgggcgcctggcagggcacgttgcatcttcctggcggctgtcggcctgagaaaagggtctggtaggccaggggcctccccggggcctcgtcctagtccggccccgatgggaggcccaggcccggcctagtcactggcctatggccctggtaaaggatccgcttccgatcgggtggggctctggtcccgaggggccgagtcgggccttgttgccgggccgcagcgtaggcccctcgcccgggacctgagggaaggccctggacggctgcggcacgcccgcctacccaccctgtaggccccgtgccaggctagcctggttggcgttgacctcagggctgggcctcctccatccactgcgaggcccttcggttcgcaaggggactggtgcctcgttctgtacccgagtcaagcctggtcagctcccgctcggcctggctcctggcttcgaccgtacctcttctctcggggggccgacaaacaggggtgctg

SEQ ID NO: 435261 - DNA, 1260 bp, Homo Sapiens
ttttttttagtcattcctcagagaactgctttattgatactgcgagcctgggcttggctgcccactcaagtggtcctgtagaaaatacctgggagctggagctgttctggtccagaagcagtcaccgccacagcagagggaaacaaatcctgacaggaacagtctttctggggatgggcagggatgtgcagccccaggtcggctcctgcatttgctgggcccccagaacatttttggcaaatccttgccttggctcagggctctcggcaaccagtttcagatgtgagggccggcccaggagctgtggcatcagtgtccctgcagccacttgcttggggctgccagctgatgtacattcttacctcagatgagggcctggactggccgatgcctcagaggctccgggcctggcatagtggttgtctggagttggaaccaggtagcaagagtcctgggtagtgttggcgagaaacagcagaaggccatggaaagccccagcaggccttcttccctctcctcagagcagtcaggtgccctggagtagctgagaggatgtcaaggggggcttgggaggggaggtgccacactcaaggtggtctggagttacagcgtcgggggagctgcctcgaaggtgattagactggattctggggcagcccccttccctgggggtgtgggagctttgtctgagggcagggggctgtccaccttggccccagactcctcttcatcatcatccatgctgggccagatggactggtcttccactctcttcagccgctcattgagtgccttcagggccagttgccttctccgctcggcgtcttgagggtctgtgcctggcaggctgatggtgatggaggatggggcaccacatcgtagcgcttcaccgtcttctggcatatctttaccttcaccaggaggctgtgcaccaagttcgccagcaaacccaccacaggctgcaggatctcagggaagaaagtggcgaaagcaaagtggtcagccatgtcccctcggccccggctatggcgctggtagaagcgaagatatacccaactggagagcaggtagaccaggttgaaggaagccatgtaggtgaggaggtaggcgaaggcccccagcagccctacagacacattcaccactgagaagaagatgagcagctccaaggccccccagaggggctccagcaaacgcccggccaccaccaccgttgtcaggctgatggccacgtcccacacatgctgctccatcagccca

SEQ ID NO: 435262 - DNA, 2815 bp, Homo Sapiens
ggcatgagacgagcgtggcggccgcggctgctcggggccgcgctggttgcccattgacagcggcgtctgcagctcgcttcaagatggccgcttggctcgcattcattttctgctgaacgacttttaactttcattgtcttttccgcccgcttcgatcgcctcgcgccggctgctctttccgggattttttatcaagcagaaatgcatcgaacaacgagaatcaagatcactgagctaaatccccacctgatgtgtgtgctttgtggagggtacttcattgatgccacaaccataatagaatgtctacattccttctgtaaaacgtgtattgttcgttacctggagaccagcaagtattgtcctatttgtgatgtccaagttcacaagaccagaccactactgaatataaggtcagataaaactctccaagatattgtatacaaattagttccagggcttttcaaaaatgacaatgaagagaagaagggatttttatgcagctcatccttctgctgatgctgccaatggctctaatgaagatagaggagaggttgcagattgaagataagagaattataactgatgatgacgataataagcttatccattgaattctttgaccagaacagattggatcggaaagtaaacaaagacaaagagaaatctaaggaggaggtgaatgataaaagatacttacgatgcccagcagcaatgactgtgatgcacttaagaaagtttctcagaagtaaaatggacatacctaatactttccagattgatgtcatgtatgaggaggaacctttaaaggattattatacactaatggatattgcctacatttatacctggagaaggaatggtccacttccattgaaatacagagttcgacctacttgtaaaagaattgaagatcagtcaccagagagatggactgacaaatgctggagaactggaaagtgactctgggagtgacaaggccaacagcccagcaggagtactatgaatggaaccagcaacagccccagcggtaaccaccaatcttcttttgccaatagacctcgaaaatcatcagtaaatgggtcatcagcaacttcttctggttgatacctgagactgttaaggaaaaaaattttaaacccctgatttatatagatatcttcatgccattacagctttctagatgctaatacatgtgactatcgtccaatttgctttcttttgtagtgacattaaatttggctataaaagatggactacatgtgatactcctatggacgttaattgaaaagaaagattgttgttataaagaattggtttcttggaaagcaggcaagactttttctctgtgttaggaaagatgggaaatggtttctgtaaccattgtttggatttggaagtactctgcagtggacataagcattgggccatagtttgttaatctcaactaacgcctacattacattctccttgatcgttcttgttattacgctgttttgtgaacctgtagaaaacaagtgctttttatcttgaaattcaaccaacggaaagaatatgcatagaataatgcattctatgtagccatgtcactgtgaataacgatttcttgcatatttagccattttgattcctgtttgatttatacttctctgttgctacgcaaaaccgatcaaagaaaagtgaacttcagttttacaatctgtatgcctaaaagcgggtactaccgtttattttactgacttgtttaaatgattcgcttttgtaagaatcagatggcattatgcttgttgtacaatgccatattggtatatgacataacaggaaacagtattgtatgatatatttataaatgctataaagaaatattgtgtttcatgcattcagaaatgattgttaaaattctcccaactggttcgacctttgcagatacccataacctatgttgagccttgcttaccagcaaagaatatttttaatgtggatatctaattctaaagtctgttccattagaagcaattggcacatctttctatactttatatacttttctccagtaatacatgtttactttaaaaattgttgcagtgaagaaaaacctttaactgagaaatatggaaaccgtcttaattttccattggctatgatggaattaatattgtattttaaaaatgcatattgatcactataattctaaaacaattttttaaataaaccagcaggttgctaaaagaaggcattttatctaaagttattttaataggtggtatagcagtaattttaaatttaagagttgcttttacagttaacaatggaatatgccttctctgctatgtctgaaaatagaagctatttattatgagcttctacaggtatttttaaatagagcaagcatgttgaatttaaaatatgaataaccccacccaacaattttcagtttattttttgctttggtcgaacttggtgtgtgttcatcacccatcagttatttgtgagggtgtttattctatatgaatattgtttcatgtttgtatgggaaaattgtagctaaacatttcattgtccccagtctgcaaaagaagcacaattctattgctttgtcttgcttatagtcattaaatcattacttttacatatattgctgttacttctgctttctttaaaaatatagtaaaggatgttttatgaagtcacaagatacatatatttttattttgacctaaatttgtacagtcccattgtaagtgttgtttctaattatagatgtaaaatgaaatttcatttgtaattggaaaaaatccaataaaaaggatattcattt

SEQ ID NO: 435263 - DNA, 239 bp, Homo Sapiens
gagacggagtggaatgtgagtataatgaggcggtagctcatgtcctgacagacgattccagaggaaaaaaaacaaacaaagcctgccatatgttcagctttctgttaaaccactgtagacagagatctttacagaatattctatagcatatgtctagtcagtatgtttgttccaccctacttgttgccaagttctaaatgcttaaaataattaacctttgcctcctctttggaaagctt

SEQ ID NO: 435264 - DNA, 461 bp, Homo Sapiens
atgctctgaatatgtcagttgcagaactttactaacactaggaaaagcatctttaaagaggttgaagaaaaagaggttgaaggagctgaggttggctggtatgtcacacttcatgtctctgaagtccccgtctcagtggtcgagtgcttcaggcaaggaacacccttgattgcattttctttactacctcatgaacagaagcggacaaacataaattgcagagattcctgactgctgacatggccctggtggcgacagttctatgcgccaatcacttttcctcctgcatctgtgctgctttttcaagcaaaaagcaatggaatgcacagcctcattgctacaggccatcttatgtcagtagatccagacagaatggtcatcaagagagttgttctgagtggtcatccttttcaaaattttttactaggttggcagtagtacgttacatgttccttcaacag

SEQ ID NO: 435265 - DNA, 1385 bp, Homo Sapiens
ttttttttgtcagtaattactttattgagcatctgcaaggtgcacatcattgtacatagcttgaaaatgtcaaattgagttttgtcacaccctctgtaaaggcttccctaatttccatggtttcgtggtttttcttcctctgttccaaggaacatgttattagtacctttactgcagcacttacttgtccttcatgtgttacgattgtaccatgtgttctctccactaggttttgaactcctcaaagatgaaatccatgcattgttcatctctgcaaccttgatgtccaaatacgtgtttgacagatgaacgaatgactgaataaatgaaggatggttcactttggttcctcctcccaactccctagtctgcatttagatcgaagtgctgatgctgagtgagaagacaacattcaaaaggcacaatggaaaagagaagtgtccaaaggcatagctgatccacagactagaaaatcagctccgtaatgaggaagaggctaatcccaaggcctcagaacataacagagccacagcaagatctttaagccagagttggggttcataaaccccaacctctacctcaaagcccagcgtagctcattaggaacaggccagcagtccagccacctgctgtggcttcacgtccaatgcagatggttctagagacccacaggcacagccacactagtagctcagggcagtgggtctcagccacctatccttactgatactttttgctttattgtccctttttaggtttcaaaactggccacccaagaataaatagacactaaacaattggatgtgaaaaagaaagacattccccaatggttctcaagaagccgtttggatgctgtgctccttacatggtgctaaggggctcaagctgccgtggatgcccttttcggacctttcagtatgcaaatatgtgctaggagggaattaagtttccatgggatgcagtaagcataatgttgtacatggatggctaattgttttcatcacacatgccaaatccaactgctttgtcagggcctggagtctgtttgatgaatgaggaaatcttgccatggtccagagaggcaactgaataatagcacgaacttcccatgtctgacatctcaggtgtgatgggacatgtgcaaacaacgttggctcctaatctgctctcagctagccatgaaactaagggctagcctgttgcctcccagggccttgggttccttatcaaataatagtttggctggactgtccctctggtcacttctaaaattccttttctttatccagcaggattcttgaccaatcagtaccaagtcaaaccctcacccttccatttaccttcacactgctgaaataaagggacatccaaactttctcgtgccg

SEQ ID NO: 435266 - DNA, 814 bp, Homo Sapiens
  misc_feature (242)..(242): n is a, c, g, or t
  misc_feature (690)..(690): n is a, c, g, or t
  misc_feature (766)..(766): n is a, c, g, or t
tctctccacactgggaacaaactttacttcccacaattgggatggaatcacctggatttttctgaactgttttaaagaattgctgagaggtagaaacagccaagtatgaaatactgatcttggggctaccgcccaggatcaatcagaaagttatatgcaaaaattcggggtcccaacaaggagagaacaatatgtcaaccatttgcatggggtcgatggatgagaaacatgagcgtagaagnagttacattttgcagaaaaatagcggaggcacacccagagtagaagagcagccagcaagctgccatcctgatcaatttgtgatgcaaggttagggagtatgagcaccgcatgggtccatgctagggagatgtgcaccaggcttagctaagaaacttaaagcagtattttaccaactcttgtcttagggagcataaagtttggatgtccctttatttcagcagtgtgaaggtaaatggaagggtgagggtttgacttggtactgattggtcaagaatcctgctggataaagaaaaggaattttagaagtgaccagagggacagtccagccaaactattatttgataaggaacccaaggccctgggaggcaacaggctagcccttagtttcatggctagctgagagcagattaggagccaacgttgtttgcacatgtcccttcacacctngagatgttcagacatggggaagttcgtgctatttatttcagtttgcctcttctgggaccctgggcaagattttccntcatttcattcaaacagactcccagggccctgacaagcagttgggttt

SEQ ID NO: 435267 - DNA, 1162 bp, Homo Sapiens
aaaaaatccattgttttatttccacaattgcttaaaatattttattaaaggaagaatacaatttaacaaaaagtgtttattaaaggggaaaatatatagtaatatgtttaaggcacatggcaaacttttggcattaaattgcaagaaaaaagaaatacaaattatcacaataaatttcagaatctgtttctttagtccaaatagttttttttaaaaaagtctgaacagcagcagcagttcactaaggaaggcacatcatggcttggtatctccgtgcgagagcagctgctgcctggtgtactcccagatcagcagggctccactcacatggacattcagggagcggataatgccctgttgaggaatttccacacaaacgtccaactgttggatcagatttgctggaattccctcacgttcatttcccaacaagagcagagatttctcaggaaagcaatattgggttaggtctaaacttttggcagtttgttcccctcccaatgatggtataacccttctgttttcttctgctgcagataatcaattagctgaggtggttttacctccactagaggtagccactgttctgcagagacactgaggtgctgaaactgtttgtcgctgatacactgaaggctgccaacaacgagcactgaagccccaaatacctcacaggtcctgcacagtcctcctaaattggtcggtttgtcgatgagcgaggccacaacgatgagtctactaattgactttccaagtctggcagcacgatcctgaaacaggagctccaggtctaagtcggaaacacgactgttccacgggataatcttcttctgaacgtcggtccactccgcttggttatctgcttcgaccaaattagtacctctagacaataatccttgagtgggtgaaatgttgcaaaaaagaaatgctcctgaatgcgttgccaattcttcttggcattccctgctccgtgcatgctttccacttgatggaggctggattcaatcacaggagtcagggcatcaaattcttcaacacttaacactttacacacagtccagagtttcttaagagcaactaaagcatacagtcgaacactaaaattgtgattgaaacaccactgcagcacaactataagggcttgcttcagaattagtttctg

SEQ ID NO: 435268 - DNA, 893 bp, Homo Sapiens
gcgaaaacaatggaagggaatatttaactctaaacagaaatctgttctgacattaaaaggaaatgagtgagaacatttgtgcagaccatattttacatccttccacgcctttcaggccttattgaagatgaatggatcaccattgataaatttaccagattcactgatgttcctttagctgcgggatttcagtggtacctttctcaaactcaacttagtaaactaaaaccaggtgactggtctcagcaagacataggtactaatttggttgaagcagataaccaagcagagtggaccgatgttcagaagaagattatcccatggaacagtcgtgtttccgacttagacctggagctcctgtttcaggatcgtgctgccagactttggaaagtcaattagtagactcatcgttgtggcctcggtcatcgacaaaccgaccaatttaggaggtaaaaccacctcagctaattgattatctgcagcacaacaaaacagaaaggtataccatcattggagtggaacaaactgccaaaagtttacaccctacccccatattgctttcctgagaaatctctgctctttgtgggaaatgaacgtgaaggaattccagcaaatctgatccaaccgttggacgtttgtgtggaaattcctcaacagggcattatccgcttccctgaatgtccatgtgatcggacccctgcttgatccggcgagtacccccaggcacccaccttgttctcgccccggaagataaccagcccatgcatggcccccttccttaccggaatcgcccgccggcttggtccaaacttttttttaacaaacaccctatctgggacttaaaccaaacacgaatttctgaaattttaattgggcaacaattttcactttcg

SEQ ID NO: 435269 - DNA, 548 bp, Homo Sapiens
ttttcttatggtgaagaaaatcttaaaacaagcatttgtacgtttttagcagttttatcacatttagacattattactcaaaatattccagaaaagaaactaattctgaagcaagcccttatagttgtgctgcagtggtgtttcaatcacaattttagtgttcgactgtatgctttagttgctcttaagaaactctggactgtgtgtaaagtgttaagtgttgaagaatttgatgccctgactcctgtgattgaatccagcctccatcaagtggaaagcatgcacggagcagggaatgccaagaagaattggcaacgcattcaggagcatttcttttttgcaacatttcacccacttcaaggattattgtctagaggcagtgtctggcttgtaaacaatgggaagggaatatttaactcttaaacagaaatctgttctgacattaaaagggaatggagtgagaacatttgtgcagcgcccagaatgctttgtccggcatctttctgcaggactcctctagtcactctagtgttaagtcaacctttttc

SEQ ID NO: 435270 - DNA, 1092 bp, Homo Sapiens
  misc_feature (962)..(962): n is a, c, g, or t
  misc_feature (984)..(995): n is a, c, g, or t
  misc_feature (1067)..(1067): n is a, c, g, or t
ggaattctccggattcgacagtcaacaaggacaggtttattttggaaaacaaacttgagaggggcttctggccaagttaggtcagagccacactctcttacaaactaaggatatttaagggttttggagggggttcttatcataggttccgaatgtttctgtgtgagggaaagtttattgcggggatggaatgtctctggtcataagggaggctgtctcggggttggcatgtttctggtcagagaagggtttatcttagggttggaatgtttctggttatgctgacattagctattaggctgatattttcgggctggatttaggcggcttttaattaagggggagcttagaatggtggtgtttgttcaagatggcaatgctcctgctccgtcactggccaggtaaggcaaccctttgttgtggtaacaacctgagattggcaggggctcacctccaggggcagctcatgtgcttgctggcgaggctgcaccttgtcattcaggttcacagggcacaggtcaaccaggccctggctcttcagtcttctgcctggagtgacttatgtaattctgctcagctttcatagggcacagggagtcaggggctaactctgctgcctggggctggaaacagactcctcccttgaggagcagcagtccaccatagggaagtcacagtggtccaagccaaaggggatgcaggtagtgtagactaggccgcacttcagggaatgcacaccactgggaaataacgggatcgtgacccgcaaccttttttcaccgccaaggcgatcccacggttccagcgaccctcctctcttttggccctttccccgaacccccgttaacctcccgacccttgtattcccaacctccttcgggcttttagccgaatttccctcttccccccaaacaccctagatatgcgcaaccctccacatcccaaccgcctatcggcgtctnttagcccaccttacccttccannnnnnnnnnnntaaccgccgccgccgatctactactcactcaaaaccgccccagccgtcaatcgctctccttgccggttccgnccgactccgaacttcccctaccctc

SEQ ID NO: 435271 - DNA, 922 bp, Homo Sapiens
  misc_feature (44)..(44): n is a, c, g, or t
  misc_feature (62)..(62): n is a, c, g, or t
  misc_feature (214)..(214): n is a, c, g, or t
catgccttgtttttgcgtcttctcaaagaacccccgggggccancggccggacaatgtaccnccatgtcccccagctttggatgcatcggtcagcacatcttccagcccactgggaactgctggccagggtccgccatgtctgctgtcagcgcattgctggtatagtacagattggtgttgaggaccacaattcgccccagccccgctgggacnccggcagcttctcacagtagaaggcaccttttttgaagagagcgatggactcattactaagccagggtttccatagttctgctatctgattgtagatgttgttacttccagctgggaactggtttttggggtgaaaatcatgatttcccaaagcagcatagactttagtatctggaaagacctctctgatgagcttggtcaggcgttccacaatttccagtacagctgcctctcccagtttctcatcgggcacatgaggcgtgtcatcaccagtccagagaatgaagtctggctctggctcaatctccttcatggcatagatggaggagttgatgagggcccagggagaatcacagaggtagtcaccccaggggcctgcgtcgggcactggctgggatccagctgatgggcacacctggaaggggtctttggataccttgtagtcagggtcaaggtgcaggtcagcgatgtgccagaacttccctggttcagccctggcacctccccagttagccaggaaaatcagccaggcgagcagcctcatcctcggggctcacttccccagagccgtgggattctcaggcactgttgttgttctcaccacaggcttcctaagtagttttctgtggccacgtgcctgagcagaactccttgtcctgttacaggtgttccaagtcctccaaggcgtctggatcctctggctcttcc

SEQ ID NO: 435272 - DNA, 1819 bp, Homo Sapiens
ggtatcatatcagtttcgctgaccggccaatctacatcaaggactatgtgacactctatgtgaaaaacatcagagagctcgtactggcaggagacaagagtcgtccttttattacgtccagtcctacaaatggggctgaaactgttgcagaagcctgggtctctcaaaaccctaatagccattattttggtgatgtacatttttatgactatatcagtgattgctggaactggaaagttttcccaaaagctcgatttgcatctgaatatggatatcagtcctggccgtccttcagtacattagaaaaggtctcgtctacagaggactggtctttcagtagcaagttttcacttcatcgacaacatcacgaaggtggtaacaaacaaatgctttatcaggctggacttcatttcaaactcccccaaagcacagatccattacgcacatttaaagataccatctaccttactcaggtgatgcaggcccagtgtgtcaaaacagaaactgaattctaccgccgtagtcgcagcgagatagtggatcagcaagggcacacgatgggggcactttattggcagttgaatgacatctggcaagctccttcctgggcttctcttgagtacggaggaaagtggaaaatgcttcattactttgctcagaatttctttgctccactgttgccagtaggctttgagaatgaaaacacgttctatatctatggtgtgtcagatcttcactcggattattcgatgacactcagtgtgagagtccatacatggagctccctggagcccgtgtgctctcgtgtgactgaacgttttgtgatgaaaggaggagaggctgtctgcctttatgaggagccagtgtctgaattgctgaggagatgtgggaattgcacacgggaaagctgtgtggtttccttttacctttcagctgaccatgaactcctgagcccgaccaactaccacttcttgtcctcaccgaaggaggccgtggggctctgcaaggcgcagatcactgccatcatctctcagcaaggtgacatatttgtttttgacctggagacctcagctgtcgctccctttgtttggttggatgtaggaagcatccccagggagatttagtgacaatgggttttcctcatgactgaagaagacacgaactatattattttacccttgggagcccaccagcaagaatgagttggagcaatcttttcatgtgacctccttaacagatatttactgaaggaatctaggttgtattttcagtggacaatgggaataaagcatttctaaagcaccgactggagaggaaggcatcagagacaaggagagaagccgagagacatgtctgcgtgctgccacgcatttgagcgattgctctgtgaagagttgtacactgaacactttcaggggaggctgtttacccaggcaatgtcctcaaacaagcctgtgccggggtgtcctggaatctgtgccaggactgtgtttttagcccttcacctctcagctttagcaggacatgaaccagttataacaagatggccctgcagctggttacaagaatgtgacatggcaggatctatggaaccaaatggaaggttttgaggtgatgtaggtctttcacagctagctttggggaatacggaatactcaaataaagtgctttgttattatttcagagggaatggcgattgaaatgttacaacagagatttcttggtggtagctatttgggtaaaggtatatgggtatttttctgtacatgtgaaattatataaaaataaaagttatataaattacattgacaacttgata

SEQ ID NO: 435273 - DNA, 1290 bp, Homo Sapiens
aaggagctggaacaaagagcagagcagaacccaggcttccctccaggctgacatgttcctagtggccgtatcagtcactcacagtttggagtcctcagtggatgttctcacagctgttgttagatggccatcccctgagatccactgaagattcattttttaatcaggcatccagtgcattgaagagcaatgttatcatcatgaggaggaacaagggagaaataatcagtaaggactataaatttctgaaaccactttagagagtggcgaaggtggggaatcataagaccttttggggtgctgggtgagggtctttgaaggagagtcatgaaggttacgtgggaagatgacatgtagaagaaacaacaccggacagttagatggttgagagcttgagacccagctatatctgtaggacttgggcagattattttaaatatcctatagcttctctagaggaattttctcaagattcttagcaagccatgtatttctcaagatttaaccaagttccctggtcaacttccaaaaatcctaaaagattcttaatgcttatgaacaaccaacagtggtcccaaggagctttttgatctgagatgcagaatgtgaccctcaacatcctctgaagggacagagtgaccaggtatctagattccttagattgaggcggactgtccccgaaaagagcttcccccacttggcctgtagcagagccgagacccaaattcaaatgccatggtcctcccatggagctggtacagcaggcatcctccttgtgctttttcataagaaattatgccctgtgtcccccttttcaatctgttggaccagtttcttctacataggcctgacgtcgagaagaacccagtttgttctagccctgggggaccagggactgcccttccgctgggtatggcagaaaaccttcataagcagccttccaccattccctgaaggggatttcccccttacatatccctaagcgagaaccccttccacggggaaggggctttgtccacccagggcggaaccttgcataatatcccccggagcaaaaacccttatgcaccccgtaaaacaaaatttccaaggggacttcctacaaaaaatttgtggaaactttcccccctatcttaaaggcgggagccagactcccccggggggatccaccccccccattaaattccgccttgaaaccaaaaaaggtcagggtcatcctacattttctcccatcgactctctgtttccaggcgctatgtttttacaggggtccctccctttactttttgg

SEQ ID NO: 435274 - DNA, 1516 bp, Homo Sapiens
ttaagtgtggagagggtacaatgttcttattatactcttctcagtcgacatggagaatagaggagagcagaggaatgcccatcttacatacaactagagcgccgcttctcagcatgcctggcttgtcttgagcattcgctgaatgaatgcagattaatcagaacaacagacttccctctgaaaacttaaattctgtagagtgcctatgtatcaatgccaaggttgctgaccggtaagacccctgaaaacgagcgatcacgggcttccctgacgacagggccattatagtgtcctcagattagatcttagcacaatggctttaacctgcttgatgaatgaataacagagggaagaaagaaaggaagtacgtgaagggggtaaagagaaggaggtgaggggatgaggggggaaagagtgacctccaaaaatggactggcccaaactgggccaacctgagctaccctggaagacgcaagagggctcactctatcccagggatgaacagaggactctggaatcctcagatgtaatggaaaagtcaatgagccatattgtactcgaaatatcttgttaataacaagggtattggctttgaatgtttggaaatcatccacagagtagtttactaagccacaaagcaattaccactagcacccatttttcataaagaaaccaagaaataatattctaaaattggtagctggtgtcatgacccaaccccagatctggacagagtggttctccatcccatggacagatcctaccaggaggtcttcacgtaggtgaaggcctttgtgctgacctttttggttgcaatgtttcaagaacaagagaaaagtgacaacgtttggtttactttagtatattaggcatttttctaatgtgaactatacgaaagcaattctcattcaatgaaagaggcgccaaaaaattagagattaataagtcatcggattctagcacgttgactgaaagaccagtgagttgtgcttgttgaattctgccctcactgcagatgtgcaggtcaaacccaaagtggtcaatgggaaagatgaagaaagatggatttccagggcatgggctcccgactagaatctgcccctcgctcacgcttctcccggcccctttagactctttagactgacatggtggagaatgtgtttgctgtggtagagaaagggagaaagtaatgagctgggccaaacagcagcactgaaagcttcccaagtcacactcagaccagacttttccagggattggaagatggagagagggaaaggaggtgcagacaccaagtaagggtttggtgcagggctctggaatgtccagaaggagcgggaagcaaaggtggcgggacactgcctgtaaaggcgacaacctagtgtggctcacatagagagtctgttattcctgttcagtgcccaccagtgacagtaaactgtacaagggacagcagtcccagccctgccatacacaagaagacagagccatctgggggatggcaaagacttgccct

SEQ ID NO: 435275 - DNA, 350 bp, Homo Sapiens
  misc_feature (56)..(56): n is a, c, g, or t
  misc_feature (79)..(79): n is a, c, g, or t
  misc_feature (330)..(330): n is a, c, g, or t
acagttgaacttaagacagagtcctctgttgaatgctagctatgggcatgtgtggnagtgagactccagggggagtttnagaagcgggaatcccgccttccatcagaagggtgttggctcccaccttccatcagaagggtgttggctcccaccttccatcagaagggtgttggctcccaccttccatcagaagggtgttggctcccaccttccatcagaagggtgttggctcccaccttccatcagaagatgctggcccagggaaacctgaaaggcttctttttccaggaaagcattctggtcccaggatgcagactgctctcgggcaanagagcagggaccctcttttg

SEQ ID NO: 435276 - DNA, 1017 bp, Homo Sapiens
  misc_feature (4)..(4): n is a, c, g, or t
  misc_feature (9)..(9): n is a, c, g, or t
  misc_feature (16)..(16): n is a, c, g, or t
  misc_feature (22)..(22): n is a, c, g, or t
  misc_feature (25)..(25): n is a, c, g, or t
  misc_feature (35)..(35): n is a, c, g, or t
  misc_feature (43)..(43): n is a, c, g, or t
  misc_feature (50)..(50): n is a, c, g, or t
  misc_feature (54)..(54): n is a, c, g, or t
  misc_feature (58)..(58): n is a, c, g, or t
  misc_feature (62)..(62): n is a, c, g, or t
  misc_feature (79)..(79): n is a, c, g, or t
  misc_feature (107)..(109): n is a, c, g, or t
  misc_feature (115)..(115): n is a, c, g, or t
  misc_feature (453)..(489): n is a, c, g, or t
cacnaatgncaagtgntttagngantttctataancattctcnccccgtnaagnaagnaaanactccagccatgggagncatgagactcgataactgaatgccatannngaggtngcaggtgaccagactcaccgacacagcagagagcagcttgaaccttcaacccagccaagacccagtgccttggactgggggagaaaacatgcagccattcctctctctctctggtggctagaggggattctggcttttcctgccagagccacccctttccctcctcctaaagttgatggtggttctttaaggaaagggagaagtgcacggtgtgatagggcaggaagagaagaaaacggaggagaagaggggactttcccataagcaggcagaagaaacggcagctgtgttgtgtgatggacatggatgcagcggtgtccaatgtggggtcagccctnnnnnnnnnnnnnnnnnnnnnnnnnnnnnnnnnnnnntcctggcccttatgattaacatgggatctgcctgcaaatgctgtttagggccatcgcctcttcctgtactgctatttttgagagtgatgctcctgagccccatgacccagtcaaatttcatgtccccttgagccagattcagtgctgggagtccagtgtgatctgcctggatcttgctgcactgagaatagggcagatcttgatcccaatacaggggctggatatgaacaggcaacagctgggtttctgaatcagaaagacttggttaattgctaattgcttaggtgagtaatttaattttgttgagtcagattcctcagctataaaatgcagatgacaatacttattcctccaggttgtggggaaaatggagactctaagcacgatgtccatttcacagaaagataccaatttggtggcttatttttctttctaccttcagaagtggctatccctgccacccaaacagacccttgactctcaagtggatgtcccatttgcacagggggagacctgacagcctacgtt

SEQ ID NO: 435277 - DNA, 939 bp, Homo Sapiens
  misc_feature (704)..(704): n is a, c, g, or t
  misc_feature (716)..(716): n is a, c, g, or t
  misc_feature (719)..(721): n is a, c, g, or t
  misc_feature (725)..(725): n is a, c, g, or t
  misc_feature (727)..(729): n is a, c, g, or t
  misc_feature (731)..(732): n is a, c, g, or t
  misc_feature (740)..(741): n is a, c, g, or t
  misc_feature (752)..(752): n is a, c, g, or t
  misc_feature (755)..(755): n is a, c, g, or t
  misc_feature (757)..(758): n is a, c, g, or t
  misc_feature (763)..(763): n is a, c, g, or t
  misc_feature (765)..(765): n is a, c, g, or t
  misc_feature (789)..(789): n is a, c, g, or t
  misc_feature (797)..(797): n is a, c, g, or t
  misc_feature (810)..(810): n is a, c, g, or t
  misc_feature (816)..(816): n is a, c, g, or t
  misc_feature (819)..(819): n is a, c, g, or t
  misc_feature (824)..(824): n is a, c, g, or t
  misc_feature (827)..(827): n is a, c, g, or t
  misc_feature (834)..(834): n is a, c, g, or t
  misc_feature (844)..(844): n is a, c, g, or t
  misc_feature (854)..(854): n is a, c, g, or t
  misc_feature (860)..(860): n is a, c, g, or t
  misc_feature (866)..(866): n is a, c, g, or t
  misc_feature (893)..(893): n is a, c, g, or t
  misc_feature (907)..(907): n is a, c, g, or t
  misc_feature (916)..(916): n is a, c, g, or t
  misc_feature (924)..(924): n is a, c, g, or t
  misc_feature (928)..(928): n is a, c, g, or t
  misc_feature (930)..(930): n is a, c, g, or t
ggaaaaaaattttattgtgaaaattcacatatatatataaaaaattcaatcaatacaaaaggatagacaatgaacaaatgaattccccttccactccagatccccaccccagatccagacctcctgagcccactttccccatctcatcacagatccagacctcctgagcccactttccccatctcatcacagatccagacctcctgagcccacttcccccatctcaccacagatccagacctcttgagcccactttcccgatctcatcacagatccagacctcctgagcccactttccccatctcatcacagatccagacctcctgagcccacttcccccatctcatcacagatccagacctcctgagcccactttccccatctcatcacagatccagacctcctgagcccacttcccccatctcatcacagatccagacctcctgagcccacttcccccatctcatcacagatccagacctcctgagcccactttccccatctcatcacagatccagacctcctgagcccactttccccatctcatcacagatgcagacctcctgagccgcactttccccatcttatcacagatccagaccttctgagccccactttccccatctcatcacagatccagaccctcttgagcccactttccccatctcatcacagatctagacctcctggagcccactttcccnatctcatcaccngtnnnttcntnnncnngcatttgnnttctattcctnccncnncaaananctacagactaagtggctttatttntgtcttanagttctgattgcnaaagtnctnagagnatntaacagnctaaagtaangcgctcgtgngccgtnttcttntggaggctcaggaaagaatagggtccngcttttttagctanagggctcanactctagnttgngnctcttcttc

SEQ ID NO: 435278 - DNA, 1629 bp, Homo Sapiens
  misc_feature (5)..(6): n is a, c, g, or t
  misc_feature (9)..(10): n is a, c, g, or t
  misc_feature (16)..(17): n is a, c, g, or t
  misc_feature (20)..(20): n is a, c, g, or t
  misc_feature (22)..(22): n is a, c, g, or t
  misc_feature (26)..(26): n is a, c, g, or t
  misc_feature (30)..(30): n is a, c, g, or t
  misc_feature (32)..(32): n is a, c, g, or t
  misc_feature (40)..(41): n is a, c, g, or t
  misc_feature (43)..(43): n is a, c, g, or t
  misc_feature (49)..(50): n is a, c, g, or t
  misc_feature (55)..(55): n is a, c, g, or t
  misc_feature (58)..(58): n is a, c, g, or t
  misc_feature (61)..(62): n is a, c, g, or t
  misc_feature (70)..(70): n is a, c, g, or t
  misc_feature (84)..(84): n is a, c, g, or t
  misc_feature (89)..(90): n is a, c, g, or t
  misc_feature (92)..(92): n is a, c, g, or t
  misc_feature (98)..(99): n is a, c, g, or t
  misc_feature (329)..(570): n is a, c, g, or t
  misc_feature (622)..(622): n is a, c, g, or t
  misc_feature (629)..(629): n is a, c, g, or t
ggaannaanntttatnntgnanattnacananatatatannanattcanncaatnccnaannatagacantgatcaaatgaatnccccnncnactccnnatccccaccccagatccagacctcctgagcccacttcccccatctcatcacagatccagacctcctgagcccactttccccatctcatcacagatccagacctcctgagcccacttcccccatctcaccacagatccagacctcttgagcccactttccccatctcatcacagatccagacctcctgagcccactttcccgatctcatcaccagtgatttcttgggcccnnnnnnnnnnnnnnnnnnnnnnnnnnnnnnnnnnnnnnnnnnnnnnnnnnnnnnnnnnnnnnnnnnnnnnnnnnnnnnnnnnnnnnnnnnnnnnnnnnnnnnnnnnnnnnnnnnnnnnnnnnnnnnnnnnnnnnnnnnnnnnnnnnnnnnnnnnnnnnnnnnnnnnnnnnnnnnnnnnnnnnnnnnnnnnnnnnnnnnnnnnnnnnnnnnnnnnnnnnnnnnnnnnnnnnnnnnnnnnnnnnagcaggtgaagtccttgcccatcgtgcatcactctcccttctgcctccttcnacttttnttttatatttagggggaacgagtacaggattcttacatagtcaaaaagctccttatagagaagctcggaactttcaatacagctttgcattttttaccattttaattttccatttaatttaaatgtattctctcatttgaccttcatactctgtggagaaatatttctattttggcttgtattgacaagctgttttcacacagcccccacatcacccaaccacccagcagagatcctcattcccatgaaacagataaagaaattgagacccagggaggctaagagtcctggcaggatcattcaccttccaaggtaaggagccagttccagacctgggtttgtgcagctccaagctcccccgtctttctacaatgctagatttagactatagcaatctagcaagtgtggccacacaatggtcaagttggatttagatgatgttctctataaatccattctcctctcccgtgtaagcaaggcaaagtactccaggccatggggagtccctgaagactcgatgaactgcaatggccatatcaggaggttgcaggttgaccagaactcaccgacacagcaggagagcagcttggaaccttcaacccagccaagacccagtgccttggactgggggagaaaacatgcagccattcctctctctctctgctggctagaggggattctggcttttcctgccagagccacccctttccctcctcctaaagttgatggtggttctttaaggaaagggagaagtgcacggtgtgatagggcaggaagagaagaaaacggaggagaagaggggactttcccataagcaggcagaagaaacggcagctgtgttgtgtgatggacatggatgcagcggtgtccaatgtggggtcagccctatgcgtgcggccactgttgcaagacgttcagctcaaggaaaaacgacaccaagcacatgttcatccactcgggggagaacgccagcaccagtgcgccgtgtgatggcgatcct

SEQ ID NO: 435279 - DNA, 1708 bp, Homo Sapiens
  misc_feature (1308)..(1336): n is a, c, g, or t
ttctttttaactcaagaaagggcttttattgtttttaactcacttcctgggaagttaatttttaaaacactcttatagagtttgctcatcgcttgtgctacattcaaaaacaacgatgccaaccaaaaccctcagtgacagggtgagcatcccacctgggcctacccctgagctttccaagggtgggtccgatcaaagtggtccccccagaccagatgctcaagaaacacttggggatcagtgattggctcttaacttgccttccactaactctataaaagtgttcttaaaaacagtaccgagtaactttttaagcttcgggccacactgccttagcccagaggagccggggagaaacgtggacccactgacaatggggcacattcggctcctagccttaaatagacgtagaaactgtattacaagatgcatgttaccagtgcgggacatacggagtgagttgtgtgccacagatgagcacgcgacatgcacccacaggcgcggagatgcagcgggatccgggtttctcccccagcctgcctcccttctcccaacaagcccctcctccgacaggacacccacacctgtggccacaaagcccttgtccatccatgtttccaggggcagtgtccgagtcctgcgtgaccctgtgggggtcaacctctatgagcattcggtcagcaaatgccacgtcggccagccggacactgatcccagagagaaggtgaaggctgctccggaagagctgtgtctgcacgcgctccagcacccccgctctgagcaggctgactgctgatgtcctcagggtgaggcaattgccgcagaggccacctgccagcgtgcacacccctccaggttctgtgtctcgtgatccctccgacctggacagtttgtccttcgttgtaggagtgtgagtgcagctcttgggcccagatgggtaggccggtgtaggaggagaggctgggttccagttatttcagcatgcgcagggccacaggcctgtcgcgtccatggccctcggtcaaagtcagccctggtgtcttctccagcctcagctctaggggcatcatcaagggagagagtgagatgggcagggacgatgtggtgcttccgcttcaggcctctgctcagagcttgattccgttcagtccactttccagataacgccgaatgcgaaacacagtccaggaaagttagttccatccacttggctgccaaataatcttgggctgtgctgggaaccacggaagatgtaggaaagctcgtgagatgttcccaagcagggcctctccccgaacccccaggttnnnnnnnnnnnnnnnnnnnnnnnnnnnnngaatcagaattctccaacactggccctgtccccagtgaggggtccgagcccccataccagcgtctgaatagacaagagctctggtgccaccaccccaaggtgggcagggtacccccctctccaccatatgcctgtggcagctgagccagcctgcccggccccagcgggaggtctcttcggttgtggtaagcctggcctccacctgccatcttggtctcctgcctctgcctcctgccccaggccatgccaaccagccgggtggcatttctgaggctccatgggcacccggtttccccacagaatgggtcaggccaaggagggccaagaagaggaggatggcctcgtgggagccctgcccccaagaccccaaat

SEQ ID NO: 435280 - DNA, 1083 bp, Homo Sapiens
  misc_feature (535)..(535): n is a, c, g, or t
  misc_feature (924)..(924): n is a, c, g, or t
  misc_feature (936)..(936): n is a, c, g, or t
  misc_feature (983)..(983): n is a, c, g, or t
  misc_feature (1025)..(1025): n is a, c, g, or t
  misc_feature (1051)..(1051): n is a, c, g, or t
  misc_feature (1065)..(1065): n is a, c, g, or t
  misc_feature (1072)..(1072): n is a, c, g, or t
  misc_feature (1082)..(1083): n is a, c, g, or t
ctttttaactcaagaaagggcttttattgtttttaactcacttcctgggaagttaatttttaaaacagtaccgagtaactttttaagcttcgggccacactgccttagcccagaggagccggggagaaacgtggacccactgacaatggggcacattcggctcctagccttaaatagacgtagaaactgtattacagatgcatgtaccagtgcaggacatacgagtgagctgtgtgcaacagatgagcacgcgacatgcacccacaggcgcggagatgcagcgggatccgggtttctcccccagccagcctcccttctccaaacaagccctcctccaacaggacacccacacctgtggccaaaagcccttgtccatccatgtttccagggcagtgtccgagtcctgcgtgaccctgtgggggtcaacctctatgagcattcggtcagcaaatgccacgtcggccagccggacactgatcccagagagaaggtgaaggctgctccggaagagctgtgtctgcacgcgctccagcanccccgctctgagcaggctgactgctgatgtcctcagggtgaggcaattgccgcagaggccacctgccagcgtgcacacccctccaggttctgtgtctcgtgatccctccgacctggacagtttgtccttcgttgtagagagtgtgagtgcagctcttgggcccagatgggtaggccggtgtaggaggagaggctgggttccagttatttcagcatgcgcagggccacaggcctgtcgcgtccatggccctcggtcaaagtcagccctggtgtcttctccagcctcagctctaggggcatcatcaagggagagagtgagatgggcagggacgatgtggtgcttccgcttcaggcctctgctcagagcttgattccgttcagtccactttncagataacgaanaatgagaaacaaagtccaggaaagttagtttcatccacttggctgcnaataatcttgggctgtgctgggaacacggaagatgtaggaanctcgtgagatgttccaagcagggctntcccgaaccccagnttaaaanaaagtaaagnn

SEQ ID NO: 435281 - DNA, 1895 bp, Homo Sapiens
  misc_feature (67)..(191): n is a, c, g, or t
aggtgatcctcatacatcagcctcctgagtagctcagactatagccacaccaccgtgcccagctaannnnnnnnnnnnnnnnnnnnnnnnnnnnnnnnnnnnnnnnnnnnnnnnnnnnnnnnnnnnnnnnnnnnnnnnnnnnnnnnnnnnnnnnnnnnnnnnnnnnnnnnnnnnnnnnnnnnnnnnnnnnntgagccaccacctacagcctggccaagaacccttttctctcccacattcccctgggagcagaggataggcctgatgattgttttaaacagtagaaagggttcagctaagaactacagtccactctcagccctgtcatgtactataggacaagtcttcattcacaacaaatggatagcaacaccaatctcgtaacactgggaaaactgcatacaatatttagaaggaacactaatacagcagaatctgcacacaacggagtcaaagatctgaggccaaatcctactacactttacgactttgagttggtcacttttctgaaccttagcttctccatcagtgtaaaactgatgtaaaataatataaagctatatgaaagctgatgtgatgtacttgtgaaatagtatgtgcaaaaggactttgtaaaatgtaaagcactaatgctggttattgtgatatctgagatatttttaaagttgcaattcaattcaacaagcattcatttagagtcatgtgcaaggcactgtgctaagagatgggaaaatactacataaatacaaaattctgctgaaaactaacttattggcagagttccaaataatgaaacggatacatttaacaaatcagagtattgctacacctgagatttttcacttcaaccacctggaaggagaaaacctaataacagcatgaattttatcatactgttaccattcatagcagcttaataagtatttcacttcaacgtggtcagccaagttttataatttggcaatagtgtaaagaagcgtgaagagaaaaggaagaggaggaagagcttcagtctttgtatctcccagggttataatataaaactgaacatcaaataagccaccccacccttatacttatgatttattatttcttaaagagcgtataatacattgtgggagaagggtagaagattcatttttcctgctcactcaactacacactcaaaagtgaaagccctcttccttgaaaagtgactgtcttagaaaagtttaacaatacatttcttaaaccaggaaaaaattacaccatctattcttttaacagcaggtagtttagagttcttaaaataactttataaatatataatatagtaacatagataaccaaagtggaaaaatttcaagccagggtaccagtgtataaaatgaaacttttcaagccatcttaacaacagttaagtgagcaaaccaccaactctgaactctcaagctgtgttttaaaatacaaagcagcccgcagcaagttctctcttgtccaggcattctgtatgtaaggccaggaggcttctgcttctttcctgggttttgcttgctaggcacagctggaagggcagagggccacagctgagctgaactcgctgtcaaatttgaacttcctagaaaaatcactgcagaggaaaccacatcaacctactgaagatttcagatcttcagaaatgtcacggaaagtccgctgaggctgagcaggccatggggtctggtttggcgtgggaactgaattcgtgggactcactagcatggcactatagatattggaagcaaccacaagtatgcagagaagaataggaccgatgattgctccttccaggcctaggtagtatgctccaccggccactgccaagcctgtcaggtaaggatggccacctcctgatatgtcagagtagattgcagatc

SEQ ID NO: 435282 - DNA, 346 bp, Homo Sapiens
  misc_feature (278)..(278): n is a, c, g, or t
  misc_feature (292)..(292): n is a, c, g, or t
aatgacgggtatagctcaggatgtcttgaattcaaaccgcttatgtgtgctctatgcacttcactctgctatcctgaggcaggtgagatgtctttaatatctacttgcctgaatgttaatgtctgcccacagaaataagtcggagctctggagtagagaacacccgatgattcagaatcgttccgaagtgctatatttcttcgactgctcagactgtacccctcaaaaccagctgtccactcatgaggcaccaatgtggaatgacctatctggggganactccaaggactcnactcctgtcggccatctcctcgggcgcagactctgaactggtaatcaacgttgg

SEQ ID NO: 435283 - DNA, 919 bp, Homo Sapiens
gtgagagccactgcacctgcccagagcacgaactttctaacttaggcttttaattagtatgcttccttgcagaataatcacagaagaccctttagacaaagaacttgcactatgaggtttaattggaaacattaaaatggttaactcataatgaattataaaactttgatagttacattgtactatcatttatgaggcatttatttttcattatttacacctgaaagaaacttcatacttgtgtgttctgttccccatctcagagcaagattatgaagagaaggtctaaactacttatataaatcaaaacccaactgggctagaaatgaagtataaagagaactaaatctatacacagctgtgccataagagcattaggtggttttagctcttatctggggtatgaaagcaatttagctcatctcacagaaacaaaagcaggtgctgaatcatgaaaacctcaattatttttagcatgcctcttaatttttctttcccctggtttcttgtcgtctgtgcttgattcttgaacaggtaaccacttgagaggatgccggcgatagatgggccatggaggaagtgtcagcaaacatgaaaaagcaaatccggccataactatatagacagtccacccgaactgttcagccacgtacccgtagataaatccaactattgcagaaaaaagaataattccctgaaacatctgttcagctagcttctggcccttgtaatccatctgcgtgggcagcgagctcagatgctccagcatggctggctgaggaggcgggcagctgagcgcgggtggcaggctgcgaggcgagggcgaccgagacttaaggaccgtgagggctaaggtctggcactgcgcgtcagtagccgggccttctaagcccgggagagcgatggcggcggccccccc

SEQ ID NO: 435284 - DNA, 840 bp, Homo Sapiens
gggttttaaatggggaaaaccattaaaaaatgggttaacttccataatggaatttattaaaacctttgaatagttaccattggtactatccatttatggaggccatttatttttcattaatttccacctggaaggaaacttccataccttgggtgttcggtcccccatctcagagcaagattatgaggagaaagtctaaacttacttatataaatcaaaacccaactgggctagaaatgaagtataaagagaactaaatctatacacagctgtgccataagagcattaggtggttttagctcttatctggggtatgaaagcaatttagctcatcttcacaggaaacaaaagcaggtgctgaatcatgaaaacctcaattatttttagcatgcctcttaatttttctttcccctggtttcttgtcgtctgtgcttgattcttgaacaggtaaccacttgagaggatgccggcgatagatgggccatggaggaagtgtcagcaaacatgaaaaagcaaatccggccataactatatagacagtccacccgaactgttcagccacgtacccgtagataaatccaactattgcagaaaaaagaataattccctgaaacatctgttcagctagcttctggcccttgtaatccatctgcgtgggcagcgagctcagatgctccagcatggctggctgaggaggcgggcagctgagcgcgggtggcaggctgcgaggcgagggcgaccgagacttaaggaccgtgaggggtaaggtctggcactgcgcgtcagtagccgggccttctaagcccgggagagcgatggcggcggcccccagggcccgag

SEQ ID NO: 435285 - DNA, 948 bp, Homo Sapiens
  misc_feature (36)..(36): n is a, c, g, or t
  misc_feature (50)..(86): n is a, c, g, or t
  misc_feature (726)..(754): n is a, c, g, or t
  misc_feature (756)..(884): n is a, c, g, or t
ggatgtatagactcatatagggcgactcgggatcancgcggtggcggcgnnnnnnnnnnnnnnnnnnnnnnnnnnnnnnnnnnnnnatcaggccaaatcggccgagctcgaattcgtcgagagcgggccatcgctctcccgggcttagaaggcccggctactgacgcgcagtgccagaccttagccctcacggtccttaagtctcggtcgccctcgcctcgcagcctgccacccgcgctcagctgcccgcctcctcagccagccatgctggagcatctgagctcgctgcccacgcagatggattacaagggccagaagctagctgaacagatgtttcagggaattattcttttttctgcaatagttggatttatctacgggtacgtggctgaacagttcgggtggactgtctatatagttatggccggatttgctttttcatgtttggtaagaaactttgtgggtattagtggcagcttgggttttgtgagtcgggttggtttggttagacctactcagtagtgagacccaaagccaacgtttccctcatccttccaaacagcgtttccctttgctatcattggaaaagtagaatgccaaaatagtgtcagatggtgcgaactatataaaaggacacagcttatttcctttggcggctactctggctaataatcttaaggtcaaagccagcaggagttttcatggtgctcacgttgtcccttcacnnnnnnnnnnnnnnnnnnnnnnnnnnnnngnnnnnnnnnnnnnnnnnnnnnnnnnnnnnnnnnnnnnnnnnnnnnnnnnnnnnnnnnnnnnnnnnnnnnnnnnnnnnnnnnnnnnnnnnnnnnnnnnnnnnnnnnnnnnnnnnnnnnnnnnnnnnnnnnccaccagcaaccagctaattttggattttaggtaagacacgggcttcactgtgtggccaggctg

SEQ ID NO: 435286 - DNA, 652 bp, Homo Sapiens
  misc_feature (33)..(33): n is a, c, g, or t
  misc_feature (87)..(87): n is a, c, g, or t
  misc_feature (92)..(92): n is a, c, g, or t
  misc_feature (158)..(158): n is a, c, g, or t
aaccctaatacaacaacttgtgcccataaaganccaattaggtgggtttttagcccctttaatcctggggttatgaaaaccaatttnagctncttcctcaacagaaaacaaaaaagcaggtggctgaaatccatggaaaacctccaaatttatttttnagcatgccctctttaatttttcctttccccctggtttcttgtcgtctgtgcttgattcttggaacaggtaaccacttgagaggatgccggcgatagatgggccatggaggaagtgtcagcaaacatgaaaaaggaaatccggccataactatatagacagtccacccgaactgttcagcccacgtacccgtagataaatccaactattgcagaaaaaagaataattccctgaaacatctgttcagctagcttctggcccttgtaatccatctgcgtgggcagcgagctcagatgcttcagcatggctggctgaggaggcgggcagctgagcgcgggtggcaggctgcgaggcgagggcgaccgagacttaaggaccgtgaggggtaaggtctggcactgcgcgtcagtatgcgggccttctaagcccgggagagcgatgcggcggccccggaagcggaatctccgagggccggtacagcccgtgtcccgcacgc

SEQ ID NO: 435287 - DNA, 706 bp, Homo Sapiens
  misc_feature (504)..(581): n is a, c, g, or t
tgagaatcatagaagcttttatttgtaagaatacctgcatgggaaagattctggagaaagagagatggaccaagcacataagggcagaggtgcaatcaagtagagccgagaaaaacactcagatatgggcggtggggttgcatggaggttgaagagtcattaacgtggctgaagctctcggaggactttcaaggcccaacagtggcagcccgggcatgctgcctcaccaatccatggtgcttcttcctgctccagtctgaggatcacatctggtttggtgccttcataacccactgagacgaggttgctataggtttccagcatcacatcccggtacagggccctctgagcaggactcagccggtgccactcctcttgggtgaagcccacaaccacatctttgaatgacacaggtatctggtattcgatcattttctggctgttcttgaaaaagatctgacacctatactcttcaaaaatgtcgacttcatggaagatgaacannnnnnnnnnnnnnnnnnnnnnnnnnnnnnnnnnnnnnnnnnnnnnnnnnnnnnnnnnnnnnnnnnnnnnnnnnnnnnctcccttcactctgtcttccgggatctggggccaaccatcctcccttcatttagccagggagagtcccgggaaagagtaacgtcttcaggttgggtctggctcagcttcgggttagggatgcggt

SEQ ID NO: 435288 - DNA, 392 bp, Homo Sapiens
ctcactcgaagaaactatatagggttgtttttcctttagcttgtgctcaagtcctcttgctgtgttttcagaagcactcacatgttctttcttttcctgagtgaaaagcaaaggtcccacggtgtgtgctgtggtgcaccgcctggctttgggggtcccggaggcaggctgcctagactcacagcctcgggaccgttgccacggcctgttttctcgttcaggcctgcctctgacagcactcaccatgaggacattccatccttcaccccctcctctggcacaggccaccactgcggtgctgtgccttcagatgggaggtgggcgcggtggccgcctccttccctccaggacctgcccgtgtgaagaccccccggagtgctgagcttcagggc

SEQ ID NO: 435289 - DNA, 623 bp, Homo Sapiens
  misc_feature (582)..(582): n is a, c, g, or t
ttttttttctgtagaacgcgttttatttagaacgccatccttgggctagattggcggaagttggaggcgtcatgcagcgcctcctgcctgggagccaggcgatccgccaggttctgggaggacctaaggtcaacagccacgcctgctctctgggctcacagtcagcagccgctaccaggagagcaagtcctcagaaggcccgagaccagggcccgggagcgcccacaaggacgggaggtcacccagtgacaaacagggaagggcagcaggtgcgcccaggaacccagaggctcccagagcagaagtgggatgcaggggtgggggcgggtcatgctgaggttcaacagggacctgcttcctggttcaacagggagctggccagagagagggatctgctgaggcttctgtttaaaaaccctggcctgggtgtgggtgcaagtggatttgcaggtgcagtgaggcagcggccggagcaggctgttgcacgaagacccaggaaagtcagggtggtttgaaccaggcagaagagggggaaatggagcctggggcagacgtaaaggtgctggggtgaggataagggtnacaggagggaggagtctggggtgaccaaggcctgcagctca

SEQ ID NO: 435290 - DNA, 203 bp, Homo Sapiens
aacgaattgttcttagtatttccttttgaacattttcctctctcaaggaaaatgtttgagagggtggctagaggggaataaaacttaccagcaggcccaagtgtgcccgtgacaggaactcttctccgccacttgagttgaacccctggggcagctgctggctccggtggcccgccccaacctgtgcgtctccccaggtgcgt

SEQ ID NO: 435291 - DNA, 527 bp, Homo Sapiens
  misc_feature (367)..(463): n is a, c, g, or t
accactgttttttaaagtatgctatttcaaggagggaagataatttgttatgagggtgaacatgataaagatacatcctcctttttttatttacttattttaaaagtagattgattagttgggtttgtaagtggtcggtctggaacacctttgcaacatggattatcataagtgatagatgtttctggaagattatgagctatctctttctttctgcacctctccatatttgtctctttgacagtggtatccctggggaagaaggcaacgttctccaaagttgaattataagtgaacataagaaaacactaatgtggctgtgcgtggtggctcacgcctgcaaccactgagacgggcagatcacttnnnnnnnnnnnnnnnnnnnnnnnnnnnnnnnnnnnnnnnnnnnnnnnnnnnnnnnnnnnnnnnnnnnnnnnnnnnnnnnnnnnnnnnnnnnnnnnnnccaggtgtggtggcgcatgtaatcccagctactcgggaggctgcagcacgagaattgcttgaac

SEQ ID NO: 435292 - DNA, 1080 bp, Homo Sapiens
  misc_feature (3)..(3): n is a, c, g, or t
  misc_feature (13)..(13): n is a, c, g, or t
  misc_feature (19)..(19): n is a, c, g, or t
  misc_feature (23)..(23): n is a, c, g, or t
  misc_feature (26)..(26): n is a, c, g, or t
  misc_feature (30)..(32): n is a, c, g, or t
  misc_feature (54)..(54): n is a, c, g, or t
  misc_feature (81)..(81): n is a, c, g, or t
  misc_feature (90)..(90): n is a, c, g, or t
  misc_feature (103)..(103): n is a, c, g, or t
  misc_feature (105)..(106): n is a, c, g, or t
  misc_feature (130)..(130): n is a, c, g, or t
  misc_feature (138)..(138): n is a, c, g, or t
  misc_feature (150)..(150): n is a, c, g, or t
  misc_feature (152)..(154): n is a, c, g, or t
  misc_feature (169)..(169): n is a, c, g, or t
  misc_feature (307)..(307): n is a, c, g, or t
tcngctcactgcntgattnaaanttntggnnntctctgggtacagggggaggtngcagatccgcctgtaccacccgcagancttttgggnattttaccacctntnntgctctgcctttgggggcaccacntggacctnctggaccacatntnnntggcccccaccaggntttgaacaatgagcaggttatttcctgcctggatgatgttgtccgcggtggtctcgatcagcaccgtctccacctgctcagccacagccacagggggctgggaggcaggaaggctcttcttccttgctttcttgttantcttagacagtggggttggggggttttcagtgaggagctgagtaggggccccggtgttactggcgttcacgagtttgttgacgggcagagtgagcgtcacattgccgcccccacctgtcaacttcaccacattggccccgctctgcacgggggtggtggtcgtactcgacttctggatgggggctggcttgatggggacaggcttgtgactggacggtgagggggtgatgatggcttggttggtgccagggatgatctggatctggttggtgagattgggctgtacttggatggtttgggaattgcttgcctgaatctgagggaccgcctggtactggatattggcatttgatcgggtccctttgttgatcatggtgggattctggatagcgaacaccagctgccctccaggataggaggcgctcagttgtgacccctgaatctgaagtatatttcctttggaggacaagattccaaagctattcttgccggggctgagagggagaggggcaggtttgatagggacaagtttccgcggtgtgggctgtgggggagcaggaggtgtcacagcagcttcaactgctggagggccaattttgctacatgttgcagcaagcagggctaagggagatggctgggagtcctgggtggtggaggcggcaggctgcaggtagtcactgggactcacagcagcagtggcagccatgctggtctgtggatcgctcattacgacatcttcctccctggcctccgccgcctccgccatcccggga

SEQ ID NO: 435293 - DNA, 451 bp, Homo Sapiens
tgcaggaaccgtgggcctgggaaaacttggaaacggcctctctcaactggtttctgtttccgtggaactggaactgcctgcacttgccttcagaaggaggcacagtccacccagatccaccttttcagcaagacccccagtggctgcccagcctgggagcacctttttgcttttcacaccaaaccaaaactggcgagagcccctcctagccaccagtgatccccaagcatccagtacagaaccaggcatcgagctagctccctgcacggccgcaccctcccagagaactccttgaggagaacaagtgcccttggggacagccggcaggcgcccctgtacgtctgctcatgcaccaggcagcacagccgcagttcctcagttgttgttttgacatatttcagtttccccctcacgtttttagagcagaaccacactgtcgggctagtcgggg

SEQ ID NO: 435294 - DNA, 501 bp, Homo Sapiens
  misc_feature (12)..(12): n is a, c, g, or t
  misc_feature (55)..(55): n is a, c, g, or t
  misc_feature (207)..(268): n is a, c, g, or t
  misc_feature (423)..(423): n is a, c, g, or t
  misc_feature (472)..(472): n is a, c, g, or t
agatgggaaatncttgattgacattttctttagcatttaaaatttttggcatttncagcttcatgacaaacagttttgtgccataccttagaaaatgtggtgctgagttaaataaaggctgtttgagcactggagcagaaaaatgcattatttgcaaactggtggataattttgtgccttctcttctggccaccaagccagtgtagnnnnnnnnnnnnnnnnnnnnnnnnnnnnnnnnnnnnnnnnnnnnnnnnnnnnnnnnnnnnnnttgaattaaattaagttttgtaattttaaactttaaaaacttctactgaaaatatttccgccaaatgccatccaatattttagactgtacctcgtttgcaaaactgctttgagagggaagagtggacaactcccatcagccttattctcttgagnactatattttggttcctagtaacagcctttccaaagctctactcttggnttttattactcataaatgttttaaattag

SEQ ID NO: 435295 - DNA, 495 bp, Homo Sapiens
  misc_feature (56)..(83): n is a, c, g, or t
  misc_feature (482)..(482): n is a, c, g, or t
atattttcagtagaagtttttaaagtttaaaattacaaaacttaatttaattcaannnnnnnnnnnnnnnnnnnnnnnnnnnnaaatataagaatttttatgacatttttgctgtttctacactggcttggtggccagaagagaaggcacaaaattatccaccagtttgcaaataatgcatttttctgctccagtgctcaaacagcctttatttaactcagcaccacattttctaaggtatgggcacaaaactgtttgtcatgaagctgtaaaatgccaaaaattttaaatgctgaaagaaaatgtcaatcaaggcattttcccatctgctgctacttctgcaagtgctaattttatttttcccaattcctgaaatttgaggtttcttagcctcatatggaagtaagtttgaaactcgctaaatgtcacaaggaaaggtgtaaccaaatgaaggaatagaaggtgtattggtctccaaaggnccccaaccaaaag

SEQ ID NO: 435296 - DNA, 708 bp, Homo Sapiens
gcagggcactggcagttgaggttgtctgtttattggtgaggaaactcctcgagagttaatacagtgtaatcttttcccagaggtgtgtagagggaagggggcctagaggcatcccagagatagcttatagcaacagtgctttgaccaagagctgctgggcacatttcctgcagaaaaggtggcggtccccatcactcctcctctcccatagccatcccagaggggtgagtagccatcaggccttcggtgggagggagtcagggaaagaacagacaacagagcagacagaccagtgatgaccatgggcgggagcgagcctcttccctggaccggggtggcagaggaaagcctaagtgaggggtcagactataaacgttaaggaaccgagatgagcacctgcttcaagtgcacccttcctacctgacaaccagggaccagaactgcagcctggggacagcactgggagcagctaacagagcactcacctgccccagcatggccgtcgcagccctggtcctggcaagggaggctccctgtggagtaaggggagacgagggaagccgctcctggaactgtgagggagagagggatggatttgcccgtcaggcccattcacgtctgacagtacaggccactcagtcataaactcaaacttaacttgaagacttcagaaacagagttcctgagtgagggaaactgagatccaac

SEQ ID NO: 435297 - DNA, 1284 bp, Homo Sapiens
  misc_feature (39)..(39): n is a, c, g, or t
  misc_feature (51)..(51): n is a, c, g, or t
  misc_feature (66)..(66): n is a, c, g, or t
caaggaagtggaaaatttcaatttttacgggtccagccngtcctgcgccgnagcaagggccggatncaagggtgtatgctctgtttgtggccacgattacctgacattggggggcaggccagctcagatctctgcactcctacctccttcctgtcacgataaccaccccttaggtgccagcccccaactttccccagttcctacaccacacctccccttgtccatcccaaaccccaaaccttgacattgacattctgatcaaatccatccatctgattcagcagctccagcaggatcctctgaacctccctgtcggctgagagtgcacagcacagtcagtcccaggcatcccatgcgacaagcctgtccaagaccccgggccttgtttcagcatcacttaccccctgtctgagcatcgaatctcttggtggcgatggcatcaatctcgtctatgaagatgatggcaggtgcattctccttggccaggcggaacacatcccggaccatgcggggccctcacccagatacttctgtacaaactccgagcccacgacccggatgaatgcagctgttgtgtgatgtgccaccgcctttgccaacatggtcttcccacagccaggtgggccatacatgaggacgcctcgggggggatcgatgccgatctgcttgtagagctcgaaatgcgtgagcgggagctccacggcctcccgcacctcctgcttctggatgtccatgcctccgatgtccgcgtacatcacatctggcttctggtctgaggtgagcatcatgatgctgctgtcggcttcggggggcagcacgtccaccagtgcattgctgtgcttgtggagggccactgaggcgttgggcttgagcagctcccgatcgatggtgctcaggatgcgcacataatagttggagcctgtggtagagcccacgatggctgtattctgatccacagcctccagaaattgtccgatgaccagcgggatgctttggattcgcttcacctcctcctgggcatggagaaattcctttttcaggttcttttgctcatctttgatgtattcctcctgcacctccaggaactccagctcttgctgcagcttcttgtagcggctgtacaggtcctccaggtcctcaggctcagggcccaggaaggacaggccggtctggggccgggacacggacagtgctgggatctcatcctgagccttctccaccaagatgcctatctcctccatagtccgctctcgacgaattcgagctcggccgatttggcctgat

SEQ ID NO: 435298 - DNA, 567 bp, Homo Sapiens
  misc_feature (20)..(20): n is a, c, g, or t
  misc_feature (407)..(407): n is a, c, g, or t
  misc_feature (409)..(409): n is a, c, g, or t
  misc_feature (425)..(425): n is a, c, g, or t
gtcccaggccacacagaggncgggttggtcactatggaggagataggcatcttggtggagaaggctcaggatgagatcccagcactgtccgtgtcccggccccagaccggcctgtccttcctgggccctgagcctgaggacctggaggacctgtacagccgctacaagaagctgcagcaagagctggagttcctggaggtgcaggaggaatacatcaaagatgagcaaaagaacctgaaaatggaatttctccatgcccaggaggaggtgaagcgactccaaagcatcccgctggtcatcggacaatttctggaggctgtggatcagaatacagacatcggggtctctaccacaggctccaactattatgtgcgcatcctgagcaccatcgatcgggaggtgttcangnccaacgcctcagtggnccccccacaagcacaggaatgcaattggtgggcgttgctgcccccgaaggcccgacaggaggatcatgattctcacctcaagaccaggaaggcagatttgattttccgcggtcatcgggggattgtcaatccagtagcagga

SEQ ID NO: 435299 - DNA, 1764 bp, Homo Sapiens
atggattcgatcttatctatttattgaagaaaccaatcctgggtaaagaaaaaagggaatgaggttttgggacagaggtgctgggggtgcgagagaagccccagcccctgagtggtgtggtggagggaagggaagggtcacttgtaaaactcatgctcctgctcgtccttcttgatgacagtcttgtatgctttctcgaagtccttggccaggacaatgtagcggttttcacggacagccaacattccactctcctgacagatggagttaatatcagctcctgaaatcttatctggccgggccacatagtcttccaagtcaacctcctcagagaggttcatcttgctagtgatagtggagaaaatcaatctcttctggcggcggtcaggaagtggaaattcaattttacggtccagccgtcctggccgtagcagggccggatccagggtgtctgctctgtttgtggccatgattaccttgacattgacattctgatcaaatccatccatctgattcagcagttccagcaggatcctctgaacctcttgtggcggctgtcaggaagtggaaattcaattttacggtccagccgtcctggccgtagcagggccggatccagggtgtctgctctgtttgtggccatgattaccttgacattgacattctgatcaaatccatccatctgattcagcagctccagcaggatcctctgaacctccctgtcggcccctgtctgagcatcgaatctcttggtggcgatggcatcaatctcgtctatgaagatgatggcaggtgcattctccttggccaggcggaacacatcccggaccatgcgggggccctcacccagatacttctgtacaaactccgagcccacgacccggatgaatgcagctgttgtgtgatgtgccaccgcctttgccaacatggtcttcccacagccaggtgggccatacatgaggacgcctcgggggggatcgatgccgatctgcttgtagagctcgaaatgcgtgagcgggagctccacggcctcccgcacctcctgcttctggatgtccatgcctccgatgtccgcgtacatcacatctggcttctggtctgaggtgagcatcatgatgctgctgtcggcttcggggggcagcacgtccaccagtgcattgctgtgcttgtggagggccactgaggcgttgggcttgagcagctcccgatcgatggtgctcaggatgcgcacataatagttggagcctgtggtagagcccacgatggctgtattctgatccacagcctccagaaattgtccgatgaccagcgggatgctttggattcgcttcacctcctcctgggcatggagaaattcctttttcaggttcttttgctcatctttgatgtattcctcctgcacctccaggaactccagctcttgctgcagcttcttgtagcggctgtacaggtcctccaggtcctcaggctcagggcccaggaaggacaggccggtctggggccgggacacggacagtgctgggatctcatcctgagccttctccaccaagatgcctatctcctccatagtgaccaagccggcctctgtgtggcctgggatgatctgtcaccgcttccgctgacgacaacggaagtcctggctgaggaggcttctgggaagtgtagtttaagttacggctgagaggtgctggaagggcaggataggacgaagggctggtctgggctccgccctcaacataagctcatgcgctgtccgtacccgca

SEQ ID NO: 435300 - DNA, 1033 bp, Homo Sapiens
  misc_feature (897)..(897): n is a, c, g, or t
  misc_feature (914)..(914): n is a, c, g, or t
gggtggcgaattcggcacgaggctatggaggagataggcatcttggtggagaaggctcaggatgagatcccagcactgtccgtgtcccggccccagaccggcctgtccttcctgggccctgagcctgaggacctggaggacctgtacagccgctacaagctgcagcaagagctggagttcctggaggtgcaggaggaatacatcaaagatgagcaaaagaacctgaaaaaggaatttctccatgcccaggaggaggtgaagcgaatccaaagcatcccgctggtcatcggacaatttctggaggctgtggatcagaatacagccatcgtgggctctaccacaggctccaactattatgtgcgcatcctgagcaccatcgatcgggagctgctcaagcccaacgcctcagtggccctccacaagcacagcaatgcactggtggacgtgctgccccccgaagccgacagcagcatcatgatgctcacctcagaccagaagccagatgtgatgtacgcggacatcggaggcatggacatccagaagcaggaggtgcgggaggctgtggagctcccgctcacgcatttcgggctctacaagcagatcggcatcgatcccccccgaggcgtcctcatgtatggcccacctggctgtgggaagaccatgttggcaaaggcggtggcacatcacacaacagctgcattcatccgggtcgtgggctcggagtttgtacagaagtatctgggtgagggcccccgccatggtccgggatgtgttccggcctggcccagggagaatgcaccctgccatcatctttcatagacggagatttgatgcccatccgccaccaagaaaattccgatgcttcagacagggggcccgacaaggggaaggttcagnaggaatccctgcctggnaacctgcctgaaatcaccatggaatgggaatttggatccagaaatggccaattggcccaaggttaaatccatgggcccccaaaaccggaacccgaccccccccgggaaatcccgggccc

SEQ ID NO: 435301 - DNA, 1169 bp, Homo Sapiens
acaaccccagaccttttcttttggtagtcaacaattggtcacattgcacatttcaaggttacagaggcccaccatacacatgcggggcaggaggagataaatcttgcttggggctaaacaataaagctacagcgagtgttccagaagttgaccacatctggaagcaagaagacagactctggaagaagcaccctagagactccaggaacccccttcactcctgggctttcgggactctacagcgtggggcctctttctcagacatcgaaaggcctccttttctggaccacagtggagcgatgtgcaggtcatcggctaagctgggcgggtcggggagggcagggggagtacagttccttcggatcccagcaaaggtagactatcaatggccaagggttcagaggcaggaaaaaaaggccgtttctggggggttggctggggacactccccttcccttctctctccgattaaatataaaagccgatgatgatgaagattgaaaagatgaggaaaatggcagccgtgtctcgggtatcctcccagcggaggcctttcatggaccgatactcctgccgtttgcgaagggcctcccgccgggccctcaggcgccgttcccgctccagttgttccccgtagtgggcctggtagaaggcgtcaaagttgaacatcgtgcggttggcgccgggggaggcccgagaaccgtcgtgggtccgagaggtgggcggcggggtacgcggcgagccggggtcgggtgcgggcgtcctggagggccggacgccaggtccgcgcaggtcctcgtcgctgagtaggccgcgatcatacttgcgacggagggtggcactgcccagcaccacgtaggcctgggagatgcgcgtgaagcgctcggcggcctccgcgctcccggagttgcggtccgggtggtagagaaagcactgacggtagtaagccgccttgatttgggcctgcgtggctgtggaggggacgccgagcagatcatacagcgccgtgcgcgaatacgagcagtcgccctgggaataagtcctcgctcctaggcccaggctgggtgcagaattttgtggaaagccacgggcctgcagcaacctccaaggtaacagccgctgccaccatcgccagcgcatggctgccatgtgaattgatatggaaggaat

SEQ ID NO: 435302 - DNA, 828 bp, Homo Sapiens
ctttggtgttttctcttaggtagattagtgcatttaaagcctgaagttaatttgacctaaaatttttataagtctttgcagaaagttcacttgtttcctgaaatcatctccttgataattttttatgtaacagttgttcatattgtaggaatgatatatatgtcatcctgttacacgtgtcaggcacttcaaaaagactccaagagaacatgcctgagtaaagataactcccaattaaaaatgattcagtccctcacttgcaatattcaggataaatgtgtggaaacattaggctaccagataaataaaaggtagttatttcctagggtgactcagcaagatatttctcgaggatataacatttttttatattgcacaatttcttagaatccagatggcaagctttcccactgcttttgttgaatggaaaataaaaactgagtaatattttgctcatcaaggtttaggtcacttccttggagctatttaaataagacatcttagatggtgagaaaggagtaaaaagaagatagctgggagtggatacagcagacatatagcccttaaaacctttccctctatttcccttgctttggggtcgggtgagacaactacagcaacagttgggacaatctccacttagatcctgaaagaccaaagaggtgacttgagcaggatataaaccttgaactgttcctgtgggtctgcttcctttggctaaggcaacctcatatttggagctttagtcgtaattcttccgattctgaactgtgaaacgtttcagtttttatttatttttatttgggattcctggggggattccatggg

SEQ ID NO: 435303 - DNA, 2290 bp, Homo Sapiens
  misc_feature (23)..(23): n is a, c, g, or t
  misc_feature (55)..(55): n is a, c, g, or t
ttcatgcactgaagatgtcattnatttaagtttaaaaagcaaaatggaggcagtnccttccagtgactaaaatggtttaacttaaagtttaattaacaaaaaaagccacattcccattttccaattcacaaagacaggtttttctttaaaaatatgcctgaaacatattacagataatatcccaaatgattactatgtaaacattgtcattacaatgaaattaatatgatatcagctccatttcacattgtaaacagcaggactgaatgcagaagcctatttagactgtccagtgtttgtgcaggtttttaaatgaaccatacaaaatctacattgttctaccttcttgtcaagaggatccatctgtttccaattattggcctttaactgatgaagttcatcaaatttcatactaatattttctatggacaactgcagcatgtcccaaaaccccgccaaatcctgggaggtgggtcttggatgagcattaggattcaggttttcttcacacagttctctgaactggtagaatttctgggccatgagaagttgggcactgcccactgcggttcggatttttcctagaatgtcttcgggcaggttgttttcccgttcttcccgctccatctgttgacaccacccctccatgcggtctcgctctgcctggagaagcttcaggaaccagtggccatcccggtggcacactgacctttgcacggcctccagagggtcttcagtgatagagtcaatccaggggtccggaggaggcagaatagaggggtcaaaatccgtgtcaaagtcatcatcggcggcacaggcatggtaatggtttcctgagccctgaatgctgactgtggaggtgctggcatcgcgggagaactgtctggccatggggccaggacacgaattgtcctctatagattccagagaattttccagattatcatggaagtccaggtcggcctgtactgctgtcgtcacactgttggatcgagtgaacctgcggaagcacttctcttcttctacttgcactcccacggactggaacttactgggtgctttattctcccctgttttgtcaggttcttcagcatcatccacctgtatcccgatagacaggcatcgatttttcttaaagtggtccttcttcctgtcctccgtggtgacggtggctatggtagtcgtggtggtgacggtggcagtgttattgcccatgtgttgactggcagggccatggatctgggcgtttgcagcttcgatggcggctgtcagagccttcatactgtccaggctctcggtggagttgctgagtccagactggctgataatatctcctcgctggccctgtccgtccatgtaggcatcctgggctgactctgtgctactctgggctgtgatagaaatgaaaggtttcgtggtagttctgggtgggactggaggtggtgtcttcttatatgttgtaatgcaagatgacacttcaactgcagaactcagttttatgacacccgtgctgctctggatggtcctaacggtggtggtggtgcgcggcggcgaggacgacctcagggacacgcactcgtcgtcctgggagcagcctttctcaatggcccgcacatagctgtggctccgcatgcggaagcagccgggcatgggcaggtccagcgcttccacggcctgcgactccagctcgctgaacacggactcgcacacggactcgaactgcccgttcacttccatctcgctcacttggctgatggtgctcatggctcgcatgtagctctcattcctggagcggaactttggtgatgtgagcaagcctgcagggtccaggctgtccaggctccggttgatggagacttcactcactgccctcaggtaactatgactccggatctggagtttgggtgagtgttccattggagattttgagtgtggtgaagttctgtaagggatggctgagtagccttgagatagctttctctccgcgcagcaacttttggagaaggcttaggactcgtgtctgagtctccactgtcttcatcccccatggccttgatataactgccactccgcattcttcggcatggaatttcatcatctttacctcgtggggtgtaccctgtccattcatcttgtggaacctggtcagtccttccatttcttgaaacttgcacacaaactgaagaaacccactcagccttaaaaaggtcgatcattttgctttcctaaaatttcatctctgggagtgctttccttctcggtctgtcttgctctctctctcgctccctct

SEQ ID NO: 435304 - DNA, 826 bp, Homo Sapiens
  misc_feature (49)..(61): n is a, c, g, or t
  misc_feature (583)..(656): n is a, c, g, or t
ctgttttcctctccctcctcctccactctgctcaggtccctctcactcnnnnnnnnnnnnnaaccgctacgccacagtccccgggagaattcagatcccaaccggggcttccggattctgtagtggctttggcctgtgtctggtctgaggacgcccggaaggcattgcactgaggctaagggaaaggtctctggagggagcctcaggaagagcaaatggaggccagagactggcaggagcgcgccagcgcaggatttaatcccgacgagcggattcagagccgtgcttatataaagcttcaggaagcgccgttccgacgatgaggtcgacacgcgagaggcgacctcaagagcggcggcgccagggatctgtgcgccaagggaggacgggagggagcaggttcgccataattcctggctccaggctctgttttgttggaccgagccactgtattttagctcacacaggagaattctggccctgggaaaattggtctcagcatgctgccaagctttctcatggacgtcagcgaatcccaacacactgtcggtcaaagccgtgctggaagaaacaaaacagttcnnnnnnnnnnnnnnnnnnnnnnnnnnnnnnnnnnnnnnnnnnnnnnnnnnnnnnnnnnnnnnnnnnnnnnnnnntcatagaaagtggcgtagtatttgcacataactatgcccatccctcccgtgaactttaaaaaagtctctaaaattacttccgaaaaccctaatcccaggggaaatgcttatggaaagaaaattgggaaaaccggggttttaattttttaccaaccctttggggggggacc

SEQ ID NO: 435305 - DNA, 787 bp, Homo Sapiens
  misc_feature (217)..(217): n is a, c, g, or t
  misc_feature (220)..(220): n is a, c, g, or t
ggcgaaattcagccgttgtcagctgtgagcgtctgcgagcgctgggtggggtgtgtttgagtatgtaagtgtctatttcctgtgctctaacagtgactatttcagttctaacccttcaattgctaattggatgagggaatggcctcttagattgtccttgttttgacttatctgctaaggcgagagaatgtctgggtttgccacacagtcccgcagnccnctggcttctttgccagggatttttatatcaagtacttagtttggccaaatttagagtatagtttaaaggggaaaaaaagtttgtattttgatgagtctaattactattattaggaatgctttttaaatgaatatgctgtgattggaatctcttcttgggggccggggagagtgctgagagatgcagctgtgtctctgctctctgcagtcttgggcaggcagcaccgctgtctcctgatacagagggttgaatgcactgcttcacattgatgccacattttcaaatctaaacatgattaacatgttttttaagtatttatcaaataattcacatttttgcaggtttaagtgctgttttttaagatattaaacatgttccttgtttcttttttctttttaaccactggagactatgtgaaaatcttgtgttatatggaatttttctaaaacaatttccttttacttttcatgttgcatattttccagtggggataaattggaggttcttattactaataatcctgaaactaaaatttgcttttcctgcatagacatcttttgttagtcc

SEQ ID NO: 435306 - DNA, 1452 bp, Homo Sapiens
cccccttgtaagaagctattgggtggtctgaagcactctccagggggttgctcccgggaaggccggtagaagtcatcctctgagatccagctcttgtttttcggactggtgggtgaggaaactaccagcttcagaccagctccgtcatgagcctgggccttctgcaggccattcccttggcccacttctctggctgtctcgctgacagtactagaaggctgctggcctgaggtgctctctacaggctgctgtaagtccagggggctgggcgcctggggacgcggctcctgcacgtggacaccatcttgagttccagaggctgcctgggcaggaaggggctctgcaggtgcctcacagtgcaggtatgtgctgttgttgaggccatggagggagagttaggcctgtggtgtggggatctctgtttcttggctcagtccgttggttggcacagagtttacctgggctttgctgaattcccaacaatacctcttgcagagaccggtctgagtcctcagcatttgctgtgcccaggtctgagtcacaggacatgggctcctcgcaatggtctggactcttggagccattctcttggagtaagcagctatcagagtttaggctgcaggacagctgggatgaactggccgtgtccaggctgagggaggaggcagtcagcttctggttcctccgtatcttatggcccgagtgatggacttcgatgtcttcagagcctgaagaatgggaaatggaatccagagattccttccgctgtagttctgcaccagaggtagagagagggtccagctcagaaagggggcaaagcccagacagggccaatggggtgagcgtccactcatttaagatggcagacttgtaggagagttcgaaggacaaggacgtgaggccctgcaggaagctaaggaggaactcgccctcctcagcatcccggagcagggcggtgggctggtagtactcatgcaagcgggcctgctcctgcagcagcagcttcaggtagcactccatcaggccatcgttcagggccagccgcagccatgcccggcagcggcccacatccgtgttgacaaacgtcaggtgctccaactctgagatgatgtgtttgtgggtgacagctttcaggaggggccagaagacaggctggggcagaggcttctggtgggcacttttcttcctttttcctccggcctcagctcggatgtgcttggcgtgcaggccatggataaatacggcctccagggcgctgcacatggtgttggcatctccgtcttcactagtgaccaccgtgtccagggacacgtactgcttctgcaaggccttcacggatcccaccagcttcttcttgatgaccgggatggcagcctgggggtccagtccattctccaccactgaaagcatctccactcacgcagctgctccctcagagaatcacatgacacc

SEQ ID NO: 435307 - DNA, 1056 bp, Homo Sapiens
ctccaagggcagggaaatttatggggcatcccggttccgtccaagtaccaggtccaccggggctccttggaagcatctagcttggaacctggggggacggccagtcaaggtcgtggtccccggaagggccgcgggttccgagagcagttctgagggagagaggcagcctggggcccctcggggggttctccaggcggttcggagtactgcagttcaaccaatcatcctctggtggaggccggacttttgcagggcctcccgcaccaggtccagccagtcctcagcttcgtcctgggaggaggcgcgcagggccagcttcttgccagagaagaccagctcaaagcgcccgtcactgtgggctggccccacagactcacagcgaagcagggagcagttctccacacaggtgtgctcctcgttgctcaggtagaggcggaactccagtggggagagctcgcagacagagctctttccagatgcccattgccccctgcccgctccacggtgcccagcttcatgagaccctggaatgggttggacagtcccatctgtctccggtgtaccacctggaagctcttatgcccctgggatggggctgcctgggcttgccttcttcctggggaaggtacacacgcttggtctaacgcccccagggagcagttttttcttggttcttgagaaaaatgcctgtggagaccaggccttgactctggagtccccctgtaagaagctattgggtggtctgaagcactcttcaggggttgctcccgggaaggccggtagaagtcatcctctgagatccagctcttgttttttcttgcagagactggtctgagtcctcagcatttgctgtgcccaggtctgagtcataggacatgggctcctcgcaatggtctggactcttggagccattctcttggagtaagcagctatcagagtttaggctgcaggacagctgggatgaactggccgtgtccaggctgagggaggaggcagtcggcttctggttcctccgtatcttatggcccgagtgatggacttcgattccgagaatcc

SEQ ID NO: 435308 - DNA, 802 bp, Homo Sapiens
tttttctttgtattataaactgacttttaataataataaaaaatctatcaagaatttaacgagaagaatctgtacattttaaagtaaaccagtgcacaatgcgctggccctgggccctcccccatttcccgcagcagggctaaagcgggtcctcctttgtctctgatgcaagatacagtgacaaggccactgcctgccctcgtgtatgctgcggcaagagagggaagcgcaccctggagggcgggaggctcggatgccagatgccgggagggcttcaagctcccaggcctgggggcagcagggagcccccacctgaactcaccacctgccaggggtgacaggcgtccccccgcttcctccccagctgtgacctttccctgaaggcataccgaagctggggggacaaactgccgagggggcttgtgtgggtccctcctccccagcaggcagggtggcttcctgtgctctggctggtgatgtcccaatcgccctgctctgagaagttaccatcaagaaaataaatcacagaagccaccgcccggtgtttcccagtgaccctctaacccgtgtgacacggcacctcaggtggggctccatcccctccagctccaaccctggctggccacctctcaggcccttgtagccagtcactcaaagagagcgagttctaacaccggccaaccgctggagaatggagggtgggggaaggaatcacagtcgatacctcaaaacgacaccttacaaccctaatattaacaaacaggaaacaatgacattttttaatttttcaataatttagttt

SEQ ID NO: 435309 - DNA, 830 bp, Homo Sapiens
  misc_feature (23)..(23): n is a, c, g, or t
  misc_feature (80)..(80): n is a, c, g, or t
  misc_feature (151)..(151): n is a, c, g, or t
cctaaaagaaccccaccgaccgnaagccatttggggccctgcaagatgttcatcggaagggcccaggaagctgaccctgngagaggccaccgcgaaggcctgagctgggcctggggagcttggcttagggaagttgtgggcctaccagggnccgctgggagctgggcaggagctgagtccaaagacgttgttgggacctggagtcgggccagagtccggcctggagatgcagccgggagagcccgacttcaggacaacttggcctgcgcggtcgccgggaggcccaaccttggcgtggaggagcccaccgaccggagaccatttggggcctggagatgccatcggagggcaggagctcatcctggagaggccaccgtgaggcctgacctgggcctggggagcttggcttgaggaagctgtgggccgaccaatgccgccaggagatgggtaggcactgagtccaaagaggttgttgagaggcaggagtcgggcctggagacgcaaccaggaagaagagctgggcccggagaggacgcccggagggtgcaagtggctctggagaggccgacttgaggaggttctgggcccggagaggccgccggaagggaaaaactgggcctggaaaggccgttgtgaggaacgagccccatgggcctgaagaggccactggcaggtgggagctgggcctgccgaagcggccgagaggcaggagctttggactcgggaggccgcagtgaggcaacagctagctgggcatggagagtccgctgtgaggcagaggctgggcctgtgcaggccttcgggaggcaggaggctgggccttgtcgagg

SEQ ID NO: 435310 - DNA, 342 bp, Homo Sapiens
  misc_feature (231)..(231): n is a, c, g, or t
  misc_feature (240)..(240): n is a, c, g, or t
  misc_feature (321)..(321): n is a, c, g, or t
cctggaagcttgaggctgcagtcagctgtgatagcactactacactacagcattggacaacagatggagaacagtcctagctactcaggagctcagctaggaggatccttagcccaggagttcaagctgcagtgactgtgatagcactactgtagtcaagcttgggtgacagggtgagaccccatctcctgaataacatgttgctcagtcagtctctcttcctggattcanaggtctttnatggtagatccagctccagctctgtggccctgtggttggagaccgctgctcaagtgcattcgaaaggatccatcccatgcnattcttcagagtcatctttac

SEQ ID NO: 435311 - DNA, 588 bp, Homo Sapiens
  misc_feature (104)..(160): n is a, c, g, or t
tctcaacctcccacgtggctgagactacaggcgcttgccactatgcccaactaatatttggaattttcctatacgtggactccagaggggtgacagcgaaacgnnnnnnnnnnnnnnnnnnnnnnnnnnnnnnnnnnnnnnnnnnnnnnnnnnnnnnnnnctcctacctcccggcagcctctccaggcccagaactttctccagtcgtgcctccacagaccaagctcatgactcacaatggcctatttaggcccataccctacgtcacggcagcctccgcagatgaggctactgcctcacaacagcctccacaggcacagctccatcgttacaatggcctctttagacccagctcctgcctcccagccttctctccaggccctgaactttctcaagtcgacctcaccaggcccagctcatgcatcttggtggcccctccaggcccagcctctgcctcccgtcagcctctacagtcccaaagtctgcctcacagcagattcttcacgcccagcatctacctcactgtggaccccccaagccaagctcccaacctttcagcagcttctacacacctagctcctgccaccc

SEQ ID NO: 435312 - DNA, 1429 bp, Homo Sapiens
catagtgacatataaaacccgcgtataaagcaggctggtacggtcggaatctcgggatatcgtcgacccacgcgtccggtcgcggtggggcgagagctgggcctggagactcccctggggggcaacagcggggtctgcacacacccttctccagctggagctgggactgttcagtcactgggagaagggatgtgggtctgaagagcttggttgctgaaacttcggggtctacaaaggccggcgggagctgagccaagggagcttgtttgctgggaggcgggagatgcagccgggaggaacagctgggccatgcgggaggcagaggccgggcctcctcaagttggcctctcagacccacttgcagcctcccggcgtcctctccgggcccagctcttcctcccggctgcgtctccagggcggactctggcccgactccaggtcccaacaacgtctttggactcagctcctgcccagctcccagaggccctggtaggcccacaacttccctaagccaagctccccaggcccagctcaggcctcacggtggcctctccaggctcagctcctgccctccgatggcatctgcaggccccaaacggcctccggtcggtgggcttctctaggcccagcttgggcctcccggtggcctctgcaggcccaaatcgtcccgaagtcggcctctccaggcccagctccggcctcccggcggcctctgcaggcccaagtcgtcctcaagtcggcctggaagtgggcctggaagagcagcaagtcggcctccccgggcccagctccgtcctctcggcggcctctccaggtgcaaaacttcctcgagtcagcctctccaggcccagctcctcctgcctcccagtggcctctttcggcccagcccagctcatggctctcggcggccttcccaggccccgcttttgacttttggcagcctcttcaggcgcagaacttgatctccagtcggcctttgcaggcccggcctcctgcctctcgaaggcctgcacgggcccggcctcggcctcggcctcacagcggactctccacgcccagctagctctcgcctcactgcggtctccccagtccaaagctcctggctttcggccacttcggcaggtccagctcctgcctgccagtggcctctttaggcccagctcattcctcacgtcggcctttccaggccccgtttttcccttccggcagcctcttggcctctaatttgtttatcttttgtgtataaatcccaaaatattgaattttggaatatttccaccattatgtaaatattttggtaggtaatttatttggagtgagtttctgcgccaagcccgaattttttattttattttcccttattatttggtgttaaacaggtttaatgacggtcatggcaactttttggcacaatgaaaaatatcgccca

SEQ ID NO: 435313 - DNA, 2185 bp, Homo Sapiens
  misc_feature (152)..(321): n is a, c, g, or t
atttaggcccataccctacgtcacgctagcctccgcagatgagcctactgcctcacaacagcctccacaggcacagctccatcgttacaatggcctctttagacccagctcctgcctcccagccttctctccaggctctgaactttctcagnnnnnnnnnnnnnnnnnnnnnnnnnnnnnnnnnnnnnnnnnnnnnnnnnnnnnnnnnnnnnnnnnnnnnnnnnnnnnnnnnnnnnnnnnnnnnnnnnnnnnnnnnnnnnnnnnnnnnnnnnnnnnnnnnnnnnnnnnnnnnnnnnnnnnnnnnnnnnnnnnnnnnnnnnncagacggctgacagcgaaacgtgggaccatcctgttgcagggacacaagcttaacacgcccactgattgtacattatgctcctacctcccggcagcctctccaggcccagaactttctccagtcagcctctacagaccaagctcatgactcacaatggcctatttaggcccataccctacgtcacggcagtctccgcagatgagcctactgccccacaacagcctccacaggcacagctccatcgttacaatggcctctttagacccagctcctgcctcccagccttctctccaggccctgaactttctcaagtcgacctcaccaggcccagctcatgcttctttgcagcctctccaggcccagctcctgcatcttggtggcccctccaggcccagcctctgcctcccgtcggcctctacagtcccaacatctgcctcacagcagattcttcacgcccagcatctgcctcactgtggaccccccaagccaagctcccaacctttcagcagcttctacacacccagctcctgccacccagtggcctctttaggccaagctcatgcttcacaagggcctttccaggcccaacttttgtctcatggcaaccttccctggccagattcctgcctgtctcccagcagcctagacaggcccaggtcttgcctcacactggcctctctacatccagcttatgcctcacggtggcctctccaggcccaactcctgtcccaggacgtcatctccgggcccaaaacttactcaagtcagactctctagtcccaactgctgcctcctggtggcctatgaaggcccaaaatctcctcaagttgacctttccaggcccagctcctgcctcctgtcagcgtctacaggcccaacctctacgtcatgggggcttctccaggcccacctcttcctcttggctgggtctacaggcacaactgctgcctcacaacatccttttttggcccagttcctgtccagctcatggcggccaatgtaggcccaaaacttcctcaagtcaaactctccaggcccaccttctgcttcccagtggcatgaacaggcccagctttgacttgagaacagcctctgcaggccctgctcttgcctcccaggggctttttccaggcccagctcttgcctcatggcagctgccccaggccaaatttctgcctgcctgccagcagcctcaacaggcatagctcctccctcacagtggcccatttaggcccaactcatgactgtcgggccatttccaggcctagtgcctgcctcgtggctgactcttgaagcccaaaacttcctcaaatcagccttttgcccaacttctgtctactgtcggactctacaggtcagcctctgcctcacagtggaccctccagacccagatggtgtctcactgtggcatcctcaggcgaagctcctgcctttcggcagcctctccaggcccagctcctcctgcctcccagtggcctctttcggcccagcccagctcatgcctcccggcggccttcccaagccccgcttttgactttcggtggcctctgcaggcctcgacaaggcccagcctcctgcctcccgaaggcctgcacaggcccagcctctgcctcacagcggactctccacgcccagctagctgtcgcctcactgcggcctcccgagtccaaagctcctgcctctcggccgcttcggcaggcccagctcccgcctgccagtggcctcttcaggcccatggggctcattcctgacaacggcctttccaggccccgtttttcccttttggcagcctcttggcttttaatttgtttatcttttgtgtataaatcccaaaatatggaattttggaatatttcccccatt

SEQ ID NO: 435314 - DNA, 1029 bp, Homo Sapiens
  misc_feature (599)..(655): n is a, c, g, or t
  misc_feature (777)..(831): n is a, c, g, or t
gggcctttgttcgaggcctgccagaggccccccaaaagtcaaaaagcggggccttgggaagccccgcccagaggccatgagctgggcttggcccgaaagaggcccactgggaggcaggagaagctgggcctgaagaggctgactcgaggaacttttgcaccccgaagagccccccgagaggctggagctgggcttggggaggccaacttgaggacgacttgggcctgcagagggcgccggggggcaggagctggccctggacaggccgacttgatgacagtctgggcctgcagaggccgccgggaggaagagctgggcctggagaggctgccaagaagcatgagctgggcctggtgacgtcgacttgagaaagttcagggcctggagagaaggctgggaggcaggagctgggtctaaagaggccattgtaacgatggagctgtgcctgtggaggctgttgtgaggcagtaggctcatctgcggagactgccgtgacgtagggtatgggcctaaataggccattgtgagtcatgagcttggtctgtagaggctgactggagaaagttctgggcctggagaggctgccgggaggtaggagnnnnnnnnnnnnnnnnnnnnnnnnnnnnnnnnnnnnnnnnnnnnnnnnnnnnnnnnncgtttcgctgtcacccctctggaatccacgtataggaaaattccaaatattagttgggcatagtggcaagcgcctgtagtctcagccacgtgggaggttgagatgggaggatcgcttcagcnnnnnnnnnnnnnnnnnnnnnnnnnnnnnnnnnnnnnnnnnnnnnnnnnnnnnnnacaacagagggagaccctgaataacatgttgcccagtcagtctctcttcctggattcagaagtctttcatggtagatccagctccagctctgtggccctgtggttggagaccgctgctcaagtgcattcgaaaggatccatcccatgccattcttcagaatcatctttactgctgcagtggtcaacttgatcccggga

SEQ ID NO: 435315 - DNA, 448 bp, Homo Sapiens
tgcctggcgtctgggctggagaggctgcgggaggtaggagctgggccaaaagatgtaagcacatttgcatttattaggcactttgtttccattattacactgtgatatctaataaaataattatagaactcaccataatgtagaatcagtgggcgtgttaagcttgttttcctgcgactggatgttcccacctgagcgtgatgggagaaagtgacagatcaataggtattagattctcataaggacagcgcaacctagatccctcacatgcacggttcacaacagggtgcgttctcctatgagaatctaacgctgctgctcatctgagaaggtggagctcaggtgggaatgtgagcaaaggggagtggctgtaaatacagacgaagcttccctcactccctcactcgacaccgctcacctcctgctgtgtggcctctaggggcacccg

SEQ ID NO: 435316 - DNA, 308 bp, Homo Sapiens
tagtgctaaatacgtgcatggtgagtcatgagcttggtctgtagaggctgactggagaaagttctgggcctggagaggctgccgggaggtaggagcataatgtagaatcagtgggcgtttcaagcttgttttcctgcaactggatggtcccacgtttcactgtcacccctctggaatccacgtatacgaaaattccaaatattagttgggcatagtggcaagcacctgtagtctcagccacgtgggaggttgaggtgggaggatcgcttcagcctggaaggttgaggctgcagtcagctgcgatagca

SEQ ID NO: 435317 - DNA, 444 bp, Homo Sapiens
  misc_feature (193)..(220): n is a, c, g, or t
  misc_feature (244)..(303): n is a, c, g, or t
  misc_feature (389)..(389): n is a, c, g, or t
tggaattttcgtatacgtggattccagaggggtgacagcgaaattaggtgacctcacagtgacttatagctaccacttactgttgattgtgacgaagtgccagctgaggcacatgccttgggagctaagtggttgctgcccttgaccactgtgaagactggtgtgggaagggtcgctttggatgcacttgagnnnnnnnnnnnnnnnnnnnnnnnnnnnngccgcaaggagccacacagcaggnnnnnnnnnnnnnnnnnnnnnnnnnnnnnnnnnnnnnnnnnnnnnnnnnnnnnnnnnnnnctcctacctcccggcagcctctccaggcccagaactttctccagtcagcctctacagaccaagctcatgactctcaatggcctatntaggcccataccctacgtcacggcagcctccgcagatgaggctactgcctcacaa

SEQ ID NO: 435318 - DNA, 352 bp, Homo Sapiens
  misc_feature (170)..(170): n is a, c, g, or t
  misc_feature (306)..(306): n is a, c, g, or t
ctctccctcctggctgatgaagtcgacgtactgagcaggatgctgcggcaacagcgcagtggccccctggaggcctgctatggggagctgggccagagcaggatgtacttcaacgccagcggccctcaccacaccgacacctcggggacaccggagtttctctcctcctnatttccattttctcctgtagggaatcttttagctaaggctttggctcttagctccaactgcaaccacatggcagacttctacttcagcccccagcttctgcagttcagccagccagatcatctgcttatgtgaaanacgatcattggggcctttaacttccaccagcttaaagtgacggctc

SEQ ID NO: 435319 - DNA, 435 bp, Homo Sapiens
  misc_feature (379)..(379): n is a, c, g, or t
ccggccccagttctctcggcttgcaaaccctcgtgggccctcaatcctccctcggaaccctggggaaaacaatgagcatctcgctggtgagggaagttgacaaggtctgaagacggaggaacgtggctcggtccggcggtcggactcatcgtggggtgtctggcctggcacgggggctgtgttcaccgccttccctcctgcaggcaacttgatagccttcttctcactgcgcccacgccctgagtctggcgtgcccaccgtctccaaggaattcttgtagcgtttgcccagtttgcgctgacaccagtggcagaggccgcagaggacgacagtgacgctaaggctgacggtgatgatggcagagaccagcaggacgtcngcgagggcgcccctggctggccgcctcgggtcccggtacatggtccctatcgatag

SEQ ID NO: 435320 - DNA, 1177 bp, Homo Sapiens
tttttgttctcatacaagatttattccccagcacacccctcccctcctcagttcacagtggagactatggagattcagggcaggatccctcaggtacaagaaacaccttccgaagattttgctctccttccttccctccctcttgccaactcccaaggcctgaagcgcacactcatgcaaacacacgaaatccccctccttccccacacctcctgtctttccacatcagagctctgaacttgagaggtgtcaaaagtctgtttgagaagcctaaagtggggagatgccattacccctgaccaccccactatgagtgactatgagacacctaactcttccctcttctgtcaaccattttcactccctggcctctgtaccttctccatcaaccaagagcaaacatgtcagcacacccccacctgcagtacatgaaaacaggctctgtccaacatccctcacccaagtacaggggtgttgggggagtggcccctgaggatcagcaaagggttaatgcagaaggaaagaggacagaagcgtttggcttgagctctgcttggggaggcagaggctatagactggcacaggtttagaatcaagtaccatgtttaggtttctgtctcacatcacatgatttcactaggggctgcagaacagatacccctcagaggggtctctgctgattacagccacattcttactattggctcatccttaaaggaggccccaccaagttgggaagcagttgaaaataaaagctgtaaaggagctgaacaggaagtaagaataggtggtgcaagagattatggcccctgggatgaatgacatggagccatttgtaaagtgctactgtatcatcccccatgaattattgcttctccaaaggaggagcagaggaaggaacaggaacatagaaatgagtatggtattgctttgctcactgctgaggctgatggccagatggacccaggggttatcagaaaccgaagattaactacacagctccagaagactcagacctcaaaatacagaggtgctcactaatcctcccagccagctgatcccctgggccaaggtaatgtagaagaggcccatccccacatcatattcacattttttaaattcgacgcgctgggtcgacgatatcccggaacttccggaccggttagcgcatgtcgcc

SEQ ID NO: 435321 - DNA, 899 bp, Homo Sapiens
  misc_feature (583)..(612): n is a, c, g, or t
ggaactccgtctcaaaagtaaataaaaataatcacctggagtttgttaaaccatatggattctcaagctcctctcttgaagattctgattcagtaggtctgggagtggcgcgctggattttgatcaaaattgtagagcattttaaggtgagtacctgagggagaacttaaagacatcttagttggggagtagtccttttgaattttacagctagatataatcttcagtcagataaaatttatgggagctggtgtcttatgcctgactcttagtaatttcataccggtttgaagtacgtgtgcccatgcctaaagccttgactttcagaatgttgtcttttgattcttctgtcttgatttgattaggggtgaaatttagaagtcttagtaatgtaacttgaagatgttaaacaaaaatctcaagtaaaatgaaaagcaaatatgggctactgaattaagaaactggcattctagtattaaatcctcacttcaggagcttttaaaaatactgagacccccccataaccagagattcagattcaaagactgaggataggaccttagcattgtagctatttaaagtnnnnnnnnnnnnnnnnnnnnnnnnnnnnnncaatgtgggtgtgaaaatgcctacaaagggttttagtgccttagaagtcctaagaagcccaatctgtatcaaagcagatccattttgcaaggatctttcttttagaactttctcagttctcttagtaagaactttagaagtaatcttgataataagcacagacagcctaacagcagaggcaacttaaataactcctgagcagttggcactagaacagaatacttggaatgacaccaaagttaaccaagtccagcatatgtccaaagagttaagtgtttcattttact

SEQ ID NO: 435322 - DNA, 305 bp, Homo Sapiens
ttttttcatgaaaaaaataacaacaaaatgtatttaaaaacagacttctccagttggcattttgaatgaaattgctaacaactccaaccctctatattgtgtttcttttgctcctggagtcctcttgcagctttaattcttgaaactcaggcggcagcaccagacattaaatccccaaagggagaggtattagtaaaccttttgctggtcattcttttccgaatgcaaatggacaaattcttaagccctcttattcatttcatgatgatcattagataaaaaaattaagcctaacttgcatattg

SEQ ID NO: 435323 - DNA, 1442 bp, Homo Sapiens
  misc_feature (41)..(70): n is a, c, g, or t
gatcattaggataaaaaaattaagcctaacttgcatattgnnnnnnnnnnnnnnnnnnnnnnnnnnnnnnccttgcagataataaatatcggcttattcacttattttaaacaaagtccaattttattcactctcaatatccttgcagtccattgtataccttctgcactgacccttgtttcagtagctgtttgataccttctctcgcttcctctgttaactgttcttttggaaaatccacatcaaaagtgattatcaaagagcccttgatattgttgttgtcaaagttggggagcccttcccctttcttccatagcttcgctcctggcctggtgatcttatcccgggaaatatgtaccttgtgaccatccaagtgagtaatatccatctcaaagccaaccagtgactcaactaatgagattgtcacatttgtgtacaaatcatctcctctcctttcaaatattgggtgcttgacaactttgattcggaaccgtaaatctccaggctccccatccacgtgaggctcaccttctccaataaaggggtactccatgccgtctctcaccccaggctctatttctacttccagcgttcgttcttcattcactagtttgacattagggcattcgtcgcagaccacctcctgggtcatttggaagcgcccagggcccagctgggtggtccgcatctcttgccgacaattgcacttccgtttgccaggagcctgccttgccacaggtttgtttctaactacttccacaaaatttcctgcatatacttcttccaaagtgacttctagatctacaataatatcacttcctcttggaatatttctgtcttgctgacgaggggttcctccaaacatgaaaccaaaatccccaaagaagtgtgaaaaaatgtctccatgggagctctgatgaccatcttttaatccttcttcaccataagtatcgtactgtttccgtttctcactatctgacagaacctcataagcagcacccagatcctggaatttctcctgggcttgtggatcatcagggttccggtcgggatgaagctgcagggctagtttcctataggcctttttaatatcctttatagaggcacttcgaggcacccccaagatcttatagaaatctcgtccggcaatcaccgccccgatgaggtatagcagcaacaggcaaaaggtgctcaggttctgcggagccatggttcctctgtcccgggtcctgttccacacactcctcacagcctcctccgccgccgcgtcggctcgccagcccacccggccctgtgaggccgcctcacaccgggggggcgcgggggtctccttggtccgcagagacagctagctagccccctcttctgccggtccacttcccgggagtcccgagtcccggtgagagaagcccccggtaggcgatcccgggaattccggaccc

SEQ ID NO: 435324 - DNA, 233 bp, Homo Sapiens
agatggtcattcatccccatctatgacatgccccagctcatgatctagcattcccttgtagtggtactaagagacaagacaatagtactcagtgggctgggaggaactgtatattttccttccttttattctattgattgattgtaaagtctagcctgcttggtagaattcatgctagcgccagggtctctactacagacactgatgtgtaactggcactagacaggattggg

SEQ ID NO: 435325 - DNA, 653 bp, Homo Sapiens
attagctagctatctggctgtttcactatcatagtcactctggtgaatccaagcataaacagacaaatccaactacaactcaacagggtgcagatggggagggcagggcaacatctatgtatatgttcagctgctccagcagaacagacagcatggcttccagctgggactgggggaaaagaaccatttccaagggggtgtgttcccctttgtcgggtgtggagggctgatactatgcatgtggagctgagcagcgggctgggctgtctgggaggttggcagctacaagctagggtgcaagtgggggacagcgggactgtgggcctgccctgggtgccttgcccttccatcctggtgccaccactgacaaccaagacacccagcctgctgctgtgggctcagcacaggaaggggccaggccttctcaggggaaagggctctctccatgtcaacaaggcagaaacacctagggtcacagctgagcagtgccctggctcacatctgtgacgggaggaggagacagggaaccgaatcagatcatgagattcgtggtgagggtcccagttggatgagtggaactgagagtgaaaagctggggtcccactcttgggcctgggactttgccttccttaatttaacctcagtatggagta

SEQ ID NO: 435326 - DNA, 2316 bp, Homo Sapiens
  misc_feature (1852)..(1852): n is a, c, g, or t
  misc_feature (2128)..(2128): n is a, c, g, or t
  misc_feature (2270)..(2270): n is a, c, g, or t
agcggggctcttctggtatttctcggcctgcgagaagtgtgtgctggcccaggtgtgcaaggcctggcggcgcgtgctgtaccagcccaagttctgggcaggcctcacgccggtgctgcatgccaaggagctctacaacgtgctgcctggtggcgagaaggagttcgtgaacctgcagggttttgccgccagaggcttcgagggcttctgcctggttggcgtctccgacctggacatctgtgagttcattgacaactatgcgctctccaagaagggtgtcaaagccatgagcctcaagcgctccaccatcacggacgcaggcctcgaggttatgcttgaacagatgcagggcgtggtgcgtctggagctgtcgggctgcaacgactttcaccgaggccgggctgtggtccagcctgagcgcgcgcatcacctcgctgagcgtgagtgactgcatcaacgtggccgacgacgccatcgcggccatctcgcagctgctgcccaacctggcggagctgagcctgcaggcctaccacgtgacggacacggcgctggcctacttcacggcgcgccagggccacagcacgcacacgctgcgcctgctctcctgctgggagatcaccaaccacggcgtggtcaacgtggtgcacagcctgcccaacctcaccgcgctcagcctctcgggctgctccaaggtcaccgacgactggcgtggagctcgtggccgagaacctggcgcaagctgcgcagccttgacctctcgtggtgcccacgcatcaccgacatggcgctggagtacgtggcctgcgacctgcaccgcctagaggaccccgactagcccgacaggtgtgtacgcatcacggacactggcctcagctatctgtccaccatgtcgtccctccgcagcctctacctgcgatggtgctgccaggtgcaagacttcgggctgaagcacctcctggccctggggagtttgcgcctcctgtctctggcaggctgcccgctgctcaccaccaccgggctgtcgggcctggtgcagctgcaggagctggaggagctggagctgaccaactgccccggggccacccccgagctcttcaagtatttctcgcagcacctgccccgctgcctcgtcattgagtagcgcgaggcccccgccccggtcgcgggaacccggccatgacctgggcggtagccacgaaaacctccacagatgacacgagaggcacctagcgcgccgcctcgtccctacccccacacgccacgcgaggtcggcaaaccatacagatccactgcggagtctcgccgctccggaacgagcgcggccgcagacccctgcagccttcaccatctttcgaggagaggacccgtgtaagtcctccctcttccgatcaaacacacccatcgcgcctttccccggaatccgccccgcccgtgttcgcccgtaggcgcacccggggtaacggaagcgagagcccgaggaccaaatccgtctaactcaccggctgtccatccttcgcaggggcgcgcccccgctcccccatccgtttcttgatacacgcccacatgagcaactcgggtccgcagttcacaatcgccccccgcataccgtggagacccccatgcgcgaggcgaagggcccgcggactacggctttgtcgatcgattgcacacatgtctcggtcggctcgacacacacaacacaaccacgtgtgtgcagaggtcaatatatggagactttggtcgcgtagacggcccattcataacctatacgcctatctgctcgtgccgaggagcgtcagagtcgtcacatgccacccatgtcgcgcacgtgcccaatgaggtgcgaccaganccgtcgacgtccacgaccttccgctcggcacggctagcgctcggcgtgcacgctaccacggagctccaccccaacccacacagacacgttcgacacacaacggatactcctgtgcgctaccccgcaccccaacggcgactcgaaacgacgcaccgcacgcgtcgccatgctcgaagcgtgagagactgacctttctcgataggcattcgtgcggcagagtagcatgtcgcccgttccttccatcgttaatgagttattcatacgacggattggctnagcccattacataggacgaattgttcatagcacggcatcttaaaagggttgttgcacaactgcaagggtataggagctgacgcacctcccgcgtggtggtatgactaagatgaaagtaaaaggaagctaccatcaacaggangtgcctaccacgtctactaccaggcatgagccttccagctcagcgg

SEQ ID NO: 435327 - DNA, 354 bp, Homo Sapiens
atcttttcgatagcccgacaggcccggtggtggtaatacagcgggcagctgccagagactggatggcgcaaactccccaggccagtgtggtgcttcagcccgaagtcttgcacctggcagcaccatcgcaggtagaggctgcggagggacgacatggtggacagatagctgaggccagtgtccgtgatgcgtacacacctgtcgggctagtcggggagctgtcgggctagtcggggagctgtcgggctagtcggggagctgtcgggctagtcggggagctgtcgggctagtcggggagctgtcgggctagtcggggagctgtcgggctagtctgggctgtcgggctagtcgggg

SEQ ID NO: 435328 - DNA, 1192 bp, Homo Sapiens
gcttcaggtggagatttgtatcctggcttttttccacaaatgacccaggtttcgatctcctggaaacagctagtaaggacttctcattaggtgagaaggccatctgcgtgactgtcaaactgtggaaaactaaattcgtgcacctgtttccaagatgtagtgttccaaagaatgatagctgcatgctctttcttagctgccttacaagctgaggcaagcagagtctttgaactgttacaagtaacacaaaatatttcataaccgtgcccatatagtttttgaacttcaggccacaaaagtattctgcagaagatgatcctcagtgggaggctcagtaagtatggagggctgaaaggccacctgctgatactcaaaaccagtactagttaacagctcctcttcatcagaaggctgagaagctatatctccctgaaagacagctttatttgataatcccaatgcagggacagtggctccttctggaagatcactatcttgattacagagcacatgattcagtgattgtcctgtaatggcacaaaaattttccacaaaattccgaggtgcagaaaaaacccgaagaactttttcatctgctccagatacaaactgaaaccgattaatcattgccaaacatttcaggtcatacccatgtatctgaggccttgcaatttcatgccaagtcacctgtgattggtcttttctcttccatggagcaaaaagtctagttgtctgatcagtaccaacagtgataataaattctccttctggatcccagactaggtcttggacaccatcaaagtgtcctgaaatgacaatctctggagtccactctcttgggttaactgtattctgtttccaaaggtgcaacgctccgtggaaagcatgagcaatgatcatggagccatcttcattgaactggcaatcataaaatcccaaagtattcccacctacttcacctactcgaacctgttctagccaaactcctgactcttcatctggagcccagagaatcatggttttatccatggaagcagataataatctcattggctgctgtaggacaccatctttgtacaccacaggttgccagtgaactgcatttacccagttttcatgaccggctagcctgtctccagagtaacagcaaggctatttcctcgtgccgattacccccgcctcctacctacgc

SEQ ID NO: 435329 - DNA, 846 bp, Homo Sapiens
  misc_feature (538)..(581): n is a, c, g, or t
  misc_feature (674)..(760): n is a, c, g, or t
cccacggggaccccctccgggcataataaatcccccggtacccctcgaactggggagaaaggtcaaaccaaattcccatgccccaaattgacgttttcttccccccctcgtattctaactaacaaaaatgtgccgttttccaacccaaattttttccaagccattggggttcaaccctaaaaagccccccatcaataagaaatacccttaaataaacggaaattccaatttcaagtttcatgtggagttgtatctccctgtttggttcctttttccaatttaatttgacagacttagtaatagcacccacctgtttaactgaggtagatccacattgtaaagaaagctgggtcccctccattttatctctaaatttatgatacttttataaaaacaaaaatccatttaaatcatatgcagaagcgatgacaggtggtactacctgaagaaagcttagaacatgagcaggtttgcaaataagacctacgcccaaatcacactctccatcagccacacagaaatctcagactggaggggnnnnnnnnnnnnnnnnnnnnnnnnnnnnnnnnnnnnnnnnnnnngtcgcaagacttttagaacaggtctttttgactgtcacagaaatgcacaatggtccattttcatcaagctatggccatagccaagctagacannnnnnnnnnnnnnnnnnnnnnnnnnnnnnnnnnnnnnnnnnnnnnnnnnnnnnnnnnnnnnnnnnnnnnnnnnnnnnnnnnnnnnngtgtatcactgaatgctcccttttaactccagaaaaaaataacttgaattatgatacagcatcttgatctgaacagtttacactca

SEQ ID NO: 435330 - DNA, 1058 bp, Homo Sapiens
  misc_feature (9)..(9): n is a, c, g, or t
  misc_feature (12)..(12): n is a, c, g, or t
  misc_feature (18)..(18): n is a, c, g, or t
  misc_feature (21)..(21): n is a, c, g, or t
  misc_feature (23)..(23): n is a, c, g, or t
  misc_feature (28)..(28): n is a, c, g, or t
  misc_feature (33)..(33): n is a, c, g, or t
  misc_feature (35)..(35): n is a, c, g, or t
  misc_feature (40)..(40): n is a, c, g, or t
  misc_feature (43)..(43): n is a, c, g, or t
  misc_feature (57)..(57): n is a, c, g, or t
  misc_feature (65)..(65): n is a, c, g, or t
  misc_feature (69)..(69): n is a, c, g, or t
  misc_feature (84)..(84): n is a, c, g, or t
  misc_feature (90)..(90): n is a, c, g, or t
  misc_feature (97)..(97): n is a, c, g, or t
  misc_feature (110)..(110): n is a, c, g, or t
  misc_feature (113)..(113): n is a, c, g, or t
  misc_feature (116)..(116): n is a, c, g, or t
  misc_feature (119)..(119): n is a, c, g, or t
  misc_feature (130)..(131): n is a, c, g, or t
  misc_feature (137)..(137): n is a, c, g, or t
  misc_feature (164)..(211): n is a, c, g, or t
  misc_feature (225)..(225): n is a, c, g, or t
  misc_feature (238)..(238): n is a, c, g, or t
  misc_feature (365)..(365): n is a, c, g, or t
  misc_feature (382)..(382): n is a, c, g, or t
  misc_feature (416)..(416): n is a, c, g, or t
  misc_feature (500)..(616): n is a, c, g, or t
  misc_feature (619)..(619): n is a, c, g, or t
  misc_feature (634)..(634): n is a, c, g, or t
  misc_feature (638)..(745): n is a, c, g, or t
  misc_feature (1035)..(1035): n is a, c, g, or t
ttttggagncgngggggngancnctgantcagngntcggnccngcctgccaacatgngagccccntttntctaaaatacaaaanttaccnggcatgntgcacacgccttnaanccnagntactcgggagnntgaggnagaagaatcactagaaccttgggagannnnnnnnnnnnnnnnnnnnnnnnnnnnnnnnnnnnnnnnnnnnnnnntgacagagcgagantccatctcaaaanacaaaaaagtggggtcccttgtactaacatactgagttagacttctgcaaagcactctagagcatgacaagggaagattctggacaattaattgatgggaagaaatgatgataatcataaactgctnattacctccattatttnaatattcagcccttgccctgcctcattctactcntcctccaatacagaaaagcccctcccttatttagttctgttttacgtcataaaggaaactgggccgggtgcggtggctcacccnnnnnnnnnnnnnnnnnnnnnnnnnnnnnnnnnnnnnnnnnnnnnnnnnnnnnnnnnnnnnnnnnnnnnnnnnnnnnnnnnnnnnnnnnnnnnnnnnnnnnnnnnnnnnnnnnnnnnttngctgggcgtggtggnacannnnnnnnnnnnnnnnnnnnnnnnnnnnnnnnnnnnnnnnnnnnnnnnnnnnnnnnnnnnnnnnnnnnnnnnnnnnnnnnnnnnnnnnnnnnnnnnnnnnnnnnnnnnacgagtgaaactccatctcaaaaataataaaactgaacacatctaaatacctgatggggatttgggggaagatggcatatgcttaaggcatgatgagggatgggggcatggcaaacaagattttttaaaatctgtttttgaagaatccataaagtagtttcaaaagacatcaaagagtctggctacccaaagaaatctagttagttgtctgcatgtctgtctacctgacttgactgtaagctccttgagagcaggaattttttcatctttatatgccccacagcctggcnccatgtttgactttactctctat

SEQ ID NO: 435331 - DNA, 1225 bp, Homo Sapiens
tttttttctaaaagaacaaaacgtttattttttaaatttaagaattatgggaaacctaagtaatgggaattgcatcctcatcggggtcttctggcaagtcggaagcaccaccctctcctgtagctcgatgcttctctagtttagcaatcaattctttcgctggattgaagacgccattggtctgctggtcacagacatagcagcgcggggtggtgcggaaatgctgcagtgcacagctctcgcagaaataatgcctgcacttggtgacaactgggttttggaagctctggcgacagatgaaacacttgaatggtatttcctcatcatcgcttcccacttcatagttttcatcctcatagacaccatagcgaccctcatcaagctcacgttcgatctgccacccatgcttgtaatctgaacggtcatggaggaatttgcagctgtctccgaagccgcagaagccagtctctttgtagtccttacagatgtcgggctggtaatcccagcgcacggtggcacgtagatgctcgggcgctcggatggggcccttcctcaccatcccggaagaggcattgcccatagacgtatccttgggcttcatgtatttctgataattgttgattccccgatagatcttgtcatcctccttgcccctcagctcctcctggatcttctggtgcgctcaaagatggcttgtgcatcgcgctctttctctgtgtccagctcatagacagctgtcgctcccatatcctctggtcccacgggtttcgccgaacgggtggatttataaaccacgccgagactctcgggctcattttcctcttcctcttcgctgctcaagtcgccgtaagccgccttctgtttaccactgtcacgggtcttctgtatcattggattgtgggtcacccgcttcttttccggtcgaaccacagtgcagccttcgtcgctactgctgccgctttctccgggctctgggtcgcaggccgggcgctttctgcgtccagcagcccctttccgcccaggctttttgaaaaggaaggtgcacacctgatccaccgcctttcctggagaaagctgctctgccattttagagtcctgagctccgaaacagccgtggctgcctgggttgcacttggcccctgcacgtcactccacgttgcgcgctccgccgggagtcgaagcaaaagacactgacggaagaggactgcgagagcgcgagcgcccg

SEQ ID NO: 435332 - DNA, 989 bp, Homo Sapiens
  misc_feature (158)..(158): n is a, c, g, or t
gccagcctgagcttttgcagtttcgccatcagttcttgggcggggttaaagatccccccggttggctggtcacagatgtagcagcgcggggtggcccggaagtgctccagcgcgcagctctcgcagaaataatgcctgcactggtgacgactgggttntggaaggcctggcgacatatgaaacacctgaatggtatttcctcttcctcgcttcccacttcatggttttcgtcctcggcagatacagtaggcgaccctcttcaagctcccgttcaatctcccacccgagcttgtaatcggaacggtcgtggaggaatttgcagctgtccccgaagccacagaagccagtctccttgtagtccttgcagatgtcaggctggtaatcccagcgcacagtggcgcgcagatgccctggcgcacgtatggggcccttcctcgccatccccgaggaggagttgcccatggacgtgtccttgggcttcaggtacctcaggtagctgtggattccccggtagatgtggtcgtgctcccgaccccgcagtgcctcctggacccgctggctgcacttgaggatggtcggcgtatggtgctccttctcggtgtcctgctcgaagtcagcggtggcccccatgtcctccggccccacaggcttcgccgagcgggtggacctgtacaccacgtcgaggctctcaggcgccgcctcctcgcccctcctgtcgccgtgagccgccttctgccagctgtggaggccccggggcctcggtgccacccgcgggggctgagccactgtgtcgccctcgtccccgctgctgctgctctctccgtgctcggggtcgcaggccgggcgctttctgaggcctgcagcccctttccgtccaggctttttgaagaggaaggtgcatacctggtctgcttggtcggccgtccttcctggagaaggtggcgctgccatgttgagtctcaggctcccatcccgggaattccggaccc

SEQ ID NO: 435333 - DNA, 1035 bp, Homo Sapiens
ggggagtgggggagttcagtaagatttgggagggcgggggtagccaagtttgcccgcgctagggtggggtttgagggagaggttagcagcaagtgcccttctaaacaaaggaagttgcagcccttccccttttcccccaagccacttgaaacctttttggaggtgcccctttggactgcaggggtaggaatcagcaaaaggtatgttcagaaactttaattgccccaagcatcttctttagtggtgactgggacagtcacaagatcaggaagttctagttctctagctaggtgtatgctggcaccagtgtccaacacagctgccttctcaggtgccaagaaaccaggaagctccttcccatatgctgtttgcagttcacaccagttctgagtagccaggtcagtgacatatacatatttaaggtggaatctctccatgggtgataatatatccagtcctcttttccagttttgtaagcttatggttttgtcatccttcccaagggattcagaagatgggccaggcatgttaactaaagcctttgactcttgggcatcttctaggtccagaaactccaggaactctgagtcactcaagtctgagaaccctgaggcttctgctgacactgtctcctcttctcttgtctctgccatggtacagctctggattgggctagaagggccctgtgacttcgttgatcttcctcctcatagggaaggccagaatgctgaaatgacaaggctgaccattccctcacgttgggtgttttctcctctcacattgacactgcacagactgttacccaccccagatcctaggttacataacgctcgcctctctcctggggcaaactctctccatgatttcttcgttcccccgtactctagatgcaatgacttgatccaatccctgctccctctgatactcctccgaacctcggactccacctggtttcgccgcggcctcggagctgctcccggacgctcccggcgaggagactgaggaagccgggcagagcgcgctgccggagcggac

SEQ ID NO: 435334 - DNA, 1886 bp, Homo Sapiens
  misc_feature (107)..(140): n is a, c, g, or t
ggagaatccgcttgaaccctgggaggccagagggttgcagtgagcccgagagcccgagattgtgccactgcactcccagcctggcgacagaacaagactctgtctcnnnnnnnnnnnnnnnnnnnnnnnnnnnnnnnnnngccataagtaaaatggagagtttgccctgttctgctttctaatagattttccaagcttatgtttcagggaaaaagccaggactacctgtaaagtatcataaaatgctatggctgttaaccttcagttgtataaaaacatcaaaatagcctctcctctcaaaagcacttcatggagatgtatcaaaaacacaagtatttcccaaaaaagagtaaaaatagattatttcctgaactacatttaataaataatattttgtaatacagtgttttctggtttttataaaaatatttacttaaataaacttttaaaataaatctaaatagagcagataagtaatgaatatgcaatttaatttatggaccatctgaataaaaatttcggcatttttttctgaattcagacattaaatgatactgaatatattcaaatgagttcaaatatcactgcaataacactcaagtggttataaatctcattcttttcatttaaaaacagcgctcagtgttaggtagtaagtcaatccaatttcagtataaattaatgacttcataatctctaaggtatttgatttttctaccagagagaaatgtgacaatattgaatacaaattgttttttgtattggttttcttatgtgcacaattcaaagtgaccctgacagaatgctgttacacttgaatgcagggttgggcccatgccacaactctactgcctattttacagcaaactcctttgggggccctgtccctgattctgtgtgagtcttaataataccagagagttcttttccaatcaaatatattaaaaatcaactggcttgagggttataaataattacaatgggatagtaatattaggagcagagataaattattatccttacctaaaaattatgtgtattatttcctgcattagcactctttagtccagtgcttctggacttattttcgaggcatggtgtacttactaggccatgcctggcccaaagaacttgtttgggtctatggcctccccactttccactgtgttgccccgagtgctgagggtataaatatcttggcaactctgttatgtattgttactccagtgtgccaaggtccattgttgggaaactgaggtaactcagaagtaggtaaatttgacctctccatcgtataatattttggaattggcccaacatagcttacaatcggacagtgattggtcctttctgggtctgacatgagatttattttctttttaactagagtaagcatatctgttttgtttgattctcatcttcttaggtaagtttaaattaacctttgttcatctttctagagttttaaataattaaaaagtcagtgcagagagtgaaaacaacatggcatttggaatcaagtacatccaggtttgagtcatgcctgaattccaatcccaactctgctacttactatatgatgttgagcaagtttcttaacttctctgatcttcagtttcttaatgggtaaaacttggataataccacctacttgcagggttgtggtgagaattggggatataaacatgcaatgcctaggacaatgcctaggatgtagaagatgctcaataaagatagttatcattattatttaaaagttaaagctgagatggtgttttaatttccaccacattgtgaacaattgatagttatcattatttcaaataaacattcttttacaaaatattttcttcccagtgcaaaactaaggaaccattgtatctatc

SEQ ID NO: 435335 - DNA, 546 bp, Homo Sapiens
  misc_feature (169)..(169): n is a, c, g, or t
atgaacctcccacgacagcctctggagtgtcccctccactttctttctttaggggcccctcagggacatgtcagaggcctgagactacttgggggatgtctatgggccaggcaggctgccagcagctgagctgtccttgccctggggctcctctgcagtcagggagacnaccaggcatgggcctggcttggatgcatcagtacttgactgcaaagacttaaaccacagacaggaaaggcgctgctgcagtctcgacggtcaaatgcagggccccctcagctgccatcccactgaggggcgaaggcccatcatctcccttcggctcggtaactgcctggcgtagcacaagggttctctttaaatccccagcaaatggagctgagtggaaattccgccccatattaccaggcacacgtctccttccactcctcactataccctgctgagaaccctggtctgcacttctgacctggggctctggctgtgcggttctgctgagctcatccgagagtccacgcgtgcatggcggagacctgagtcagcgcc

SEQ ID NO: 435336 - DNA, 730 bp, Homo Sapiens
ataaaatctacactgcatacgcacaaatgcagtttcaaaaatgaatccgtgaaatttttctaccataacaagaatttctctagctcttcatagctgtgaaaagagcattggtactgccctggtgaagctctgaaacatgtggatttaatgttccaagatgatgcaggacaaaagactggcaattcttaaatgcaaactaaaccctggtgagttcttcttgtaaataatctctcctgtctttagaaagagatcttactaatcctctagcaccctgagccttcatctgcacatgacagagaggtaaagtaagggagccagcaggcagattcaaggtgtgcagacagacaatgcaaagtatctcataagccacatcctgccttagagcgtgaaccgtaagaaggggaactgccccatcaggctgcttgggtatctcgagagctagaaatcaccagatagatgccagctctgtacttcacttcagactatgtaaaccttggggccttgtaggagtcatgttttatctgtataagaagagattataattaaaatttgtcagggttaagtagattcttcagcaatatcattccttactggaaaaaggcccaacaagcacccatggcgccattaaggagcatgagaccggggtgtaagaagaaagcagctgtgtttatcttcatgcttgagtgtatcttgctaaccacgagcaaaggagagatttgttccttagccc

SEQ ID NO: 435337 - DNA, 675 bp, Homo Sapiens
caataacatgcatcttaagacaacacataggaatcttacatcctgtgatttttaaaagctttttctctccagaaaaactctactgtctagttcaaattcataaatatcaaatccattttaagtccttacatgtaaaattagaacaatttaagttttaagacatttaagctaatttcccaataatttaaccctatctttcattgactggcatgtctgttcttgggttaaactctgatcaaatccttttgtcaaataccaacacgcagacacatacctcttccagctgtcccgaagaaactggattatcttcataagcaggaaactgacaacctgctttgcaaccacaaaaattattaatttcttcctcgcattgtgccattattttacaatttgcttctgagctttctaaatctatttccagggattcattcatgctacattccaaacactgattttgctttcctactgaaagaatcccagttgattcctcctgggaatccagtgatgtctgagcactcttttccatcccagatttttttaacctgggaaggaattttccagactcaagctctgattttccatagtaatggccttctttctctgcatcttcttccaaaggtttgagatctgcctgcggatcttcaaatatatcaactgagaaggaatgggaatatt

SEQ ID NO: 435338 - DNA, 2756 bp, Homo Sapiens
  misc_feature (43)..(44): n is a, c, g, or t
  misc_feature (2631)..(2689): n is a, c, g, or t
gacacagttctggattttatccacagtcatacaatcacaactnntatatatatatatttgtatttatatacctttaaattacacaatcatgtacaaaacaggtgcattgctgagaccacagcacttctcggagtttcacaagtgtcggaactaatggagtcaggaagcctagggcggcagacggcgggcggtggggcagccctggttccttgcagaaccaggccgcagaatggtggttaactggggacaaaacacattactcgccgagccccaccagggcgggcccgtgcagcatcgtgggtgcaggcaggggctacaggaggaggccgtgggcatggcaaggggcgtggcccccacactcggtgttgagtgccctgacaccagcactggcaggtagggctgggccctggagctcagggggacttccaggtaggagaccctcccgctctggggccctgaggacctggggactgagagagtggtcccaaacagggccctggaggtggctgctcaggacggagggggtttcgagtccctgccctggagtgggcagctagagtgctaagagggacaggctggagtccagctggggctgcagcccctcccaggtgctgggaagccgctggcacagagagggggagcccaggccccaaggtgcagattgccagcttcccacctttccaaggtaagcgatgagggacagaggcccccaaccccaactcctgcctggggaaaggctggagagagaggcttctgcactggagctgggaggactgcaggcttccaaaagcttgcttcaggctctgaggagcccaggacacacctcaggctgcagccgaagctcggagaccagacagtgataaggaagggggtgctgacggcaggaaggaggtctgcctgtccccggggtgccatcgcccctggccctgagggaggcctgccccagctcaggccctgccagagtgtcaggaccctctgtgcccacatgaagaaggtcagagccttgaggctggggtctactacctcctaacagtgggctgttgggagaagcagcaggagcaaaggaggactgaggggaaacagggctgggctggctctctctctttacctggaggcccaggaggccaggtgtgcaggagggaggagggcatctgcggtccagaggcctagaagtggcatccactgtaagcaagtctcacctggtgctgcaggacttctcagctccttgccccagaggtccccaagagacttttcttccagctccccgccctcatggggttttgtccaaccctggtctgcttcccaagcccccgcaccctctcgtgcggtacctagcactccggcaccactgctttcaccaaccagcaggtgggccctttgctcccacccacccccaaaggtcctttcactctgacccaggtttggagacatggaagggctgccagcagggagaatgttgttctgggggctgtggggacaaggaagaaaaacatgtgactatcttcttcctgagggccaggattcctcctttctgctgaactcagctgcaggctctcccctgatgtctcaggctggaggcacccgtgcggccttcacgggctccccaggcaggccagagaagaggacagaggaatggttaggccaagaggcttgcaggtacaaggcttggcctcatggaggctgatgtggaacccagtgattttatggtttttggatggacatggagggagagtggggggccaggggaacaagatgatctcctccccagcaaatgggagcaggctgctactgttgctggctttgccgtaggtttgggggtccccaccctaggccaggggacttttgagaggggacaggtcctctgcaagttgctgagggggtttggatctgctgaggagccgatgctgaaagtgctgatagctggaaagaagggcctgcgtaacagcgtcttggtccttcagatgggcctggggctgggagggctggcacagcccgggctgagggcctgcatgcccttcattcaccctcctgtaccccagtgacaccatgacttcctccagctcacccctctttcatgtctgggggacccctggaaacctccatgggggaggagggtgaccgttcctcctccagtcccaccggtcccaagggacgtggctaggagtagaagggtgctccccggggcagagtggaaaactaaagatggggaagcctcccttccaggggtctggagaggaggcctttgagagcagggtggtggaggaagggaagcagggcaggggaggaagaagaggttaggaaaccaggccagggaatggggcaggtgccggcagcctggagtggagtgggacggagggagtgaggcggggtggaagggtcaggagacatccatccctcagggctcaggagactctttggtggaacccgaagagcagatgttgtgatgttgggctaagtcctaagactgttacctaccctggggccaccccaagccccagcaccccagcctcccaggtggccctgcaaatgctctgtctctgcatactttgttttgttctgttttgacttttaaaaaaataaaagcttgatcggaaaatatgtctggaactctatggcgaggggaaggagacnnnnnnnnnnnnnnnnnnnnnnnnnnnnnnnnnnnnnnnnnnnnnnnnnnnnnnnnnnncctctagatagcctccacgtagttggcagggtagaggcccagctgcccgctgtccagccgcccacgg

SEQ ID NO: 435339 - DNA, 445 bp, Homo Sapiens
  misc_feature (130)..(130): n is a, c, g, or t
  misc_feature (435)..(435): n is a, c, g, or t
atatatatatttgtatttatatacctttaaattacacaatcatgtacaaaacaggtgcattgctgagaccacagcacttctcggagtttcacaagtgtcggaactaatggagtcaggaagcctagggcgncagacggcgggcggtggggcagccctggttccttgcagaaccagggccgcagaatggtggttaactggggacaaaacacattactcgccgagccccaccagggcggggcccgtggcagcatcgtggggtgcaggcaggggctacaggagggaggccgtgggcatgggcaaggggcgtgggcccaacacttcggtgtttgagtgccctgacaccagcatttggcaggtaggggcttgggccttgggagtttcagggggattttccaggtaggaaaaccctccccttttttgggcccttaggacttngggatttaga

SEQ ID NO: 435340 - DNA, 1195 bp, Homo Sapiens
  misc_feature (29)..(30): n is a, c, g, or t
  misc_feature (446)..(446): n is a, c, g, or t
ccccatgccatgaatggccttgactgggnncctgttaagtctccttatgctagtctcttttcagtcttgaaagtcttagccctgccctctgaagaattaatgtggaacctttcacagctttcacctaggtccatgaggtttaaattgttggagaggcccactgtgatatgattgtaagagtcaccatgccatttttacaaccttgagttataagtttcttgtaggtgcttcactagcctcatgatatgccttgccagaagtagcgcctgagatggagatttgggtgcaggtgatttattgacgatgtgttcttcaggaaaaatactttctattcacatttttagatggcaggatggtggctggcaaagtgttgatggcaaagcaagaaattgttgaatgtgtagcctcagcagctatgatatcgccgggaaaacttcctggagaancacattcccaacggatagctgaagaagctttgggaggtctggacaactcacttttaggggaaaggcatggtttccaggatttcagctgtgtctttaagggctggaggtggatgtctgttgactcttgggatgctctgagacatgttaaatccttccatggcactgctggtccctgtggactagctgggacctgctgccctgggtcatcaaactccctctctaaatcctccaacagggtcacagcttcctcgccgctttctggattatgttgctgaacccagatctgcagctcctcaggcagaatgctcaggaactgctccagtaccagcagttctaagatctgctcctttgtgtgcaactctggcattagccactgatagcaaagttcctggagtcggctcagagcctcccggggcccaggtgtctcctggtagcaaaattttctgaattgctgacgaaacaattcttggcaggattgagtactcccattctgcttaaatttctcatcccaggaaaagttatcttctactttcactagtattagttcttgttccggaggatcctgaggtatcagggttgaaatcactccagattccacagccattcttggctgaaacagcttagcaaaaagctcagtacaactggttctgtgcttgagaaggagtgtgagtaatctcttctttccgcgaagcccaggagcggccaggaaatgagccacccaccccgagctgcaagccacaaagaccccc

SEQ ID NO: 435341 - DNA, 1084 bp, Homo Sapiens
acccaccggaaaagagggtgatcgccagaggcttccctttgcacttgtctgagcccgaagtcccggagattcgcaaggaattagaacccgaagaatttacagaacaggaccaatttagaaagaatccccaaggacccccaccaagggggcgcccaaggcccgcgcgcacccccaaggtgagagattggtaatctggagcccctgaacagaggagaaatttcagagacttatcttataatcaggctttgaaattttcttctgcgcggcacatgtagtagaagcctggcttattttgaatcgccgaccgcccctcttattaagagatatttaaatctcaaaccagccaaacgagtaatcaaaatattatacccccaaaaagaaatactaacaagaatcaagacggaccaactgaatgaattgtaccaccgttgaaatattaacactctactgttagaaggttagccaaatatggaagtggtccaataaatcgattcgactctatacattcttcttgagttccattcttcccaacatccccatcacaactacgatttgtaaagatttatccccctcccccaaaccatgcccccagcaagactccaatagatacctgagaattaacttcctcctgtattggtgagaatggagtgtttgtcttcttgtccttcagcaacataaaatactgcaatcttgtgtgtctctcggcactgccttgaatccaagttcctaagttctctaagtagcttttcatttttcttcaggagatgaaagctcctccgtttgtcccaggagttcattcccatatactaagaagcaatctgcaataataaaatgctgactgaggtttttgaggtattggttcatcttgttccacagctttcatgtttaagtcattaaagtgcttctcaacaaattctttttcttctgtatgttgcttaaggatagcattaataacatcattttcttgtttttcagaaatgcacacaggttgtggagcaggaatattaagtgagattccagttctctgtaagcattcaggactagtaacacccaaatactgcaagagctcatcaagaacatcttc

SEQ ID NO: 435342 - DNA, 1119 bp, Homo Sapiens
agcggagtctgtaatgcagacgggataggggtgtgtgtgtgaggggagggggcctgtatggcaactgctcttgccccagcgtccccaaaagtgcagaggcagcggctgcagcatccagccagcttggatgtctggcctgtgagcctggggaaactattattaataatatttactgttgataatattggggaaaacagcccttaactctgaggtttctgctgtgctcctgtccaaaacagacttccaggactctgaagaaacagttacaagcaggatgcttttcccaacctctgcgcaagaatcttcccgtggcctcccagatgcaaatgacttgtgccttggcctgcagtccctcagtctgacaggctgggaccgaccctggagcacccaggactcagattcctcagcccagagcagcacacactcggtactgagcatgctccataacccactgggaaatgtcctaggaaaaccccccttgagcttcctgcctctggatccccttgggtctgacttggtggacaagtttccagcaccctcagttagaggatcacgccttggacacccggcccatcctggactctcgatctagcagcccctctgactcagacaccagtggcttcagctctggatcagatcatctctcagatttgatttcaagccttcgcattttctccacctcttgcccttcctgtctctgtcaggggggtggttccagagaccctttaaagatgggggtaagggtctcgggatggaccaagagcaaagccggctcttgcttgcaagtcacctccctccacaagcagtgcttcaagagatggccaggagctactgtgtggccatcctgggaactcttcgaaggtccaaagacccgttagcattgagagaagagggccatagtgttgtgacgaaatagactgcaatgctggtgaacttgaagcgccacccggttgctgcggagtggccaactttctcccccggtacttatagacaccccactaatactgtaagggggttcttaggaggggtgtcctgtggattataccgcaaaagggaagtacagtactgtccggagtaggggcctcgagtggagaggcgcggaaagatgagcaaactccg

SEQ ID NO: 435343 - DNA, 1164 bp, Homo Sapiens
  misc_feature (814)..(929): n is a, c, g, or t
ttattattttatgctcttttcttttttcattggcaattttattttttaaaaatgaaatattcaaagtacttttctttcaaatatcaacacataatgtttaactttaaatatttacagcatgttgttgtgatgctcttgtagaaaaatgcatgcttctggcctgaaagccagagcaaaatgcaaaagaccatttaactgcagccagagaacatgaacctgtacagtatccagtcacttttcagcacaggagagcaggaatacaaaattggaacctattgtttcctagcaacatggctcagaccattataacacaattttcaatatgattagaacctctacctgttgttatacagaaactgaaaacttggcatacactgtaaacatctttacttttcatgagaaagtaagcagctaaaaagaatgtttttctgacataaaggctatacttctctttttcgccttctttcttactgatgcttttgccagaagaatagtaaagatttagacgttgtcatgattcatacaagtaaaatatttttcaaggacacaatctgatatactaacatttatttaagaggttaaagtccaccactaaatctaaggaaagatttttaactgccaaacacatttcctttgacaaataatgtaagatgacaactgccaagacaaaatccacagcaagtttaactctaagtattttcagttactgtttagaaagtaatttcttcttgtgaacagtagtatatttggtccttaatagctttcacatgaaggacacactgaaaataatagtcactatttatggttgaattcnnnnnnnnnnnnnnnnnnnnnnnnnnnnnnnnnnnnnnnnnnnnnnnnnnnnnnnnnnnnnnnnnnnnnnnnnnnnnnnnnnnnnnnnnnnnnnnnnnnnnnnnnnnnnnnnnnnncagaagaaagaacctttatagaaggctgtggaagagctgaagtactagtcaggtcagctatgtgtatgtgaatttcttcaagaaaacaggaatgttccattccatctgtagccttatgtctttccacatagctatatataatatgctccaatgtctccaaaattttcttttcaatacttcgttactgtacttttgccgctctcgacgaattcgagctcggccgatttggcctgat

SEQ ID NO: 435344 - DNA, 474 bp, Homo Sapiens
  misc_feature (361)..(361): n is a, c, g, or t
  misc_feature (399)..(399): n is a, c, g, or t
  misc_feature (452)..(452): n is a, c, g, or t
cattggcaattttattttttaaaaatgaaatattcaaagtgcttttctttcaaatatcaacacataatgtttaactttaaatatttacagcatgttgttgtgatgctcttgtagaaaaatgcatgcttctggcctgaaagccagagcaaaatgcaaaagaccatttaactgcagccagaggaacatggaacctgtacagtatccagtcacttttcagcacaggagaggcagggattacaaatttgggaacctattgtttcctaggcaacatgggctcaggaccatttttaacacatttttcaatatggattaggaacctcttacctgttggttattacaggaaactggaaaacttggggcnttacactggtaaaacctcttttactttttcctgggggnaggttgggcgggcttaaaaagggttgttttttttctggaccttaggggctttnccttccctttttcggccttctt

SEQ ID NO: 435345 - DNA, 333 bp, Homo Sapiens
aatgattaatttgatattctttagtgaacttgtttaattcctcagtgggtgtgacatatttcatgggaatattcaaatatctatggtaatattttgaccctttatatttgttctaaaataagtcaaaatgtgaaaataatattaaatctaagatattttgaactaagcatctttatatgcttgtgtaacaggaacaaagtaacagcctttcaattcatatactgccttgtgttcagtgaacccaagaaatgtaataaatatttgtaattttacacaaatatttaagaggaaagagtattaagagcaattcaaaaaaagtaaccttatactact

SEQ ID NO: 435346 - DNA, 390 bp, Homo Sapiens
agtaatattattgttatgcttgtattcttgcatttcagggtaagtaacccctgaagaaatcttattttagtatagctacagctgcagtagcttttaagtatgtatcaacatttcattataaattatagcttcctggttctgtgtctcagctgtttcagaactttcagccaagttaaatcttttttggtgttgaaacttttagtaagttgagtaagctatttttttccctacggtaatccacaatctgttctttgtgtgggttgacacctatttataattcttaaaataagggtagctcaaaggagccaagtacagtagtttagcttgctactgttgagcatgaatagcagtaggttgttttcattaatgcagttttcataatgtctccca

SEQ ID NO: 435347 - DNA, 1043 bp, Homo Sapiens
  misc_feature (11)..(11): n is a, c, g, or t
  misc_feature (28)..(28): n is a, c, g, or t
  misc_feature (69)..(69): n is a, c, g, or t
  misc_feature (83)..(83): n is a, c, g, or t
  misc_feature (110)..(111): n is a, c, g, or t
  misc_feature (125)..(125): n is a, c, g, or t
  misc_feature (141)..(141): n is a, c, g, or t
  misc_feature (151)..(151): n is a, c, g, or t
  misc_feature (168)..(168): n is a, c, g, or t
  misc_feature (186)..(186): n is a, c, g, or t
  misc_feature (190)..(190): n is a, c, g, or t
tcattaatatntgtgagcccacttgtanctttgtggggaagaagctgattgagtgaaggcagtggatgncccaggggagtacncagatgaggagtaatcgagaagtgggnnatgagatgttgtantgataccaggaggagnggaggacccnaagcttgaggagagagntggtgggggtggatttgntgtnggggcagacccatcaggggaagggccgaaggaggacgattgaagtagggcagcacactggggggcttatccacacgagcagatgagggtacaaggttctcagagggtgtggcccgtccatcagcagaatcactagaatctcgggaatgggcccgtggaggtattccccctcttgggactcggacacactcacgtttccgagcctgtgcctcaaactgtgacaggttctgccgggtggccggcctcacgtccactttttctccattaagaactttccctggtaggagttccaacaatttgtggacagagttttcagaggctaccaccacctcagcataccctttggactggccatttgctcgattctctgcaaatttcaactccaccacatcatagactcctatagagcgaataacctggatcagctgctggtctgtggtccaccaggagaagctgcccacataaacggcagctcgtctattacgcaggccactgtaggtatacagaattgcaggggtcttgttgttgggcttgggagatggctcctggcgaacaggaggaggtggttcagtgctgctgcttctgtcatctgagggctgtgaggtggctgtcagcacatcatcatacaggtcaatctgatctgtattgttgaactctgggtcctggttgaactcctcgtcagcatatatatcaatcaagtccactccttctgacatggctccggaaggaagatcgcgagtccggaggatggacaaagtaaggaagatgccacgggaatatggcggcggcggcggcgagtccggactaggcccgaagcgcgcgaaccatgcaaggaattccggaccggtaccagc

SEQ ID NO: 435348 - DNA, 1168 bp, Homo Sapiens
tgcacctggaatgcgctctggttcgctgcatgatatcgtcaaatgcggcttcactcacggtagaggttggagggcccgaagctcggcggccatggtggttatatgggggcagaggccttaatgtaagtatctggtggaggccccactgtagcgtttggtggggggaagaaggctggattgaggtgaagggcaggtgggatgtccccagggggtggtacagcaagatgaggggtattcgaggaggtgggggcatgagatgctggtcgtggataccaggaggaggaggagggaccccaaagcttgaggagagaggtggtgggggtggaattggtggtgggggcagacccatcaggggaagggccgaaggaggacgattgaagtagggcagcacactggggggcttatccacacgagcagatgagggtacaaggttctcagagggtgtggcccgtccatcagcagaatcactagaatctcgggaatgggcccgtggaggtattcgtttccgagcctgtgcctcaaactgtgacaggttctgccgggtggccggcctcacgtccactttttctccattaagaactttccctggtaggagttccaacaatttgtggacagagttttcagaggctaccaccacctcagcataccctttggactggccatttgctcgattctctgcaaatttcaactccaccacatcatagactcctatagagcgaataacctggatcagctgctggtctgtggtccaccaggagaagctgcccacataaacggcagctcgtctattacgcaggccactgtaggtatacagaattgcaggggtcttgttgttgggcttgggagatggctcctggcgaacaggaggaggtggttcagtgctgctgcttctgtcatctgagggctgtgaggtggctgtcagcacatcatcatacaggtcaatctgatctgtattgttgaactctgggtcctggttgaactcctcgtcagcatatatatcaatcaagtccactccttctgacatggctccggaaggaagatcgcgagtccggaggatggacaaagtaaggaagatgccacgggaatatggcggcggcggcggcgagtccggactaggcccgaagcgcgcgaaccgctctccgccccaggtcccgcccccccgccgccg

SEQ ID NO: 435349 - DNA, 824 bp, Homo Sapiens
tttcgagaaggttgggggcacgaaaattgctggtatggggatccccggacgggaggaggaagggacccccaaagcctaaaggagaagagttggtgggggtggaattggtggggggggcaagacccattcaggggaagggccgaaggaggacgattaaagtagggcagcacactggggggcttatccacaggagcagatgagggtacaaggttctcagagggtgtggcccgtccatcagcagaatcactagattctcgggaatgggcccgtggaggtattcgtttccgagcctgtgcctcaaactgtgacaggttctgccgggtggccggcctcacgtccactttttctccattaagaactttccctggtaggagttccaacaatttgtggacagagttttcagaggctaccaccacctcagcatacccaggagaagctgcccacataaacggcagctcgtctattacgcaggccactgtaggtatacagaattgcaggggtcttgttgttgggcttgggagatggctcctggcgaacaggaggaggtggttcagtgctgctgcttctgtcatctgagggctgtgaggtggctgtcagcacatcattatacaggtcaatctgatctgtattgttgaactctgggtcctggttgaactcctcgtcagcatatatatcaatcaagtccactccttctgacatggccccggaaggaagatcgcgagtccggaggatggacaaagtaaggaagatgccacgggaatatggcggcggcggcggcgagtccggactaggcccgaagcgcgcgaaccgctctccgccccccc

SEQ ID NO: 435350 - DNA, 679 bp, Homo Sapiens
tgggtgatgagtatactaggccttcagacctcggttcttgtaagggtcgaaggtgaggggtctgggatcctggactcgtataaccctgggataagagagggtttgggggccccaatcgccctgatcttggactcgatgctttgagggaggaggatgtctgggacctgaatttctgggtcccgggagaacagaagtgggtgtcatacctaggatgtggctgctgcgagtctgtcccttcctcacagagatggcccacggaggacccaggttcggacccctcggcttgggggtccgccctggatccctgtctcggctctgggggcatgtactggtggtatgtcaagttccccctgggcttggactccctccaacgttgggagatcttgggagactccttctttggggacctccaaggaggacaatattctggctcggggagcaggaccccagggctgaagaggaaaggggccgtgcccgagggcaaggccggggccagaggagggtctgaggctgagatccacgggtccggatccgagactggagagacggtgaaggaccctgagaggcctgcaggcagcaagccaggccgggaggagcaaggctgtgtggaaagcggggcccagggtgccggagggcaggccagggagcaagacttgattgctgggagatggcgcctgac

SEQ ID NO: 435351 - DNA, 441 bp, Homo Sapiens
  misc_feature (430)..(430): n is a, c, g, or t
atgtgttgtcgtgcaggtagagtatagttctatgcatttcacagcacagaaaacccttctttcagagggcatgcaagttgccggagattacacccccaagtctggtgctcttgtgatgagcaacttactggcaaacacatctcccagtgttgtaagcaggcaaatacattgagcacattttgctgtaattccatctatttgcaatgcctgcacagtgtctgtctctggctgttaacttactcattcttgacagaactctggctttattgattgcacttttttaaaaatgccaaaggattttttcacacttgttaggcttgaccgccaccactaggggtattaaggggcaagtgttctctatggccttactgggcaaacacattctcccagtgttgtaaggcagggcaaattactttgaggcacatttggncgtaattcctt

SEQ ID NO: 435352 - DNA, 1462 bp, Homo Sapiens
attgtttgaaaaatagtttgtagaccattttatttaaatatatgaacaaccaatgggctactgcaatccaagtaaactcttcacattttagaacctttgtgaagtatagtaagataaagtaagactgttggtctttggcagattcctcctgccccccagacagggacatagatatacagataaatgtttatatagttaaagagcggaggcccaggtgaaaattccccaccccaagctggctccccaacccaaaaattaccattggcccctgagaacacccaaagaccaccctcccagatttcacacaatatcaattgcaggaacagtcgtgcatggcaaagtatagttctatgcatttcacagcacagaaaacccttctttcagagggcatgcaagttgccggagattacacccccaagtctggtgctcttgtgatgagcaacttactggcaaacacatctcccagtgttgtaagcaggcaaatacattgagcacattttgctgtaattccatctatttgcaatgcctgcacagtgtctgtctctggctgttaacttactcattcttgacagaactctgctttattgattgcacttttttaaaaatgccaaaggcattttcacacttgttagcttgaccgccaccactagggtataagagcaagtgttctctatgccttacttgctacagtctcctccttctttggagaggattccccgtaatggtaacggtgatgggggaggctggtgccaacgacacaaatacatttctgtggtggaaaggtacggcaaatcttctatctcacttgagaaggctttctccttgggatgggtgctgggtcccttttggggagtggagagtcttggtggggtgtccactgaagaccggggcttttctggggtttcttggctcctcaattcacgtttacaaacagtttcagataaggaaccacagggttcctctttaataggagagtgcttaggagtttttgttttgacttttgaaaattcaggagccagctttttaacaggagtctttctttctgtacttccaaatggggatttccttttatgtccctttccactccgcccacatgagaagggcttgggaggcagagtctgggatgtctcggaaagctccggctggcactccagtttaattttctcagatagctctgtttcctctctctcttcagtttcatagccctgaaacagcttgtgcctttctttctcgttatccttctttaccagctgcatccgcctttccatacgttcaatccgagcaaggagcgtgtctctctctgacttcagctcctcgatctccttttccttggccctgagctgctgctgctgctgttcgatgaggtccaattgcagcagaaggatctgtttgaggcaggcggcctgactggaggctcccgagccgccaccacccccgagagggctcttcctcatattcttcc

SEQ ID NO: 435353 - DNA, 308 bp, Homo Sapiens
  misc_feature (273)..(273): n is a, c, g, or t
  misc_feature (277)..(277): n is a, c, g, or t
  misc_feature (282)..(282): n is a, c, g, or t
tgggcacatcctgtggtaagtgggactgtgtatgtgggctcaggctggactcagcagcccttctggataccaagcactgcaaggtctggcccactggtgaatttgcccgtgcactgtgtatctatgagtgcctgcagagatgacaattaaagggtacgggttcatgtctatgtcaccgtctgggaaaatgctccaggagtgtacacatttcaggctcattgtatggatgtacctccaaactcttctctggatgggtgggccagcttgcatgcntgtnccggnctctgcccagcgaggtcagggccagg

SEQ ID NO: 435354 - DNA, 1999 bp, Homo Sapiens
  misc_feature (304)..(312): n is a, c, g, or t
agcggtgtagacatattttcatttctttattagaaagaggtctctacaccatagccacctctctctgttactttacacatctttctttttctttttcccttagaatactgtacagcggacacaaaaaaatcccaaggcaggaaaatacaaactggcatatttaatcaaaacaagatcatatgaaataacaagcaaagtgaaatgtctgtcaatggttttaattacagtacaaacaatataaataaagcatcattgagtcattgtgaaacataaagttgctgaatgaggtaatagaaaacatccnnnnnnnnntcctaaacccatctgtggatacacccacgctgcccttccatctctatacactgctatttacagaaacagaaaactggctgcaaggtgggttggccttccctgcccctgcctagaaatgcatctcagttgtcacctttgagctgctccggctgccctttaggaaacgcacccctgtggcaagatgagaaccaaattccaagctggcagaagggaagagccagtgcaggagacctgcccccgggacccgtgcgaccctcccctctccaggctgagctcaataagggcctccccagcgctcaggtgctcggggctgagaggggctgcagtctggagaattagatgtatttcagacacaaaaacccagccgtgggagggaaactgatgcttttcaagtctgcaagaaggaattatttctaacgttacagtgctggtccctctccccccgttcttaacgccacgaagcagcttctaaatgcacactttgccacccaccatgcaactgccccacccctctccagccacctgtgtaccctcaaaacagccatgctgagagccctgctgggacccttggggctgggttgggatgggggaggtccctcgtgccaacctgagcagtgcgtgagacccactccccagaccagcccctggctcactcccaacacccttggagccttctctgttctcctaccctgagaacccaggcaggaaatgcatttgcccagggacctccaggaatgtcaggggacaccccagggctgtggtattgggcagggggctgggctgcttccagtgtctgcatgaggcccattaggattccatgcacctggactgtccttcctcaagtccaaaggcccctgacatcctcatgcccagctgctgaccgagtgggcttccagtgtcttctgtttaccaaagctctccaagcggctcagacgttagcttcctgggccagtgtagactgttcagcaccagggagatgagggtttaattggatttaggggcagctgttcccaacagctggtgtgttaagggggtttgctccactgggaagattccccaacacactcatgccttgtttggttcctttctttcacctgcatctcaaggcaaaggccatgcaatccccccacggggcattctagatcagtccgatgtggacttcgacaaggagtctctatcatatggtttcaccatcctcaggttgggggagtgctccctacaggtaccctgtgccaggccaaaatgaaaaccaagcccttgagccagcctctcctcacattcatgaggaatatcctgtttggggcacatggagcggctgcccagcttgggcgtcccaaggtcggatgccacagctgcctgctggtctcacctagcagccttaggcctgagctctggggctttcagagcccatgcaagtctctgctggccactctggccccatctgcccacctccaggccctgaggcccatctgtagagggtgaggacctcagacaagaacagttctacccaacaggtgcaaaaccccaaaccaagtgctgtcattttacaccaaaaccagcatctcatggtgaaagacagtaagaatgggttttcagatttaggtttgcttaccgctgctctggggtgggtgtttactacactggtgaacttaaatactttctcatacaactcaaagatttaaaaaag

SEQ ID NO: 435355 - DNA, 368 bp, Homo Sapiens
aattggttttggcccccttcccccaaatgcaaacttctttttattggaaaaaataaacccctttttaaaaaagtagactgaaagaggaaacacatttcaatcccagcatccgctctatcatttcattgctactctctgcctttgctacaatttttcatcagaagctcctagggaaaaaaatttacctaggcagatcagtattactctgttttacagaacattgaaaatggtttgctctcactttagtaatttatattcaagctggtaacatcctcaattttatcagcggagtataatataattgccacaatttcctaagtcactggacaaacataaagctctactgtttttgctgatcaatgaatatg

SEQ ID NO: 435356 - DNA, 410 bp, Homo Sapiens
  misc_feature (338)..(338): n is a, c, g, or t
cttggttttctgaaggaaacttcaatctgtaatggccattcagaaatgcccttggcatggcagtctgtgtgatggcatttaagacctgtgaaatccttgagcccaacttgatttaatcaacactgataaccaccacctttatcctttaaagtctgctttatctgtattttaaaaaatgaaaaaccctcaagtgtaagagccagctccctatctactcacataaaggagaagcgtattaatgaataaacctcccaaatgtctcatcattaatataaaaaggcatccaaaaatcacctaccatctaaggaaaatgtgaagcatgacaagaaagttttttnactgacgctgaagaaaacataattgaggaaccagaagaaaacaggagtgagggttgaaagatggaattatta

SEQ ID NO: 435357 - DNA, 575 bp, Homo Sapiens
  misc_feature (46)..(46): n is a, c, g, or t
  misc_feature (49)..(49): n is a, c, g, or t
  misc_feature (52)..(52): n is a, c, g, or t
  misc_feature (71)..(71): n is a, c, g, or t
cagtgttccaaatgcaaccctcaactgggtgggtcagactgccatnagncgntgtggctgtgtggaggganaggtcccggacctgtggcaaactggctggctcctgccaggaggctaccaaaagccaaggctctttaacatattgaggttcctcagctgcccccagtgcctatatctctaacaacagtaaacagtgaaatacctgcaggcaaccatgtctaaataaagagataaatatttgaatcttcaagaagtggccaacttcagaaaggcatctcttggcaccctagaggagactgggatgaaagttgtaccggagactggagaagagcccgatgtgtttcacgaggttcggctccactacataggccctctctcccttggccctcaacagcgagtacagtgccatgtccttgccaaagcccttgtggcagtacacttgggacaggtaggtgagggtccggcgggccgcaggtgccgggaagagcatggctggggtgcaacactgagaggcaggaaccacactgtacagggaaggactcagccgccgcagttccaggaaatagtgccgaccc

SEQ ID NO: 435358 - DNA, 929 bp, Homo Sapiens
agtatgtcacatttacgcagcgccaggaccgtttgatcagaagatgtttatggcgaggcatagatctgtgaaccaccagactggctggaactcaggcttgtgtacagacgctgctgaagggttggttacctctgttaaatttactgttcttgtataatagtctttcaggtagaggttccaacttcatccacagcctgagctggctcaatcttttatctctttctgatcctctccttctttaagggaaagtccggcaagggtactgatggatgcaccagctcgtggtcgctgaagcctggttccaagaccatatttgtccgaaaaagccagaggcatatagtttctacgtcgtgccagtttcttgcgatctcgctcaaccttctctttctgagcaagctgctggtaatattcaatcaatttgttcatccgttgtgtgtgaggattttcaggttcctgccaaccgccactagctacagatttgtctgccatgcccacatctctagacgtccagcgacaaaatccacatgccaggtaataggctttcttcatggtggtcttggctgggtcatctggaagctgtgtggagatgctcgtggcccgagtagagagggtgtgcatgcagccaggacagtcaaaacaattggcacatctattcttttttagtttggcttcagccgatggcatattttctaaacaactgggacaataatgggagtccacctcgtgagacacacattccagcgaccgcagttcgctacaatagcggcagaagtagagttgcgagagcggggcccgaaccttcttttctccctggactagatagagaacccggtccgactgcagcaaggacgccatcttggggagggaggaggcgatgacgctcccggcgcatcacgtgacccgagagccagcgtcttcctcgctccgct

SEQ ID NO: 435359 - DNA, 1071 bp, Homo Sapiens
cacgcccacccaccatggcgatgccccactctgagccccgactcctcatcccaggaggccctgtcggcccccacctgctccccaacctctgactccgagaacctcagccccgatgagctggagctgctggccaagctcgaagagcagaaccggctcctggaggccgactccaagtccatgcgctccatgaatggctcgcggcggaacagtggctcctcgctagtgtccagctcctcggcctcctccaacctgagccacctggaggaggacacgtggatcctgtggggccggatcgccaacgagtgggaggagtggcggcgcaggaaggagaagctgctcaaggagctgatccgcaagggcatcccccaccacttccgggccatcgtgtggcagcttctgtgcagcgccacggacatgcccgtcaagaaccagtactccgagctgctcaagatgtcctcgccgtgcgagaagctgatccgcagggacatcgcccgcacctacccggaacacgagttcttcaagggccaggacagcctgggccaggaggtcctcttcaacgtcatgaaggcatactcgctggtagaccgggaggtgggctactgccagggaagcgccttcatcgtgggcctgctcctcatgcagatgcctgaggaggaggccttctgtgtgttcgtgcggctgatgcaggagtaccggctgcgggagctctttcaaacccagcatggccgagctcgggctctgcatctatcagttcgagtacatgctgcaggagcagctcccagacctcaacacccacttccgttcccaaagcttccacacatccatgtatgcctcgtcctggttcctcacactgttcctgaccaccttcccactccccgtcgccacccgggtctttgacatcttcatgtatgaggggctggagatcgtgttccgagtgggcctcgccctgctgcaggtgaaccaggcggagctgatgcagctggacatggaggggatgtcccagtacttccagagagtgatcccccaccagttcgacagctgcccggacaagctggtcctcaaagcctacca

SEQ ID NO: 435360 - DNA, 1043 bp, Homo Sapiens
cttttgtggaaacccggaaaaatgggtgtgtttaaagtttctggggaagtttgtttccctgccaagcaaggtacctcggaaacttgattaggattgccggaagccccgagtttcgggcccatgggtggggtttggaagaggttcccgcccaacccggtacttcctggcatcaagccggccggaaccccccccggagaggcctccttccttcaggccttctgcatgaggagcagggccccacgatgaagggcgctttccctggcagtagccccacctccccggtttaccagcgagtatgccttcatgacgttgaagaggacctcctggcccaggctgtcctggcccttgaagaactcgtgttccgggtaggtgcgggcgatgtccctgcggatcagcttctcgcacggcgaggacatcttgagcagctcggagtactggttcttgacgggcatgtccgtggcgctgcacagaagctgccacacgatggcccggaagtggtgggggatgcccttgcggatcagctccttgagcagcttctccttcctgcgccgccactcctcccactcgttggcgatccggccccacaggatccacgtgtcctcctccaggtggctcaggttggaggaggccgaggagctggacactagcgaggagccactgttccgccgcgagccattcatggagcgcatggacttggagtcggcctccaggagccggttctgctcttcgagcttggccagcagctccagctcatcggggctgaggttctcggagtcagaggttggggagcaggtgggggccgacagggcctcctgggatgaggagtcggggctcagagtggggctcgccatggtgggtgggcttgttagccgtgagcggggttggttcacagctctgtctgcgccgagcgcgccgccatctccgtgccgagcctcgccgccccgggctgagccgccggatcctagccgcgccgttcgccccgcagccccggcccggccccctcagccgccccccgatcccagggaattccggaccggtccagc

SEQ ID NO: 435361 - DNA, 1302 bp, Homo Sapiens
  misc_feature (1218)..(1254): n is a, c, g, or t
ttacttctcccatttttcaatgggaaggtaagaaaaaatccctttatttaaaaccatgaaaaataatctgaatatattcaagctattggtcttagtctctattgctcatttattaacaaatgcatatataaaataactagtaaccacaacactggacattttgagtcatgcattagaatgttcgtactctaaaaccagagttaaggtcctgtcactattgcttgcactttcaatcagacccagtttgagtttaataagcatgcaaaataaattccttgattcagaggaattacgggacataacaaggatccatgcaagtttcaactcaaaagttgggttaataattgcttagaaatgcaggtagaagctccacatctatcacaatgctgcttcagaaaagggataggagtcatacacaaaaatgttaaaattaggaccactagtcagttttaaaaggcttatatgcaaatcctggtccatctgagtagagaatgatgtacaaactctgggaaaagaaagagaattgagggatgtagagtcttaaggagctgttaattttcttcgtgatttactgacaactataacaggagagcataggtggtttagggggatggttaagatgctcttaggcagaatggtttcttttctgattcatgctaatgagcattacctgcatagctccctggggaaaaaaatgataacgagcagggctaatacaatgtaaactcaagctatcaataccctgaaatttagcacagccctctgctttttaaaactgttcaccaagggatccttccaaataggatataattaatagccaagcaatgttcattaataaactaaagcaatctgcttgaaccaacagcaccatgagaatgtaaactcctggaggccaagagtcttcatctttttgcatatcacagatacaagaagagtaaacatgagaccacagtaactttgaaaagtaattaactgtatactttcaagactatgaaaaactcgtagtatattttagcatttagacgtattaacatggctgttaagggtaatctttaattgttccaagtaactgaactgctgacatcattgtactatgtagcgctgtccccagatagtgcagatgtctgaatattgcttggttattcccatgtctctaagaccaactgacagcataggaccgctctcgacgaattcgagctcggccgatttggcctgatnnnnnnnnnnnnnnnnnnnnnnnnnnnnnnnnnnnnncgccgccaccgcgtaagctccaggtcgccctatagtagtcgtatacat

SEQ ID NO: 435362 - DNA, 1389 bp, Homo Sapiens
ggttggtttaactattagaactttgacttagatttattttcatctcatcttttttaaatttctatttttgtgtatgttttataatgtacataatattttagtacagtagtacatgtatataatttacaaataaataattatacaattaaggaagtgaactaaacatttttttactgatgggaggcacaacccatgctcaggaagcacatctgtccacagctgccagagctcctggctctgctctccactcacccgccctcgggaagtgaagggtgggacactgaccccgaaactcacagaacttttgaggcagcatggggaaagtacagagagctcttttgtggtgccacatggcgttttcaatttcatttaagtgaacatttacttcctctgagcaaaacgaaggggccagatggtttgggtctaaaacacacttcagctgatccaacttaaataatctgaatttaaatcactacatctctccacatactcaatagccccttgcctcaaatgtgagtgggcctgtaaagttagatacttagttgcaagcctggcttattttattaactaagtgtgttaccactgacgccaaattcctggccaaactacagtaatctatttaaacaatagagaggattcgctcttcatagccacactgaatgtgccatcacccccacccacttgtcagttggagaaatgcagggcttaaaggtgctagctaatccgtgatcgtcaagtggcaaatttctccactcttcccagatgtggccttggctaagcctttctgattcactagacaaatgaaagaaatagcgacagaaaaacaatcaataacttgtcattccaccttttcccacaaccaagaattaagggcttccataaccgtcctccgacaagcatctttgggcttgttgacaagcagccatttgcgagacagagtgtcttttattcctatagcagtagatctgtccaagaggccacctctggagctcagagacctggcagcaccaacataaagacccaaatataaacagggccgtggtcccatccgactcacaccccaggatatccatgggacaaacggggcggtgcatacacgctctattttttccaaaagtatcatcggtaagagcagtataagtcacaggtcagctggaagagggaaaaacagggcaagggaggccagcactgcctcccccttccctcctagagcgtcaggaatgccagggggccaggtgcagccatccttcctaacaggggaagctccaaaataggcttttcctttatctgatttcatcctctaactgattccagttccaaaaccatctttcaggggttccttatgtatatattattcttatagatgtatatttgtgtctgtataaaaag

SEQ ID NO: 435363 - DNA, 1324 bp, Homo Sapiens
  misc_feature (1187)..(1187): n is a, c, g, or t
  misc_feature (1197)..(1197): n is a, c, g, or t
  misc_feature (1219)..(1219): n is a, c, g, or t
  misc_feature (1290)..(1290): n is a, c, g, or t
  misc_feature (1298)..(1298): n is a, c, g, or t
gaaaatcaaagtgggctcagatgatctggagcggattgaggcccggctggccactctggaaggggatgacccttctttccggaagacacattcaggccctgccctcagccagggccatgtgactggcagcaaaaccacaaaggatgccactgggcctgatacttagctgacatggatttgcagaccccagggtgggcagatgtctccagtggggtcagtgagcacaattccagccaggggccacttggaccaagctccagtcagttgatgggcagctagaggggtgcagaaagcctgtgggcccaggagatggagatgccgtttgtggcgttgatctccttgcgtccttgggcatctccgggcatcagaccctctccctggcccttgttttcctctccaccatggagcctcattttgtaggccagttgtgtgcatgctctagacaccacctcgctggagaagctggaagggctgttgtcttcccaggtctttctcttctcatcaagctcctctcctcatcttttttgtgtgtgagggcaggtcttgactctaggtctcagctggaaccccaccctttctcctcctccttcctctgagttgaccagcagcaggtctgccgaccaccagcaccatcctctcctcccagcagcctccagaaccatgcccaggtctcctgcctcacatcacaataatctgggacccaggcttgtgccctttcagtgtaaagctgactccatcacatgtgcatccacttcttttcatccattgagatcacactgcctcctttttatacagacacaaatatacatctataagaataatatatacataaggaacccctgaaagatggttttggaactggaatcagttagaggatgaaatcagataaaggaaaagcctattttggagcttcccctgttaggaaggatggctgcacctggccccctggcattcctgacgctctaggagggaagggggaggcagtgctggcctcccttgccctgtttttccctcttccagctgacctgtgacttatactggctcttacccgatgatacttttgggaaaaaatagagcgtgtatgcacctgccccgtttgtcccatgggatatcccgggggtgttgagtcgggatgggtaccacgggccctgttttataattggggtctttatgttgggtgctgccanggtcttcttnaagcttccaagaaggttggccntctttgggacaagattcttacttgcttattaagggattaaaaaggaccaattcttgttcttcggcaaaatngggcctgnttttgttcaaacaaaggccccaaagg

SEQ ID NO: 435364 - DNA, 462 bp, Homo Sapiens
  misc_feature (250)..(250): n is a, c, g, or t
  misc_feature (401)..(401): n is a, c, g, or t
  misc_feature (423)..(423): n is a, c, g, or t
  misc_feature (437)..(437): n is a, c, g, or t
agaactttgacttagatttattttcatctcatcttttttaaatttctatttttgtgtatgttttataatgtacataatattttagtacagtagtacatgtatataatttacaaataaataattatacaattaaggaagtgaactaaacatttttttactgatgggaggcacaacccatggctcaggaagcacatctgtccacagctgccagagctcctgggctctgctctccactcacccgccctcgggnaagtgaagggtggggacactgaccccgaaactcacaggaacttttgagggcaggcatggggggaaaggtacaggaggaggctcttttgtgggtgccacatgggcgtttttttcaattttcattttaaggtggaacattttacttcctctgnggcaaaacggaggggggccagntgggtttgggggtntaaaacacacttcagctggttccca

SEQ ID NO: 435365 - DNA, 500 bp, Homo Sapiens
  misc_feature (17)..(17): n is a, c, g, or t
  misc_feature (27)..(27): n is a, c, g, or t
  misc_feature (68)..(68): n is a, c, g, or t
  misc_feature (419)..(419): n is a, c, g, or t
tgggtagctgtatgatntctatgcccnaaagaaagaaagggggccaaacagctctgaaatttccaaanaatggctagagggagagtccagtttctgagctctgtacccaaattaaaatcctgatgttcaggttaatccaagcaacacgcattgggtttaaaaccagcaccgaggcccagtgggggaatcacagacatcaccaagtctcgtcttctttccttcctgtgagttgaaaccaaacaggcctctcgctcactcctcccagcccagtaatgctgaggagttcagttgtgaggaaagaaggctggagctgtgagattcgcttttccctaggctgttccgcgtgggttaccttattcaccctgggagcacttggtattccagacccctggacatgaggaatgcaggttcacactgtnaaagagtttgtggaaaggtttcagtcttaactggggttccttagctggaagccagggctggaagttacaggcctgaccttc

SEQ ID NO: 435366 - DNA, 901 bp, Homo Sapiens
  misc_feature (230)..(239): n is a, c, g, or t
attccaaaaaaggggatggcttattaattttaaaagggaattccctaaaaggggaaaggaaaaggttaccaggccaaggaggcctgttttcccctttttaggtccaattagtctttgggcaggagccccaaccaaaggcccaaattcaccttaggatgccccaatggcttgtgggggatctcccacaggggtcaaagtaaagcaaaccccaaatgaaccatgttggattnnnnnnnnnncaagatctagaaactcttgaaggaagagcttcaccctgaaaagggaagaggaaaatgcttgaaggggaagggcggagggtcagtgtgtgatctctgctgtggtgctgggcaggggcttaggagttaagccaagggtgccggagacactcggcggcagtggctctcttctcagggatcagctccaacatgggcagtaagaaatctgtgaagccagctgcctcttcctgcgaccactcatacttctccactagaacctcaaaaaggccccaaggtttcagcttcgtgatatgtttcaggtcacctgcagtgaagacagtacagaaaaagccactgatcaacacagacaaatgacaaggtactcttgtggaaacccacaaactaacccatgtagtctatgaggaatcaaattttgcaatcagaatctaatccttcattcacaaagcatttcttttctgacatatgcctcagaaagaagtgcctctattcttcatacggctccaaaaatttaaggtaatttgttttctcccctattctaggatttttttggtcccagtcaaactgggtgtgacaatcaagaagtaggtatttactactaaaataaacatgaaatgcctatgtcttcaacatggtcttatatggtgtgcagagacactctagtacca

SEQ ID NO: 435367 - DNA, 1051 bp, Homo Sapiens
  misc_feature (264)..(264): n is a, c, g, or t
  misc_feature (935)..(935): n is a, c, g, or t
  misc_feature (989)..(989): n is a, c, g, or t
ggggggccccctaaattttaatgtgtgggcccaatggaattttttctccccgggcggggttataaaaatggggggggagtgggcccaagattccagggtccccccatttatggttcccgggatacctgaagtttaacaggagggttttcccagccacaaagttttttgaggcgaccaagaccggagttgggttcccacagttggaaaagggatcttgtgcctttgcagacgggccacaccatccagtgcaagcaagccatccanaattgcacaagcagatgctttccgtgtaagcagacaagtctagctgcccggaaatgttggccaacgtgaccaacgtgttatccctcaagacctcgaggcagtcccaccaccactcatcttgctgcaggccacccccttgtcctcatcctcctctttctcataggtctgcggtgctcgctttctctctggatgctcgtggtgaagaagaatcagcttccccaggatcagcaccaggcctggatgtttggacatttcggcatcattgccaggcacgaatgacaagctacggacaatattggacacacagatgcatcgcttagccagcgagtcctgccagtgcgcgatggtacacagaggagtctcgtctcggctcctgggctcgtcctccagcagcttgatgttccggtgacttttggcttgctggataccaaagggaaacttactgctttcggtctggggcccagggtttgcgtcttcaggcaatgcccctggccgagcagagaggacgtcatcgatggttgctatgatgcttttctcttgctgctcttcagagtcgcctttgccttcttgctctttctttctacctgcggagcttaaggggggaggtgggcgcctgcgaggaggaatttccatcttgctctcaaagtgagtctgaatgtgctcggtggtgncacccccgccgagctgccagtgcagaaggccactattgaactcctgcacacgcnccaacttgtcagatcggtcaacaacaaacaggttgttctttttgactatctttattggcagc

SEQ ID NO: 435368 - DNA, 1035 bp, Homo Sapiens
  misc_feature (172)..(182): n is a, c, g, or t
  misc_feature (1007)..(1007): n is a, c, g, or t
tcccaagaaatggccttttacaaaatgtcaaaggttcttcataccaactgctggtcattggctggggttttgaacactgtatgacaatacttaaactacaaaattttttttacaaatacagtttcatcaaaacttgggacatacatcaacttcatttcttttcagtaccttnnnnnnnnnnncatcagttctgggacataacaaagaaatactaggagaaatggtatctggacaggaacagaaatgtccacaactgcgagggattttcttttacactggccacagagcgtttattgacaccaccactcctgaaaattgggatttcttattaggttcccctaaaagttcccatgttgattacatgtaaatagtcacatatatacaatgaaggcagtttcttcagaggcaaccagggtttatagtgctaggtaaatgtcatctcttttgtgctactgactcattgtcaaacgtctctgcactgttttcagcctctccacgttgcctctgtcctgcttcttagttccttctttgtgacaaaccaaaagaataagaggatttagaacaggactgcttttcccctatgatttaaaaattccaatgactttcgcccttgggagaaatttccaaggaaatctctctcgctcgctctctccgttttcctttgtgagcttctgggggagggttagtggtgactttttgatacgaaaaaatgcattttgtgcagctggtgaggtataatccaaagcaaaagcaggggcaaaaatggacttcctgaagttatctctgctcctgctggttatcctccagaatctgtcatgttgactgagagtgcgtgcttgctttctcaggcctcctggccaatagcacaggtctgctggaaatcacccacatggtttttcattgcctgtgcagtcaggtgatgcctctatgtttttggagttcacctctgttgtttcttaaccttcccagccttccacagttgtccagtgatttggagaaggtctctnatttctggcactttcgacgctgaactgc

SEQ ID NO: 435369 - DNA, 2001 bp, Homo Sapiens
cggttgggtttttttccggtttttcctgtggggaggtttctggggcgaggggttagtggtgacttttggatccggcaaaaatgcattttgtgcagcatgctgaggtataatccaaagcaaaagcagggtctaaaatggacttctggaagttatctgtgctcgtctgggttatcgtccagaatctgtcatgttgactgagagtgcgtgcttgctttctcaggcttcgtgggcaatagcacaggtctgttggacgtcacccacatggtttttcattgcctgtgcagtcaggtgatgcctctatgtttttggaggtccacgtctgttgtttcttaaccttcccagccttcccacagttgtcccctgtattgatcatagcttcttccatctttaagtcccaggtccatgtttcgagtccggggggttacgctgcttgtaacccttgcagctcctcagctccatgagctgtacgtgtagctggttgaggacatccctgtccagtgtgttcactgcattcatcagctggtaggggtctgtgttgagatcaaagtactctaggaagccagttgcaaattcacagaagaggaaattgtgagtctcattgatggtcctcatgcaccagtacgtgttattgttggcgctggtgcaggcacagaaaggccccagtgtccagaaaggcgccgtctgccagtgctggttgtcgtgggtgaagcacgtgaggcctggcatgctgcacgtgtcgttgttctgcaggcgcttgagcagcttgcggagtttcttcttgcgcttctgctcccgcaacagccacaccttgtccttctcttgcaggcccttcctgaaaggatgcagactggagcctctgtgcttgaggcggcctttgtgctgggtgtggtagctgattttgtgacagtcacattcttctggccgctttttcttcaggtgacctcggacttccctcaggttcttaattttgttctgcagggtttcaatctcgtggtcgatgtgcagcttgtggtctttccaggcctgcagggacttgtacaggtccaggtcacactggactgtgtcgttctctaggatgtagcaccgatgtgtcactttaatggggttggcggctgagtagtcgggaaggcctccagtgccactgaagtccccaccatccttgtcatcttggtcctcaggggcccctggccagtgccgcttggtgaggtttcggggctgggcggcatcacccaggcctacgtggtacaccctgccgtccacctcgatggccactgagcggatggagcgactgcggacatagctggccttgtacttcttcttgaagagttttttccggcgtccggccaggctgagcttgtagtccccgctgtcacaggtgcaggcctcgctgccctgcccgtagtacttgggcacgaggttggagagggctctgctgccgcccagccgcatggggcccttgcacttatgcagcttcagcttccccgtggcgtcctccacacactgccacttctgtcccagctgctcacacgccgtctggtactcagcacgctgacacaggtccttcacacgctggtacttgggcagaaagttctcctcctgggcgtccaccttgtcattgtctctcttgtgtagcagcttgcctctctccaccaagaaggagtcccgccagaccctcatcttctttttcaagtgaaaccgattcaccggccgctccgtgtccagcagcttgaggatggatttcccgtccatatccgcaggtatgtccaggcctgcaatgtccaggatggtgggggccaggtcaatgttgaggacgatgtggggattcagacagccggcttccacgttggggcccctcacgtagaacgggaccctgatgtcaaactcatatggcatggatttccctttcaccaggccaaactggccgatgtggtaaccgtggtcggcggtgtatacgatgtacgtgttgtccagctcgcccgtctcaaccagcatgtgtaaatc

SEQ ID NO: 435370 - DNA, 1060 bp, Homo Sapiens
tcttgcggcgatcctggttatatcattatacgaagtagggctcaggcaaatcgggcgagctcgaattcgtcgagagcggtgggagtaatagtgtagaagaatatccagcgtagtagaggatttaagcagatcgctttgcctactttaattatatgaaataccaggaggtcagatgtttaacctctttcaacatatctgtgctcttgtcctgcagaaacagatgattagtgctgagattatagatgaagaagatacttacaccatgccctcaagcagggattatgagattcaaagagaaagaatagaacttgtacgatgtattggagaaggccaatttggagatgtacatcaaggcatttatatgagtccaagagacatccagctttggcggttgcaattaacaacatgtacaaaactgtacttccggacagcgtgagagagaaatttcttcaagaagccttaacaatgcgtcagtttgaccatcctcatattgtgaagctgattggagtcatcacagagaatcctgtctggataatcatggagctgtgcacacttggagagctgaggtcatttttgcaagtaaggaaatacagtttggttctagcatctttgatcctgtatgcctatcagcttagtacagctcttgcatatctagagagcaaaagatttgtacacagggacattgctgctcggaatgttctggtgtcctcaaatgattgtgtaaaattaggagactttggattatcccgatatatggaagatagtacttactacaaagcttccaaaggaaaattgcctattaaatggatggctccagagtcaatcaattttcgacgttttacctcagctagtgacgtatggatgtttggtgtgtgtatgtgggagatactgatgcatgttgtgaaggcctttttcaggagtgaagaacaatgatgtaatcggtcgaatttgaaaatgggggaaagattaccaatgccctcccaaattgtcccttcctacacctctacagcccctaatgaacgaaaatgcttgggccttatggacccccagccagggcggc

SEQ ID NO: 435371 - DNA, 1115 bp, Homo Sapiens
  misc_feature (974)..(974): n is a, c, g, or t
  misc_feature (1034)..(1034): n is a, c, g, or t
  misc_feature (1049)..(1049): n is a, c, g, or t
  misc_feature (1055)..(1055): n is a, c, g, or t
  misc_feature (1069)..(1069): n is a, c, g, or t
  misc_feature (1089)..(1089): n is a, c, g, or t
  misc_feature (1095)..(1095): n is a, c, g, or t
  misc_feature (1098)..(1098): n is a, c, g, or t
  misc_feature (1112)..(1112): n is a, c, g, or t
cgccggtcggttggtggcgcctttgtcctacggcgggcaggtgggccgacgcggaggcggcagcggcgggcctgaggcgaaggagcggccgggagcccgccgcgctggtagcgatattaataaggcagcggaaagaagaaatatgaatacggctccatcaagacccagccccacacgaagggatccatatggctttggagacagtcgagattcaaggcgtgatcgatccccaattcgaggaagtccaaggagagagcccagggatggcagaaatggccgggatgcccgggacagcagagacattcgagacccccgagacttgcgggaccacagacatagtagagatttgcgggatcacagagacagcaggagtgtgcgcgacgttcgggacgtgagggatcttagagactttcgtgatctaagagactctagggattttcgagatcagcgagaccccatgtacgacagatacagagacatgagagactcccgagatcctatgtacaggagagaaggctcttatgaccgatacctacgaatggatgactattgcaggagaaaggatgactcttattttgaccgttacagagatagctttgatggacggggccctccaggcccagaaagtcagtctcgtgcaaaagagcgtttgaaacgtgaggaacgggcgtagagaagagcttttatcgtcaaatattttgaggaaatccagagacgctttgatgccgaaaggccgttgattgttctgtgattgtggtcaacaaacagacaaaagactatgctgagtctgtggggcggaaggtgcgagacctgggcatggtagtggacttgatcttccttaacacagaagtgtcactgtcacaagccttggaggatgttagcaggggaggttctccttttgctattgtcatcacccagcaacaccagattcaccgctcctgcacagtcaacatcatgtttggaacccgcaaganatcgcaacatgcccaagcagatgcatggtgctggtggcagaaatatgagcgttacagatnagtgcgggagaggangtgagngatgcagacagcancaaatggcgatgagcatctncagaanagnagagggcctgaggnggg

SEQ ID NO: 435372 - DNA, 1329 bp, Homo Sapiens
  misc_feature (252)..(252): n is a, c, g, or t
aggttccggaagggggggctcctttgggttcctctttgggtcccaaatggtggggtagccccccgattccccccgtgttctttcctccgggggtggggcagtggtccccagggtcgctccggagccaacttctggcttcggatctgggaaagcgtcctggctggcccagggacccggttctgcttcctcctggggggtccctggctgccccaggctgagggtggcgctggggctctgcaccgagcctggggncaggtctggaggcctggactgagttggcccgtctcaaacctgctgggctccggctggagttctccagcacccccactgtgggtcccagctctctgaatctcggctagatgagctcattcgtgcctcggaggccctgcgcacgggaggcccatagtttcctcgcccgggagcagaggctgggtcagggcctgtcttctgacccgggcccctcctatcttcactgtcacctcgagctggagcccgggcagggtgcttgggctcaggagcaggctgttcaggggcagcaggctcactgacaggctgctggggcttggtcttcttaataggcataggctgtgggaggacctgtttggggaagcctttgaagaaccacgctccagaacgcttccacacctccctctgctcaatgcagattttgcagagccacacagaatgcaggcggttgttggtctccactccgcacttggtgcagacgttcttcttacagtcctcacatactacacaggcagagcccagcatccccagctgttctccacacagtatgcagcggttcaccccatctccagccacgttcttcctcatgttttctaggcggtccaccaggcgtccgattcgctcctgctccatctcttccattttctcagctcgagcaatcaccctgttgatgatttctttctcctcatcagtcagctcttcctgcttcctctgcctgtcaggctgaccaccggggtggacggaccagcctgcctggagctttgattgaaggggccggtcactggggtacatccaacggttagaactgttgctgaacacggtgtcagtcatagtagatgtctagtgctccgcgacgctggaggcttgcagggggaatgggtgagccaaattcttgccaactcctcccttccctgccgggtagaaagacgctaagtcccaatgacttggtttaaaagctcagcggaggtgccactgccagaagcggagaaaactcggaccagccagtgagtcagtggacaagggacagtggctccctcagactgtcccctcggccgattcaccacgggcctctactagcccgat

SEQ ID NO: 435373 - DNA, 804 bp, Homo Sapiens
cccgtgcacctcgaggtggaccccgcccagggtctggcctcagaccacgctttcagggcacgcaggctcactgacagctgcggggcttgtcttcttataggcatagctgtgggagcacctgtttggggacagcctttgaagacaccacgctccagaacgcttcccacacctccctctgctcaagcagattttgcagagccacacagaatgcagcggttgttggtctccactccgcacttggtgcagacgttcttcttacagtcctcacatactacacaggcagagcccagcatccccagctgttctccacacagtatgcagcggttcaccccatctccagccacgttcttcctcatgttttctaggccggtccaccaggcgtcccgattcgctcctgctccatctcgttccattttctcagctcgagcaatcaccctgttgatgatttctttctcctcatccagtcagctcttcctgcttcctctgcctgtcaaggctgaccaccggggtggacggaccagcctgcctggagctttgattggaaggggccgttcattggggtacatccaacggttagaactgttgctgaacacggtgtcagtcatagtagatgtctagtgctccgcgacgctggaggcttgcagggggaatgggtgagccaaattcttgccaactcctcccttccctgccgggtagaaagacgctaagtcccaatgacttggtttaaaagctcagcggaggtgccactgcccctcgtgccgaattcgccaacccaggcctcgctaccttagccgtatgggtttg

SEQ ID NO: 435374 - DNA, 773 bp, Homo Sapiens; identical to SEQ ID NO: 322715

SEQ ID NO: 435375 - DNA, 904 bp, Homo Sapiens
  misc_feature (804)..(804): n is a, c, g, or t
  misc_feature (814)..(814): n is a, c, g, or t
gatatagtctcaactaataggtgcaatttgggaaaatcaggtttattttttggagtggaactgttataagtgcttatttataaaaggaatgtttctgaatgcaagtgcctaaaaagatctttgttggtatgcatatgttttgtcacacaattttatagtgcatctttcaccatttgtgcttttttaagatacgtatgtaagctcttatttttcaattggcaattcagttaatttttaaatgtttacataatggccagaaggcttgcaaatctgtatttaattgcattttaattaattgccagtttttacatgtgatagtcagttgtacaaaggaaatgcacttaaacctgtttctaaattatatattcagttatattatatttggctttagatggttttaatacatttgatagtttttcaccccttggctttattttatataaacttttgtttttcagcagttctgaactttttagtattttataaatggtccaaaaaatgcctgtttcagaagtttttgaattcagtgcatttcctcttgatttgtctgggttaaaaccattccttttgtatgaaatgttttgacttaggaatcattttatgtacttgttctacctggattgtcaacaactgaaagtacatatttcatccaaatcaagctaaaatttatttaagttgattctgagagtacaggtcagtaagcctcattatttggaatttgagagaaggtataggtgatcggatctgtttcatttataaaaggtccagtttttaggactagtacattcctgttattttctgggnttttatcatntttgcctaaaataggataataaaagggcacaaaaaataaagtgagactgctttcttatgtgtgaatatatatttctactcaaatgttttc

SEQ ID NO: 435376 - DNA, 918 bp, Homo Sapiens
gtttctggggctgggaggtttcggtttgggctcccccagaaaggggacatttgcctgacccccggccaggggccccatgggctctggagcgggcatacatcaggatctgggggccggtcatcacgcccgtttcacgtagcccctggcctaagaggtgcaggatgcaagagaggacatctgtactggtacaggccacaccccccaggcaacagtgtggcccagggttccaggaggatttggacccttctgccaggcctccagcaccagacaaaccagctgatcaatgtggaggcccttttccccatgggctttgagaatacgaacaagaagacagctcaagagattcctcttctgttccagggttcggccttcatccttctctacgttcaggtatgcctggggaggtatcagccacagggcctccccactgcgctggggcccaggctcatgaagccgcagcacacccccgtgtggaaagtcctggccctcatgcagggtcaaagggccattccctgaggtgaggggcacgagtgcctggagcagcagctctggggagaggtcagaatccttcagcaaggtctctactgacacctcctctgtctgattgaatttcagcagcagccacatctgcacggtggacacatgcagtatctgcttcccaaactgcagctcagcccggcccagccacgtccactgcagtcgccgatgtggtcccatgtccaggactggatggttctgacctcctcttcctctagtctcttttcctcctcatcttcctgctccaagaacaacttgtcgagccgctggagctggaagaggtggaactggcgctgcagctcctcagaggtgctcaggctctgcagcatcagctgtgggaggcggtgggaaaacatcccgagaatccggaccggtccagcc

SEQ ID NO: 435377 - DNA, 1807 bp, Homo Sapiens
  misc_feature (6)..(6): n is a, c, g, or t
  misc_feature (15)..(15): n is a, c, g, or t
  misc_feature (18)..(18): n is a, c, g, or t
  misc_feature (28)..(28): n is a, c, g, or t
  misc_feature (62)..(62): n is a, c, g, or t
  misc_feature (69)..(69): n is a, c, g, or t
  misc_feature (83)..(83): n is a, c, g, or t
  misc_feature (97)..(97): n is a, c, g, or t
  misc_feature (104)..(104): n is a, c, g, or t
  misc_feature (115)..(115): n is a, c, g, or t
  misc_feature (118)..(118): n is a, c, g, or t
  misc_feature (120)..(121): n is a, c, g, or t
  misc_feature (124)..(124): n is a, c, g, or t
  misc_feature (141)..(141): n is a, c, g, or t
  misc_feature (172)..(172): n is a, c, g, or t
  misc_feature (222)..(222): n is a, c, g, or t
  misc_feature (365)..(365): n is a, c, g, or t
gccatnccagcccantangtcctagggnccgggttctgggccgccccaagtcagggctccanatcatcncctccaaggccccncaggcgcctccttngcctctngctcctgcttnccntnnccnccaagatgttcatgatngagttagggatgtgagcttgctggtgggggntgaaggagcggacatgggccagcaggggctcccggagctctgggcacttntcaaagacggctcccagctgctggggcggcagctgcaggatgacctggaagctctggggctttgtgcgctggcagcacttgatgaagccctcccacaccttgggtacttccacacctgcttcatgatgaggcgggacaggatnttcatgacgaagccccccaggcgggggtacatggtcagggactggatgacggtcctcatgagcagcatgggcagggggctctgctcccatcagctgctgcatcaaccacggcccagcacctctgacttgtaacacgtttcctccgcaaagcacaggttggtggctttgatgatggatttcatgtcgcacttcacggagtcaatgttgtgtaatgcgatcaggagctctcccagggttcagcggggacaaggctgagtttccctcaccatgctgggtgcccagcaggcggttgaagacttccttcaccacgatggggttgagtttgatgagtttaggcagggcctggatcacctctttcttctccagcccattgagcaccgggatgaggaagcggacgtctggcagtcgcttgtggtagagatcccggacccgcttcaccagctctggggagggtgggactttgtctgtgaggctgtgcagacatctcgtgaccagtgtctctgctcccttgggacaattttccaccagcaggagcagctccggggagttcatgcccattcctcggatcggctgctcaatgaccctcagcaccgtccgcttgatgtcggcgatggcttcagtgtacacggccgccagttcgtggatcagcttgtggttctgaggcaggagggccaggtagaggtacagacactgcttcactgtctcctccgtccagggtgctgccacctctgtgtccttgtcagctccaaacagcacagacggtgggttggggtgcaccaggagctgcaggtagttgagggcaaatttctccacatactcccgcagctgctccttctcatacatgcgtttgatgaacagcagggcctgggagcgcaccttgtccttctcatgggagctgaggtcgaggaggacatgcaggtactggaactggcgggacgggcgcttgaagatcaggtctcgaagtgtggacatgcccagataggtgcgactctcatcctcgcagtacttgcggaccacctgccagggcactctctgtgatgagtggcgcctccagcacaaccttggtgaagatcccatccttctggtctggtttctcctgcaggccagacaacaggcggatgaggcagtcctcatacttgtccagggagcccgaggcacctgcggccaggtaggcgttgtactcctggtagagccaggcgaaggccaggtccaggcgggcccgcacatcctccaggatgaaggacaggacctccgccttcaggcccgagttgaactgtgtcaccaggctggccaggatctttatgcggacctgggctgccccgctgcaggcacacagccttctcagcccagcaggatccgcttcacagcgcccagcttcatggcttccacctggcagacgcgtggtcgacaatatcccaggtattccggaccgtaccagccca

SEQ ID NO: 435378 - DNA, 1185 bp, Homo Sapiens
  misc_feature (59)..(59): n is a, c, g, or t
  misc_feature (63)..(63): n is a, c, g, or t
  misc_feature (65)..(128): n is a, c, g, or t
aacttagcccaagttcacatcttttaatttctttttaaggcaaagcacccgcagtcaancccncnnnnnnnnnnnnnnnnnnnnnnnnnnnnnnnnnnnnnnnnnnnnnnnnnnnnnnnnnnnnnnnnttggcctcgggttccctggcgtcctcggcagccgggctgggagtcttcatagcatcttctccaacaggtgcgagggtctgggggctccgctcctccttcaaggtcagcccgcccgctgccgtctccttgggtagggggccctcgagactagagtccaacagcgcggcctcggtcagccccgagtcgtcatccatgctgatgaagatgcccggggtctcgcactcaggcccctcctcccggaaatccatggcttcctcagacgggggcgggcctggccgggccgacggagagggagagggggaggaagaggagggggctcccactccttcccggcttcagcttctgttcctcctccagctgccgctttaaggccttctcctgggccagtcgcaggccgatgaggtcctgagggggccggggtgctggggccggggccaaggtcaggggctccagatcatcctcctccaagggccccgcaggcgcctccttggcctctggctcctgcttgccgctggcctccaagatggtcatgatggagttagggatgtgagcttgctggtggggggtgaaggagcggacatgggccagcaggggctcccggagctctgggcacttgtcaaagacggctcccagctgctggggcggcagctgcaggatgacctggaagctctggggctttgtgcgctggcagcacttgatgaagccctcccacaccttggggtacttccacacctgcttcatgatgaggcgggacaggatgttcatgacgaagccccccaggcgggggtacatggtcagggactggatgacggtcctcatgagcagcatgggcagggggctctgctccatcagctgctgcatcaccacggccagcacctctgacgtgtacacgttccgctccgcaaagcacaggttggtggctttgatgatggatttcatgtcgcacttcacggagtcaatgttgtgtaatgcgatcaggagctctccagggttcagcggggacaaggctgagtttccctcaccatgggggacccagcaggcggttccgcctattctg

SEQ ID NO: 435379 - DNA, 954 bp, Homo Sapiens
taaggttgaggtgttgtggggtccgttgactcctgcagagtcgcaccccccgctgacgtctcccttggtgaggggccctcgggagattagattcccagcagtgacggtcctcggtgaaacccctaatgtcagtaatccactgctgatgtagagatgtgcccgggggtcttccaactcagaccacattcatccacggaaagcacgatggcgttcctcagacaggggcggggccctgggcccggccgctcgtataggggagagtgcgaaggaagacgaagtggggcttccccacgtcctcccggcttcagcttctgttcctcctccagctgccgctttaaggccttctcctgggccagtcgcaggccgatgaggtcctgagggcccggggtgctgggccggcggccaaggtcaggggctccagatcatcctgtgggggtgaaggagcggacatgggccagcaggggctcccggagctctgggcacttgtcaaagacggctcccagctgctggggcggcagctgcaggatgacctggaagctctggggctttgtgcgctggcagcacttgatgaagccctcccacaccttggggtacttccacacctgcttcatgatgaggcgggacaggatgttcatgacgaagccccccaggcgggggtacatggtcagggactggatgacggtcctcatgagcagcatgggcagggggctctgctccatcagctgctgcatcaccacggccagcacctctgacgtgtacacgttccgctccgcaaagcacaggttggtggctttgatgatggatttcatgtcgcacttcacggagtcaatgttgtgtaatgcgatcaggagctctccagggttcagcggggacaaggctgagtttccctcaccattctgggtgcccagcaggcggttgaagacttccttcaccacgatggggttgagtttgatc

SEQ ID NO: 435380 - DNA, 1484 bp, Homo Sapiens
ttttttttgcacaattggaatgtgctttatttcagggaaatataaagggaaatgaatgctattataacttggtagaacagaagaaatggctacctagctttgctttccaactacaaacataaatgaggatctcagcatttaaggtaaaacatgataagcacaaaaggagagttcactggggactggactccctcatttactctagaaattatgagaaccagcagcaatattcctcaagcatccatctcaacatcaagttcctttgttttatttaccagatgaccaggaatcatagatgagtttggctgcaactgtgtcttccactgccattcccaaagacttgaacacggtggtcttctcacagtgggctggtttcactcccttaatcacttctcccagctcagcaaagatctcggcccctgacagcaggacatctccagactccttcagggcagcctcctgggaatccacgtacagcacagcttctttcatgagctcatcatccagttctctccagtcaggtctgctggctccaacagcattgatgtgagcccctggcttcacccattcaccaaacaaaatgggctctgttgccagggtgactgtgatgatcacatctgcacctgccacagcctcctggaccgaagaacagacccgtacctctccttgcactgtgtctgcaaacttctctgcattttctttggtgcggttccatatcctcacctccttaaaggagaactgctctgtgaagatctcataatggctgtaggcctggaccccagccccaaggatgcacagcacttcactgctgggaggtttcagaaacttggtggcaatggcagaaactgcagctgttctctttgcagttatgacatttccatccatgaccgccagcagggtgccattgctgggctcaaagagtagcacagtagcctggtgggaagggacgaccgaggtgatgccgcggtcctcgtagaaggtgaccaacttggtggtcagtgcatcctctgcagcactgtaggcgggcatgacccccaggtagcccctgtgcttggtcaccggcaccacggtgcgcacgggctgcatgacccctccttcgggaccgctggagaagttggccagggccgtctctagaggcgggatgaggaggctggagctgcggaggtgttcctccacctcggccgcgctcaggaacgctggtacccggctcatctcgccacctgtgccttctaacctcagtctccgcaccgcgatccacgtaccctcggctgtgccctttatgagcgcgcccgctgctctgtggagccgcctgctggtcacagcccagcctccgggggcggagcaaccccgccccgccccgccagccctctcctcccccttcgcccacctcgacccctaagggtgggcgagatgggtcccttccagcaacggattccccaagatggacatcgcggtggcgtgctgggagtcaatatgttggtcca

SEQ ID NO: 435381 - DNA, 293 bp, Homo Sapiens
  misc_feature (141)..(141): n is a, c, g, or t
ggaaactgattttggttattagtggtcccatattgcaatttttggagcttgcacctgatgtccagagtggactggctgataaaatgctgtgccattagcacaatacccttgggagaggaagggtctaaatttgtatatttnctgaaggcctcttccaacctgccataaaacatagctgggtttttctccttcccttatgtgacttccctgaccttataatttatggtcttgggttatcccctttttcatccctccaaggagtgcctcaagaaactttgcttgcctgtttattt

SEQ ID NO: 435382 - DNA, 1188 bp, Homo Sapiens
  misc_feature (199)..(199): n is a, c, g, or t
  misc_feature (288)..(288): n is a, c, g, or t
  misc_feature (382)..(382): n is a, c, g, or t
acccccctcggattttctcttaaggggtaaaccgggttttttggctgtcccaggaggtgaaaaaaaatccctttttgaggggccccgcaaaaggggtggaatttttttcacccaggggcccatcaaaaaagtgggggcccagttgggtaattgaagttgaatggcgagccccacttgggccctttatcatccaaactcnaaaaattttaatttgagattgtaccagaaaaattcccccagttattcccctcccaatgttcgataagtccccaaagggtaggaggacanaatctggaaatcctgagggattatttttctttagttttttggcaccccattaaaacccattctaccatttttgaatcccccccttgtgactgtntgctttatgcagtgagaaagctgaacccccaggtggatgatggagggctggataatcagtgtgaaagcttagcttcccagttgtgtaagccacattgtttgcatcgattttgtcttgcacttgccaagtatgtccataaaatgtgagatagaggaaacccatccttttcccaagttttgaaacttctcctggtttgtcagatgctccggtgagtcttactatgcctactttcttgagggtggagagccacttgtatgcgtgttcatcatatcttaaaacatcttcaaaatccaaagtgggtagctggagctctgagccccagtattggcattctggaaaaaacaattctctttggagctttgctctggcctgcttggaaaagcatcttttcttcagccaatcagcctggaattcactgtaatgctcatcgggccatgtgatgtacaccttttttctgtcaaatatcaagcctttaattccaatgttcacatcaagagcttccactagaagtttccgtgcttttgcagaatccaggtagcaatcagagcacggacagttgtctctcaaccatacagctgggtagagagactcttcctcatcataccagaggatctgcatcaaatgagccccgtcaagtgcttctgccttttggatggtacaagccatgtttccggtcttcaggagtagatgctgtcagctaccaagtaaagaaactgtcagctttggtccttagatcctttggagagggagcattctggtgcccgtcacatcccaggaatgatctgtccccagtttccaatcccgct

SEQ ID NO: 435383 - DNA, 895 bp, Homo Sapiens
  misc_feature (56)..(56): n is a, c, g, or t
  misc_feature (78)..(78): n is a, c, g, or t
  misc_feature (83)..(83): n is a, c, g, or t
  misc_feature (101)..(101): n is a, c, g, or t
acccccctggtgaacggttggccttaatgcaagtgaaagaaagctgaacccccccngtgggatgaaggaagggctggnataanccagtgtgaaaagcttancctcccccagttgtgttaagcccacattgtttgccatcgatttttttcttgcacttgcccaagtatgtcccataaaatgtgagatagaggaaaccccatctttttcccaagttttgaaacttctcctggtttgtcagatgctccggtgagtcttactatgcctactttcttgagggtggagagccacttgtatgcgtgttcatcatatcttaaaacatcttcaaaatccaaagtgggtagctggagctctgagccccagtattggcattctggaaaaaacaattctctttggagctttgctctggcctgcttggaaaagcatcttttcttcagccaatcagcctggaattcactgtaatgctcatcgggccatgtgatgtacaccttttttctgtcaaatatcaagcctttaattccaatgttcacatcaagagcttccactagaagtttccgtgcttttgcagaatccaggtagcaatcagagcacggacagttgtctctcaaccatacagctgggtagagagactcttcctcatcataccagaggatctgcatcaaatgagccccgtcaagtgcttctgccttttggatggtacaagccatatttccggtcttcaggagtagatgctgtcagctaccaagtaaagaaactgtcagctttggtccttagatcctttggagagggagcattctggtgcccgtcacatcccaggaatgatctgtccccagtttccaatctgatgtggtactttttcttggaagcctttttgctcctggcagtttcactgtgtccc

SEQ ID NO: 435384 - DNA, 743 bp, Homo Sapiens
cagaattcgtcattccattgagtgaggtcacgtgtgagacaggggagaccgttgttcttagatgtcgagtctgtggccgccccaaagcctcaattacctggaagggccctgaacacaacaccttgaacaacgatggtcactacagcatctcctacagtgacctgggagaggccacgctgaagattgtgggcgtgaccacggaagatgacggcatctacacgtgcatcgctgtcaatgacatgggttcagcctcatcgtcggccagcctgagggtcctaggtccagggatggatgggatcatggtgacctggaaagacaactttgactccttctacagtgaagtggctgagcttggcaggggcagattctctgtcgttaagaaatgtgatcagaaaggaaccaagcgagcagtggccactaagtttgtgaacaagaagttgatgaagcgcgaccaggtcacccatgagcttggcatcctgcagagcctccagcaccccctgcttgtcggcctcctcgacacctttgagacccccaccagctacatcctggtcttagaaatggctgaccagggtcgcctcctggactgcgtggtgcgatggggaagcctcactgaagggaagatcagggcgcacctgggggaggttctggaagctgtccggtacctgcacaactgcaggatagcacacctggacctaaagcctgagaatatcctggtggatgagagtttagccaagccaaccatc

SEQ ID NO: 435385 - DNA, 1766 bp, Homo Sapiens
  misc_feature (1272)..(1282): n is a, c, g, or t
  misc_feature (1301)..(1309): n is a, c, g, or t
  misc_feature (1602)..(1603): n is a, c, g, or t
  misc_feature (1631)..(1631): n is a, c, g, or t
  misc_feature (1719)..(1719): n is a, c, g, or t
  misc_feature (1748)..(1748): n is a, c, g, or t
gagaccgttgttcttagatgtccagtctgtggccgccccaaagcctcaattacctggaagggccctgaacacaacaccttgaacaacgatggtcactacagcatctcctacagtgacctgggagaggccacgctgaagattgtgggcgtgaccacggaagatgacggcatctacacgtgcatcgctgtcaatgacatgggttcagcctcatcgtcggccagcctgagggtcctaggtaagcaccgtgcaacgaggattctacgtgacccagtggggcacgtctttcaggagtctccttaagtcctgagtctgcccttacactccaagtggcctgaaagatagaacaataagtcatttgtggggcttcaaaagacagttgtaagtagcagaccagagtgtctgggatgtcacaggagagtgacctctcggcaccttatgtaaagtcgggggagacaccggagctcctgttgctgggaggaggatgggggcctgcctggtgaaggcctctggctgcccaccatggggcaccagggccccccacgaccagcttctgagttggagcagggtgctttccgtgctcctagtactcaaaacactcatatccagctacccagctgaatctggatctggtctaggttggtctcatgtagaatgtgcatgggaaaagcaggaaaggagatgtgggtgagtcccgggcctgcgcaggccctgtgcctgtctgagaccctaacagcaacccttctgggtgaatgcacgccctcctcaccccatccaggaagagccaagcccagggcggctcaataacttgtccagagcatctggctaggaggcatcctgccatggggcctgcttgctccagtgtgaaaagcttgttctttctcctcagcaaaaccacaagcttcctgggggcaaaaaccaatatcttagggctctttccaaaaccatcctggaaattggcccggactggaaaaaagcctggcgggaaaaaaggtggtggaatagtttctcctgggtgcccatcctttgcaaaaaagggcccggtccattgcaagtatacggggggggtgcccacccaaaaatttgggggagggtccccctcaccagaaggggacacaattttacataatctgcccaacatcggagagaagaaataaaatattgtggggtttctctcggcgaaaaaccaccgcgtccctggtttctgcggggtgtggacacctagatattgtaatctccccgcgccgcgatattcttgtgcgatctgcatagatnnnnnnnnnnncttctttttttagatgatnnnnnnnnnacagaaaacgaacacgtccgctctcatataatttatatactgccgtggggtgattgtatttactcaggcgcgacacacccgtgttaataacacatctcacaagtgaatgagaaacaccactcgttcgctccccagaaagatattttctatttatagggggaaatagcaacgccgagcagcaactatattcgtaacagatatgtctggactgagcgggcctctctcgaacacataatcttgtgtggagagccgctacatgtgatacatgttattaaagtatagatgtgagaagnnacgaaggcacagaccccctagaactctntcgcgtggtcacacaggtcggcggcggctatagcacgtttctcctcgccccgcggagggggagggcgttagtatatgtctgtgtcgcnacacaacagcgtgcgggtcgaccaacaanccgagccactcggggaac

SEQ ID NO: 435386 - DNA, 467 bp, Homo Sapiens
aggtttaaaatgtacagccgggcatgtgctcatttattagggctgactctccgtgtccgcttcctgggaaagaaaatccctgtgacatgaaccgatgaagggacagaagctatcacagatgctacagggctcagagaggggccggggcaatctacactacagaagtaaaagcaacgtaaaatgtttctgggtttcctttcccttcactcaaaaccactatttccttagttctatcaaagtacgtaaggggcgtaaaatagactcaggaactcggggctaaatcatccaaaaatggagccaaggctctaactagaaactgtctctgtcgtccctgttggcctcaaaaccccgaggtaaaaggctggtctcggctcctcccaggccccctggctcccagcacagtgccccgtcctctgtgttcatcatcatcgttttttaagataccaggtctcgctctatgccggcca

SEQ ID NO: 435387 - DNA, 1177 bp, Homo Sapiens
  misc_feature (1039)..(1064): n is a, c, g, or t
  misc_feature (1072)..(1099): n is a, c, g, or t
tggtactcgtcttcataacagtttcctgtacgtgatagcataccaacatgtcatctagtatgtggtttctcttgctcagcatgatatttttacggttcacccatattgcatgtatcaggaatataatcctttttattattgagtagtgttctattgtatgtatataccacagtttatttctcccttcatcctttgctagattttggggttttttcacattgcgctattcagtataaacctgctctcaacattcatgtgcaagtctttgagtggacatatatttgcgtttctcttgagtgaatgcaccttgttgggtcacgtggcttaacttaaaaaaattttaatcactgtggtgcatatgtagtgattattagtgattatctcataattttattttcttgtttaatgatgttgagtgtatttcatttgtattttagtttgcaaatgtttgttcaaattcttcacctgtttttaatgaagacgtacgacttatttttgtgttctgaacataagttctttgtcacataaaatgtgctatgaatgttgagttttaaatactccaaatgaatggctagagaattactatttgtagaaatatttatatgtcaaagggatgctaacaatttactttattgctgttaaatagataagttgccagaatgctgtggagttttagtggggtaacatgatagctggtgttactgagtaaatttgagtgttaaatgtcaatgtaagttaacggccaagatagggaccactgcagggtggttacttgcagctgtgactcaactggtccttcactgccaaacatacctggggttggatcattggcctgatgtttgcaaattgaggaaccttagggcaaatcagtgaacttctgaactgctttcgtcttcagttatatggggatttccccacttttgagatccttgtaaggattatatgagatgaagagatgagacaaggtatataaaagtcctagcacagagcgtgtcatataatatggcttcacaagtgccctcatctcctttccagtcgnnnnnnnnnnnnnnnnnnnnnnnnnngagaccannnnnnnnnnnnnnnnnnnnnnnnnnnnctcttcattattacttctttactcagctagcagagatcaaatgtgctcaggacccggtatatgagctctgactacggg

SEQ ID NO: 435388 - DNA, 1028 bp, Homo Sapiens
  misc_feature (905)..(905): n is a, c, g, or t
  misc_feature (917)..(917): n is a, c, g, or t
  misc_feature (932)..(932): n is a, c, g, or t
  misc_feature (937)..(937): n is a, c, g, or t
  misc_feature (946)..(946): n is a, c, g, or t
  misc_feature (955)..(955): n is a, c, g, or t
  misc_feature (969)..(969): n is a, c, g, or t
  misc_feature (1012)..(1012): n is a, c, g, or t
  misc_feature (1014)..(1014): n is a, c, g, or t
ccagaaaacacaactttattcactaggactgaaaacaaaggcttgtgcaatcaaaaggccaagttgagtgcaaggtggagcgtgctcggaaatcacagacctcacctgtggccaggccgggctggcagttgttgtttctggtgttttctgtgatttcccacattttatcacaaggccacaggcatcctccaaggtcagtgaggaagaccctattgctgtttgagccagagcctcctagagggtgggccgggagcaggcagctcccaggacacacagatgcacgatgtgattagcagtgaagccttctgtcccaggcgtgggcaggcgtcctcccttagctgcctgagcatgtgcggctgaagacatggcttttctagggttaggcactgtgcgtggtgccagccccagccctccctcacctggacgtgcccaggagggggcagcagagcaccgtggcaaagtctgtccacttgccgctccccgtcccgtgcagaagactgcttttccgtggcggccagtgtgcggccacgggctctcagaagcctgcttgttgggactgttgctgggaggaggaagggacaaggcttgacctggggctcctgaaaacagacactcgggcgttggccactgggcaacaaagtcagaagggcctggagaccctctgtccagccttctagggactgggcggcttcctccagaggactgagctcagccaggttcaagggcggcagcaggaggcccctcgaccctccctcttaacgtaatcatgcagccggaagcgcggctcgctgggagccttcatggagcgctgcttcaactcctttgctatggctgtgaaggccaagtccacgttgaggcccgtcttggcgctggtctccatgaagggcagtgcatactcctgtaanagctgctgcaancaggtggtggcctgncgggncagctaggntccgagctncacggggacccctnacaacccctgcctgactcacttggcagttttcccgtctccttntnacaaacgtcatggg

SEQ ID NO: 435389 - DNA, 2147 bp, Homo Sapiens
ttttttgggcatcagaaatgctgtttatttctctgctgctcccaagctggctggcctttgcagaggagcagacaacagatgcatagttggggagaaagggaggacaggttccaggatagaggttgcaggctgagggaggaagggtaagaggaaggaaggccatcctggatccccacatttcagtctcagatgaggacaaagggactcccaagcccccaaatcatcagaaaacagcaaggagcaggaggagcttgagcaggccccagggagcctcagagccataccagccactgtctacttcccatcctcctctcccattccctgtctgcttcagaccacctcccagctaagccccagctccattcccccaatcctggcccttgccagcttgacagtcacagtgcctggaattccaccactgaggcttctcccagttggattaggacgtcgccccgttagcatgctgcccctgagaggagagcacaggcaatgctgttagcagcaatgagcaccgcagacagtgagttaggggatcaaattctatcctagtcactagtttggagcaggtctagaagttggggatagcaggtgctctagaagagattagaaggagaggtaggaaaatgtgaagtcacccatgcaggcctcaggagttgccaaccccagacccctgcagcacttaaaggggcattggtaggggcaagggggggagttagggaagccctgggtggggttagaaggaggtgaggaagaagaagaggaggaggctttggcccagcaggagcaggcctgggggcagctgcccagggaccccttctgcgactgcagcctcagggttcccagcacggctgaggtagatgatgaccacattgtcctccggccctgatggctgcacctcgttgtcaaccgtatagcagccctttccctcaaccgctttgccatggaacctgcgccccagtgtgtcctcaccaccctcaccgggcgtggccagtgccacgtccactgagctctcagcactgcccagctcattggtggccaggcagctgtaggtgccttcctccagcttgccaaagtcggggataagcaggctgccattggcaaaggcctggaagcgcggctgggagctggccacaggggtgccaggcagggcacgcccatcagtgcccacgttggggctggtgatctccacaatgccactgggtatctggatgtgccagtgaagctgaggggccggctgcccgtccacatcacagtgcagtgccagcacaaaaccaggccgcagctcggcaccatcctggctgggttggtagctgagctgcactgagggcgccgagcatggcagtggcggcaggcggctcagcggtgtacccttgagcacatggggtgaggtgcaggcgatgttgtcctgctccgggatggacacggccgtggtcagggcccatgtcttgagccacacgatgccgcaggtgcagtcgaaggggttctcgttgatctgcaggtgggacagcgcggtgagcggggtgaaggtgccctcggccaatgtgtgcaagcggttgtggttgagttgcagcgagcgcagagcacggaggctgcggaaggcgtcgcgggggatgaaggtcagctcgttgctgtccatcttgagcaattggagggcactgaggttgtgcaggtcgctccaggcaaagtcagagatgagattgtggctgaggtccaggctcttgagatggctcagagaggccagggctccggcggccaccgtgcggatctcattgtgtgccagccacagcgactgcagcaggggcacctccctgaaggcaccctccggcaagcctggcagccggttggctgacaggctcagtgtagtcacattggccgggaagccaggcggcacggattctaggtcgcggtaggcacagtcggcgatctggaagccatacttttccccacagtcgcagggctcagggcaggcctgagccaggcccaggagaagcgcccaccagagcagatgcagctcctgcatggtgcctcccgaggtcacgcagccaggcaggatgaagacgggatggaagaggaccccagctcctcctccgagtggagagttctccctccgctctcgacgaattcgagctcggccgatttggcctgat

SEQ ID NO: 435390 - DNA, 972 bp, Homo Sapiens
gtcacttatgaaacacaggtccttgttgctgcagagcaagcagttgttttgctggaaggagggagtgcgcgggctgccccgggctcctccctgccgcctcctctcagtggatggttccaggcaccctgtctggggcagggagggcacaggcctgcacatcgaaggtggggtgggaccaggctgcccctcgccccagcatccaagtcctcccttgggcgcccgtggccctgcagactctcagggctaaggtcctctgttgctttttggttccaccttagaagaggctccgcttgactaagagtagcttgaaggaggcaccatgcaggagctgcatctgctctggtgggcgcttctcctgggcctggctcaggcctgccctgagccctgcgactgtggggaaaagtatggcttccagatcgccgactgtgcctaccgcgacctagaatccgtgccgcctggcttcccggccaatgtgactacactgagcctgtcagccaaccggctgccaggcttgccggagggtgccttcagggaggtgcccctgctgcagtcgctgtggctggcacacaatgagatccgcacggtggccgccggagccctggcctctctgagccatctcaagagcctggacctcagccacaatctcatctctgactttgcctggagcgacctgcacaacctcagtgccctccaattgctcaagatggacagcaacgagctgaccttcatcccccgcgacgccttccgcagcctccgtgctctgcgctcgctgcaactcaaccacaaccgcttgcacacatttggccgagggcaccttcaccccgctcaccgcgctgtcccacctgcagatcaacgagaaccctttcgattgcacctgcggcatcgtgtggctcaagacatggggcctgaccacggcgtgtccatcccggagcaggacaaaatctgctggactcaacccatgtgctcaaggga

SEQ ID NO: 435391 - DNA, 784 bp, Homo Sapiens
  misc_feature (491)..(491): n is a, c, g, or t
  misc_feature (646)..(646): n is a, c, g, or t
  misc_feature (677)..(677): n is a, c, g, or t
  misc_feature (690)..(690): n is a, c, g, or t
  misc_feature (719)..(719): n is a, c, g, or t
  misc_feature (748)..(748): n is a, c, g, or t
  misc_feature (764)..(764): n is a, c, g, or t
aagaaaatgaatgttagtcaaggaaaggccacttaaggttctgctctatgaaggagaagaaagaggaaaaagaagtaaaggagttaggaggagacacttaaatgaaagattggcaagaaaagcagtcggactctaccttaaggagggatgggaaggaaagagttgagttggtttctttctgattcctctactcatgtagaaaacacttgtacttctggaaatggactggagactttttaaatttgagtccactattgacatggaaaccccagtggaatcagattttccctcaaagaccatgatggtatcggactagttttcagacactgcctgttgctgtccatcagcacttggtctcttatcttcagtgagaaggtgacccgccttcttcccatggtgggctgcctaaagtgcttcttttctaacccaaaacagttctactcacttccttttacagaattcaccggccatttttcctgttacctgatccnttctacagggatttttaaaaagtaagagagtttcagagaagccgatcccataatccccagtgcagccaggggtttgtgtgtcatcgtactgggagtaggaggggccgactctttcccatggaagggtgaggcacagctgtggaggtgagtgaggntcatattctccattttgttcagtgctgggantgggttaccaggntcgttaaccttcccttggggtcgggaaantttttccatctgttcggccctaggaaaangaggaaagttttaccntcgagggtgtgggttgatcc

SEQ ID NO: 435392 - DNA, 892 bp, Homo Sapiens
  misc_feature (836)..(836): n is a, c, g, or t
  misc_feature (875)..(875): n is a, c, g, or t
agcggatataggccaaggttgaggcctagtccagaagaggtctcagaggaccctggctagagtttggtcaacgagataatctttttctcccctgtacccctgccaggatttgtgtgagctccaccatctggacatctcctataatcgcctgcatttggtgccaagaatgggaccctcaggggctgctctgggggtcctgatactgcgaggcaatgagcttcggagcctgcatggcctagagcagctgaggaatctgcggcacatggatttggcatacaacctgctggaaggacaccgggagctgtcaccactgtggctgctggctgagctccgcaagctctacctggaggggaaccctctttggttccaccctgagcaccgagcagccactgcccagtacttgtcaccccgggccagggatgctgctactggcgtgagtgatcgtcctgtgtccactcttcttcacctttcctgcccagtcctcccccaccttgcaccctcttgccatccctgggtgaggggccaaggacctggacgctgcttactgtgttcttaatacctggagctcagcaggatgggcctaccacatactccctccccctttttgtctttgctcagttccttctcgatggcaaggtcttgtcactgacagattttcaggtcggtgtggttgggggggcgaggactgttgggggaagacacgacagggaggggcgctggggagagaaacagagggctggctgggtgacagggtcttcctggtccgtggacagtagggtcccgccttttggctggcttgggcaaggcagaggtgctcccaggctccaacctctctntccttcctgtcgtcacgtgccagacttcacacatccttngggctcagccccatggg

SEQ ID NO: 435393 - DNA, 1366 bp, Homo Sapiens
  misc_feature (291)..(291): n is a, c, g, or t
acgcgaggcctgggtggcgaattcggcacgaggttcctttcctcattgataggcgccgggcagctgagctggtaggaggaccagacggggatgttcggctccgccccccagcgtcccgtggccatgacgaccgctcagagggactccctgttgtggaagctcgcggggttgctgcgggagtccggggatgtggtcctgtctggctgtagcaccctgagcctgctgactcccacactgcaacagctgaaccacgtatttgagctgcacctggggccatggggccttggccangacaggctttgtggctctgccctcccatcctgccgactcccctgttattcttcagcttcagtttctcttcgatgtgctgcagaaaacactttcactcaagctggtccatgttgctggtcctggccccacagggcccatcaagattttccccttcaaatcccttcggcacctggagctccgaggtgttcccctccactgtctgcatggcctccgaggcatctactcccagctggagaccctgatttgcagcaggagcctccaggcattagaggagctcctctcagcctgcggcggcgacttctgctctgccctcccttggctggctctgctttctgccaacttcagctacaatgcactgaccgccttagacagctccctgcgcctcttgtcagctctgcgtttcttgaacctaagccacaatcaagtccaggactgtcagggattcctgatggatttgtgtgagctccaccatctggacatctcctataatcgcctgcatttggtgccaagaatgggaccctcaggggctgctctgggggtcctgatactgcggggcaatgagccttcggagcctgcatggcctagagcagctgagggatcctgcggcaccctggatttggcatacaacctgctggaaggaacaccggggagctgtcaccactgtggctgctggctgagctccgaagctctacctggaggggaaccctctttggttccacctgagcaccgagcagccactgccagtacttgtcaccccgggccagggatgctgctactggttccttctcgatggcaaggtcttgtcactgacagaattttcaagagtcacagatcctttggggctcaggcccatgggcccacttttgccctggcagtggggagtactcctggaaacctcaggtggccttgactgagtgacagctctcctcagggggttgtgtgacccagcccttggttcataaggttaagagcggagtccgtgtgaggcgggaagcatctctgaagccagtgatacgggaccgtgggcccgaagtctgaagccttctcggtggcaggtcggtggcagaagacacgg

SEQ ID NO: 435394 - DNA, 1939 bp, Homo Sapiens
atacatatagtacaccaagcatgtggtaagttagaaatgacaggaaagtgctccccaaagcagtgggagagcaatgtgttctctcacatccattcaatggcattctttttcctggaatatctgttacccacccttctcaggaacaagaaccaggacgacggggagtatgtgtcaaataagtacaatcatcactgcactggtgcctgtaatcacccggtgcacgtagtgagaaacagacattctggaaaggatttttgattctcccactaactgtccactggactggtcactagctctggatggtgctccaacaatggtcacttctcgcggagaacacaaacaccagcatcacagcgctgggttcccatggatgtcacgacttcccagctgtcgatgatagggtcataacattcaatgctacttagcagggaattaccatcatatcctgcaattgcatagagtctcccccgaagcactgtggcccctacatagcatcgtggagtggtcatactggtgacagttgtccaggaatcagtgcgaatgttgtatgcttcaacggaagaaaggtgggctgtaccatcaaatccccccaccacataaatatggtcattcagcagggctactcctgcaccagaacgcttggtggccattggtgtaacattagtccaatgtcctgtatgagggtcgtatttctcaactgaatttaagatattcaagccgtcatatcctcctagacagtagatcactccactggccactacgagtccggcaccttcccgggctgtctgcatatctcccagcatgctccactggtcaatgtttggatcatagcgctccatactggtgtgacgcctgcttccatcaaagcctccagagacatagatcatatctaggcgagcccttgtcctgggtccctgcatctgactccgaagttcaggcctcagatgaaacttctttgcttcatcaaccagatccctgcattgtaaactacagcggatgaaaggctcagcatctattacatctgtgatatacctgggggttagtaggggcatccgcacatactgtagcaggttaggcaaggattcttcccgctctttcttggcatgcttcacccagttgatgacagcctcaaagactggctcttcagaatccacctgaatttcgtcgcacttgattagcttttccacctctccttgactcagaagaatgaactcttcatgctgtaccacttcaggaatattgctttctggctaaaaacctcagctgcttgcatcaggtcaacacaattgtgggtttcagcagaatcccttatacccaggcaattagaagggtccaactgactttctaagtactcacagcaggcttgtttcacacctttcaactgaagcagacatggctgcaggaagcagttcttgtacattctccactgtcacatgtactgtttctgtgtacacgaagtccaataaaatttccatggtagaggcagtcaaaccttggatgtcaacataaggtttccccttctctgagagctcactagtgaacatggcacagaagtaatcactacaggcagccagcacaatccgatgggcagggaagtctttctgctctactctcaatgtcacatcacagagggtattgctcttcctgagggagttcattgaattgaggatggatttagcatgagtatttgtcattatgtctttgggggccataatgcctcccataaagcagtgcggagaaagaaacaaaatgggtccttggattctgcaactccgctcccgaacccacacagccgcaccgggcccgtccccagcctgtggggatggagtgcggcgcggggctagcaggcggctcgggaggagccgaagcgccgcccagacccggaggcttctggaggctctggagccgttccgggtctggcccctgcggccgcaagctt

SEQ ID NO: 435395 - DNA, 1151 bp, Homo Sapiens
aacataaagctaaacgcaatgacccagttaccccaatttcattctttttcttctgaaactgaataaggaaattatcatttaagcacatggaataatggccatgtctttttccttttaataacagtatattttaaaactcaaatacttcatatcatggaaatttgaccaagctgtacaaaggctcctaaatacagtacagtcaaaaagtttcctctttgcagactcaatttatagtcaatttagtacagataaatataggaaactacttcagattattggacaaataagaatttcagtgtgtcactacctataattaagtagcagcacaccacaaccacagcaagtaaacactaatctcctctactgcctttttggggtcttttccagtcacaggagctaatttacagggataccactgggtttcaaccaatctctgaaagttcctttattatgagttttgaaatttaactaatgcatcacctacaattctgttggctagtttttttcttactcttcactaattagttttaaatacaatatgtaatgttttcaaatttttataaacataggtgttgtactaaaatgattaatggcatttgaaatacaacaaatgggtaagatgttaaccaaaacaatgggattaagagtattttagaaagcgattttttgttaactagaaaagctacaggattcacaatgaatacagatacaatatttttaaccctgctcttttattacatcagtagtatagtaagtgcataaagtatagaagagaaagaaaatttcaggagagaaacttacacaaaacttgaagtttgatgcgtcaaacacaaaatagtttaaaacagtttacagttcttataagcactatcataattttttctacccaaataattcaggtcttcattccatttcaaactgcaatccagaaatgaagattttcagtgtaaaaactgttcagagaaatctaattcattatgtaatacatcttattaatttcagttttcaagtattcaagtaatgcatacccaagtattttctgttacagcaacacatttacagactaagcctcaaacatggggaaaaattcatttaaaataattgatacacttttctgtccaacgacatcaaacccaagacatgacaccgct

SEQ ID NO: 435396 - DNA, 2631 bp, Homo Sapiens
  misc_feature (335)..(335): n is a, c, g, or t
  misc_feature (651)..(651): n is a, c, g, or t
  misc_feature (657)..(657): n is a, c, g, or t
  misc_feature (697)..(697): n is a, c, g, or t
  misc_feature (2600)..(2600): n is a, c, g, or t
  misc_feature (2613)..(2613): n is a, c, g, or t
ggaagaggccatgataccatgttttggagccaaagaagaggtcagtatgaagcatgggactggtgtcagatgcagatttatggcaggggctgagagagaccaataataagtcttgcttctgggcagaaaaagaaccctgtatgtatcctgccggtggaggaagttggaagtctaggccagaggaggaagaggacattgtcaattcgtggttctggtccagaaaatacacaaagccagaggccattatagggtcctggttatgggactacagaagagagtcaatatagatgggactggagaaaaggccaagatatactgactgaagaggagaccantaatcacacttcctggttctggaaagaagatgaagccatttcagaggctactgacagagaagagtccaggccagaagctgaggagggggacattattggttcttggttctgggctggagaagaggacagactagagccagctgctgagactagagaagaagacaggctagcagctgagaaagaaggtattgttgggtcctggtttggggccagagaagagaccacttacgaacgagaggctgggctcttgcagcaaactccaggtcctaaaagctgaacgagggaagaatgtcacttattggggtcctgggttctngggaangaagaaggccaagttccggcgggcatgtgagcaggagatngggctttgagatcaaagcctgggactgaggaggaagaaatcactgttcgggtcctggttctggcctgaagaagaagccagtatacaggctggatctcaggcagtagaggaaatggagtcagagactgaagaggaaaccatttttgggtcctggttctgggatggaaaagaagtcagtgaagaagcaggaccatgctgtgtatccaagccagaggatgatgaagagatgattgttgagtcctggttctggtctagagacaaagccattaaggaaactgggaactgtggccacctgtgagtccaagccagaaaatgaggaaggggccattgttggggtcttggtttgaggctgaagatgaggtagataacaggactgacaatggaagcaactgtgggtccaggacattagctgatgaagatgaggccatagtggggtcctggttctgggcaggagatgaggcccattttgaatcaaatcctagccccgtgttcagggccatttgcaggtccacgtgttcagttgaacaggagcctgatccttcacgcaggcctcagagttgggaggaggtcactgttcagttcaagcctggtccatggggtagggtcggcttcccatctataagcccctttagatttccgaaagaggcagcatctttattctgtgaaatgtttgggggcaaacccaggaacatggtacttagcccagaaggggaagatcaggaatctttgcttcagcctgatcagcctagtcctgagttcccatttcagtatgatccttcctacaggtcagtccaggaaattcgagagcatcttagggccaaggagagtacagagcctgagagttcatcctgtaactgcatacaatgtgagctgaaaattggttctgaagagtttgaagaactccttttattaatggaaaaaattcgggatccttttattcatgaaatatctaaaatcgcaatgggtatgagaagtgcttctcaatttacccgagatttcattcgagattcaggtgttgtctcacttattgaaaccttgcttaattatccgtcctcccgagttagaacaagttttttggaaaatatgattcgcatggccccaccttatccgaatctaaacataattcagacatacatatgtaaagtgtgtgaggaaacccttgcttatagcgtggattccccggaacagctgtctggaataaggatgattagacatctcactactactactgactatcacacactggttgccaattatatgtctgggtttctctccttattagctacaggcaatgccaaaacaaggtttcatgttttgaaaatgctactgaatttgtctgaaaatcttttcatgacaaaagaactactcagtgctgaagcagtgtcagaatttataggcctctttaacagggaagagacaaatgacaatattcaaattgttcttgcaatatttgagaatattggcaacaatatcaaaaaagaaacagtgttctctgatgatgatttcaatattgagccgcttatttctgcattccacaaagttgagaaatttgctaaggaactgcaaggcaaaacagacaatcaaaatgaccctgaaggggaccaagaaaattagtaatggttaattgctggcctcagattgtccttatgttcctgagttatgatccttgagtaatgctttgattttaatagttggttctgtgttgcaacatatatctttagtgctgacactaactttgtccaactctgtctgtaagctggagcatttttctgatgccagctgaatattagagctgaaaacacatttgttgatatttgtcttgtccacattgtgatgttcagtatttgagcttatagtgaactgagcaatcataaataagccacccttctgattgtcgttctacntgtatatatatancatatttgagtttttttt

SEQ ID NO: 435397 - DNA, 1207 bp, Homo Sapiens
  misc_feature (4)..(4): n is a, c, g, or t
  misc_feature (8)..(8): n is a, c, g, or t
  misc_feature (19)..(19): n is a, c, g, or t
  misc_feature (30)..(30): n is a, c, g, or t
  misc_feature (41)..(41): n is a, c, g, or t
  misc_feature (43)..(43): n is a, c, g, or t
  misc_feature (47)..(47): n is a, c, g, or t
  misc_feature (49)..(49): n is a, c, g, or t
  misc_feature (54)..(54): n is a, c, g, or t
  misc_feature (56)..(56): n is a, c, g, or t
  misc_feature (67)..(68): n is a, c, g, or t
  misc_feature (77)..(77): n is a, c, g, or t
  misc_feature (83)..(83): n is a, c, g, or t
  misc_feature (85)..(85): n is a, c, g, or t
  misc_feature (100)..(100): n is a, c, g, or t
  misc_feature (110)..(110): n is a, c, g, or t
  misc_feature (120)..(120): n is a, c, g, or t
  misc_feature (122)..(123): n is a, c, g, or t
  misc_feature (677)..(677): n is a, c, g, or t
  misc_feature (692)..(692): n is a, c, g, or t
  misc_feature (725)..(725): n is a, c, g, or t
  misc_feature (757)..(757): n is a, c, g, or t
  misc_feature (780)..(780): n is a, c, g, or t
  misc_feature (787)..(787): n is a, c, g, or t
  misc_feature (794)..(794): n is a, c, g, or t
  misc_feature (796)..(796): n is a, c, g, or t
  misc_feature (798)..(798): n is a, c, g, or t
  misc_feature (880)..(880): n is a, c, g, or t
  misc_feature (889)..(889): n is a, c, g, or t
  misc_feature (912)..(912): n is a, c, g, or t
  misc_feature (920)..(920): n is a, c, g, or t
  misc_feature (969)..(997): n is a, c, g, or t
  misc_feature (1051)..(1051): n is a, c, g, or t
  misc_feature (1058)..(1058): n is a, c, g, or t
  misc_feature (1093)..(1093): n is a, c, g, or t
  misc_feature (1116)..(1116): n is a, c, g, or t
  misc_feature (1152)..(1152): n is a, c, g, or t
  misc_feature (1159)..(1159): n is a, c, g, or t
aagnaaanacagaattttnttagctaacanctatcctattnanattnantttancntcctccgtcannccggaaatncagacntnttaggccagggagantgcagagtcnagagtgggcncnnagctgcatacaatgtgagctgaaaattggttctgaagagtttgaagaattccttttattaatggacaaaattcgggatccttttattcatgaaatatctaaaattgcaatgggtatgagaagtgcttctcaatttacccgagatttcattcgagattcaggtgttgtctcacttattgaaaccttgcttaattatccatcctctagagttaggacaagttttttggaaaatatgattcacatggctccaccttatccaaatctaaacatgattgagacattcatatgtcaagtgtgtgaggaaacccttgcacatagtgtggattcccttgagcagctgactgggaataagggatgctttagacacctcactatgactattggctatcacacaactgattgccaactatatgtccgggtttctctccttattaaccacagccaatgcgagaacgaagtttcacgttctgaaaatgctattgaatttgtctgaaaatcctgctgtggcaaaaaaactattcatttctcaaagctctttcaatatttgtgggtctntttaacatagaaganacaaatgataatattcaaatttttattaaaatntttcagaatatcagtaacattataaaaagtgnaaagatgtccttaattgatgatnatttcantcttgancngnttatttctgcatttcgtgaatttgaggagttagctaagcaactacaagcccaaatagacaaccaaaattatcctgaggtggnacaacaaanttaatatgattaaccacctgccnctgatcanccttatgttcccaaagagccctgagtagtgctttggtgttcacattctnnnnnnnnnnnnnnnnnnnnnnnnnnnnntgctgatgttaactttgtcaaactcttgttttgagcttgatcattttgtggatnccaaatnaatatcaaaactgaaaacacatttgttgatatttntcttgctgtccatgattgctttntttttcattattaagtttttaatgaattttttctcntaagtangctacccttttattcgttttttaaatatattgttctctatttagtctg

SEQ ID NO: 435398 - DNA, 713 bp, Homo Sapiens
ggtgtttgcgcaatgtgtaacatagaactttattgaaaacacagactcaaatagagaaccatatatttaaacaacgaatagcagggtagcttacttaggtgacacagttcattgaaaacttaatactgaaaaataccgcaatctggacagcaagacaaatatcaacaaatgtgttttcagttttgatattcatttggcatccacaaaatgatccagctcaaaacaagagtttgacaaagttaacatcagcattaaaaaatataagttacaacaaaaaaacagactgtgaacaccaaagcactactcagggctctttgggaacataaggctgatcagcggcaggtggttaatcatattaactttgttgtcccacctcaggatcattttggttgtctatttgggcttgtagttgcttagctaactcctcaaattcacgaaatgcagaaataagcggctcaagactgaaatcatcatcaattaaggacatctttccactttttataatgttactgatattctgaaacattttaataacaattcgaatattatcatttgtctcttctatgttaaagagacccacaaatattgaaagagctttggcactgaatagtttttttgccacagcaggattttcagacaaattcaatagcattttcagaacgtgaaacttcgttctcgcattggctgtggttaataaggagagaaaccccgct

SEQ ID NO: 435399 - DNA, 1033 bp, Homo Sapiens
  misc_feature (44)..(44): n is a, c, g, or t
cccaagtacctatgtatgagcaggcagcagcagggcatggccantctctccttttagcctctgtgtttcattaggcattcatcctgccaaccagggcaggcccggcgtctgggctctgggaacaaatggggcccacatcctggagtggcaaattttgggggatgcgctacctgtcccagctggccctgtgcctccaacccagagctccccacagacctggtgtaatttcacaagggccatccctttccccaggcttccctgagggaggcggaagtttgaacccttatgtggggttcattgggctagggtagtggtatgaggtttaaaactatttaaggattaggaggagaaagagtcttcaggaaactcttgtttcactggactctgcagcctgcagaactggggcaagggtaggagttccagtaggggaaggagcaggtagactcttcagctgcctcagctgggactgaagacctaagctgattctctttcctctccactcctaagaagcaattttctgttcctctccttccaccactttttactttctgctatctcccatctcccgcttcccttccatttcctttctagaaaaccctgggtatttagctcaggccaaactgccttcagcagaaaaggtggccttgggacaaaactggtccaagaatttgaagtggcagtacttgcggatggctctgtccagcaaggctcagctgcttgttgcgtctgctttccctcccctaacagaagggtaccctggcttattcagggactccttagtccacactgtgtcacctgatgccttaatctttcattgcctggcgtgtggcctgggagatcctgggcagccctccacacatttcctagtcaagtggtgtggcctggagattggatgtctgcctcaatcgactccaggggctgaacaggtcagaactgtcgcaccagcaggtaagtttcttttgagccaaccgtgttggcggtcagggaccagccaggcgaatttggtattaccgtcggggggggcccgtccttt

SEQ ID NO: 435400 - DNA, 458 bp, Homo Sapiens
  misc_feature (23)..(23): n is a, c, g, or t
  misc_feature (87)..(87): n is a, c, g, or t
  misc_feature (108)..(108): n is a, c, g, or t
  misc_feature (143)..(143): n is a, c, g, or t
tggaagttctaccattgattcanagcacaatgcaactgggtctttggctttcaaaaaaaggaaggaccttaacccctggcttacttnccccgaacttaagtcttcttnaccaattgtcttcagtccaatttggaagtcgattnaggcaagagcaagtcaaatctaccagggccagcagccactctgacttagggagatgtgtggaggggttggcccaggatctcccaaggccacaccccagcaatgaaagattaaggcatgcaggtgacacagtgtggactaaggagtcccctgaataagccagggtacccttctgttaggggagggaaagcagacgcaacaagcagctgaggccttgctggacagagccaatccgcaagtactgccacttcaaattcttggaccagttttgtccaaggccacctttctgctgaggcagtttggcctgagctaaatac

SEQ ID NO: 435401 - DNA, 1403 bp, Homo Sapiens
  misc_feature (211)..(211): n is a, c, g, or t
  misc_feature (557)..(594): n is a, c, g, or t
ggcctcgcgggtggtaaaaaaaagtgggtgcgagacaagtacgcaagaatatgcctcggtgtgtaggccgtaaatattcttgtttactcaacgctagcctacgtgaacaattttgcgcggtgcgtgttggggtgtagacccaccacccggtttattaaccccgctctgggtggaagagttgggttatagaaatggtgcggcccgtatgggngaggcgttttaaaaaaatttgccgcagtggggggggatagttgtgggtcgcccacaagtgtgggtgtgtcggatcccccggacgggtttaggtatatgggggggtgccccgtttgaaccacaatggttgcccccaggctgacgagccgctggtgccccacggtcgcccagcaggtgtgttgtaaacgagggggccaccatggcccagagcgctaataataaacggcgcctcacaaataggggggcccaccttgtgtagcacaaaaaaaaggggggaacgggcgccaaaagggctgggggccccctctcggaggggggagaacctctaagaggcggcgcgcgccccnnnnnnnnnnnnnnnnnnnnnnnnnnnnnnnnnnnnnnaaactaaagaaataattacagagagaaaaaccccatcccgtcaaaaaaaagattcagcattcttctccatcccaccccctcactgaaggtttgaagtggaagtgacctcactctctcggtgtccctgacccacgatccctttcactcattggtgagcacaccagattaggtacaagaatcaccagagcagcatcgtgaagcaccaggctctccagagattcctgcagcccctcattcccccagaggtgcagctttaccagagtggagggtgagagcacaaaggctgggtctgtcttcaggaagaagagcttttgcagaagcctgatgagagtttcaagttcacccccaggatagcccttccagaagcagaagggctgaggcggagaagctaggcttaccagagttgtaagtactcggctttgatcaccgctctgtaccgctggtagctgtttttgtgtcctaaactacaggggagttgaggtgggtagctggttggacaaggtatcctgccaggcaacacacagaagggcctgaagtagccccctcccttcttggggaggggaagaaacgcaagagcgaactcctgcaggtggcacagctgggctaaggacttgggtgcatctgacatgaagaagccctgggaaggcatggggacagaccagcgtgggctggaggaaaggaaggaggtgggtcagggtttggtctctggattctgaaccccaaaggagcctttccaggaatggaaaatgcctgggagggggagagtcccaagagaggcaaatttcccagagataagtgcctctacccac

SEQ ID NO: 435402 - DNA, 1613 bp, Homo Sapiens
  misc_feature (141)..(295): n is a, c, g, or t
ttttttttactgcagacctactttattatgcaccgtgatgtttcaagtatcacaaaccattacaaagcaatataatcaccctccttcccccttactgcttcaaactattgtggtaaaaataaataaataaagccctggctnnnnnnnnnnnnnnnnnnnnnnnnnnnnnnnnnnnnnnnnnnnnnnnnnnnnnnnnnnnnnnnnnnnnnnnnnnnnnnnnnnnnnnnnnnnnnnnnnnnnnnnnnnnnnnnnnnnnnnnnnnnnnnnnnnnnnnnnnnnnnnnnnnnnnnnnnnngccaccacgtgggggacggagtaagactcagttcaaaggcatgacgaaaatagcaaaaatgctttagtgttatacctgttacgaatttaatggaaattacaagtaggagcccattacaatctctagccttaaaatgctgaaaacatacacagtgtgacaataagtaaacttcgagacccaataagggggaaagtccaacgtggaaagtatttggtaggagtgaagaacagagtgacaactgcttagtcccactggatatttcgctcctcttcaggaagaatactccagtttggggaggccatatcccgggccagccagttaaaatcgtcaacatcgttccagttatttttgctcctatctaaaccagagctctcgaagtccttgtcgatctccgggtagctccaggtgtaaggggcgaactggatcccactgcagtcctccacgatggccctgctggtcacctgcaggaagatgcgggtgtctttcgtactgtgtatgcggagctgttggcaggccactgccagcacgcagtcactgcagtcctccaggaaaacagaggtagacaccggaccgcagagcagcttgcagctgtgggccttggttagccgcagggtgttgggatttccatacagtctgaccgtgcagttgctcagttcggtcaaaagaacgtcgcgctggtgcaactcgctggctctcttctccaagacttgggactccaggttggagaaaccgcagacccagctggggccgaggtctccttccgccttcttgggcagcggggagtcctgtatgctttcaactgccggggggatgccaggagccgcgtctactttggtagacgaagcagcatcctttccccgggtcttgaaagcgaaacgcttcttgggctgcagcccccggcgccgctcggccaaggccgcctgcagccgcgccagcgcctcttgtccctgccgcaggtcgtaagcggctaggaaaaaaactgagtcgttgattagtttctgcagcccctggagccgagaggccgcctcctccagccgctcgaccgactccgcgcgctccagaagctcttccacggccgctcgctcccgagcaaaggtggcgacgaaaaagtggctgttctccttctctacctcctggttctgccgcttttgtttccgcctttcaacttccagctgccgttcttgttcgcgtctctgaagccgctcaggcaccaggctcaggtcccgctgggactccatgtctccggtcctgacagcagcagcggagcaactgacggactccatattggcttcaagcttcctctctcttgtcttccgct

SEQ ID NO: 435403 - DNA, 1734 bp, Homo Sapiens
ttttttttcagcaggcagaaatgagtttattgcattagaaaaaacaccgaagaaaaccagcaaacacctccgtactagacagttattagtttgactcaagggcataaagaaaactcagatactagatttacttctgggagggggtgatggtctcatccctcctccttccctatccctttaaaccaatggacctctagaggtgtccactgtgcaatacaagtacgtgactcatttcccactgtgcttgcctgttcacatccaggcggagttagccggccacaatgagaatgctcctgaggtgctgggacagacagaaatatgaggatgggggtaggcagttgaagcctgagcctgagtttacagttagtgacagtggggctcccattgggagggagagcttgccttcccatggagctctgggaaaactgctcagtgatccctcgctctctccccacaaaccctagggcacaggcaatggcacaaatggctgctagtataaaggggggtgctgttcaaggaaatgagtgactcaaattctctcaggggagctgctcctgggcctaagggtgcctgctggaagaagcaaaccagctgaaactggatctgggagaggagaaaggaaaaaaaggagctgtgatgcccagaaccccctggatggaggggagaccccaggcagaggggtctggagcaggaccctggaagacagagccgggccaggcaagctggaaaagggaacaacactggtgggaaacagagcactggccaaggccaacctggtaccctcccagaagaaacccagcctcagaaattcgtttctctttgggcccaattctgctagtagatcacgattatacaacagtccctgctagtttctgctctaatcgtattatttccatgcacactggcaaatcagtgggtcttgagaagaattaaactgttcaatcatttggcctctacaagttcccaaatgtcacttgacatcccagctggtcatgcccctggtcaggtcgcaggcaaacactaaggcagaatgacagctcctctagctgagactctgatgatgccaaactgtgatggctgatggcaaagatagcagcagatggggccagaaatgagcagcagctttttggagaggaaaggcctgtgctgcaggccagacttccaggaagaagcaacataattcaagtccgtgaagtggcaagttgtggcagaaggggcccaaggatgtcagacctgagactcgggtacctggcagctctgagtcccttcttcatgctcactttcccaaaatctaactaatggaggttcatgtgaagagagggaatctgaaagtctctctggattagagactcccagactgttccctgcctataacctcctagcagcaagtcattaggaaaatgcccactcatgccccaacctgcctttctaaagtcagaatgacaatggaaataacgtgtgccttcaaaacacatttaggataagggaaagtccctatcagaaacgattctaaattttcttgccaccttgattccacttcattattttatttttttgagatggagtctcaaaaaataataataattaaaataaaggtattttcttagagtagggaatcccatcccttggtccccagctaaatactgcgtactggcctggatggtggttacagagactgcaaataacctacatcattacttgcagaaaaaaggccttggcttctactgctccagc

SEQ ID NO: 435404 - DNA, 413 bp, Homo Sapiens
  misc_feature (397)..(397): n is a, c, g, or t
gcagcaggcagaaatgagtttattgcattagaaaaaacaccgaagaaaaccagcaaacacctccgtactagacagttattagtttgactcaagggcataaagaaaactcagatactagatttacttctgggagggggtgatggtctcatccctcctccttccctatccctttaaaccaatgggacctctagaggtgtccactgtggcaatacaagtacgtgactcatttcccactgtgtcttgcctgttcacatccgggggggagttaggccggccacaatgaggaatgctcctgagggtgctggggacagacaggaaattatgagggatgggggggtaggggcagtttgaaggccttgaggcttgagtttttacagtttggttgacagtggggggntccctttggggagggg

SEQ ID NO: 435405 - DNA, 1735 bp, Homo Sapiens
ttgtggagcaggaggttttattgtaaagaggccgattgtacagagcaaagattgttctgacacggggggctgggtggtgggacccagaggccagagctgggtgaaggatgaggggtggcatcgccccatccaggcagtgggcagggcagggaggactaaacggctgcctcccagttcccttccctgcccctcattactgggtaagagggagccaggctatttccacggatccaggagaatatagcaggagaccctcaccaccccacaccatgccccaaggatacgggaggtgccccagtctggcttttgcagtcggccagctcccagcctcctcgaggagcagcctggccacacctttttcccctggagcctggaacagctggctttgggttaggaggctggaagcacccccttaccctgtccaggcacctcaagggacagcccgtggttccctggtcaaaccccttagggcacagtgacccattggcttctgcctctggggctgggtagcacaggagtgggtgggcactgaggggccagcactgagccaggtcttaaagagggagtccgagtgttgggggcagtggtctctggtgggggcatagccccagagatggggctcctgtgagtccagcctaggggttgagggggatctgagccagttcacattgtcctggccacaggggtctctagggcatgacactcagggccactctgcctgttccaggccctgatcgtggtaatttaaagctcagaatggtggatgggggaagcctcagggaccaaggccctgccttcccctagactgagcccctcgtcggcttcatcctcacacccgctgtatctcaaacagcttcacgtcggtgtcgtaccagacaggggggtccacattcctcagatagatgacgccccacatgtaggtgcggaaccacatggcagtgcccgagttggcctggtacttgcggatgaggatggggtggggcacgggcagcagccccaccagggtgccatgctgcaggaaccgcaggatctcagactcatccgtcaggcccttgtcgatgcagatcttctccacctgcggaaccagcacctgcagcagcctcatgatggtctgcagcggcagcttcgacttccaggagaggacccactctggcgttgggctccactgcccactggctgatgaggtggacggtcgccgctgctccctccacgcctggctgggctcccccttagctgggctgccatcctccaagctctgctggggctcaggttccagggaccgcaaggtgccatcctctgacacctgggacttctcggtcagcttgtcaatgcctggagtagccaccagactggtcttgagggtgcctggctctgcaggggcagcggggcgggagccctccatggaggtgccctcctgggagccggtgcgagacaagggctcaggtgtccgccggcgccgctgcagggccttgtgaatggtgggcgggtccgtgggcaggttggccagctggtggaagatgctgcgcttgcggatgatggcgtagaccaggttggagttgccatcaaactggtactggatgatgttgttgaagacctccaggaggaagaagaccaggtggtggttctgggcggcagagaagaggaaccaggtggtggagaaggcctccagcaggtgcagcaacttgttggcggtcaccatggacaggctcttgaggtagggggacacgttgaccac

SEQ ID NO: 435406 - DNA, 1278 bp, Homo Sapiens
  misc_feature (114)..(122): n is a, c, g, or t
tttctcactccccattttttcctcgggcggggttagggacccctgtggcccccggggccctgggggggaggggaaaactccctgcctctgggagggggtcccagccccaaagannnnnnnnncccctagatctccccccgggtggggaattttggggggcccacccctttttgggcctcttcctgggtccaggggaggaaactggggggaagtttgggggggccagccccccagccttcaagccagggttcctcctgcaaccagctcaaaaggaagcaagcttcccccagcttggatgggggtgccaccaggggttaggctgtttttcctttcggtctagctcccaaaccccatgtgctgtaccacctcttcgtctgcccagtgataagagaggagtggagggagctgtgtagtgcgaagagggggctcccagggctggcaccttgcaaggtgtccctggctgcactgagctaaggtgaagtgacagagcagatcatggactctggtaccatccaccggcagcagtcccaagcctggtgagttggcatcagcaggaagggggatggggagattcctgtgttcgtaacggctctttgttccccgggcacagtgggtggacaggaggtgggagaggacacccgtagaagcagcacatctggcttctccttgtccactggatgcccaccctcaaagtcttccccggtcccatctgcccgtgcactggccctgagacctctttgtagccttgggggcaaggagatatagccccctccccactggggtcctggggcccgcccctcgcctctcccagtgccaggggggcaccaagctgagtctgtctgggctcagaagcccccgctctcagagctgctccggctgtggtagctgggactgggggtcctcgaggggctgcgtgtccggctgcgggtcccatggctgcgactgctgtagctcccgtggctgtggccggggctggggctgcggctgtggctccgggtcgagtagtcgctgctcaagcagctggaggaggaagaggggctgggccggtagtatggaataggacgcttgcgggcgctggtgatgcgccgcggctccatgaagcttggcgagtcccggcgccgcttgcggatgggcgagtagctgcgggagcggcgccgggcgcgggtggcctcggcctcagagtgccttgcgcggccctcgccgtccttgtcccggctgaggggcttcttgggcgacggcgagcggctggggctgtgggccgcttctccgcagagcgcg

SEQ ID NO: 435407 - DNA, 300 bp, Homo Sapiens
  misc_feature (78)..(78): n is a, c, g, or t
  misc_feature (121)..(121): n is a, c, g, or t
gtgtctctaaggccagggctcaggggaaactgaggcaggaagccctggccgctgctgggatggggctcggggcctggnatggcctgtaatcagctttttcttcccggcagcgccgcaagcntcctattccatactaccggcccagcccctcttcctcctccagctgcttgagcaggacctactcgacccggagccacagccgcagccccagccccggccacagccacgggagctacagcagtcgcagccatgggacccgcagccggacacgcagcccctcgaggacccccagtcccagct

SEQ ID NO: 435408 - DNA, 664 bp, Homo Sapiens
  misc_feature (250)..(355): n is a, c, g, or t
tggcttcctgccatcttcctccacttcaatctcacaggtaggctccagctgtggcattggcctctcttcatctgagttgtcaaagggctcattcagtacttctgtcgtctctgaaatggtctctgttgttacactgctgttgatcctcctgcgtttacgaccccttttcttctttagtacaaaaggcctctttctctttatggcaactgactgtggtttcgtcaatcttgggggagagctttgaatattnnnnnnnnnnnnnnnnnnnnnnnnnnnnnnnnnnnnnnnnnnnnnnnnnnnnnnnnnnnnnnnnnnnnnnnnnnnnnnnnnnnnnnnnnnnnnnnnnnnnnnnnnnctgctctctttagacagctccagcagctgccctcgctcccctgtgactggccggctctccggggaatgcaaatatttatttttcgattgtacttttgcaggtgattgcctactgttagctctagttgacaggatttcttgttcctccttctcccagcagctagcttgttccattagccgctcagcctctttctcagcttctcgctcttcttcagacactgcagcattagaaattaaaattggggtccacctcagactgtctggatcaagttcattggctctggaacaggttttcagcttttccatgtgg

SEQ ID NO: 435409 - DNA, 882 bp, Homo Sapiens
  misc_feature (4)..(4): n is a, c, g, or t
  misc_feature (36)..(36): n is a, c, g, or t
  misc_feature (54)..(54): n is a, c, g, or t
  misc_feature (265)..(265): n is a, c, g, or t
  misc_feature (437)..(437): n is a, c, g, or t
cagntgttgtagggatcccttagcccacagggtcanaggcacacacggtgttgnggagggaggtgaagaggggcagggcatgtctgttctccgtggaaacaaaagaactgaacccatgggttggtgctgccaactttccggagctgggggcaggtacatggcctcggagaagcatgtcagcagcagtttcagcagctccatccggttcatatcgtggatgtagttaggctggggggagtgagcgaaagcccacaccagcctcccnagatgtattcacagctgtccagggagtggacgtcctctgccgagtccacagtgctcctccggtggctctgaatcgtgaagtccgggcagaagagcagttcagcaatggccaggagcagggacttctgccaggggcctggcatgctcatcatcctcttctccctgccctcctncgccctgccccgggcactgtggaccagaagaagcccctccagtcggggtcctcaaagatgtagggcagcacgcgggtgagcagccggctgcagttcaggacgatctgcttctccttctccgagtggcagccactctcagctccctgcaccagcttctcaacggccttgtagcacagggtggccaagttggagggtgactcttcccgcacggcccggatctctgctgccggcaccagtgcaaacacatcctgcaccgaggtggctgtgtctgcccagaactggtcccaaaaggcatcatcggtggcttccacgggctgcgtcttggtggtgagctggatcaccgccttccggaagttcagcttggagtcggtcgaccccatgtctctggagcccgctccggcccggcccccgcccagactccaacccggctccggcttcagcatcc

SEQ ID NO: 435410 - DNA, 986 bp, Homo Sapiens
  misc_feature (959)..(959): n is a, c, g, or t
  misc_feature (971)..(971): n is a, c, g, or t
cgagggccgggggcggggcgcgccgcttgtctcctgcgagagccgcgggggccgcggagctggagccggagctgaagccggagccgggttggagtcttgggcgggggccgggccggagcgggctccagagacatggggtcgaccgactccaagctgaacttccggaaggcggtgatccagctcaccaccaagacgcagcccgtggaagccaccgatgatgcctatgaccctgtgggctacgggatcccctacaaccacctgctcttctctgactaccgggaacccctggtggaggaggctgcccaggtgctcattgtcactttggaccacgacagtgccagcagtgccagccccactgtggacggcaccaccactggcaccgccatggatgatgccgatcctccaggccctgagaacctgtttgtgaactacctgtcccgcatccatcgtgaggaggacttccagttcatcctcaagggtatagcccggctgctgtccaaccccctgctccagacctacctgcctaactccaccaagaagatccagttccaccaggagctgctagttctcttctggaagctctgcgacttcaacaagaaattcctcttcttcgtgctgaagagcagcgacgtcctagacatccttgtccccatcctcttcttcctcaacgatgcccgggccgatcagtctcgggtgggcctgatgcacattggtgtcttcatcttgctgcttctgagcggggagcggaacttcggggtgcggctgaacaaaccctactcaatccgcgtgcccatggacatcccagtcttcacagggacccacgccgacctgctcattgtgggtgttccacaagatcatcaccagcgggcaccagcggtttgcaggccctctttcgaattgcctggttcaccattcgtgggttcaacgtgttcccccttaacttcaaggaggctgttccntgggtgaaccgncaacaagtttgctgg

SEQ ID NO: 435411 - DNA, 353 bp, Homo Sapiens
atcaaaacagtatgttgagagtctctttaatttttagagtaaatatgacacaatggatagctttagaacaagctaacattactacagttcaagcatgtgcaactggtacagttcagtagtacataaacgactcaaacaaatgtacgacaggtcagaaacttaagttacaaaatagagtcaatattacaattaacacagagaagtaaaaaccattgctctcagattctgcacacttaaaaaaacataaactttatacagtaattgaaattacgcatttctactcagattattagagcatattacaaacacacagaagcctaaacagttatggtcacattttggttttgttccag

SEQ ID NO: 435412 - DNA, 1775 bp, Homo Sapiens
  misc_feature (902)..(902): n is a, c, g, or t
  misc_feature (1630)..(1669): n is a, c, g, or t
tcggtacccttttcacaggaaagtatatacgaaatatctgcttttggaataagcagaatgaggctaaacatgggttatacaaagggtatctggaaactgaagagcaacttgttagaaaactgacaatgtcgcaagatgtactcagttttgtttctgtgtgacatgcaatggcaactcatgtggacactattgaagggatgtgacattacctcctgtagatatgctaacagtgttattctttcatttccaagggttctctgtggctttgtgtatatgtttcccagaggtcatttgattacctaatttactgaactgatttagcagggaatggaatccattccaactattgcacgtggatttcccagctgcccctaaatatatatacttgtgagtggcaaagtggcactaatgaagcttttgccttttgtacatttgagatttttgtatatagtgtttgctgcaaggcctgtgggaattaattcgttgcatatagaggtatcaactgctgcatgttcaggcatattataaaactttagtctatgaaagaataattataataatgtccaggtgcaatactctgtaagtctattggttcaagttaccgagagataggtgtgttcctttatgggggatgggggggtgtgttggggattctttgtattgtttatttcattttggtttattttaaaagatgtaaacatatattaagctatattaaatctcacatacagttcttctgtgctctattataccctgatagagatgggggagagaaaggaatgtttttgatggtggtttcaaagctcggacagtaactatcttgagcccattagagagtctgtgtccatatttgcatctggctggtcatagcctttgttactaatgatgacattcagttctcntttgtttttattttttaaaaactcaggtgtaattattatctgttcttaagataattgcaaatattaaatattatgatatatcaattcatgtgtttggcataccagtgaatgatgaagaacatgagattaatttaatttatcttcggtaacttgacattctggagagagactatcttctggagttgagtacaagcacagaaacatctttacggtggcatcatctcattttttaggaagacatgataatactgcccatcatattcatgtgtaactactgttctttcttctgctttcttcaccataataaactttggacaaccaagcaagctctaaccgcaatgccagatggccttgtccgagggcctagtgtttgcacggcagtgggaactgggcctttcctacaggacaactggcaagtttgctgggaagtcaaataatacattccacctggcagctgaaggcagccagtcagtctgtcccagaaagggcccttttcagcacccaaagctgggctggctgggatgcctctggctgggtgaagttctcacataggctgatttaaatccagcaaaggtctatagaaaaaggcttgcgtgttcgttgagtaatcattgtttcattttcatttttacgagagtttgaaaatagacacactgttaacacttctgccagttttttctgatctttccagccccaccccctttctctttctctctctctctcaaagnnnnnnnnnnnnnnnnnnnnnnnnnnnnnnnnnnnnnnnntatatgaaggatagctgttcttctgtgttctctcattatggactttgtgaagtagaaacataattttttttcctccaaaggtgaaaaaacaatgcattcttgcttt

SEQ ID NO: 435413 - DNA, 350 bp, Homo Sapiens
cgagtgggcctgcggacacggtgctctcggttctcttcatcctccccgcggccggccccaccagctccagctgctccccctgtggcctcccaggagggctgggtctgggccccggggagtctcgtagatgaggatgttcagggtctcctcgaagatccgggcctctggaaattccaccttggtctgcttcttctccgtagcatagacaatggaggtgcagcacacctcggcgattttgcggccctgcccgtagaaagaccagcagcagatctcgtcccccaggacatccttgaggaagagtagccgcccgtggaagcgcagggccagcttgtcgaacagctcgatgttct

SEQ ID NO: 435414 - DNA, 903 bp, Homo Sapiens
  misc_feature (20)..(20): n is a, c, g, or t
ctccagatggcctggtagtntcggcggcggttcgggtgtgcaagagctgaggtccagcatgtcggtggggcccagggcagcagcatgcacttccggatcaggggttccgtctctccgtaggcaaagtctcgggtcacctcctcgccagtgtccaggtccctcaggggccacagcagcgtgtaggccacctgctgcggcatgtagaagaagggtgccgtggcgaagctgggcacgtccgcgtgctggatccgcgaaccgaactcgtccatgatataccacaccggcatcttctcctcagctgtcccatgggccagctggtaggtctggttgaacttccacatctcctccagcaccagggccacagcctctgtactgggcagctcaccgtggaactcaatgcccatcaggttggccatgcggtgcagcagcccgggcacctgctgcagctgctggcgcgcgtgctccacacggcacgtccaggcgtggtcgatgaggaagatgctgttggggtgggctgcctggagcccgctctccctggtcacgatgaccttgtagcacagctcgttccccgggttgggctgctgcttccgcacctcccgggctgcctcgtcctcctcctcttctacctcctccacttgcatgatcccaaacacttccccagcgtcgaaaacctcgtgctccagcttgtgcaggaggcggccccagtaacgttcggggacccccgaagcgcgcagcgccgggccgtgcagcgccgcgaactcggccaaggcctgcgcgccctcctccggcgtctggcccgggctgctacgctccgcaggccggcgctcgggaccccgctcggcctccatggcgccagcacccgccctcgtgccgaattcgccacccaggcctcgctacctagaa

SEQ ID NO: 435415 - DNA, 1654 bp, Homo Sapiens
  misc_feature (111)..(111): n is a, c, g, or t
ccttaacccctgcccctcccttaattgttggccaaggaggaggacaggaggcgtgcctaaagggaccatggttggttggagtacagggtaggaggatgaggaaaacaaganggggagctggagatttggcccaaggagccaacttcagaaggacaggagagcaccgagcattaggaggaaagccaagggcagcagcagagggaagccagttaatgtcatgagagaccaacggcagtgatgtttgctggcgcagatgcagaagccagagggaggcccctccaaccttccctggtgaggcaggctgggagcagagaaagggttaagagagccaaccccagacagagaacctcagaagacagggccgcaaggacaggcagggggaatggtctttctctgtttctcttggctagtggggctgcggcaaggatcaatgttctgaaggttcagagacagggcaagaaaagggcagggggctggcaggagggctgcatggccccgaagcagctcagctctttggtatgacactggcggtgtgtggggcatccggctcactcctccttccacactgcgggcccccttggccgctcgcctctggcgccagcgcagctcctccacctggcgttccagccctcgcaccttggcctcgagttgggccccagaggctcgggagccagtgagccggctcagcagggcgtagaggatcagcaaggccaggagtagcagggcccgggtggaagggtcgggcaccgacctcatcagggccacgaagccggccaggaagatgacaagcttcaggccccacaggatccgccccagcaaggccaagaccaagccgaggagcagagacagcagccagtagacgaccagggcccctgctccccacagcaggaaggtctggacctggccagggctgagcttcaggccctgggcgaggtaatcaccagctagtcccaaggcattcagcagctgtgcggcgatcccagacagagcaaagaaggccacagaaatggctgatgagatggcccacaacacttgggacgaagactctgacaccaggtgcatggtctctggcccaatccaggcatccagtgtccctcgcacagatcgacctatctgggtcaagacatcaactggggcttctctcttctgttggcctggtggtgcaaagtctcgacgggactgggccaatgctgagtggaggaggataagggccactaggaccatcagaatggctttgaacacatgctttccccatggtgaactgatgctggaggctgccatgactgggtctttctcaggccactgctatccttcacgtgcgacttcgctgaaacgcgccaccaaacccgcgcctcaactcggggcgctggtttaccttctccgcatgcgcaaggcgggatgagctcggagactagccggccttcctcacaatcgaagcctgtgccgggagcgcatgcgccccgctttatctattgcgtttctttttccccccacaagcattcccaccgagagaagaatgggatcggaagttccagcagggaacggaagtctctggctggaaaggggaaataagtgactatatctgggctgtagagtgcctcgtgccgatttcagccacccagcctcgtacctaccgattgtttctcctccccta

SEQ ID NO: 435416 - DNA, 1665 bp, Homo Sapiens
ggaagggagctgcaacagccatgggccagggttgagcacagccacccttggaaataagttaaataaacaaagccgtcctaaaaattcgtaggtaacagcataactgcccaccttccccccagaagggccggcagccgccaaaaatgtagtgcttggagttaaagggggtgaccccacttcttaaactacccacaagggaggactacaaagagttgtcagttattgctttaaggaacaaaggtctctaggtaggatttatcttctgctaaggcattaaggtaaactgagtccccagtgaactttcaagtctttttaagggctctaagcaggactgtcagctctgaggctccccctccatgctcttcaaagcctgggtgggtgtcagggtgtctggcagagtgggagtggaggctggccagctggctgggccaccccacccgggaggagggggcagtgttcttcccagtcgcagtctccagtgatgagcatcccctgttggggccttcggtggctctcctcagcggctaatgcagttctggacatccacaaagcctaggcgttgcctgcgtttccgctgctccgtcatctgctccttgagctcgttgagctgggcagtgaggtgggacaccagcttcatggtggagttgagcttgtcctggagaatccgaatctcattctgctccccctcgccctcattgctgacaagggacatggcccgcatccgggggaaccagtccaggttcttgttcttgatcatctgggccacgtagctctcagggcccgtgtagtcggtcttgttcttcacgcggaccagcacaatgaagtacaagtagttccacatgttgtgctccagcttgatgtgttcctcaaatgacactgtcttgttatcaaacttgtccctctccagaccacagatgaagcatgtcgtcttaagaatctcctccttcttctgcttctcactacgcaggtcagcgaaggtgtcgatgattaccccaaagatgaggttcagcacaatgatgatgacgatgaagaagaacaggaggtcatagaccactcgggctgggaagagagactcatctttggagggcttgcggagaatgtcgcccacgccaccaccgttgcgtagcccatggttcatgacagtgacgatgcacatcaacagagtgtcacaggcccgctctgtgctgtccagctccctgtcctcttccaggacctcaggcaccgagagccctgagacacagtccatcttgtccccactgcaggtgtccacaaatgcagcagctccatgtggcatccccagggggctggctgtggagtggttgttgggcagccggtcgacctcgagaatgaagtcatccttgaggaagaggaagccgacgatggagaagaggtagaccaggatgagggccagcagggctgtcagcaggatggagcggccattgcgggtcacactcttgatgacgttgaacagcgtctcctcgcggtagatgaggtcaaagagcaggatgctgtagaacagctcatgagcaaagaggcccaggacactggtcaggatgtagcccacgtggtagaggaattccatgtccatgaccatggccttatagccccggatgaaggtgccacggttgcccacgaagctcaccacaaacacgatcttgttggtca

SEQ ID NO: 435417 - DNA, 3207 bp, Homo Sapiens
  misc_feature (19)..(19): n is a, c, g, or t
  misc_feature (28)..(28): n is a, c, g, or t
  misc_feature (34)..(34): n is a, c, g, or t
  misc_feature (106)..(106): n is a, c, g, or t
tgcccaaaaacccaatctnccccctgcnatggcnaaatcaaaactggggttgaacaaccccctgccttgggccgcctaaaaacaaggcccaaatggaaaactttantaacagggtggtggggccctctgtctctcatccccttcctctgaacagctgcccaggtaggtcctttgaaggggatccccatcactggagatgggggagtttaaggccctcttgcctagacatcctcttctgcatctggagtgcctgcatgaagatgaggcagcctctgttagtgggctggttcccaagctgcacaaaatccagggtttgtgacacgctaattgagaacaagggtttggtgctgacatcgacatccttaaagcaccccgatagggccctggcccgccgccagtgccgaatagcagctgggcccacaggggaagacgggtgccaagctcttccacagcacccatggagggaaggtgccaggcggcctgaccaggcctgttggcatctgcttaaccctagatgacggagcagcggaaacgcaggcaacgcctaggctttgtggatgtccagaactgcattagccgctgaggagagccaccgaaggccccaacaggggatgctcatcactggagactgcgactgggaagaacactgccccctccctcgggttgggtggcccagccagctggccagcctccactcccactctgccagacaccctgacacccacccaggctttgaagagcatggagggggagcctcagagctgacagtcctgcttagagcccttaaaaagacttgaaagttcactgggactcagtttaccttaatgccttagcagaagataaatcctacctagagacctttgttccttaaagcaataactgacaactctttgtagtcctccttgtgggtagttaagagtggggtcacccctttaactccaagcactacattttggcggctgccggcctctgggggaggtggcagttatgctgttactagtgattttagggctttgttatttaacttatttcaagggtgctgtgctcagccctgcccatggctgtgcagctccctccgtgcctcagatctgctgtagccagtgcagacctcactgtcgtgtccatgccacccccggcatggctccaggtggcctggtgactccatgatggacgatcttgctcccaggacctgcctcttcccaggcttcctggggaagagttgtacgcccaggcaacaagggctgagctgcgcttgcgtggctgtttcatgaccgcttgtttttctccttttggtgtaatgttttacaaatcctttggcctgagaactaatatgttaattggcttaaataaattaatagaaatctagtccgttaaaaagggatgtgtttcctgcactcccccgggggctgtggggattaacaggacacactggcagaagacaggaacaagagcccctccctgctggcctggcctctcaggctctcaggagatacgctgagtgacatcctgtctcaagggtcctcccctgagatttgcctacccagaactgcatttcggcataactggtttctacggcagtcctgtcgattttattttatgcatttcagaacatcctgaggagtctagacacagacgaggttaagaacccacttccactttgtacccaccagggccgctgtgggcccagccctgtccctcacggttccagagagaaggatgctcaatatcagtaagagccaaggttccatggaataacgaggtgaccctgtgtgtgtcctcagccagcaggcctctgacttgtggccacctacagaacctgcccacagtgctgaagccaactgcagctgaggccccgcttggccaaggcctgtctatagcttgcctgtcccttaagccaactgggcaatgtgggtttttgcaaggtcagggatagaggcctaaggtccatccttctctgagtcagtggggatgagggccaagcaggctttttgcctctctcggcctcacacctccctactgctttctgtttgcaacaggatgcccttttcagtatttactgctatttttggcttcctcccaggagctcctacaacaaaagggagcctgagtatcttgccaggagacaccagacccgtgccagaggggcgggggctcccgtggcaatgcaggaagcaccttgtgccgaggccccattaccctcatcaggcccagagggaaacctgcatttcctctccccaggagatttccctaccctgagcagcagtcacagcagatagctcaatcaccatcccttctcaggctgaaactttctttagagcagcaagggcttcctttctgggaaagctagaggagattcccaaaccgtaaggtcaaggggaaactggggcagttttattgacgatggcaatgtacaagactccacacctaggtatgtgcacgaggtaaggcctgagctcaggccttatgatcctcctcaggacccttgggggcaaacttctcctgcagtttcttccacatgcctttatctatttccttaagctcttccaaggtgtctgtggacaggatcagcttgtactcttccaacgacaggccactgaagctggtgtctctggggcgagggtacttgtgtttgtagtagtttgaatggagtcgcgctaagctctcgtacatctgatcacaggcctcaggctctgcaacctgggtattctctccctcccgaaaggcctgtgctacccgctgtcgcaggtaagcgcccaagtcccggccccgtttggtctcgtccactggccattcctcacagagcttaagaaaacgccggtaccggctggccgccatcttgggccccgcgtgttcccgccttagcgggaggagtcggcgccgacgaatggcgcttgcgcactaagcctcgccgcctgccttaggagtggagcgggaggccggagtgggcatgcgcgactttgtaggcgcaccgctactctccgtgtaggggcgctgctcgcctttctctgcaagccgagctaattcagtcttcgtcctcctggaaccggcccagctcccaggggcaaggcggacgtggagtaccccagagacagctttgcgtctctttttcaatgactgcacaagcttgagactaaaaaaccctcccccgaggcctccgctgttttgcataaaccaatatatttgcatgtaaatacaggttactggatg

SEQ ID NO: 435418 - DNA, 1142 bp, Homo Sapiens
gtgtttttttctagtctcgcattttgttcttccttgtgtttgtaccagtgcttcgtccacggtattaagtctctttttcctgaatatacattactgggttacacaatggttccatgggattcgttcctgttctcctggtcgaagtctcgcacatgttcggctccaaaggccagtggtttgccatttacaccggttttcttttgggacctatatggctgaaaagtaacggctttatcggtaacataccctggtgttgccccaggccccatgccttcaggccaagcagctcaggggcctcatttcactccaggctcacagggcactccctggaccccccgtttgcaccatccatgggggcttttcctagccttgagggcaggcctgtggtctgaagaggggttctgctcagagcctttgctctccctccaggccagcctcctgccctgagccagctggtgaacctgtaccttgggaggtcacactttgctctggaaagagcccgccaccatgagctggctggaggagaacgtccacgaggttctgcaagcagtggacgccggggacccagccgtggaagcctgtgagaaccggcggaaggtgctctaccagcgtgctacccaggaatatccaccgccatgtgatcctctctgagatcaaggaagctagtcgctgcccatgcccccggacgtgaccacgcagtctgtgatggggtttgatcctctgcctccttcggacacaatcttactcctacgtcaggccagagaggctaagtcctatcagccatggaaacaccattgctctcttcttccggtcactgttgccaaagctatatccatggagggggagaggcccgaggaaggagatggctgggggtctgaaccgcaaccagggcctgaacaggctgatgctggctgtgcgcgacatgatggccaacttccacctcaacgacctggaggcgccgcacgaggacgacgctgagggggagggggagtgggactgagcgtccgcagaggtgaccgaaaagccgtatgatgatgttcccgatttctctgttggtcggagtcggccagttgcctgaagtagggaagctgagtgtgtcgctcccctggtaccacctgtttgctgccctctgaagagtgaat

SEQ ID NO: 435419 - DNA, 2284 bp, Homo Sapiens
  misc_feature (254)..(301): n is a, c, g, or t
gagggtgacccatttacatttatagggagaaacaggtggaccaggggagcgacacactcagcttccctacttcaggcaactggccgactccgaccaacagagaaatcgggaacatcatcatacggcttttcggtcacctctgcggacgctcagtcccactccccctccccctcagcgtcgtcctcgtgcggcgcctccaggtcgttgaggtggaagttggccatcatgtcgcgcacagccagcatcagcctgtnnnnnnnnnnnnnnnnnnnnnnnnnnnnnnnnnnnnnnnnnnnnnnnntctccccctccatggtatagtttggcaacagtgaccggaagaagagagcaatggtgtttccatggctgataggacttagcctctctggcctgacgtaggagtagattgtgtccgaaggaggcagaggatcaaaccccatcacagactgcgtggtcacgtccgggggcagggcagcgacggcttccttgatctcagagaggatcacatggcggtggatattcctgggtgcacgctggtagagcaccttccgccggttctcacaggcttccacggctgggtccccggcgtccactgcttgcagaacctcgtggacgttctcctccagccagctcatggtggcgggctctttccagagaaagtgtgacctcccaaggtacaggttcaccagctggctcagggcagggggctggcttatttcagcattgggtccaaagaagcggtgactggaaacgctggcgtcgggccgcacactgcaagactcgagcaggggcaggaggactccagggaacatggtgagcgcctgctgtatcaggagagaggccttctgcctggcagagctctgctcacactcagggaggtctgtctgctggctcagcaggaaatacgccagtggaacagagaaggcaaaattagggagctgggacaggttccgatgagcctcccactcctggaagaggcggatcaggtactcgtagttccgggcccgcaaggccaggtggtcgatgagcagcagcatgcagagggggtcctcatccggctcgagactcaggatgagcttgcagtactccagcgccgtgcgcgggcagcctcgcttctccaggaagctcatctgcttgtagagggccaggtagaagctcctgttctcgggtctgcggtaatccagccggcaggccccactggtgagactgaacagggggtggaacgcacattccatgctgtacagcgctctctctacgaggtctcgagccatctcctgatcctcttgaaagcggcaggcatcgctgagctgcaggagtgagtcaacgtggtaagggctcgtctggagcagaaccacgatgttgttcggctccatagactccacggccaccaggaacttgtgctgagcctgctggtactcctcactgtgctcaaacgcaaagaaggagaggcctttttttgattccagcagccgcatggacagacctggtttgctgtagcggggccaggtgcttttaggggtggtcagccatgtgcacttggggtacacacgttgtctctgccgtggcctttgctcccccaggattgcccgggcaccaaaataccttttcagttctgtgtctggattcaagtgtctgtgctccacgtagagaacgtgcttcctggagctcaggggagctgggccgggacggttcaacccagtgctgtcctcaatcctctctaggatgcgatcgatatcttctagtccgttttccgatgcttctcccgtgctgcttttcttgtttttctgttttttattcttcttccggagtttgccacttgcatgagactgctctgagggcactgtctcggtgtcatctccatccgtcttgctctctgtgtttccacgctgaccccttcctttgttccctggtgccacagcgtctgtgagcgcacagccagacctctccccgttcaccacagggtcatcctcaagatcgtcaatgtttatcagctcgaagcggttgttgactcggacgccctccttccctgcgcccccgggacgccggacaccaagctcccgcttgggcccttcttcttccgcgtcatcgtcatcacggagatcgaaatgcaaggcgccgggcccgaggggctcctggccgcgctgttcccccctcagcctccggagggcccggcgcgacataggaccgaacgaccacgacgtctggagagagggagaaggaagcgcagaaaactcggctgtcggcgcgcctgcgcactcttcgcgcggggtcgggggcggggccc

SEQ ID NO: 435420 - DNA, 412 bp, Homo Sapiens
  misc_feature (253)..(300): n is a, c, g, or t
ttttttgtgacccatttacatttataggagaaacagtggaccagggagcgacacactcagcttccctacttcaggcaactggccgactccgaccaacagagaaatcgggaacatcatcatacggcttttcggtcacctctgcggacgctcagtcccactccccctccccctcagcgtcgtcctcgtgcggcgcctccaggtcgttgaggtggaagttggccatcatgtcgcgcacagccagcatcagcctgtnnnnnnnnnnnnnnnnnnnnnnnnnnnnnnnnnnnnnnnnnnnnnnnntctccccctccatggtatagtttggcaacagtgaccggaagaagagagcaatggtgtttccatggctgataggacttagcctctctggcctgacgtaggagtagattgtgtc

SEQ ID NO: 435421 - DNA, 405 bp, Homo Sapiens
  misc_feature (252)..(299): n is a, c, g, or t
ggagcgggacccatttacatttataggaaaaacaggggaccagggagcgacacactcagcttccctacttcaggcaactggccgactccgaccaacagagaaatcgggaacatcatcatacggcttttcggtcacctttggggacgctcagtcccactccccctccccctcagggtcgtcctcgtgcggcgcctccaggtcgttgaggtggaagttggccatcatgtcgcgcacagccagcatcagcctgtnnnnnnnnnnnnnnnnnnnnnnnnnnnnnnnnnnnnnnnnnnnnnnnntctccccctccatggtatagtttggcaacagtgaccggaagaagagagcaatggtgtttccatggctgataggacttagcctctctggcctgacgtaggagtagat

SEQ ID NO: 435422 - DNA, 399 bp, Homo Sapiens
  misc_feature (106)..(153): n is a, c, g, or t
tctactcctacgtcaggccagagaggctaagtcctatcagccatggaaacaccattgctctcttcttccggtcactgttgccaaactataccatggagggggagannnnnnnnnnnnnnnnnnnnnnnnnnnnnnnnnnnnnnnnnnnnnnnnacaggctgatgctggctgtgcgcgacatgatggccaacttccacctcaacgacctggaggcgccgcacgaggacgacgctgagggggagggggagtgggactgagcgtccgcagaggtgaccgaaaagccgtatgatgatgttcccgatttctctgttggtcggagtcggccagttgcctgaagtagggaagctgagtgtgtcgctccctggtccactgtttctcctataaatgtaaatgggtcac

SEQ ID NO: 435423 - DNA, 556 bp, Homo Sapiens
  misc_feature (256)..(303): n is a, c, g, or t
ggacacaatctactcctacgtcaggccagagaggaagggagaggaggagaggaacagtgttatttgggggtcacagctctgcgtttgcaggccacgttctttcccatctccaccgaatgtacaagcgcttgcgtgtcggcctctgtggcaggtgcgagtgacacagtggaagcaggctaagtcctatcagccatggaaacaccattgctctcttcttccggtcactgttgccaaactataccatggagggggagannnnnnnnnnnnnnnnnnnnnnnnnnnnnnnnnnnnnnnnnnnnnnnnacaggctgatgctggctgtgcgcgacatgatggccaacttccacctcaacgacctggaggcgccgcacgaggacgacgctgagggggagggggagtgggactgagcgtccgcagaggtgaccgaaaagccgtatgatgatgttcccgatttctctgttggtcggagtcggccagttgcctgaagtagggaagctgagtgtgtcgctccctggtccactgtttctcctataaatgtaaatgggtcacgctcaaa

SEQ ID NO: 435424 - DNA, 414 bp, Homo Sapiens
gcaccggttgatggagtcggcgtccgggggcgcaggaaggagggcgtccgagatcaacaaccgcttcgagctggaaaaatggacattttcctctccccctaagaagaaagataaaactccttcctggttattaagtgaaatgctgatcgagctttatcctaaagaagatcagtcgtggacaagaaccttgtgaaatgttccccatttgagaccctaaaactaatgaaaatcacagcttttggataaacattgacgatcttgaggatgaccctgtggtgaacggggagaggtctggctgtgcgctcacagacgctgtggcaccagggaacaaaggaaggggtcagcgtggaaacacagagagcaagacggatggagatgacaccgagacagtgccctcagagcagtctcatgcaa

SEQ ID NO: 435425 - DNA, 460 bp, Homo Sapiens
  misc_feature (18)..(18): n is a, c, g, or t
  misc_feature (29)..(29): n is a, c, g, or t
  misc_feature (82)..(82): n is a, c, g, or t
  misc_feature (101)..(101): n is a, c, g, or t
  misc_feature (157)..(188): n is a, c, g, or t
gaccacgcaatctgttanggggttttgancctctgccctcttcggaaaaaatctactcctacgtcaggccagagaggctaantcctatcagccatggaaanaccattgctctcttcttccggtcactgttgccaaactataccatggagggggaaannnnnnnnnnnnnnnnnnnnnnnnnnnnnnnncgcaaccaggccttaacaggcttatgctggctgtgcgcgacattatggccaacttccccctcaacgacctggaggcgccgcccgaggacgacgcttagggggagggggagtgggacttggcgtccgcagaggtgaccgaaaagccgtatgatgatgttcccgatttttttgttggtcggaagtcggccagttgccttaagtagggaagctgagtgtgtcgctccctggtcccctgtttttcctataaatgtaaatgggtcacgctcaaaaaa

SEQ ID NO: 435426 - DNA, 430 bp, Homo Sapiens
  misc_feature (195)..(195): n is a, c, g, or t
  misc_feature (365)..(365): n is a, c, g, or t
  misc_feature (379)..(379): n is a, c, g, or t
  misc_feature (394)..(394): n is a, c, g, or t
agagccccaggacgaagccctcctgctcctgggtctgggcattctgctcatcgacagctttttctgtgtgttctatgatctgacgaattgctttcttcaggctgttggctctcagcatgagctgttctcgaggccggaatatctgcggccgggccgggcaagctgatgccaccaagcggtctccggtggaaccgnagatgctgcccgacccatctccatcttcagcctcctcggcaatggtggggggcgggttgggcagagaggacgaggcctgggactcatcgtccaaggtcttgagaagggaatccagcttctctttcaggacagagcacttcttggccatgacctctgactcctccgagctntcggtcgtcttctnataggccttccccanccgtgccacgaagtccttcaccgtctcacagagcac

SEQ ID NO: 435427 - DNA, 504 bp, Homo Sapiens
ttggttaaaccaacccaaggtgggcatggggcaacgtacccccaggatgaaggtccttccccatggagaaccagggttgcgtgcaagtgcggccttcccgcctgggaggcatagggaaatagagatggtgttctgtgggggtccggagcgctgctatgatgaccttcttcttctgggctggcactcagggcccgtcggatcagtatcaagaagaggaaacaccaccaccacaggcacaatgaccgtggtgatgttatacaccagaacgtacaccaggtggcccaaggagttgctccagacttccgtgcaggtggacgtggcatagatgtcagccacattggttactgcaaacacagggacactggccaccactgcatgggcccagatgtacatcaccagttcacgggacttggcatcagatattttcctctccagtggatagaggactgagtagtaccggaagtactcttgagaaaggactctgacttcactcttatattccag

SEQ ID NO: 435428 - DNA, 490 bp, Homo Sapiens
ccctagttatagaaagattaaacctgcaagaaaatggtggaattgggggaaacaaacaaggaacgaaagcagggaccatgcttttctaggatggcttttttatcttaggtacaaaagcttagtcacatatggattggcttatacagctgatcaggtaagtcttctttctgaaacactgatgaactggacgctagacccatctattcttgtgcctaccctcaaggggattcagggaagcctggctgctgaagtttggtgagattgctgcccctattcctttcaacttggcttctcaagcagagccattgtcccaaaatctggggctgccttacacaagggctctgctgctaccatgggctctctgtggaaagagtcggcattaacatacactgagacttgttctgagccaggtaccaactaggagcttttaatgaatttaatttaatcttcctaacaactccacagttaggcttttttatacctgaatttc

SEQ ID NO: 435429 - DNA, 917 bp, Homo Sapiens
  misc_feature (808)..(808): n is a, c, g, or t
  misc_feature (846)..(846): n is a, c, g, or t
tgaactgggtacactggtttaatccatgtcaaatgtagtttacaaagggaaaggacaagtacctttgtatagaatatacagacacagcatcacaccacagggcccacgggagggtcggggagacgacactttttccctgggaaaggcagctctaatcccaggaatggttctcagcagaggctgggtggccaggagcactgtcctctagccccctaactcagcctctgcttcagctcggttcccatttcctgcctctaccccccaactccttataaagagccccatgagctaagactaaggagaggatcatgtcccttggggcgtgtgccccatgtctgggagaagaaatatacaccactgaacaccgagcacatgggagagggaagggacaccacaggagagagagaggcaggtaccccaagaggtggatgggccgagctcccagccaaccctgaaggaggcgctgcttccaggggttcttaaaaaagaagaaaatcatacaaccaaagggggaggggacaggtagagggcgaggagttgtcccatttatacacaacattgtaaacatacacggtctatattacatgtgcttcagtctggtgtttgcatgtctgtctgtccgtctgtcagtatgggggctggatcttaggagccgtgccccactactcccccaacccccacctccctgccccaccctgggaacagagctggaacaggtatggcccccaaaccataggtgggagccagccggtagtgcctgggccacagcctttactctggctccagagtcctgcgtgtgtaaatgtgngtgtgtgtacgcatgtttgagtatgtgcatgtatgtanatggggaacctgtgtgcaagtatgtacaaagggagacggtcactgtcacagaggctgggggcaggtggggc

SEQ ID NO: 435430 - DNA, 866 bp, Homo Sapiens
tttttttgtggggaggtgtcaggcatttatttctggagcagaggtgagatggagcaatggcctcagcagcggacgcagttgcgcatgaagtcgacacagaggcttgtgtagtaagtagggtagtcacggaggtggctgacgtgtgcagatgacacgaaatccacagaacgcgccaggacccggcgtgccaggcgtgcctccaccatgcgttctatgtctctggccaggactacttcgtcagccctcgagtagaggtagagctcgggccagcgagagcccgcgtcctgtagcctgtcatagaagtgggtgtggaagagggctgtgatgggagcaagcaggacgtggaacaggacgaccaccagggcaaaggccaccagcagcaacaggcgcagcatggcggcccggcgctccaggatggctgccagggcccgcagagcccctaccaggttgctgtcaccaggagcgctgtcaaagatggtgcccaccacacgcaggcggcagaagcgacgggtctgcaggagctccagcacgtagcggtacagcatgacgccaccgttgctgaagacatggaagagcaggggctccttctcaatctcataatcaaagagcagctcgagcagcttctgggccaaaacacgaagtgaagggatacccagtgactcggagtggtagatggcactgtacttggcaaggttcttgtccttgcagccaccccagcccaagagaatcaccacaggctgccgagtttctgcctccttcccacctgggctggggctgttcttctggctccagcagggctgatccgggatctcgatggtgtagtccagctctgccgaggccatggtgaaggcgccggcccagagcac

SEQ ID NO: 435431 - DNA, 1243 bp, Homo Sapiens
cttactctggctccaagagtcctgcgtgtcgtaaatgtgtgttgtgtgtacgcatgtttgagtaatgtgcaatgtatgtacatggggtacctgtgttgcaagtatgtacataagggagacggtcaactgtcacagagtctgtgggcagttgggtctgctggaggcgaggcctgcctggggcagatagctcacaaagtagatcctccgcaggtctccgggcgctgtgatcgtgttgcactgagggcagagcttcttggcacccagggtccgcagccagcactcctcgcagtgcacgtgccaacactggatggacgttaggggcatcgagtacgagtccatgcagatgaggcatttgtaacggtccccacgagatagctgccgttcaagttctctgacccgagccttcagagcctcaaacgtggtcacagctgaatcttcggtgattttctcgatgtcgctgttcttgcaggtcttctgcatggcctcctgcttgctgctttcaccattgctggtggatggcatctcatcactggcccatttagagaactcaggtgtgatgcgcgtgctgggagggccgccatttaggactgcgccccgaagtgcctctctctccttggcttcaccaggctcctcgcctgtgcaggggatgacatcagcctctgtgtattgtggcttcccatactccagagtgtcatccccatccacatccaagtcagcatcactgtccgggttctctttgccgctgcacatgatgaagccagagcctcggaagccaccttccaggagagtggtggcccgtatccgcttctgtccacaccactcatactcctcaaagcggttgttgttctcatgctcgatgtccacagcatcatcctcagccatgcaggagccttccctctgcccttcatcttgcttcctccgtttcattttcccaatccgagcattcagtcgggtctgccggttggctcgtactcgcagaaaggtttcctccctcccgccggcccctctgctcctccggccgctccgggctctcggcatagccgccgggcgctgctctaacgggaccccgtggccgctgcgcggtgccgccccagccctggcctccggcgctctgggccccacggccgcccggccggcgagggcggcgatgcgggcggattccccgtggctgcccggcggcggcggcacttcagctccaagcggcggcggcggccatgttggccatcccgggaattccggaccc

SEQ ID NO: 435432 - DNA, 599 bp, Homo Sapiens
tggggcgggggccaggactgcaggccgcgcctgacgctctcttttcttttcttgcatctgcccgcgatcttctcccagacctttctgcgagtacgagccaaccggcagacccgactgaatgctcggattgggaaaatgaaacggaggaagcaagatgaagggcagagggaaggctcctgcatggctgaggatgatgctgtggacatcgagcatgagaacaacaaccgctttgaggagtatgagtggtgtggacagaagcggatacgggccaccactctcctgggaaggtggcttccgaggctctggcttcatcatgtgcagcggcaaagagaacccggacagtgatgctgacttggatgtggatggggatgacactctggagtatggggaagccacaatacacagaggctgatgttcatcccctgcacaggcgaggagcctggttgaagccaaggagagagaggcatttcggggcgcagtcctaaatggcggccctcccagcacgcgcatcacacctgagttctctaaatgggccagtgatgagatgccatccaccagcaatggtgaaagcagcaagcaggaggccatgcagaagacct

SEQ ID NO: 435433 - DNA, 334 bp, Homo Sapiens
  misc_feature (293)..(293): n is a, c, g, or t
  misc_feature (295)..(295): n is a, c, g, or t
ggggctcggtacctagtggactcgtcgttgacctgtttgatcttttcatgctctcagcaggcaaacttcagaggactccagctcactgagagaacgctgcagagctgtgccatgcttagctatcaagtcattgcacgtgctctatgtcctctactttgctagagagggtccgaagggtattctgcagctcagtcttgtcagtttgtgagacagactcttcatctcctgattcatctgactctgccagcatcttcacagctttggccttggccagttccagggccgtcacccancntgccgctcaacttctgaactagctttcagatggtaggtc

SEQ ID NO: 435434 - DNA, 1024 bp, Homo Sapiens
cccctagcgaggcgccctccgcttgatggctttggagtttgtgggatttgggtgctctggtcggccacctgttcactggcctgtgtgcacaccggagggggtgctgatggtgcagcaggtctgcacattgtttttgcaagtgaagatggggaagccgagttctggagggacagaggtgagcaaccagacatttcaagtcttgggatggggggttcttctggccacacctgggaaggagggctgcccctggacaaggacacaggcctccaaaacaaaagggagggacacctgggtaggtggccacaccagcacttcacacaggacttcacacagtctgtgagccctaccacttaaaaaacagtaattaaatttcaaaggaagcactccagcctcaaaccaaacagccccatcttccatgggcccttcctccactgtccctggccccccaacatgatccctaaccctctgtcccctaccagtgcccatacctccaacctgccccaggcccaggcctgtcccggtcatcccctgcctgcagcctcaggcaccctccatccatgcacacccctcaaggcagacggggagcccagcaccgggaggaccgactctcgccctggcccagccctggccgctgcctcctgtccgagcggatgtcccccgctccccaggtctggggctgagctcagcttcacacgtacttagtcgcccacactgggaccccctttttcccctagtgggagacgagtggcccttgcctggcgggggagcaggggaagcacctacggcaagataccaacccaagcatgtgggcttgcgcaggcacccagtcaacccaaagtttgtctatgagtttaagttcaactttttataggctaagtcacgaactaaaacagacggtatccagtggtagggaagggaggtattcaataacgtcgacaatggcgtgaagtgacagaggcactccttgtacaggagaaacaacgcaaaggtgtggtaaatcgcgggaggcctcaagcacaaggga

SEQ ID NO: 435435 - DNA, 281 bp, Homo Sapiens
  misc_feature (94)..(94): n is a, c, g, or t
  misc_feature (108)..(108): n is a, c, g, or t
ccttacttttggttggatgcagggtgtagtttcaataaaatgtcacagaacaaatttctaagacctttaggttgagtgagtgttagagtttgtntagtagtatatttntcatcagttacctatttagctgttctgcataggcctttgagataaggaaataagtaagataaattctccccagaaaccgcaaaacaattataatgttgagagaagaatgaagtagtaactctgtctgtactgaagaaggaattcggtgtacagaaaagaggtcactgcctgag

SEQ ID NO: 435436 - DNA, 2231 bp, Homo Sapiens
  misc_feature (904)..(904): n is a, c, g, or t
ttgtcccgggccgggttacaggggaaaagtttgtcgggggaaccaatggtaagcgtattggcccaggggaaaaaggggtgtgggtgcgatcggcagagagggatgagaaaacggtagagaagggggagagagagggtttattaccacgaagaattgtggaggaagtgacattctttgtttgggggcgcccatcgccccatgagggaatcgcagaaggccccaatttaaggggttgggtttccaggcccttagggggaaagaaaaacccccctgacccgaggcggtgggggtttgtagcctagttgtggccgaaaaacccaataagttttgtctcaaaatttgtttcgatcgatttaaaaggccttgcaggggagaaagaatattgtggggtggggattttcatgttctcctagggaatgaaaatttctttaccatgacaaaatagtgccatttccttgaaacgttctagcggggcaattgcaattgggcgggaacatctggaaacttggttctcctgggcgtacaggtgtttgtagaggctgctgccctggcaacggtggagtcaacaattgcgcaggttgtccctttgtcatgtaccccatgaaagagcagaatgttcacatgccgtgtttgcggcagaacagcgcacgtcattcaggaagacgtggaattgctctggggttgggtcgacaacctttaggatgtgtagtgcaacatctccatgccatgtaccgttataagcagttccaaaagagcctgacccaatccgagtggacagcatcacttcactggcttctatttcccaataatagcttgaatctctctgtccacgaggcctaattttgtttttctcctgggtcccagatactggtgcccgctctctttgtgctggcacgggggtttntcggctgtgaccagcctgttgggctcagattgttggggctactggacagggctgaaggtgaggctgattcgctgtgacttcgaattgcatcctcaatcatcctgctgtccacaggcagggtggtgctgaccatgtggacattaggtgtggatgtcgacctctgcctctgggagagggaaccttcagatgagggactggaggtgttaaaggtgaaggcgtgaggtgtagaatatctgtgctgagaactaacaggcatcctggaaacagactctcgcatacgacgcatagtcaaagaaggtagtgctgggactccactatcaccaatagtggaatttggaaacaataagagttgtctgatgttactccagtccacacacatagtaggtactttggtgctacagtgcttcatgaaatttgtagccaccaagtctgacatcgaaaatccagttgagcagggaattttctgacagaatgtcaccagaaggcaagcttcaggaacgtctttccgagcaaagttgtgtgtttgtgaggggaacatgatccaggaaatctacttgaagttcttctccaatcaaagacgcagcatcagtattccaatctaagcgtgcttttttacctttgtgttcgtggagaagtctgaacactgcacagcactctggttgcaggcccctcaccttgagtgctttcataaggcagtcatgcaagctcattccatttcgcacattgaccactgttctttgcttgttcggcaagaaaacacggatagtgttgcttgtcttagaaggatctgtgagtttgccatcatctgatgcccggcgctgatagccaaactgctgaactattgtaggagagatgcagctggagccatcaaacacggcatctttgaatccaaaaccattgctgatcgtcttccaagctccctgtatgtgctccattgatgcagcttaaacaattcttaaacctgagggagccaggccgccccaacgtcctgtcgttcggcggcagcttctcgcccgctcctcctccccgcggcgggtgagggagcgggaggcggtcacattcggcgcgtccccagcccaggggacggagccccgagcagcccccgcatcgtagcaaacgcgctccgcgcctcagggcacgcgccccaaagcccggccagctgacccttttcggggcccaaaaaaggcagcagaaagccgttcccgcctcacaatcgttttcctcttactcccgccatctaagatggcggcccaagcgcccgcgattaagactctcgggcggcccagacgagcgagccctcgactcggtgctcgtcctcccgacctgc

SEQ ID NO: 435437 - DNA, 1604 bp, Homo Sapiens
  misc_feature (79)..(166): n is a, c, g, or t
  misc_feature (168)..(169): n is a, c, g, or t
  misc_feature (171)..(178): n is a, c, g, or t
  misc_feature (180)..(187): n is a, c, g, or t
  misc_feature (189)..(200): n is a, c, g, or t
  misc_feature (202)..(208): n is a, c, g, or t
  misc_feature (210)..(257): n is a, c, g, or t
  misc_feature (640)..(640): n is a, c, g, or t
  misc_feature (684)..(711): n is a, c, g, or t
  misc_feature (731)..(739): n is a, c, g, or t
ccccccccgcggggttgtaaaaagagggcgccccggccccggtgtttaataaaaggacgccccccttaagggggccccnnnnnnnnnnnnnnnnnnnnnnnnnnnnnnnnnnnnnnnnnnnnnnnnnnnnnnnnnnnnnnnnnnnnnnnnnnnnnnnnnnnnnnnngnngnnnnnnnngnnnnnnnngnnnnnnnnnnnngnnnnnnntnnnnnnnnnnnnnnnnnnnnnnnnnnnnnnnnnnnnnnnnnnnnnnnnttttagaaagctgtttcagaaaaataaaagtcccacttcgactttattagattaaagcaaaattaaaccttgactattcacacgtatgttacagaggaagaggaggcgtccggaagaagctccttggcgtttcgtggagtcacagagcacgacggcattgacaagcatcagaacatcaagcagccttagatttcacgatcactccgaatagaacatagaaatacggaaacacagccagtttccactgggaagagttcttcgtgtacaaatgatatatatttatattttttaaaccagtcaccactaaggtgagtcctttctctgctaacaagcagccgaggatactaagtatcttcagctaattaatttgagccgtgttttanggaaggggcaacacttgccaattttaaaactaccttccccatcnnnnnnnnnnnnnnnnnnnnnnnnnnnntttacccctttccaaactgnnnnnnnnnggttgggggtgtgtaatatatcagatttcagtaggcagaaggattcagagggggctagggagaaagatttcagattatgtagtgaaatacaaagtttctttaaataaattgcagggaacatgaagttgggggataagaaacaatgacaaggcagtctctttcttgattactgcaactggaatgggggaggcgagtttatttttggaaatgggagtgcgcagagctaagcgaaatttatttctcctaataaggaaatggacaaagttgtcccacagtggcgcgcacctttttacccagatacagttagagaacatgtaggaagtttcaagtcgtgctgctttctcgccctcttaatttcagcctctttctcactccccttcctgccttcgccctctccctgcctcccttccggctacgagccagtcagagaggaaacaccaggaatccggagaaggtcgagtacttccagccccccatcaagtttccccgctccagcttgaggtatgctcggtcgcctttctccatttggattaggactccgttgctggcggcctcccgggtcacgtcctggtcaccagcgaaggctgaaatcaccggccacccgtttagcatgaggctcacctgtatggtttgtctgttgtagacttttaccacgtggaagttaaaactgtagatccctttgcgcggggcgatgaaagtgctgcgttctgaatcaaagttgttcccaatgttcactagtacctggtcgaagtagatgatcatggtgcgattactcatctcggacggctcgtggttggtgctcctgatggcagagaaagccaccccccgctctcgacgaattcgagctcggccgatttggcctgat

SEQ ID NO: 435438 - DNA, 3222 bp, Homo Sapiens
  misc_feature (2133)..(2150): n is a, c, g, or t
  misc_feature (2993)..(3057): n is a, c, g, or t
agttcttcatgaggttatgtttactacaaatttttattgttaatgtttctcatcctgaaattatgggatacagcctagcagtttgtcctcacttggcagagtaggtaaccctggctctcacactgagcccccaagagtccttttggttttactggtgtcagggattacagtcagcaaaccccactcatttacagggtcaggtgtacagggctgagctggagggttagggtcagggcccctcaggaaactctggtctggcacagcagcagcagggatgccactctccctttgtggaatccttcttaatacaagagtgagaagcagaagagcaaaccacaaaggaattccagctcagaccccaaagtacctgggagagctgcaaacagccatggagataagagaggcggggagggaacacagtgactgagtctgagagacagcaaagcacctctccagcgaaagccactccgagatgcagcctaacttcctagtttgcatcagcaagatgagcaggcaccaccatggaaagagcacctggggtgtagctggttaccacagctcagccacattccccagaaacggaggtcagccctccatggcccaggaaaacatgggggatgaagggttggcacctgcagtgaccagatggagatacaatgcaggcagctgctaccatgcttggtgaccagggtacaagcccctgatgagcttgccatggcagccaaggacactggtgccggaggaacgacaggggcctgcaaagggacatccgaggagggggaagcaagctgggagcaagaccagcccagctaggtttcagggcaacagcaaagccccagagacatggaggcagatgagtcaaccttgctgggtgagaagtgagcttgcactgcatagggcaagaagaaggtggaccccactcctccaggaggctgacagtctcagccaggtacaatggagggtccaggtcacaaggaagggggctatggtgagcatggatggagaaaggtaggcttgctgtgtggaaggaaggaggaggggaggggaagggtgagcaaagtggggctgcaggcatcaggctgtggctgatctgtggtcagcctggagctcagaggcagttctggattgacaggacacatggtgtggccacacaggtggggggacagtgatcccatagtccccagggagtgactgggaggcagaagattggaacaggacagagaagggcaaagaagcacatggctcatgctttaaaggtgtttttatgccaagacaagggggcgaggacctcatcttgaggtgggaagaagtcgttgccctgccagtccagtggtttgaacatgaatccagcccagtggacagggaaggcccagggagaggtgggtagggagggcatcctgcagaggctggggacaaggaggatggcacagaatgccatcacagccaggggagtctggcagggcttggcggaggcgccaaagttaccagcaagctagaaggcaacaactgatagccctcacaggaaccttcttgtgtagacccacagaagctccctggccctgcctgctttgcctgactctgaaatgccagacaggcccatttctaggtctgttctcctgaaaatacatctttggtgctgggtagatcctgaatcctgagaatacaagtttctgctcctggatacacagtcacatgacccagaagatcccagcccagtggctaggccaaggctgcagtccactccttcatccacagcccgttctccccaagggtctcacttcatcgaaggcgcagataacacagtagggtggcctccactggtctgcccatgctcagcaaccatggccaggagtaactgccatctccagggtgagaagcctcggtcggaggagatgacacccacttagggttcacagccccttcctgtgtcagttccaggaaccttggatcacagacatggcctcacccagacaaggacacgaccgtgcagccttaagatgtcagagtcccaagcgcggggagaagggctgcaagccacaggtggccacgtctgggattcaccagctgctctgctcagacctggcttctccagacacgctgtggccccagctctgcctggctctctagcacctnnnnnnnnnnnnnnnnnnctgggccttggtttccccgagagagtccctttcacacatgggaccagccaacatgagctcatcaggtcacaggcagccgcagcctcctgccacacaggaagaagattcctgacccacaattatcattgcaaaggagtattttgtaggtaagtcctctggagccctaaacaccaggcagggaagaccctggctgcccttggcacccacagacaccagctcccactggctcacgtccttgccctggacaagaagtaggagaggatgaagaaggccacaattagacccacggccatgccacatagaagcttccggttgtcttgtccggaccttgccattgtggaaaagcgcttcacgctccctgtaagcaggctggtcatgcttgtgaaatccgagtccatgccatccaggtaccggttctgatcctctgcatccctatcgatgtccagggcgagcgatttgagcctggtgactttggaggccaggctgtcagccattcgcttgttctcccggtctagaatctcttccacagcgcccgggctctgagcccgagcccagtccgccatcgtgccctgccccggctcctcgacgcggacaccgacgcggccacagccgcctcagacgtggccacagccgcctcagacgtggcgcagtcgcggggaaagagcttccggccccgcccccagctagcgatggccccgcctccgcaccgaccacgcccctagatagcccagccccttccgcttcgggctcgctgacttccggcttagggccgagggtggggaactgccgggcgcggaagcgatgggcatatctgtggcttattttcagcactgtcgcgcagannnnnnnnnnnnnnnnnnnnnnnnnnnnnnnnnnnnnnnnnnnnnnnnnnnnnnnnnnnnnnnnncagcaccgcggatgtgacgtatggtgttcctgtgaacgtggggcggggcggggccgtttgcttgctcagtgcctagacgatggtggtggaaagacgcttctgtgggttaggtcctaacggctaggaacggattcacaggcgggtcatgaggaaggagcagacccc

SEQ ID NO: 435439 - DNA, 1046 bp, Homo Sapiens
  misc_feature (64)..(64): n is a, c, g, or t
  misc_feature (231)..(231): n is a, c, g, or t
ttcctggggtcagttccagaaccttggatcacagacatgggctcaacccagacaagggacacgnccgtgcagcctaaagatgtcagagtcccaagcgcggggagaagggctgcaagccacaggtggccacgtctggggattcaccagctgctctgctcagactggcttctccagacacgctgtggccccagctctgcctggctctctagcacctggggagggggggagggnctgggccttgttttccccgagagagtccctttcacacatggggaccagccaacatgagctcatcaggtcacaggcagccgcagcctcctgccacacaggaagaagattcctgacccacaattataattgcaaaggagtattttgtaggtaagtcctctggagcccaaaacaccaggcagggaagaccctggctgcccttggcacccacagacaccagctcccactggctcacgtccttgccctggacaagaagtaggagaggatgaagaaggccacaattagacccacggccatgccacatagaagcttccggttgtcttgtccggaccttgccattgtggaaaagcgcttcacgctccctgtaagcaggctggtcatgcttgtgaaatccgagtcctaagggaggaatcccagcaagatcacacagaagtggtgatttgaccacccacccgcaccagtgctgaaggagacactgcaggctctgcagcaggtagtgctagggcagggcactgatacacgcacaccgtgggcccttaccatgccatccaggtaccggttctgatcctctgcatccctatcgatgtccagggcgagcgatttgagcctggtgactttggaggccaggctgtcagccattcgcttgttctcccggtctagaatctcttccacagcgcccgggctctgagcccgagcccagtccgccatcgtgccctgccccggctcctcgacgcggacaccgacgcggccacagccgcctcagacgtggccacagccgcctcagacgtggcgcatcccgggaattccggaccggtcca

SEQ ID NO: 435440 - DNA, 900 bp, Homo Sapiens
  misc_feature (61)..(61): n is a, c, g, or t
  misc_feature (67)..(67): n is a, c, g, or t
  misc_feature (90)..(90): n is a, c, g, or t
  misc_feature (120)..(120): n is a, c, g, or t
  misc_feature (153)..(153): n is a, c, g, or t
caggtggcttctagctcaggacactgtgaccttcaccacaaggctctaggccccatccttnacctcnaccctcccagcacccttgtcagnagccctggagcgatgggaggttttggggtnccccacctggggcatccctgctctgcctgtccnaattctccacaacaaccccctctctcacagcctttctctcccacaggccccactggtcctggcctctgcttcccccaggaaccgttcttctccatggaaatgtcccctctgggccttggggactcccagatgatgggggtggggcaaagtcaggggcaacggccctcagccaccacagctgtcagataccaacccagggaagggaggaggagccttctctctgccaccccccagcccgtgccgcctctactgcagctcccccaggggcccattctctcggggcagcgccccattcacgcctgcgctgctggccgcgggcacccccaggtaccccagcaatatctcgctgcggcgccgggacagctgcaggatgtcgtctgccagcgcgggcagtgacgtgtagcgcacattgtccaggtcgaacatgtccctcaggtactgcacaatctggtgcttgaagaaagcacagacttcagcaagctgaggcttgggtccaaggaagccgaaggctaggacagggctcacatgctccgatacggagtagaaatgggagatgaagccatcaggcaccatcagcagcctcctcttggctttcaggaccgaccagcaagcagtggccaaggccccactccaagcaggaagatggggccaggtgcctaagctctgctgcttcctcctctgattttggactcagacatacctaaacttgaatcttgactctaatcttactgctggatcttctctgag

SEQ ID NO: 435441 - DNA, 445 bp, Homo Sapiens
agatgaaagccccagaagataaatacaggggtcaaaaccagactaacagttttagaaagtgaaaaaagttaaaaaagaaatgggggcagtgggttaattagaaataacataaatggctggtatggtttgtctgtgtcctcacccaaatttcatctcgaattgtaatccccataatccccatgtgtctagggagagacctggtgggaggtgattggatcatgggggtggtttcccctacgatgttctcctgatagtgggtgagttctcacaagatctgatggttttataaagggctctgcccctttaactcctcactctttctcctgaagccttgtgaagaaggtgctttgcttcccctttgcgttcccccatgattgtaagtttcttgaggcctccctggccatgctgaactcttcagtcaattaaacactttcctttataaatt

SEQ ID NO: 435442 - DNA, 1154 bp, Homo Sapiens
  misc_feature (209)..(219): n is a, c, g, or t
  misc_feature (792)..(792): n is a, c, g, or t
  misc_feature (794)..(794): n is a, c, g, or t
  misc_feature (1084)..(1096): n is a, c, g, or t
ggtccggaattcttgggattctggatacagcatgggggactcggactgcctgcacaaacacgcaaacaatgcagccagtgttcacagggccgcagaaagctgcatcaagagcacggtcaagattgccaaggtaaccatgtctgtgtccacagacacgtctgccgaggctctgtgagcctgatgcctccctggcagcacaggaaaagaannnnnnnnnnnaagctcaaaatctagaagagtctattgtctccttggttatatttttttaactttaccatgctcaatgaaaaggtgattgtcaccatgatcacttatcagtttgctaatgtttccatagtttaggtactcaaactccattctccaggggtttacagtgaagaaagcctgttgtttaagtgactgaacgatccttcaaagtctcaatgaaataggagggaaacctttggctacacaattggaagtctaagaacccatggaaaaatgccatcaaatgaataatgcctttgtaaccacaactttcactataatgtgaaatgtaactgtccgtagtatcagagatgtccatttttacaagttatagtactagagatattttgtaaaatgtattatgtcctgtgagatgtgtatcagtgtttatgtgctattaatatttggttagttcagcaaaactgaaaggtagacttttatgagaacaatggacaagcagtggatacgtgtcaatgtgtggcactttttttctatattattggccatgatataacctttagaaataaaccttaaatatttctttcngncccgccacgcccccgctccttgacccaccccccgtcagaacacccacccatccccttccgacggagaaagggggggccccctttaaaaaatccccctcagggggccccacagttttagcgggacccccgttttttttgtaaaaaaagggggccccccaaagggggagccgctaatttacaaatctcgggcgcttgggcccccttttttttacacaacccttgggaagtgggaaaaacaccggcccccctttgggggaaatttgtgggagggagagcaccctctctccttnnnnnnnnnnnnnaacatacgtgggggaaaacctttctctttagaagagtttttccgaccctttaggagga

SEQ ID NO: 435443 - DNA, 1109 bp, Homo Sapiens
  misc_feature (16)..(16): n is a, c, g, or t
  misc_feature (138)..(233): n is a, c, g, or t
  misc_feature (237)..(238): n is a, c, g, or t
  misc_feature (937)..(937): n is a, c, g, or t
  misc_feature (964)..(964): n is a, c, g, or t
  misc_feature (1003)..(1003): n is a, c, g, or t
caaggggcttttgganatttacttacagggggtcaggctggacccacacagggaagaagttacagaccctcaggtagcgaagacagcaggatgcagagaagcagtcgttggcctggcagccaaggggaacacacaaannnnnnnnnnnnnnnnnnnnnnnnnnnnnnnnnnnnnnnnnnnnnnnnnnnnnnnnnnnnnnnnnnnnnnnnnnnnnnnnnnnnnnnnnnnnnnnncatnnactcacactcatataaatgcacattttgtgcacacgtgtgtgcacatgtactcagacacacacaggtgtgcttataaatgtgtccacattcatacacttgtgcactggtgcacaaacatgcgctcacacacgcgctcacatacaggcatgcctaacacacgcagactcacacatttacgcacactgcacttacacacatgtgcactcacacatacattcacatgtgcatacacacaggttctaatctcaggaaactggctgtagttcaggagattcaggccccgcatggctatgtctcttcacggagtttcccagacccccatattacctccccagagccccaggctctgtgccccccaaccagcacctggcagcctgcaaagtctcaaagttggatgcttctcgcaaggccgagctggcctctagctctgaatgcaggacaggaaagccataggtctagaagaggtcaggagtgcgctgaacagctcccaaccacggcacccgtctccccacaccttgaatttgttggaggcaggatcatagacaggccggggccctgcaggggcatgagaaggaacagatactgggagacagccacgggacgcagggcccaagggaaagagtcctggtggatatgggtttgggatgaggggtcatgcagtgtgggagtcctctatgtggcaggcctcggcccccctngcagggttgggagaggggctgtggaanagaggggccgcctaggttgtgttctccccaccccagccntcctaggaagatctgtctctgtgtggcccagaccagccccatcgggaaggaaaagcccccaggtcaggaaatggactgaaccaaacgggggtgagggacagggggc

SEQ ID NO: 435444 - DNA, 1632 bp, Homo Sapiens
  misc_feature (257)..(278): n is a, c, g, or t
  misc_feature (283)..(283): n is a, c, g, or t
  misc_feature (289)..(289): n is a, c, g, or t
  misc_feature (297)..(297): n is a, c, g, or t
  misc_feature (319)..(319): n is a, c, g, or t
  misc_feature (332)..(332): n is a, c, g, or t
  misc_feature (339)..(339): n is a, c, g, or t
  misc_feature (345)..(345): n is a, c, g, or t
  misc_feature (353)..(353): n is a, c, g, or t
  misc_feature (358)..(395): n is a, c, g, or t
  misc_feature (417)..(417): n is a, c, g, or t
  misc_feature (431)..(431): n is a, c, g, or t
  misc_feature (449)..(449): n is a, c, g, or t
  misc_feature (451)..(451): n is a, c, g, or t
  misc_feature (454)..(454): n is a, c, g, or t
  misc_feature (468)..(468): n is a, c, g, or t
  misc_feature (584)..(584): n is a, c, g, or t
  misc_feature (615)..(615): n is a, c, g, or t
  misc_feature (633)..(633): n is a, c, g, or t
  misc_feature (636)..(636): n is a, c, g, or t
  misc_feature (647)..(647): n is a, c, g, or t
  misc_feature (673)..(673): n is a, c, g, or t
  misc_feature (1137)..(1213): n is a, c, g, or t
gactctcagaggatttccccgtacgccaaggctacaagtgcccctaagattccagattagagatgctgaggtgtctgcctcttcagtagactgcgagctccaagaggacagagttcatcctgctccccatgtcaggtccagttcaggcagctgagtatcccctcatgtggtcctggagcatgaggactgaccctccatcgtcacggggcgagagaaagcatcacagagcttcacgctgggcaagttcttttattggnnnnnnnnnnnnnnnnnnnnnnggggngggggnctgcctgngcccagccctcccatgggagangcacaggtcaganacaatgnccagcnccacaggngcccnnnnnnnnnnnnnnnnnnnnnnnnnnnnnnnnnnnnnncccactgaactgcggctctccngggggatccttggnccaggactcacttgggcngnggncttcctggggctgnaagggctaggctgactctctctggtctctgggtaggcccttgtatcctacatgctgctcccatgtctggtagaaaagcaggcctctctttgactccagagagctacctccagtggntggtcttgcacatccacttctaacacctccngccaactgagatgagggngcncccttcatttnatcttcgggacaccagccccaggggntgctcccatcccacctgctcctctgggcctcagaagccgggcatcattggctggacatctcctttccttgcaaggagggagtttgcctttcccctgcaggctgctggcacctttgaaggtccatggaaacctcacctacaaagccttaaagagccccagcccctgggcaggctgaacacacagtgtctgcagccccgttgtcttgtcatggggagctgagagggggcaccaaaggccaccaaagtgttgagctcttgctttcctagaaccccggcttcatcttgcactagaacatatgcagtagagtatgttccctggtagccctaggggaggggcaaggggcttttggacatttacttacagggggtcaggctggacccacacagggaagaagtcacagaccctcaggtagcgaagacagcaggatgcagagaagcagtcgttggcctgacagccaaggggannnnnnnnnnnnnnnnnnnnnnnnnnnnnnnnnnnnnnnnnnnnnnnnnnnnnnnnnnnnnnnnnnnnnnnnnnnnntgcttgtgcacacatgttgatgcacatgcatgcactgacactcatataaatgcacatttgtgcacacgtgtgtgcacatgtgctgagacacacacaggtgtgcttataaatgtgagcacattgatacacttgtggcactggtgcacacacattgcgctaacacacgcgctgacatacagggatgctaacacacccagactagcacattgacgcacactgagacttacaacacatgtgcacttggaccatacatttggcatgtggattcccccagggtgtaatgtgaggaaacttggtgtgaggtaggagataggagccccaggatggtagattagtttagaggaaatatgtccaggagcccggttatatcgctgcaagagcgccgaagatcttggagtagccaaaccaaagccttggag

SEQ ID NO: 435445 - DNA, 469 bp, Homo Sapiens
ggccatagcactgcctgtgcccagccctcccatgggagatgcacaggtcagacacaatgcccagccccacaggggcccagggagggcataggccgtggccaggggctgcggtggagcccactgaactgcggctctccagggggatccttgtaccaggactcacttgggccgaggacttcctgaggctgcaaggactaggctgactctctctggtctctgggtaggcccttgtatcctacatgctgctcccatgtctggtagaaaagcaggcctctctttgactccagagagctacctccagtggctggtcttgcacatccacttctaacacctcccgccaactgagataggcagcccccttcatttcatcttcgggacaccagccccaggggctgctcccatcccacctgctcctctgggcctcagaagccgggcatcattggctggacatctcctttccttgcaagga

SEQ ID NO: 435446 - DNA, 682 bp, Homo Sapiens
  misc_feature (63)..(63): n is a, c, g, or t
  misc_feature (199)..(301): n is a, c, g, or t
  misc_feature (460)..(523): n is a, c, g, or t
  misc_feature (587)..(587): n is a, c, g, or t
  misc_feature (599)..(599): n is a, c, g, or t
  misc_feature (637)..(637): n is a, c, g, or t
  misc_feature (644)..(644): n is a, c, g, or t
ttctcttccaactaagaacatatgccaagtaaaagtatgttccccctgggtagcccctagggnaaggggcaaaggggcttttggacatttacttacagggggtcaggctggacccacacagggaagaagtcacagaccctcaggtagcgaagacagcaggatgcagagaagcagtcgttgccctggcagccaaggggannnnnnnnnnnnnnnnnnnnnnnnnnnnnnnnnnnnnnnnnnnnnnnnnnnnnnnnnnnnnnnnnnnnnnnnnnnnnnnnnnnnnnnnnnnnnnnnnnnnnnntgcatgcactcacactcatataaatgcacatttgtgacacgtgtgtgcacatgtactcagacacacacaggtgtgcttataaatgtgtccacattcatacacttgtgcactggtgcacacacatgcgctcacacacgcgctcacatacaggcatgctannnnnnnnnnnnnnnnnnnnnnnnnnnnnnnnnnnnnnnnnnnnnnnnnnnnnnnnnnnnnnnncacatgtgcatacacacaggttctaatctcaggaaactggctgtagttcaggagattcaggccncgcatggctatntctctctcacggagtttcccagacccccatattacctncccagancccaggctctgtgccccccaaccagcacctggcagcct

SEQ ID NO: 435447 - DNA, 359 bp, Homo Sapiens
  misc_feature (75)..(75): n is a, c, g, or t
  misc_feature (168)..(169): n is a, c, g, or t
ccccagactcttggacaagctgattccctccccaaggcttcacagctccccactgcccaagtcttcagacccctnaggtaaacccttatttccaagagcgccccggctcccatgtcaaagagggggtgcagagacacactgtgtgggtgagtggagggctgcctggtnnccaacagtggtccccttggggcacctgtgctcctgctgcagtggacggctgggtgtctggaggaagggctggggtgtggagacagcggtggggcacagccagcaggggtgggggttccaggctgactccctctgcatctgccgagggatgggctgcgaatggtttctgtcccctgatatccacttgttct

SEQ ID NO: 435448 - DNA, 353 bp, Homo Sapiens
  misc_feature (325)..(325): n is a, c, g, or t
ctgagagggcagtatggctgacctcctcaggtctggggttgaggtctaggaatgggtattttgcgagagcctccaggcagccatgtgccccgctgtccatggtgctgaaatgcgtgctccttgatccctaggctccctgctcaacccaagccacctccactttgcctcctcatagtcttatctactcccacagtcacccctcccagtgtccagcctgtgtctcccccagcaattgtgtctaccagtctggctgctgacctggagggcctgacactcacagactccaccctggtaccgtcgcttctgagtccagtatcgggtgttnggcggcaggagctgctgcaccgggtagc

SEQ ID NO: 435449 - DNA, 1158 bp, Homo Sapiens
ttctctcgtttgtacggtcaagttggtgcagctccagcgtggccggggcatccagggatccatcaagacgtaggcttccaccaagtcattggtcctgcccgtgcaataccttgtactcatgcagatgtccccacaaggtaacacgtacagcagggtcggcagtggcagtcacttttctggcaccacaatggtggtcactgccgacaggtgtctggcagcatgagtttctctgtgatctcattcatgcccatcagctttccctgttccttctttaaactcattttcactcatgaacacaggggccatcagctccccaacaggtggctgaatggagacgtagaactgtcgggtctgggtgcacagctggaagttggctgcctgggttgagtcacagaaattaatgcccattacagcagtggcagattctccaggtgccagggactcaatttcgggaaattcttggatgctgatgccagcaggcagtttgggagtgcccacatgcaggcccttgatgggggtatcagagctgttggagaagtggatgtgcacggacaccatgtggggatccccggagaaaggttggcggctgaaggtgtagtccacagccagcccctcgccagctacccggtgcagcagctcctgccgcccaacacccgatactggactcagaagcgacggtaccagggtggagtctgtgagtgtcaggccctccaggtcagcagccagactggtagacacaattgctgggggagacacaggctggacactgggaggggtgaaatcctctagatcaagcagggagatctccttggttgcaggagcacttttgctgctgggaggtgttttcctgctccaggaggcaggttctaactgctcctcctcggactccgatgtcatctcggactctgatgagctactgctggaatcgctgccctcatcagaggatgacgcttctccttttctctctggcaccttcttcttcgtcttcctcttaccatcctcctcactctgttcactctcactgcctctccctttctcctcatcctcatcctggtcttcattgtcggactcactgctggactccccagagccgctctcactgctgctcttactgtccgattcactctcagactcagggtcactgtctgcggactcccc

SEQ ID NO: 435450 - DNA, 1170 bp, Homo Sapiens
  misc_feature (47)..(47): n is a, c, g, or t
  misc_feature (49)..(49): n is a, c, g, or t
  misc_feature (78)..(93): n is a, c, g, or t
  misc_feature (104)..(192): n is a, c, g, or t
  misc_feature (195)..(195): n is a, c, g, or t
  misc_feature (197)..(197): n is a, c, g, or t
  misc_feature (1103)..(1103): n is a, c, g, or t
tttgttcaatttattctcctgcttcagcatcaaagagatagctgggntnataggcgtgcgtcaccacacccaactaannnnnnnnnnnnnnnnagtagagaaannnnnnnnnnnnnnnnnnnnnnnnnnnnnnnnnnnnnnnnnnnnnnnnnnnnnnnnnnnnnnnnnnnnnnnnnnnnnnnnnnnnnnnnngantnaataccatacttggcccataattagctcctaataaccaaggcctggctcacgtctgccttgctcctgctctccccttcagcgagtgcggcttactaatgagtgaatctgattcctgccccacaacccaccaggagcagacacagacgcaggtgcacgccggcaggatgtgggtcgccgatgtggatctagcagccgccaaacccgtcaggctcccaattgcctccagggatgctgaggtcggtgcttcaccacctgggaggcctccctgtccctctcctcagaagtgggaaccgacatccccagagcctgactccctagagcctgacatcggtcctgagcccaccagttcctgacaactctgaaaccccacagctggagttttcctctagtgtctctggcccaaggatggatgtggtccactgtgagccacctgagatcagatccctcctgcctgaaaggccaggtagctgcatggccagcgggcactcttaaggcagtgcaaatagggctctggggcttctgggggacctgtcagggagccaggcagaagaggaagcaagcacagactggctggggcccaagcatcctagcagcctcatagagacagccactccccaccacacagaaggcacagagctgctccatccgctgtgcaggcagctgcgcccacaggcctgggctggcagtccccattttgcagcagtttttggtctggtgggcaggatttccacacttgagggagaaggccccaggaccccagctccctaaggctttactttcctgagggccaatcccctggtccgatcctgtttttatcaaacccttaaacaaaaggccctgatagggatagccggtatgccttttgtgtggaccaagtaacccctgatctttttttgtaggggccnttgggtccaggaccggttcatctggttaaaccccaaggtgttgtaggggaagtcttttcctccaaag

SEQ ID NO: 435451 - DNA, 773 bp, Homo Sapiens
  misc_feature (326)..(326): n is a, c, g, or t
atagggcgttcttttccaaatcctaactaaggagctgtggaatcctagttgaaccactccctgaagagctggatggaagttttgttctttctaaatgttcccatataattatggatcatctcaagtgtgtctttgatgtaatgcatttatattccttcttcagttctgcttctctttcttcaagtctgctaatctggtcagcatagtttattcgctttcagctcaagttgtcttgtttgagattctaaagattccactcgggtctgtaagtcctttttttcctgttcttgagagtcttcaaattcaatgaatttctcctcagcgtnttgcgcagcgccttctcacgctcgtactgggtgagcagctgctcgttgtcctcgcgcagcagctccagctccacctcgtgctcctggttctcgctgagcaccgagtctaggttctccagcacgttcaccaccagcggcatgagctccttgaccacctcctcgtcgtagcagtggatgaggcgctcgaactcgcggtagatggagcccgccaggcccgacacccgctccgacatcaccgagccggagcagtagtcgtcctggtacaccaccacgccagccgccctcggtccatctggatctccatcatcgcggccaccgccgcacgccagcgcggctcagctatccaggccggcgcgcaccggccactccccagctgcctcaggttccgcaggccgcagcccgtcgcctcccgcagctgctgtcgcacatcagggccaccaccagctc

SEQ ID NO: 435452 - DNA, 921 bp, Homo Sapiens
  misc_feature (894)..(894): n is a, c, g, or t
cttttggtgcattgcagcgttttctcccagcagctgtgtgaaagatgcattttctaagctaaggagaattttctcaagagtggcatactcatgccaaatattattgttctgggccatataggctggtcttcctccacactaaaatgggtgtcttgttttggtacttaaaacagtctactccaggcatccagtccttacagaccaaggaagagcatagcgattgcctgttggaattgcagatgcattctgggccttctcccccgtcctgaaaacattttctttgaggaaggctcttagaacattagatagtctgctgaggttgttggcccagctccatacacccagtagaacagtggaacaactcatgcttcatgctgccaaggtgctgtacttcaaaggaaacagatctagcacactgctgcacccctgcttccacactccacacttcaccccgctgcttttctctgacccgcccctggccttgtaagactcatgtaagctaagtccaggatgcctgtggcctgcggtttgattcttccctttaggattcagcaagttaatggcttcctcgctatagaagtgagactttgacttgatgcctcttggtatatcaaaaagatattcatccagaaagtaccaaatgttctgaaagacccgctcttcactccagttttccctagggtgtttctggcagggcgtttttaaaaggcatctacctgagttgacgctaatacttgtcaccacctggaacgtagttatcggtcggcaggctgaacatactccagattccccagaggccacttctgtagcccagcgatgcatctgagcctctctgcgtggtttatgcttgaaaaatagataatgcttttagatggttcactgccaggccatggnccccacaacatcctcagggccctggtg

SEQ ID NO: 435453 - DNA, 794 bp, Homo Sapiens
  misc_feature (657)..(657): n is a, c, g, or t
  misc_feature (771)..(771): n is a, c, g, or t
cgccggctttcggcgcgacggtcgccgcgttccatcgtcgcgcggccttcgggcgcccgagcccgcaatgtcgggccccaacggagacctggggatgccggtggaggcgggagcggaaggcgaggaggacggcttcggggaagcagaaaggtacaacttgctggggtaaagcagagctgaaattcaaacccaagtgaccctgacccccaagtccaatcctgagtttcggctgttaccaacctggaggaccctgggcaggttccttccttctgaggcctcggtttccctagctatataccatgagggggttggactttaagatgcagccgatttcccaggacgctgtcgtctgtgagggtggctggctctaggcaacgggtgccctttcctagaacacaggcacatatgcacccataacccagatacgctcctccagctcctccaccggctgcttcccccttggtctcaagctggcagctgagtgtatgtgagtcatgggctggctcagaactgggtcccgcagtgggcacaggcccagaccttgagtcctcagggacactgtgttgctgagcagggcagctctggagtggccgtggaggggagggagtgatggtttctagtggagaccagggaaggcttcttggaggaggcattttnagctggtccttgaagggctgttgtggttgaggcattctaggttgcagggatagttgagcaatggcggagaggctggaaagtcagaggcttcattcattcactcactcagtcatncaacaaatgcttatcgcaaaact

SEQ ID NO: 435454 - DNA, 450 bp, Homo Sapiens
gggggaaacccatttaatgtggacactcaaggcctgggcaaagtggggagcgcccaaaaattgggtgggcaggcaagtgggtgggttgcaggcccacttttggccccaggagggcatgccaggtggtgggggctggcccaggtaggccaaggggaggcccaggcaggaagggtggcccaggcaggcaaacccaccaggggtccctgaaggccaacccttaaaaaggtgtttaaaccagggggtgagtgcccaggccaaaacctagcccaggccctttgaacatgctgctgtctttgcctggaaggtgctgggtcctcccatcttccttcccttctctcctcctggatgagtcccactcatccttcaagtttcagtatggatgtcaccaccgggagcccacccaatgccccagactggatcaggcctctatgctgagcccctagccctcct

SEQ ID NO: 435455 - DNA, 917 bp, Homo Sapiens
  misc_feature (158)..(158): n is a, c, g, or t
tggggaacacggttttagcccttgtcccgttccctatgggggcccgcggcccaaaaagagggtttttgaaaattttttaagggccgaaggcgcccaacaggggttggatggtaagcgtatttggaaaggccaaaagggcgcaagtgggagtggtgtantggtgggagacccatttaatgtggacactcaaggcctgggcagagtggggagcgcccaggagttgggtgggcaggcaagtgggtgggttgcaggcccactcttggccccaggagggcatgccaggtggtgggggctggcccaggtaggccaaggggaggcccaggcaggaagggtggcccaggcaggcagacccaccaggggtccctgaaggccagcccttgagaaggtgtctaagccagggggtgagtgcccaggccagagcctagcccagggaggcagggttgggtcccggttgggggctcttggagcctaggggctggcatcactgggggcctccccgagctgctgctggaactccaggcgtgtctgccggttggactccagcagctcctggaggcgggcgtggaggtggtcattcttctcctccaggtggtccagacaggagttgatctggtccagcatggagttgatggcagcgtattctgcttccccgaagccgtcctcctcgccttccgctcccgcctccaccggcatccccaggtctccgttggggcccgacattgcgggctcgggcgcccgaagggccgcgcgacgatggaacgcggcgaccgtcgcgccgaaagccggcgccggatggaaggtggaggcggcggatagaacacgggccggaagggtagaacgcggcagctgacgcgtgggtcgacgatatcccgggattccgaccggacagcctgcttttcacagtttcatgcacatgg

SEQ ID NO: 435456 - DNA, 1335 bp, Homo Sapiens
  misc_feature (57)..(57): n is a, c, g, or t
ctggcctgcctcccaccagagtccccccagctcctccctgctgtgggctggcctggnaggaagggggtggggtgcacttacatttgcaggtctttccagcccctggggcagcctgattaaccagcttctccagggccaagctgttgggggtgaggtgcagcccgaagcagccagaccagcccctgagcctcccgggtgctggcagctgtcatggggctaccctgggggcagcctcacctagggctgcagatgctcctcctggcgttgaactgtctccggcccagcctgagcctggagctggtgccctacacaccacagataacagcttgggacctggaagggaaggtcacagccaccaccttctccctggagcagccgcgctgtgtcttcgatgggcttgccagcgccagcgataccgtctggctcgtggtggccttcagcaatgcctccaggggcttccagaacccggagacactggctgacattccggcctccccacagctgctgaccgatggccactacatgacgctgcccctgtctccggaccagctgccctgtggcgaccccatggcgggcagcggaggcgcccccgtgctgcgggtgggccatgaccacggctgccaccagcagcccttctgcaacgcgcccctccctggccctggaccctatcgggtgaagttcctcctgatggacaccaggggctcacccagggctgagaccaagtggtcagaccccatcactctccaccaagggaagacccccggatccatcgacacctggccagggcggcgaagtggcagcatgatcgtcattacctccatcctctcttctctggccggcctcctactcttggccttcttggcagcctctaccatgcgcttctccagcctgtggtggccggaggaggcccccggagccgctcgcggaatcgcgctccttcatgggcaagcgctaccatgacccaccacatcccacccagcgaggccgccacactgccggtgggctgcaagcctggcctggaccccctccccagcctcagcccctagcctggcctctttgcatggggctgggggagatggggcgccgggagtgagtgcatggtgcttggtcccagctcctgcacccacagggcccgccgcagggctccttgccatattccgcaccagcacacgaagcaaagccgcccggaacgcatggccatggaaatcccgaagagaacacacgcaaccaccatggcctcatacatacgtggccagcgaccagggtatagtcgtacaccagcgaaccaagaagaatcatgataaaggagcagctcaggaaggatgaggagaagga

SEQ ID NO: 435457 - DNA, 2040 bp, Homo Sapiens
  misc_feature (1146)..(1163): n is a, c, g, or t
ctgcccacctcctccacctgcttcaacctgctcaagctgcccaactacagcaagaagagcgtcctccgcgagaagctgcgctacgccatcagcatgaacacgggctttgaactctcctagctcctgtcccagccctgcctccagggctcctgggctgccagggaccttcagctcccagaggcagtgtggtcctgggaatgtgaccaacatgccaggtgacattggcccctagaccctctctatagccatgagactccttgtggcctcaagaaatttagacgcccacgacagcactacacagcatctccaggtgatgcccaaggcacagggctgcagaaaataaacctccagattccaccaacacgggtccattcttcctgggtgatggcagaggggcttctttttagctagtttgatcttttgggagtctgtctttccttagccgtctgagtgagctgtgtatgaacaagtcccaggggtttcaagagtttagagtggtttttgcagcatgggttgagtgtacaaagctactgtgcgtgagatcctctccttccgtttctgaaatctcttactcaggtaaggcctcgccaagcctctatgcaccccacaaagtttctgcctccatgccgtccacagcgcctcttcccagacagccaggcccatctgctgcccagggaagcgcaggcgcctgctagggacgctatggacaccgtgagtccaaggcgctgctcctgccttgaagccacgcgctccacgccgcggccctcccattttctgcgtcctcagcgggctgagctgccagagagtcttcccggacctattcccgtcctatgcattcacattggcatcctggtttgggggaagaaaaacaacggcccttagcagcagccccgtttccagaatgtgctgcctgttccccaaagcctgcttgtcccgcggaggacggctgcctttgaccctgcttatttgtctcactggttatctaatgaggaacaaacactaacctaaggtacacatcccatctgggcggtggcttcactcctgagtctgcaaaatcccaggaaacttgggtcttgctgcccatccttcctcagcacagggaacccggaagcccgttgcactgacagaggctcacaccctctgggnnnnnnnnnnnnnnnnnnaaacttcatttctcttccaacccattgtgttcctctgccctcattctttacctttgttgtaagaactttagctccagggaactgaggcagaggccctgtttgtggtctgtgttgacagccacccaccctctcccacctcatgctcctgcacctgcaccaccaaggttgatgccggattcgaagccaggaaggcccagtccctcctctgctctcctcaaagacgcaaaacattttccaacaagagctgtcacagtggcagcaaagcaggggccacccgtctccacagtccttcagagtttcagctgcatcctggtgtcccacccaggtcgagcccccaggcttctggaaaagagtgtgtgctctactttgatggaaacatggcaaggaatttaaagacaggaatgtattaatattattgaaggtgtgttcgtaacctctgattctgtggacttgccactttctccaaacgctcggttcctttgaagatttcttctgaacgtgtgtgcgcacgctgggcgggttcgtgcatacatgcggggaccccagactgtcagcacagggaagatggatcccatcctaatttttatcacctgaaggttggaaccagtgagggactgggagagagtgatttataagcaccaatatcaacttcatgtggatttttgacaaggaggggtagtttgtaatttcatttaaattcttttcagcagctggaaatattgcactatctgaaacactgaatctccttttgtaactggtgttcactgacaccttgatggctcttgatggctctaaaaagttgtaggattttttgtttttgtagctaacttatggattgggatgtgatcaaaggctttattaaatttgtacttcagca

SEQ ID NO: 435458 - DNA, 1482 bp, Homo Sapiens
  misc_feature (52)..(173): n is a, c, g, or t
  misc_feature (1225)..(1278): n is a, c, g, or t
  misc_feature (1280)..(1318): n is a, c, g, or t
tactgaagcattcgaccggagcagctgagaccacaggcatgcaccaccatgnnnnnnnnnnnnnnnnnnnnnnnnnnnnnnnnnnnnnnnnnnnnnnnnnnnnnnnnnnnnnnnnnnnnnnnnnnnnnnnnnnnnnnnnnnnnnnnnnnnnnnnnnnnnnnnnnnnnnnnnnntgacgcaccgcgtccggctggagcaagtatatgtattgtgtggtgagtgtgtcttttgtgacatgaatttgtgcactgtaggacaagtttgtgtgctgtggcacaattgtgtgcatcaaggagtgatatatgttgtaagatgtaccgttgcatgtctctgtggtggggtaaacttgtctgaaagctatagggagagtctctgtagtatgggtttagtctgtgctttgcggggtgactctacgtgctctgcagagtgtctgtgtggtgctgggcaagtctgtgtcctgaggtgatggtctgtggcctatggtgcttgtctgtacacaatggggtgagtctgtctgttgtgggagagtctttgtgtcatgatgcgggtcttcaagctgtctcatgagtctattctcgggaaagtctgtttcattggcaagagtccctgtgctctaggacgagtctatggtctgtggtgagagtatgtgatgtcaggggtgtctgtgtgccctggggagagtctgtttgctgtgggaagaagctgtacactctagagaaagtctgtgtgctgtggggtgagtctactggccttgagagtatgtgtgcttgtcggggaagccgtgttctatggggtaagtctgtatgctgtgtgtttcctaaaatgggttcgtgtgatgtgggaacagtgtgtgatgttgggattgtctgtgtgtcatagtagagtccttatgggggggcaagtctgtgtcatgcggggtgcatcagtgtgcctcaggtgagtctctgcattaagcagtacatacgtgcctctgggagagtctaatgatacggggattggggtgtccatgtgttctggggaacatctttttgctgtggtgcttgtcggtgtgcctttggatatgtctgtgtactggaaggcaagtgtgtgtactgtgagaagagtctaggtgctgtgggggtaaatgtgtttgtgttatctggtcagtgtgtgcattaaagggtgagtttgtatactgcggacacaagtctgcttccaggcaagtcccccttagtatctacaaatnnnnnnnnnnnnnnnnnnnnnnnnnnnnnnnnnnnnnnnnnnnnnnnnnnnnnnannnnnnnnnnnnnnnnnnnnnnnnnnnnnnnnnnnnnnnagatttaagtaacccgtcccacagtcatgcaactagcaagcagccgaggtctgaaaccaggcagtctgtttcctgttctcatactattatgattcccctcggggccctgagggcatcggtggcctcaaaccttagaaagccttcgtggtcactggtgagcatcc

SEQ ID NO: 435459 - DNA, 1001 bp, Homo Sapiens
aaattgtacttctcggcactataattttaattgctttacaaaagatgatttacaaaaagacaccactgcaaagtagaaataaatcattttaatgtctattttttcacttctattaattgattattgatttctacacaagtgtatgcatctagtttgacttgcttcatatttattttccaacatggtgcaatcttcagcatgaggtgcacgaagtaccttgtcctcaaagagctttatcaactcgaacattttcgaagagctctataaggcagctcagcatggcagttttttactgaaatctcttatctggaagatggcagaagagacccggaccttcccgagcccactggttgcttgtattcatatcacagctcgcttgagtaagtggtaacgacagaataataagcagattgctcctccaaacccagctgggtgagatagcttcatttttggaaaatcaactgaatcatgaaaaccttcctaatggtataatttgttccagagttcttttgatacttaagaagggaaatattaatccttgtgcacagtcttttattacaagcactcttatttatggtattacagagttttcttctccagccgtcattctctggtgaggtgactggctgtaccccatgcagaatcgaaagcatgaagaaatctcctttcttaatcagagctgatgacagccctctcatttcctgccaaatggatcagaccacacttttaaccctggtggctgcacatcctcttgaacaattccagcccgatttatagcttgttccttcttgtactcctccaatctcattaggggccggaagtagatgggatagaaggcggcgccgatcagggagatgaagccgccgaaaatgagcgcggtgcgcaggttccgggacatggcgtcaggccccgggctgccctgacccgccgaccgcccggcactctcggaaaccaggttaccgacggccgggccgttaccccgctcggaagaggtggagagg

SEQ ID NO: 435460 - DNA, 693 bp, Homo Sapiens
  misc_feature (17)..(17): n is a, c, g, or t
  misc_feature (38)..(38): n is a, c, g, or t
  misc_feature (500)..(512): n is a, c, g, or t
  misc_feature (664)..(664): n is a, c, g, or t
gacaagcctgacagcancggcacagagcaggatgaccncttcagcttctgagggcccgggcaggccggacacaagcggccctgacacgtgatggaccaaagccacctgctgcgggggagccagttctggggcccgcctgccacctctcccagccctcagcattgtcagcctgaagatcagagctgcagccagtcaggcaggggagagatttttcttttaagccctgctctttctctgagaaccaaaagatgccttgaatatttattcagtgacttctggcttatgctcagaagccagtctgcgtcaggcacgtctcctgctgcgtgacatgtgcagtgctgtaatcggctcccgcttgctctcctggagcaagctctgccctggctgtgggtatcaggactgtgaccaaagcatttctagtcccttctctctttctaaggacccaaatttccctgggggcatcctgcttcctgaaagctgttggatttcagtgatttttnnnnnnnnnnnnnagcacaggagagcacccacagccgcagaaggggaatgtgtcctcctgctctgcttcctcagggcccagcaggcgggggtttgagccctgggaccccagggtttttaggagactaaggggggcagctcctgaaccaaagaacgattacagctntggcacttttaaagcattaacagccaggt

SEQ ID NO: 435461 - DNA, 383 bp, Homo Sapiens
  misc_feature (47)..(47): n is a, c, g, or t
  misc_feature (61)..(61): n is a, c, g, or t
  misc_feature (66)..(66): n is a, c, g, or t
  misc_feature (352)..(352): n is a, c, g, or t
  misc_feature (373)..(373): n is a, c, g, or t
ccctcggcaacaaatcttgcaagaaaaaacttctttgaattcaacantggctgcaaaatgncggtnacgggggcactgcccaggccccagggctttgctggttgcaggaggtgaggaggcagagctctgggagtcccctacgcagtgggtcttggctggagatgggggctcagggccgtctctgggcagtcccccacactgcagcaggggccatttggcaccagaggccagagcatctggacttgggaaggagatggagccatctgcggtgagctcaatgtggtgcaactgggtaccatcagtagccatgatgtagtgggtgccagcttcttttagggtgtcactcacaacncacgcctgggctgcctctccntggctcctcg

SEQ ID NO: 435462 - DNA, 941 bp, Homo Sapiens
  misc_feature (815)..(816): n is a, c, g, or t
  misc_feature (825)..(825): n is a, c, g, or t
  misc_feature (897)..(897): n is a, c, g, or t
  misc_feature (904)..(904): n is a, c, g, or t
ccagggttaaagacggaacacaattacacttcttgtttggttgggagacggcactggtcattcattgtgtcaggtctttcctcctcctaaacttgggccctgcttggagatacgctccatcaaagcacttgcccacttactagcctgccctgcttgttattccctatcagcaatagagtttggatcacttagaacgaaaagcaacaggaggacaatggatccaggaggcctcttaactgcacatgtgctgcctggcctcgaggagacaggatggagaggtaccttctttttagccctttagactttattggcctagatatctaccaggtgaggtcagatgtgatcctggattttataaaactcagaccttggtaactgtggtaaaagcaacacagccaatttttagctggggaggcaggagtgagtcggtggaagggcttggtaagcaaggtaaagaacaggaggtacagagaccaacccccaccacccaaccacctgtcagaaaacacagagaagacatttgcctgcctttcaagctttgccaaggatacagggacttgcttcctccagattagtcacaatccaggagactatagcaactgcttggtcttttcctggtccaagtgtgaactttccaacctgatagtctaagtattttcctctggctcgcaaatctcggaggagcaaatccaaaactgacttcctgtaggtcttgataaattgttacagaagtactggaggatgctttctatacccatgtttctaaatctggttattttctttcaaagcctccatctcctaccactccctccccnnatttcattncccttctattccttctcaagcaagatgtattgtcttaaacaaattgtctaacaatggaatttcaccttttcnccccaantgaagcatctttcagggcaggttcctatctattttcc

SEQ ID NO: 435463 - DNA, 2068 bp, Homo Sapiens
  misc_feature (17)..(17): n is a, c, g, or t
taaatttcctatacctntgatgggtattatatccctgtatagtgatgcaaaatgcacttatgtgtaaccagtggtgatttggtgcctgtcttaaaggaaggcctttgaggacacacctgtctgccacaaatgctttaaagtgtatcatgagctagtcctaggcctcaaagtactgtattttttatttttacctgatttgcagtcataaacactgcactttggtgctgacactgggtccagagtgagcattctcttggactattagatgtatatacttttgaatacatcactgttggatagatgttttaacagttttttctggtttaaaaaccaaattgtaaatggagtgtgtacttgtagagagtgacaaggtattgtttccctatgtgctgtttgagcagtattttaaccaacttgtattacagatgttacagttccatgttaggaagtcagaaaagacttgtgtttgtctttgttctgctgatgtggagtcatgttttgtggggtcttccatggcacatttacctgttgctccgtccagatgttgagggccagtctaggctgacacatcctacccgaggacaagcctgttctccatttcttcactctcccctccccatatagcaactctcccaggtttagattaccgttttcgacgacagattaaccaaaaatgccccacacaggttttattactgttatatactatacttttaacagtacagaccctaaattttattatttgttgctcccccaatctgataccaaatgtttaaagttgtttgaaatccaaacatggtagtgttcatgggtaaatattttctaggctatgtaagagttagcagcccatagcatagaagtaatcaagtagcatctgagactgttggaggcactagggcctctctgggccctaacagcctcacttccccagcctcaccttgctgtcctctgacactgccatcagggctgttagtggcacctgtatgaggccaagtgtgcgtccaggggaacagcacaggttaatgcgtctccctagaactcatgaagtcagtttaattcatgcatgaacatgagttcattttatgttttatatagctttcttagacataccaaaccatcattcataaatcagataaattattcagtttttgtgtttagaaagctaagtatgtgtagctggaaacaaaaatgagcgtgttttctctcctgttaatctagagtgtgcagttacacatgtgtggataatttcatgttccaggggcgcttggcatctcccatggactgattcccaggaagaaaagcccaaagggaaacccacgattcctttcgagtagatgtgggaaagagcccattggaggatatgaggtcctgtgaaattcagttgtgtgtgtggctccttgttagcagtcatgttgacatggtgttaggaggctccccatccaccctttacatgatgtagggaccagtgtcttgtgagattaaccttgggacacagtgggttagcctggagaaaatgagaggccctgcctggacccagggagaggagccagtgacacaggcagagcggtgcagccctccttcccttccatttggaggaggtggtgccaggagcctgcccgcttacctctgctgaagcataagtggactttgcttttggggcttatctctgatacatgctggagccctgcctctccactgctagatggaacctggaatctctcatctacctcttagtctgtcagtttctacgtgtgagaagcaagcttgtgggccagtgtccttgtacatgctgtagcacttaaaaaataattccagggttccctggaaaaccagtcccagggttcctatgatctgtagtttctacctggattataactggttttgggtacctgaattttgattggttagccttaattatagtctggcgtgatcatgtagaatcttttctggtgaacagatcataaagttctatcaaggagttctatcaaggcatccatgtcagtggtgctatgctggttacaacttgagatttttgaaataaaaaatttgtcatattcatgcctctaaa

SEQ ID NO: 435464 - DNA, 488 bp, Homo Sapiens
  misc_feature (387)..(387): n is a, c, g, or t
  misc_feature (406)..(406): n is a, c, g, or t
  misc_feature (415)..(415): n is a, c, g, or t
  misc_feature (473)..(473): n is a, c, g, or t
agaggcatgaatatgacaaattttttatttcaaaaatctcaagttgtaaccagcatagcaccactgacatggatgccttgatagaactccttgatagaactttatgatctgttcaccagaaaagattctacatgatcacgccagactataattaaggctaaccaatcaaaattcaggtacccaaaaccagttataatccgggtaggaaactacagatcatagggaaccctggggactggttttccggggaaccctgggaattattttttaagtgctacagcatgtacaaggacactgggcccacaagcttgcttcttcacacgttggaaactgacaggacttaaggagggtaggatgaggaggtttcccggggttcccttcttggcngttgggagagggcaggggnttccagccntgttttttccgggggttaaggccccccaaaggcaagttccccttttttgctttccgcngagggttaggcgggg

SEQ ID NO: 435465 - DNA, 1447 bp, Homo Sapiens
acttttccctttttagtaatggtgtctttttattgataacttcccaacagcatctgtaaacatcgggtacaaaaatattccattaaactctttcccgaggtggctccgtttgctccatggaggccttcagagaggcctgctggcccctcaggttccacacctctattcagagaaacacagaactcagcacgctcagggctgaatggatggccagcctccgtctcaagacttctacctatctcagaaacctccttgagataccaaggagaaagtatttgatacttttacggagcaaggggcaggaaaagcagaattagtgggtgcgggggtgggctggggtgaactcagaggagaccgtgcttgtgcacctcaaggaggtcctgaccggtggtgggggacatctggctctggtgtctgggaaccttctaagcattcttcagagcagacgtcaggctcagctctggaaaaattcccctgtgcccagccccacgactccagctggaatgggcgtgccctggcatggcagaggggtcttgcagaatagagatgttctgaggaaggaaggagccagaattaaagacccccccaggaattccacacccctcgggagagagccttgtccccctaggagccctgggtgacagaacggggcagcaaaggagccctggatgacagaacaaggcagggttacccgctgccaccttgtatgctgctgccctgagaccccctcaaggcaccgggcagcagggctattcgcccgtcatctcctcgtcatctgtctggctgcggccgttgatggctggggagccagcctggacatgggacaggtcctcgaagccggggctcagggagggcgagacggtgtcggggctggtgtcacatgagcccgtgctctgttctgaggtggcaatggtggtcgtggtgctgggtgggatggggtcttcatcctcttcctccaggaaggatgcctctgggatatggctgaaggcctctgggtgctgcctggccagtttccctttcagcgtcctgatacggcggaagatgctgtccaggtcccgtttcatctctactagggtcctcgtgtggtgcaggaagcgttcgctcatctgctgcaggcgggcactggacaggttgttgaagttgagcagcatctcattggtcttctcaaagcggtccagcatgttcttctgggccaggatgatggcgttgacatcatctgtgttcaccatgctcaggatgcggccgcagaagaccctcgaggccgagtccgggaggtccatctctttctcctcctccgctgcctgcacatctggcggccttgctcgcgcttccgggatggcgcccgcgccggcgaaacgtcaccacgcaccgatcctgcgagcgcgcgtggcggggacgtaccctggagccgcttgcgtgcgttaagcctcgtccgaaatcgccaccc

SEQ ID NO: 435466 - DNA, 1720 bp, Homo Sapiens
  misc_feature (85)..(114): n is a, c, g, or t
  misc_feature (1184)..(1229): n is a, c, g, or t
  misc_feature (1289)..(1298): n is a, c, g, or t
  misc_feature (1556)..(1571): n is a, c, g, or t
  misc_feature (1685)..(1685): n is a, c, g, or t
ctactctccagacgccctgaggggtgtgccctgaagaggagggtgcggccctcctcagcgacccctacccatcatctgttggtgnnnnnnnnnnnnnnnnnnnnnnnnnnnnnnaacaattaacttttaattatctttttttaaacagtaaaactaaaaaccaaacacaccaccttccttgatcccagctggcctctcgctggccgcacctgtcacgtctctccctcttctctttcaccactctttcccccagtccatcctgaagctcctgcacccccttcccgccttcccctcacttcccaagaatactccaaacaaactctgaaccacggagacttggagcagtgggagacccctctcccgtttctcgataccttcctggaggaacgcggggacatcggaccaacccatacatcaagccagagggcggggcttagggagactggccttggagatgccccactccctgtctaagctccgacaagactgtgacttcctctgtggctgctctgcctcctcccactcacacccaagtgggcctggagtatagacggacaggctggagacgaggccggagtttgagaggcctctgggtgggtgtgaggccatggagtctgtatccctggggaggcgctggcctcctgggccttgccgtccagtggggagtggagggcagaggccctttggtctgctggctgtggagggtgggttgcacggacagccggatatcggggacactgccttgggagagggcggcccggacgggtatttggtacttttagtttcctgatttagcactttaaatggcattaacttattgaatggggatggggtgggcaagagtgaggggcctagaaaaccaggttttgtggcttgcccttgggggaagggtctggtttgagggaaatgggagggtcaagaggggcttgacggggagcactgaaaacaccctgggacccgcaggtgggggtgactttgaactttcagtcatccctccttggctaatttttggagggttttttccctacggaaaagggaatggaaaacccctaattttttttccaattgggggcgcctccctggctagcaccccccctgggttgagaagaatggtttcttgtaaaagaggtcttcccctcctgtaagagggccccttggttagccacaaattccgccatgggctnnnnnnnnnnnnnnnnnnnnnnnnnnnnnnnnnnnnnnnnnnnnnntttgggctggggtatgagataaaattcccccatcaccacttgtggacccctctatggggnnnnnnnnnntgtgggtcccaaatgaaaaaagggggccccgcgggttttttgtggggggggctacatgattttggtcccccccgtcccgcccctcgttgggggcgctctttattgttctcgtgggggccctctcgcgggggttattcatccctcttgtatgtgggtctaaagtgtctccccgcccccatcgaaccctagagggcccccctcacattattttttttggggaggttttgtgcttacacaacttggtcagcgtggtggggnnnnnnnnnnnnnnnnggaaaagaggggggccacatcagggtgttggtggcgcattacacgctgcgagctatccggcggtatagtaagggcacattctggggggcgcatcacaataacgtcggcggggcntaggcgcagagcgtaagcctcggggaggtctcatt

SEQ ID NO: 435467 - DNA, 1011 bp, Homo Sapiens
  misc_feature (697)..(811): n is a, c, g, or t
  misc_feature (959)..(959): n is a, c, g, or t
  misc_feature (991)..(991): n is a, c, g, or t
  misc_feature (1000)..(1000): n is a, c, g, or t
ccacacccggcttacatgcattttttatcaccacaaactgaaactctgtacccactgaaaaagagctccaaattccaccctcaccccagaccctggtaaccactatttcactttctttctgaatttcccttcatatgagtgggatcaaacaagagttgtccttttgtgtttagcattcttacttagcaagccatcaactgctcgaacagtcactggggcaactacttttcgcccagtgtcctccagaaaagaaaggtctggagggtcaggccactctttttcttcaaaataatggggtgcagaagggtagggatgaacctcttcctcctttgccactttagctttagctcaaaggaactccaactttttattatttgcaacagttagttagctttctttgtttcacatctctgccttgcagaaccatgacctattcaaggtgttttgtcaaacaaaaactaatactttccctgggaaaaagccatgtggtagcaagtaccagaaatttttatggccaaataatacaccactatatccataggaccgcatttgggtttatccactcatctgctgattgtttccccctcttgggtattatgagtaatgctatgaacatgggtgtacacatctctcttgaagtcccttcttaggtcctttagggatacatatccaggagcagaactactagatcacatannnnnnnnnnnnnnnnnnnnnnnnnnnnnnnnnnnnnnnnnnnnnnnnnnnnnnnnnnnnnnnnnnnnnnnnnnnnnnnnnnnnnnnnnnnnnnnnnnnnnnnnnnnnnnnnnnntagtgcctttataaaggggctcaagggaaccaattacctcctttttgcccttcgattcccttccaccatatgagggacacaggcaacagggccccgtcctaggaagcttgaggactggggccctcaataggtggattaccagttttgncagcacgctgattcgtgggggtttctcagttntttcacaantttggaggaaa

SEQ ID NO: 435468 - DNA, 480 bp, Homo Sapiens
atctagcttgctgaattcctacctgaatagaactgagaggggtcgctcaaggtgctgctcggacagtcactggagcaactacttttcgcccactgtcctctggaaatgaaagatctggagggtcaggccactctttttcttcaaaataaggagggggtgcagaagggtaaggatgaacctctccctcctttgccgctttagctttagctggcaaacaaacctgctctgtaacctcttctgttacttcgttatactccccttcctcctcatcatcagtgtgaaaaggttccaaggtggaatgaaccagagtccacccttgtcccattgttaccttgatgcctccgagctccccttcttactgaccatggggactgctttaagagtactcgggtgtcctccagcttagttccacgttctccaactgtcgctctggtgatccttcgacctggattcgagcccccacgtatgggcgctgcttgc

SEQ ID NO: 435469 - DNA, 467 bp, Homo Sapiens
  misc_feature (17)..(17): n is a, c, g, or t
  misc_feature (29)..(29): n is a, c, g, or t
  misc_feature (89)..(89): n is a, c, g, or t
accccaaatgccttttnccccccccgggnaaaagtattaagtttttgtttggaccaaaaaacacccttgaataggtccatgggttcctncaaaggccagagatgtgaaaaacaaaagaaagcctaactgttgccaaattaataaaaaagttggagttccctttgaagctaaagcctaaagtggccaaaggaggaaagaggttccatcccctacccttcctgcacccccattattttgaagaaaaagagtggcctgaccctcccagacctttcttttctggaggacactgggcgaaaagtagttgccccagtgactgttcgagcagttgatggcttgctaagtaagaatgctaaacacaaaaggacaactcttgtttgatcccactcatatgaagggaaattcagaaagaaagtgaaatagtggttaccagggtctggggtgagggtggaatttggagctctttttca

SEQ ID NO: 435470 - DNA, 470 bp, Homo Sapiens
  misc_feature (372)..(372): n is a, c, g, or t
  misc_feature (382)..(382): n is a, c, g, or t
  misc_feature (427)..(427): n is a, c, g, or t
  misc_feature (437)..(437): n is a, c, g, or t
  misc_feature (444)..(444): n is a, c, g, or t
tcaaaataatggggtgcagaagggtagggatgaacctcttcctcctttgccactttagctttagtcaaaggaactccaactttttattatttgcaacagttagttagctttctttgtttcacatctctgccttgcagaaccatgacctatcaaggtgttttgtcaaacaaaaactaatactttccctgggaaaaagccatgtgggtagcaagtaccagaaatttttatggccaaataatacaccactatatccatagaccgcatttggtttatccacttcatcttgctggattgtttccccctcttggggtattatgagtaatgctatggaacatggggtgtacacatcttcttctttgaagtaaggtcccnttcttagggncccttagggggtacatattcccggggggccggaactacttgggtncacatatggntaagggncttgaattgttccccccacccaaatt

SEQ ID NO: 435471 - DNA, 450 bp, Homo Sapiens
ttttttttaatttaaaagtacgaatttatttctcatagttgtgaagactgagaagcccacgatcagcgtgctggcagactggtatcatctattgagggcccagtctcagcttctaggacggggcctgttgctgtgtcctcatatggtggaagggaatcgaagggcaaaaaggaggtaattggttcccttgagcccctttataaaggcactaaatccattaatgaggatggagctctcatgacataatcacctcctaaagcctcacctatcacgttgggtgggttgcttcaacatacgaatttggtgggggggacattcaggaccttaggcatatggtgatcttaggtagtttctgctcctggggttatgttattcccctaaagggaccctaagggagggggactttccaaggaggaggatgttgttacaccccttgtttcataggcttta

SEQ ID NO: 435472 - DNA, 995 bp, Homo Sapiens
tcaacttgggaccacactccatttgatgagggcagggggttttcccgggggagggcccactggggagcccgaccactcttcccagggaagaactggggagtcccccccgcgggtgagcccagtcacccacctcacagggcagatgggcagggccccttttccacagcactcgccttcatgcagaacgtaagtgaagcccgaccgacagctgtcctcacagggcttctgggagcactgggccacgcggaggcccatcacggcatcctccatgtcggtgcaggtgcacacatcgcagccctcctcccagaactggcccacagggtagatggtgcttcggtggacacacaccttgtcgggaaggcaggtggttgtggtacagccacagtcattggtggcggttgaggccaagtacccaaggggacagctcactgtggagttgacacagttgcaggcacactcatactcatcacagcactgggtcttccgaagggtgggcaaacggtgcggggggcaggagggtggggacactcttttgcactcctccttcctgcaggcgcaggtgaagttgggtctgcactcgccagggttggtcagtgtgggctggaggccacgttcacagtgaggcactgggggcaggtcacagctcactgggtcacacacacactcatactcggggcagcactggtctgcattctggcggaggcgggctacttcacacaggccacacgtgggagctttggccgtggggcagggctgcgttgtgcagttgaccttccgcccgctgaggcatgtgcagatctgacagggctggtggtccgggacccaggcttccaggaactggtgctggactccatcctcaccaatgcactgagtgcaggcctcttcagggacacagctgccttccaacatgactttatctggagggcagaaacagccttcggagggatggtccccacaggagctcacgttgccatcacagtgccggggacagccat

SEQ ID NO: 435473 - DNA, 956 bp, Homo Sapiens
  misc_feature (246)..(286): n is a, c, g, or t
ggtccggaattcccgggatggggacccctcctccgggatccggtacacagcgtcgcgcgctccccccagggtgccatggcctcccggctcctgcaccggctgcggcacgccttggccggcgacggccccggggaggcggcggccagtccagaggccgagcagtttccggagagctcagagctggaggacgacgacgccgagggcctgtcctcccgactcagcggcaccctcagcttcaccagcgcnnnnnnnnnnnnnnnnnnnnnnnnnnnnnnnnnnnnnnnnnctggccctgaccagctgcccctcggggatgggacgtcaggagaagacgcagaacggagccccccacctgatgggcagtggggcagtcagctcctggcgcggcagctgcaggatttctggaagaagtcccggaacaccttggcaccccagcggctgctcttcgaagtgaccagcgctaacgttgtcaaggacccgccctccaagtacgtgacaaacctcagctctacaccctcgccgtgatcggcccaggaccgccagattgccagccagcccagatctctcgccgttactcggactttgagcggctgcacccgaaacctgcagcggcaattccggggcccaatggctgccatctccttcccccgtaagcggctgcgccggaattttactgcagagaccattgcccgccgtaggcggggcttttgagcagtttttgggtcccctgcaggcagtgcctgagctgcgcaatgccccggacctgcaggacttcttcgtgctagctggagcttgctgcgggcacagaagcctcacctgtacgtggctctatcagtgaggctctggcaactctgggccattgcctggcagttgcaagcccagtgggcaccccatctggccagaacgccacctggtagacctgctgtgtgacacgtgttgcccaaggactggaagac

SEQ ID NO: 435474 - DNA, 1121 bp, Homo Sapiens
  misc_feature (349)..(389): n is a, c, g, or t
ggatggctggtggctggctggcatggaatgctgccctgatgcggcgctctgagctggcctgatgcccggctggagccctgcagattccggcctgacctccatgggctgcggggggctgcacccggacccctggggcgcggcgcgcccctgaatgcaccgtgggacgcaggagggtgccatggcctcccggctcctgcaccggctgcggcacgccttggccggcgacggccccggggaggcggcggccagtccagaggccgagcagtttccggagagctcagagctggaggacgacgacgccgagggcctgtcctcccgactcagcggcaccctcagcttcaccagcgcnnnnnnnnnnnnnnnnnnnnnnnnnnnnnnnnnnnnnnnnnctggccctgaccagctgcccctcggggatgggacgtcaggagaagacgcagaacggagccccccacctgatgggcagtggggcagtcagctcctggcgcggcagctgcaggatttctggaagaagtcccggaacaccttggcaccccagcggctgctcttcgaagtgaccagcgctaacgttgtcaaggacccgccctccaagtacgtgacaaacctcagctctacaccctcgccgtgatcggcccaggaccgccagattgccagccagcccagatctctcgccgttactcggactttgagcggctgcaccgaaacctgcagcggcaattccggggcccaatggctgccatctccttcccccggaaggggctgcgccggaattttactgcagagaccattgcccgccgtagccgggcctttgagcagtttttgggtcacctgcaggcagtgcctgagctgcgccatgccccggacctgcaggacttcttcttgctgccggagctgcggggggcacagagcctcccctgtactggccttctatcgtgaggctctggcactctggggccatgcctgggagttgccaagcccagctggggacccccctctggcccaaaccgccccctgcctgacccgggctgggactggcccgggtgcccccacgaagctgggaaaaccctggagagggccccgggcatgcttgtgaaaaaggccccggaaagtgttttgggggg

SEQ ID NO: 435475 - DNA, 1044 bp, Homo Sapiens
  misc_feature (821)..(860): n is a, c, g, or t
ttgaccgttttgttccaaggcccccagggcccccggggagaaaccgggaccaatggcccctcccgggaaaggggtccccagcaaaggggtgggagcttcttgtccccccaggcaaggcgccagggctttctccccaggcattgcccgggcctctccaagggttcttccagctccttggtgccacacggccagcccccagccaagggtcagcagggggcggtctgggccagaggggggtgcccagctgggctggcagctgccaggcattggcccagagtgccagagcctcacgatagaggcccagtacaggtggggctctgtgcccgccgccagcttccggcagcacgaagaagtcctgcaggtccggggcatggcgcagctcaggcactgcctgcaggtgacccaaaaaactgctcaaaggcccggctacggcgggcaatggtctctgcagtaaaattccgacgcagccgcttacgggggaaggagatggcagccattgggccccggaattgccgctgcaggtttcggtgcagccgctcaaagtccgagtaacggcgagagatctgggctggctggcaatctggcggtcctgggccgatcacggtgagggtgtagagttggagggcgggtccttgacaacgttagcgctggtcacttcgaagagcagccgctggggtgccaaggtgttccgggacttcttccagaaatcctgcagctgccgcgccaggagctgactgccccactgcccatcaggtggggggctccgttctgcgtcttctcctgacgtcccatccccgaggggcagctggtcagggccagcnnnnnnnnnnnnnnnnnnnnnnnnnnnnnnnnnnnnnnnngcgctggtgaagctgagggtgccgctgagtcgggaggacaggccctcggcgtcgtcgtcctccagctctgagctctccggaaactgctcggcctctggactggccgccgcctccccggggccgtcgccgaccaaggcgtgccgcagcctcgtgccgaattcgccacccaggcctcgctacctta

SEQ ID NO: 435476 - DNA, 2478 bp, Homo Sapiens
  misc_feature (20)..(20): n is a, c, g, or t
  misc_feature (42)..(42): n is a, c, g, or t
  misc_feature (47)..(47): n is a, c, g, or t
  misc_feature (52)..(52): n is a, c, g, or t
  misc_feature (114)..(114): n is a, c, g, or t
aattttccctgccccccctngaacctgtttgtggaaaagccngggangaagngtcccctcccaatcccaaagggaataaaagacagctcccaaagtctgtgagcccaagaaaangggaagcctctgtaagcagtaattaacctttctcctaactggctgaataccccagctggtacccaaaagttaaaaaattgctgccccaacactccatgatatggagcatcttgggagtcaggtatagttaatgcaaactttatttataaaagactcttaaattagttgtatcatgccatgcattcatacagaatacagtgacccttcagggcgacagagaagagctcacaaactgaaaggaaaactattaaagagtttctaatattaactattaaaaagctaggaaagattaggacaattttacaaatgagcaattaaaaagaaaaggatctgggaactagactgagcagagagggggcagctgtttacaagtctgtacactaaactcatccacggacagtcttctagagcagcaggacgctgacagagagaagcagagtatgtacaaatacttgtgccacaatgactcctccccctagctccacggcatgatacatacaaccagtttgtatacactaggcctgctgaggccattttaaactatgaggacttctagtttagtaaactaaagctgcagggtgccgggggagtggggcagcttcatttgcgactgctctttattctctccagtctttttttcaagtcgtctatgttagctgtggaggaggaggaggtcacagttcctgaagagtgagtctggttagaatccaggtctgaatgctggtgctgctcccgtgactcccggagctgagagagtttgctgtggagcatgtctgtggaagaggcgacagtaggaactgctggtttggagagcaaagaggtcaaaggaggtcggtcatcttgctttgtgttgtccagaccacatcgctgtcggaggatctttagcctttccaagtagacagatggccccacttcttccccatttgtgttacctatggaggacactgtgcttgtgggcgtgggcacacatgtgacttccatctgaggggagatgcctgttgaagtggaaatacgacctttgccctccctctccatctcaatcacccgaaggcctctttcgacatagctctggaagaactgtgaggaatttttcagaaatggttcaatgtcagcatctgagtatttcttcttatattcatataactctgctagtccctctttagtgttttctttagagccaatcttcttaaaaatctcagctaagaaatcattcactttggcctttgatgatttttcatctattcgagatgctcccttttctgtttccttatcagacttgctcccagtctggtccatactgtgcttcatcatccggcagagatgggcctccagctcagactcgtttttgttgtcgatcatcgttaggtggtccaggatcttgggcccttttaatttgcataaggtgtgtagcagggtctttagggtccttatgggaaattcacttttgcattgcttcagtttctctttggggaagaccttcatgaaaatgtggatatccagaagaattctgtctaggttaatgctattgatggtatcaggcaacagtcgaaccattctccagagacacttcataacaagctctgagaatttgggagaactggctgttgctagcaggctgtcttggagcaaaacaagtagggcactcaggatgttggtctggtctgacttctccagaaccttcaccaccaagaggttcacagagcggatgacctgttgtccttcctcaagatcttcaatccgagaatccagcattaaggtgatgaggccatgcattaggtcttttagtactccagtggaggcctcccgggcaaggctctctatctgaaacagcgaaatcatgttgccaatgatacagctatacaacttgatgatctcgtccttctccaatttctcatctgccatgtgtgtgttgtagatgagtcttagctgcataaaagtggctatcagaaactgatcaatatggccggacatggcttcagctttgtcttcctgtctcaggacctcatcgatctgtgtcagagcttggatacttgtgttgatgtcaccactggctacttgggagataatgaaattgattgtggatgctgtattactgtgcatgtcatcgaagtgtggagaaacagcccggatcttgggttcaggaataaggactggctcaaaaatgtcatccagtttgtgctgaacaagttctggcatttcacatcggactgtaccattgtcattctcaatctcatctagatccagctggaattctcggcggaccatctgggctgcctcaggatgcccactcatgcttcgggcttggttgagtttggaagacatgtcctcagctggtccatccggagaatccggaccggtaccagc

SEQ ID NO: 435477 - DNA, 1636 bp, Homo Sapiens
  misc_feature (895)..(895): n is a, c, g, or t
tctgtgtcagagcttggatacttgtgttgatgtcaccactggctacttgggagaaaatgaaattgattgtggatgctgtattactgtgcatgtcatcaaagtgtggagaaacagcccggatcttgggttcaggaataaggactgtaccattgtcattctcaatctcatctagatccagctggaattctcggcggaccatctgggctgcctcaggatgcccactcatgcttcgggcttggttgagtttggaagacatgtcctcagctggtcccttgcgtaacatgttggcattggagcttatgttctgtgcgcgctgaggtttctcttccacctgttttattggtgcagcagagggtctctttgctgaccgcttaatcctctcctcgagcatgctcatatccttttcagaaagatttccaatcagtttgaacacctgatcctcatgtacattgtgcatcgttgcttggtgttgagtgccagcattgcgtacagcattgtcacggtctcctatgtgaacagctatttcctttaaggcttttccctggggttggttggcaaacattcatgccataggactcaaccagacatcccagctcttccaggcactctgctctctgcttagagtttttggatttggttccttccatgataaagggaaacatcttgctagctgggtagacaaggcacatccggttcaggatggcacgaacatctttacgaatgacatccttgggtctcccaacctgacgacaaagataggggaatgagggaagatgcttcattctcagtaagatgatatctttttcacttagcaaggtgaagagcaatttaaatattctagtgctttcatcaggacgcttgtattggtgtcaaaaaacctcagggtaagccactntaagataagatccaggcaaccaataactccttctttttcactctccaagtgatcaaccataccagcaagggctttgttatgatgctgaaagtctgagtgaaacatctcatcttgtaaccatttagccacacagctagccatttgagtctttagttgctcaatgtattcatcccgtggggtagtaaaattccactttagcaccttcaatcctttttcatctttcatcctttgctcttttccatttggaacaacaataaaaataggcccggatttgtcttcatcctcctttaagctggttttgcttggcatcttcttcccttgtgcactctttgctttagaggataatcctggagctttggccttttttggatcaggtttgggttctgtactgctggaaatacaatcttcagcaggtgctgatgcaggctggaatttggctggagcggaccctcccattggtttagaagttgctttagtgggtggagcaggcttggctggcatgttaactttggctttctctagcatggccaatacctgatctttagaagttggctttagtttcccagtagccttggccattttttcatatcctaaatgcatcatgaagaatggcaaggcatcttgggccttctttcgcacatctccatttcgatcttctaggcaggagtagagatgaggaacacaaaggataaggtctgtaggggtggaacgaagcctcgtgccgaattcgccacccaggcc

SEQ ID NO: 435478 - DNA, 2600 bp, Homo Sapiens
  misc_feature (240)..(240): n is a, c, g, or t
  misc_feature (2314)..(2314): n is a, c, g, or t
  misc_feature (2344)..(2344): n is a, c, g, or t
attgtcccaaattaattccaccccccccagaaagtaagggttccctttcacaaaagatcccccaaggttagggcagtttttccccaatcccaggaccgttgttaaaaagggacggcccagtggcctaggtttattaattccgactcccctatagggggccacttttgtacaagaaaagctgggtacgcggtaaggcttgggcccctggagggatactctagagcggcccgcccttttttncatcaatgctgaatgtttcggcgggacttaataatgtaatttatttgaaatacttccagaaaagtttaaggccattatacaaaaacattcatttcatcaaaacattcattgaccaccttcccataggccaacacttgacaaacctcttttcccaacacactggctgatggcttctaaaagtggctgatggcgcctacaaagaatcattcattcttttcttcaccaataaaggctgttcttggctttcctctgcttctgtctgcagcaggttcacttgctgtatcaataacgacttgagaaagcagttttaaataaacttgtaatagaaaaaattcatcatgtttaagacctataaatacagaaatatgttttacagggtaaaattgatcacaatatccttgttttcaaaaaataataaagtatataccttgtttttatattgatatatcttgtcacacagcttgaatgcacatgatatatgtacataataaaatgccatcaatgcatttactgctttcttttctgtgaacttgagagacagattaaaaaaaactttttggcaataatttagaataattaccactagtgctggtgtgggtataattttgcacaggtcatccttaatatttacacttgcagggagctcttctaggtacttagctgtttttaaggtctgcactttaccctgcactgtaaatcaaggctggacaaagaggttactaatctggctagctgattctaattaatcagagttaatgaaattggcctctggagaacataattacaattctgattatagcacagaaccagagatggcaaattgacgacccaaaagcagagcagggaaagcccaaagctctggcctttctcagaaggcactggaccatgcttttctctcaatggctcccacagaaggttctgacgaagtgcttttcattccaaattcttcctctcctgtgttttctataaacagtgtcatcggatagagtcatggtctctcttccttgttgcttcattcattctctaaaataatgagtaggcctaggcagatgaaacacaatgaatacagggccttcttgttatcctggcaggccttcctaagccctttgggttctattctgatgttttaggctagcaaccaactatgagagacacctcctggtgccatgtgcatttcagttaaagattcagagctggcagccgcttctgtcctggcccttttaaggtcagcctctattttatgtcctaatacattcttgcatcaaacttgcactggatgaagttgcaaagttcagacaatgcatcctcctttgcaaaattaagccttcagaatccccagggatgttttcaagctttctagttgagtaagatcaaaccaagttcacttcatgagttggtctttcctgattctctctctaataccatcccaatacacagatgagttcctcatgccctatttacaaggccgtctaaattccgtgcctttagctaccacatctaagagctgggaaagtggtacagaagcacaagaggaaggactcttcaaacaatctatgtaaaacagtaggttttgagaattctttttctatttttttaaaatccagcaggacaactgaaagtaacttgtttgagtacctctccatccatccagacacttgggaaatacaacacagggtaatagttgccacagattccagcttacacagacagattggcagttacagtactagggacaaaggtacagatacgagagactgggccaacatgtatactttcacaaaagtatgaaaaagtgcttctccaaaccgttccatctgtggaatgcaaatactgtacaggtaagatgcaggcctgcttcccgaagtgcacatgcttctgtcagacgttactttcaccgtgcctgctgtttccacaggaagagtctgtctgttccatgcgctcacagtcgaggctgacctcactcgtgtccatactacagtctgactcactgtccgattggtccatctgctcaagttttgtttctccctgtagctctctgctcccggtggtgggatttaggaacgatccctcggantcaagcaccccagcttgcccggcagcacanaaaactgtttctttggcttgacgaatacagttaagccactgctgtttgttgaaagtgtcattggcttgtagcgagtgggtctgactttgggggccatttttgaaactgactctgaagaagtttttaattctctcattgttgctgaatgcccctcgcagggagccacccagccctcacttctccatcctggaggtcttccagcaggaggtctttcacggggattggctgacggtacaggtggtagcaaagctgctca

SEQ ID NO: 435479 - DNA, 1904 bp, Homo Sapiens
  misc_feature (704)..(715): n is a, c, g, or t
  misc_feature (1631)..(1631): n is a, c, g, or t
ttttttttgctaaatagtattgtttattaaggcttgtattctcctagaggaaaaacccaatgtcgtccaggactccattcaggcagtaacagttcagaggaagtgacacgctctaaatacaagtctaatgatacagctgaaacgttaactcagagggtcttttggagcaagtagttttcagaaagcgtctgctctctaggacggtaaggatcctctacaagggcacgtgcagatccaggcgctggagcgtcaggcatgggcaccattttcatgcttcaactcaaactccaggtggtagtgagctcaacggtccctcattccacaaaacatgacagcaaattcatcttctaaaaaaagttttgttttgtttttacccattcaacaggaaaaaaaattagacacacacgatgaaatttacaaccagcagcatcatccatcacactgtctgtactaccagatcctacacttaaagctcagcattattggtataaaaacttaagacggcattagaattcttaagaaaaggtgtaaaatttaaaaagatgtgcaaacaacaaagaatgcccgaccctgaaccagacctaaagcaccttccagttcctccacacatcatgccccaacaccatccagcccaatcggacaccaggacagtgagggacgggtggctgttcagtgggcaacagatctggaaggaaagattttcnnnnnnnnnnnnaaagtgtctgccaaatttgaaaaattaagagttatctgtctagcagaaaaatcaaatgggtaaattagcactttagaccgataacagataataaaatgacaaatcagaatgaacaaaaaatcattaaccttttgatttcagtattttcaagagattttatcagaatactctaaatgacaaaatgactcatggtttcttatgtttgctaaaaagcaataaagggatgagaaatatgaagtctcacagaatatcaaatgactgaatttaagaacacaatttctgccaaaatagatgctttgtttttaaggatacttacatttcacattagatcagtctgattgataagctgacaaaaaaaatactcctttattagtgacttctacaggattataatacatagaaaaagtacaaataaatgcagatccatctgggcaaaaatcaacgacaagaaaggcaaagatgcaacactcaacccccgcacgggacgacacactggagctgaccaagcacacgtgttttaaactgttttcaaagtcaaacgttagaacatgtaagaaactggttcgccctcattgtttgtttcgactctgccgttccttgcgcaccacctcctcctcctcctggcgcttctcgtagtgagcaaagtcgtcgaagatggaggttgtgtgcttgtaggaactgataattttcagcacttgcttggctttttctaagggcacctcctgggtgtcccgggagtttgtgaccggtttgttgtcgttattctccagcctgatgtgccggagctggttattgggtacatccttaacaaaaatccactggacatcaaacttccccttccacttgtcctgagaccagaccccggcactggtgccgtagtccacgggggacttcatctcggccaccccacaaaaantgcccactcccattgacgctgaagagcaggtagacgggccccgtatgtgctcatgcagcggaaggcgctgtccaggcgcttgttgccgtgctctgtgctacaccagatggagtacttaatggagcggtggatgtcgtcctcagagtagctcttgatgatgaacacacgcccgcttttcagattccactcaaactctttcgggttgtagctgtgagcagccttcagtttttcaaggacggggtgggattcgacgctgggggcagaattaggctg

SEQ ID NO: 435480 - DNA, 939 bp, Homo Sapiens
agaggtggcacgtatctcagagtatagtagatgcagtaggttgaataaccaatgtcgatatatagagggcgcagagaaagttaatcaggttgggggacgggttataaggagaatctgtgaaatcgatttggcaatatggggataggaagatttggagttcaaccaaagagggttagaccggtatggttgtaaacgggcatcacttttaccccccatgtttcccttgccctgaggttttggcctatttgaagcaggagaaaggaatttaccagaaaggaggttggacagaggtgccattgcaccatgtttaatctctggaggccaagggatttctgaggaagctacaatcatacccatttactgtaggtttcagagaaagaaaaacaaccctcaccttttctctagcaagatgctgtcctcaaatatacctatacaagtcacatggaataccccaagccctgaattgccggcaaagccaaagcagatgtgtgggcccatgtccttgtggcctactctcatagtcttcctaagggatttctccagagactgtcacgaagcagagctgatgctttctgttaaaaccacctgtaactgacttggaaggaatcctgggaaagggatgagagatgtgttaaaagtagagagacccaggctgggtgtggtggctcacacaggaagagatttatggaatggagacagtgaaacagatgggaattccagaggtccctgctcctttcccagaggaacagtaaagttcagcagacctgggtgcgtccccatcctagatcagttagaagaacagagattatctatttcagggctttactacagtcggcactcaataaataaaataactgatttttttaacaaataccgatttaagaagtgatggagttgattgaaggtcactggtaactgacccatccggggaattccgga

SEQ ID NO: 435481 - DNA, 793 bp, Homo Sapiens
ggtgatttattgggggtgtacactgggggcaatatggtttagcactgaattcaatttgtccttagagtctatgagtgagtccgatcttttcttgttgaaaggttttgggcatcgtacaagccagtctgcctagaaggtgtggaggactcaccacgggcagggtcgccctggcccacagcacgtgagcctgcactcactgcggcctttgtaacaaaaccagttgtggtcctcagcatttgaagcagctgcatacttcagagtaaactatttttcattatttagttttgtcacaagaaatcgaccattgtactactctcacttacagcagtttaaacagcatagaacttaaaaacctgtctgcatttccattttttctttctgtatggttgtgggttttaggacatagggggttaggagaaggggtttcttgatcatgtcatgaattctcctttgtcctgtttctcctgtttcatttctcctccgcctgctgtatattacctgagctggtgttgtatcttcaagtccatatgcgtatttgcagacctttcctgttcccactcttgttggctcttctgatttatgcacagatggttcccagcatgtgtccagtgcttcatggatgggaccatcccagcaactaatcagacttcctgccagtgtcctaacccccagggcaccctgttcaaccatatttaaaaattggaatttgtataaagttgcttccaagttttataatgcatcattttacatcttttgtaattaaaagcatcacaatgaggttgtctctgcaaaa

SEQ ID NO: 435482 - DNA, 1029 bp, Homo Sapiens
aagagaaaggtactgcatctttatcatacaggtacagcagttttaaagggacaaaattcaagtcaagacagttaccaactctaatcaatacgattaccaaagcacgacagaggattaacaagaagcacaatcgtcagagaaccacagcaggagtcggccatggctatgctatgtgcgtaccaccagtctagagccaagcttcggtggagagcctgcactggattggctgaagatgccgctgtccctgcaccaaagcgcttggacagcagaggagaagtcttagtcacttaccctcagaggctacccatgaggtctggaccaggtgttggttacgctcacactctaacacctgaaggtacataacgattatcttatgaggatgcttcacatggacgcagaaacccaactctttgagaactcgtctttccgcctttataatttggttctttaaattaacataatcttgatccagtagtagaggcacgggcttctttttgtctctcagctgtcgaaggcggtgaaacacattgatgacgtcccgtatgcgtcttggggcctcttctatcttggaagccaggtggacacaggccattgacacatgctccatggagtgcttcacgaaggacttggtataaaagaaccgctggaacaacacctgcccggtagccatggccacctgcggcaggcggagcaggataccggccgcctggatgagctcgcagcccaccacgcggaggtcggtctctgtgtcggtgtcgaggccgctcgacatggacggcgtgaaacggagcttgtcgtcaggcaggaggcagttctccaaggtgatgagcaccccggagtacagcctgtccccgatcagcaccccctgcgaccctgagggtgcgcccccagatcccggggcgccggccgctgccgcgggagctgccgaccctgcagcaccagccgccgccgccgccgccgccattttgtgccgccgaccctcgtgccgaattcacaacccagcctcgtacctagcctaactgtctccgt

SEQ ID NO: 435483 - DNA, 1351 bp, Homo Sapiens
  misc_feature (65)..(128): n is a, c, g, or t
  misc_feature (225)..(283): n is a, c, g, or t
  misc_feature (369)..(441): n is a, c, g, or t
ttctgtcttttgttcgcttctttgtcgtttcttcgtcgtgtgtgtgcggccttttgtatgcttcnnnnnnnnnnnnnnnnnnnnnnnnnnnnnnnnnnnnnnnnnnnnnnnnnnnnnnnnnnnnnnnntgtgtcctctcgttgtttgttgcgtcttcccttgtctttgtgcttgttcttctctcctttttgtgtcgttcgtgcgtgcttgttttcctcctcctcnnnnnnnnnnnnnnnnnnnnnnnnnnnnnnnnnnnnnnnnnnnnnnnnnnnnnnnnnnncgctccctgttgttgttgttactgtgttgtcttttcttttggtgtgctcctctcttgggttttatgtttgtgggggcgcccccccnnnnnnnnnnnnnnnnnnnnnnnnnnnnnnnnnnnnnnnnnnnnnnnnnnnnnnnnnnnnnnnnnnnnnnnnngctgtaatacacaaaagttttatttttgactttcttcttttctgaaggcaaaataaaatagaactgaacatcagtgaattttgtacaacaaaaacagcttttaatatggaatagtccatgaacattttaaaatctcggaatggcttccctttttcaaagtcatgctttcttgcggtccacaaggagttggcacagaggagatggtggcagcggcgggtgaggtgagtggaggacagggcttctctcagatccgtgttagctggtgccacagactggatgggaggatgctctccactttctccatgacaaagtttaagggggcaaacaaagtgctgaggaaagcttttgcgaagacccccataagttccgggaactgatgtgtcaggagggccagcatggctgtgaaggaacataatccagcagtaaagagaataaagaagggaagctccttctttgggtaaactgagacttcatggaaagatggaagcagctctcggtctgctgtttctgtacagattgggtaaggataaaataggtgccccttttccaagggataagggatcatccgaaaagtgccttcccacgtacaatgcaaaagattcaaagccccttccactctcttccagtgtgcaagatgaaagaatgcatatgctattgcttcactgtctcctctcttcaggatatgttctgggggtaggattaagcttttcatttctagtaggtattttggcacatgaggattgaattccacagctctatgaatggcctctactgcattcatctctgctgtgctcagctcccgccgagatgcagcctcaggagagaatttgtcagagacagctcttgctttgagcaaagcagctgtgtagcatattgttgctgactttggtaacgcttatatgcatcatac

SEQ ID NO: 435484 - DNA, 747 bp, Homo Sapiens
taattccttttaacaggtttatttgagcattcagcaattttatcaatcaggcagtggcagaccgccagcagttcagggcgccaccaccgaggaaaccagaggggacacttacaaggtgtctctgggagcaagacaaagaaactatttgattggttagagtggaaagttcatatttagaggttaactgaccataaatctcttgttagaggttagtcggtagtttctgactggttaagctgaagtttcctgctcctaggttacacacaacactttcactctgagttgagtttcagtttgctgacttaggaacccaaagtgcaggagccatttcagcctattggcctcccagcgaattttttataacaggtgagggagggtgcttagtgtgtatcagaatagcataccaaaggaagcagccagtcctgaggccacgaggggatggggggaatgttcctggaatgttcaaggaacagcagagaagaccattatggccagaatgcagattgtaggacatgagaccaaagagggtacaggatcccagagcatctaaggcagagactggcttttactctgagtgcagtaggaaaagcattggaggattttgaggaacgacaggatcaacctctgtttttaaaggatccttctggctgctgtgtcgaaaacgacaggagatgggggaaggctagaagctgggagaccagcagggaagttgtggctgttgtaggagtccagcccaagatgcaagcc

SEQ ID NO: 435485 - DNA, 1740 bp, Homo Sapiens
ggcttctaggaacttctcttccatcacctggctcataatccatgtcttccaacgtctccagtgtgctgatcttctgacattcaggtcttccagtgtctgcaatatccagggtttccgatggcacctgtgtcaaggtcttccaacaactccgggtcttccagcgacttcaagtcttccaataatctcaaggtcttccagataatcctgagcttccagaaaatccacatcttccagacaatccatgtcttccggacaatccatgtcttccaagaagctccaagtcttccagtaaatcaagtcttccagcaaatccagtcttccagcaattactggtcttccaccaaatccagatcttccaggaaaatccacgtcttccaggaaatccatgtcttccaataatttcaaggtcttccatcaaatacagatcttccagctaatccatgtcttccagaaaaatctgtgtcttccaccaaatccaagtcttccagtaaatctagttcttccagaaaaatctagatcttccagtcaatcagtgtcttccagaaagaaatccaggtcttccagtcaatcagtgtcttccagaaagaaatccaggtcttccagtcagtcagtgtcttccagaaaaatctacgtcttccaccaaatccaggtcttccagtcaatccacatcttccggaaaaaatccaggtcttccagccaatatatgtcttcctgaagatccacgtcttccagaaaatccatgtcttccagaaaatccatgtcttccagtaacctcccagtcttccagaaaatccacgtcttcccaacaatccaagtcttccggataatttgggtcttcctgaaaatctacgtcttccaaaaaagccatgtcttccagaaaatccacatcttccaatggcctccaggtcttccagactatccatgtcttccagaaaatccttgtcttcccttaaatctatagcttccaaaaaatccgggtcttccaggaaatccgtgtcttccagcaagtccacgtcttccaacaaagccatgtcttccagactatccatgtcttccagaaaatccttgtcttccctcaaatccatagcttccgaaaaatccaggtcttccaggaaatccgtgtcttccagcaaatccacgtcttccaacaaagccatgtcttccatcaaattaatgtcttccagcctacttgtgtcttccaacaaaggtacgtcttccaacaaaggtacgtcttccaacaaaggtatgtcttccaacaaaggtacgtcttccagaaaatccacgtcttccaaccaagccatgtcttccagaaaatccacgtcttccagaaaatatatgtcttccaactaagctacgtcttccaacaaatccatgtcttcctatatctccaggtcttccagcatctccagggcttccagcatctgctcgtcttccaacatctccacgtcttccagcatctctgtgtcttccagcatcttcatgtcttccaacaactacccagtcttccatcaactggctcaatatccatgtcttccaacgtctccagtgtgctgatcttctgacattcaggtcttccagtgtctgcaatatccagggtttccgatggcacctgtgtcaaggtcttccaacaactccgggtcttccagcgacttcaagtcttccaataatctcaaggtcttccagataatcctgagcttccagaaaatccacatcttccagacaatccatgtcttccggaca

SEQ ID NO: 435486 - DNA, 536 bp, Homo Sapiens
tacttttccacaggatgctggaagacgtggagatgttggaagacgagcagatgctggaagccctggagatgctggaagacctggagatataggaagacatggatttgttggaagacgtagcttagttggaagacatatattttctggaagacgtggattttctggaagacatggcttggttggaagacgtggattttctggaagacgtacctttgttggaagacatacctttgttggaagacgtacctttgttggaagacgtacctttgttggaagacacaagtaggctggaagacattaatttgatggaagacatggctttgttggaagacgtggatttgctggaagacacggatttcctggaagacctggatttttcggaagctatggatttgagggaagacaaggattttctggaagacatggatagtctggaagacatggctttgttggaagacgtggacttgctggaagacttgaagtcgctggaagacccggagttgttggaagaccttgaccctgtggcaaagtagggt

SEQ ID NO: 435487 - DNA, 486 bp, Homo Sapiens
ctatatctccaggtcttccagcatctccagggcttccagcaaatccacatcttccagacaatccatgtcttccggacaatccatgtcttccaagaagctccaagtctctccagtaaatcacgtcttccagtatatccagtcttccatctattactggtcttccaccaatatcccgatcttccgaggacaaatctcacgtcttccacggaaatccactgtcttccaataatttcgaggtcttccatcaaatacagatcttccagctaatccatgtcttccagaacagtctgtgtgttccaccaaatccaagtcgttccagctaaagtctagttcttccagaaaaatctagatgttccagtcaatcagtgtcttccagcagagaaatccaggtcttccagcatctctgtgtcttccagcatcttcatgtcttccaacaactacccagtcttccatcacactggctcaatatccatgtcgtccaaccca

SEQ ID NO: 435488 - DNA, 265 bp, Homo Sapiens
  misc_feature (17)..(17): n is a, c, g, or t
aaaaatattaaaaaacnctaagtgcaaatgaactttttttcccaaatgactaatatctagaaaggcagtagctaacactcaaaacaatttgtttaagtgtaaattaaaagcagttgatttgcaggagagcaaacagtggggtagtggccatggcactctgatcatggttatatccaagaaagcataaaataaccaatgtcctgatatgcaatctggatgtgcagcatttacagcaaacaacataaaaagaaagaaagaagaatgg

SEQ ID NO: 435489 - DNA, 810 bp, Homo Sapiens
  misc_feature (156)..(196): n is a, c, g, or t
  misc_feature (216)..(216): n is a, c, g, or t
tttaagggtaaattaaaagccagttgatttggcaggagagcaaaacagtggggtagtggccatggcactctgatcatggttatatccaagaaagcataaaataaccaatgtcctgatatgcaatctggatgtgcagcatttacagcaaacaccatnnnnnnnnnnnnnnnnnnnnnnnnnnnnnnnnnnnnnnnnnccaccacaaagtcccaaacntcagaaattaacattcacttaagaacacagtggtgaagacttttggtagcaaaatctgcacggttcttaaaatgggagtcttcaaaagtacttctccaaattcaaaagctaagaaaaccaaagagggaacagttacacaggcttagtggagatgccgcctgtcatgaagatgaccatcagtcctacttcccagacacagtgagaaccggtgagcctgacgaacctgaaggaaaaaggccggctgaacgggtgctgatgccactgactatacaagaacacaccgggtcaactcatcattgacagcgagagacacactactgctcctcctggctgatgccaaggctgcctttctgcacctcaagctcctcggcactgaccattgatgggtcaatggccgcgtatttggttccatggaattgcagcaaatgtatctgtacataaagattgacctctgcacttctgcacaggtatgggaaattgcctcctgttttcagatgagctcttcgggcattaggatacagcttgtacatttcttctttagcttcagttgaaagcgcactctgatcaaacacatccataatagttacaggtacc

SEQ ID NO: 435490 - DNA, 759 bp, Homo Sapiens
  misc_feature (24)..(24): n is a, c, g, or t
  misc_feature (260)..(302): n is a, c, g, or t
gataactttaaagcagtacgtctnacccggggtgaaaaggaatttttattcccaaatgactaatatctagaaagggcagtagctaacactcaaaacaattttgtttaagtgtaaattaaaagcagttgatttgcaggagacgaaacagtggggtagtggccatggcactctgatcatggttatatccaagaaagcataaaataaccaatgtcttgatatgcaatctcggaaggtgcggcatttacagcgcaaacaacatnnnnnnnnnnnnnnnnnnnnnnnnnnnnnnnnnnnnnnnnnnncaccacaaagtcccaaacctcagaaattaacattcacttaagaacacagtggtgaagacttttggtagcaaaatctgcccggttcttaaaatgggagtcttcaacagtacttgttgtaattcaaaagctaagcaaaccaaagagggaacagttacacaggcttagtggaggatgccgcctgtcatgaagatgaccatcagtcctacttcccagacacagtgagacccgagtgagcctgacgaacctgaaggaaaaggccggctagacgggtgctgatgccactgactatacaagaacacaccgggtcaactcatcattgacagcgagagacacactactgctcctcctggctgatgccaaggctgcctttctgcacctcaagctcctcggcactgaccattgatgggtcaatggccgcgtatttggttccatggaattgcagcaaatgtatctgtcc

SEQ ID NO: 435491 - DNA, 2029 bp, Homo Sapiens
  misc_feature (1901)..(1937): n is a, c, g, or t
gtacttacttacagcaatttatttgggtagcaaagttgaaaacctccagcccatccctcagtcttggtcaggaaaatattctagacaacaggctcaaacagtctgatttaattaggaagttaaataagttgaggtggggtggagtgggatcatcagaaggctgacatgggaccgctggagttggcaatcatagcagtgtgaggttggcaaggggagcaacccccttcaagacaaggcacaaactatttggcaaggagagatgaggggtgggacctcactgtcaatggacatgctcagggaggccagtgggttacatgcaacaggaggatcattcaggcaacttcagctatgaggctgggcatctgtgagggctgaaggctcaggctgttctcaaaggcttgtgattcacctgggagatgctcacgcctgtgagtctttccacactctctggcaggcgagttagaatgtccagtacttccccagtcactttggctgcccccatggtcccactgccgctggacaccagtgtgatcttattggctgaagtcaagggaccactgatctcctctgccacctggggcagcttctctagcagcatgtccagctgagcagcctcttggtacagctggaaggcttctgccttcttggccatctgctcagcctcggctcgggctcgggcccctatggcaaaggcctcagcttccccacgcatccgcacagacgcggcttctgcctccgcctgcataattagttgggacttctctgcctcggctaggcgctccagcttgtagcgctccgcttccgctggcttccgcacccgggcctccagctccttctcccgccgggcgatctcctgctcctgcactgccacctgctgggcccgctccaccacctgcacctgcacccgctgctcctcaatctgctgcttagtcttggccacctgaagctgataggccaggtcagcctgtgctcggcgggtgttgacctcgatgtcataggcggccttcttcagttcgtaatctctctgtgccttggccatctcgatctcactcaggtactgagcagacaccttttcctgcttggctttagcttcccggatcccagcatctctcttggcctctgcttctccaatccgtgcatctttttggacttgagctgttcgagccttccccaaagagtgcaaatagtcctggtcatcgtgaatgtccttcagagtgtagctaaccacactgatgcccatgttgaccaggtctgaggaggccactttgaaaacctgttctgagaatttctgcctgtccttatagatctcctccacagtcatgtgggccatgatggccctctggtggccctctaacgtctccagggcaatgtgggcaatctcagcctccgtcttccccaggaacatctgacaggcggccgccaacatctccttgttctgcccctggatttttacctgggcaatgccagtgactgagatggggaccccatggcgagtgtaaaccttttcactcttgacattgagggtcagtgtgttgagagagatcctctggatctgttggatgcagggcaggacaaagacacgccctccagccaccatgactggggggcttcggcagaacccggagaccaccatggcctcatttgggccacaagtgaaaaacatggttcaggctggagcttccgggacgcgggcggcagcccggctggggtctcgggaagggcggggtcgcgcagggacctgggagccgggcaggggccgctcgcagaccagctttcctgggagctggccccgctcccgcgttccccaccctgccgcaccccgttgctgcggcagacgcgaccccgccccccgcaacgactccgctctcgacgaattcgagctcggccgatttggcctgatnnnnnnnnnnnnnnnnnnnnnnnnnnnnnnnnnnnnncggccgccaccgcggttacgctccagttcgcccttagtggttcgtattactcttccccccttccggttccttgcctccctgcctcgtcgggt

SEQ ID NO: 435492 - DNA, 1249 bp, Homo Sapiens
  misc_feature (258)..(258): n is a, c, g, or t
ctgggcgatgtcgtatcagagtatggaaaatgtgttgtcactgcaggggagtcgctctcatcttgtggcacgacgcaggtgagaggagtctttctgccgtttgtggaggccgcttttaggccagccgctttggtattttggagtcccagagtcgtcctaagggaaaaagagacctcttaaggtttcccccgggagtattgtcaactaagtgcagcgggttttatggcctagcggctgtgcgaataaaatagtgtgggnaattgtgcctggcttagggtgaagggcggctccaatttgtgtaagcgctctcgcctttccgataggcattcccggccccccggggccttcccaggccctttttatccgcgcggggggattttcccggttacctggcaatgcccccctggtgggggcccggttccccccacctggcacctgccccccgttgtccctcaattctgctgcttagtctttgcccacctgaaagtgaataggccaaggtcaaccctgtgctcggcggggtgttgacctggatgtcataggcgcccttcttcagtttgtaatctctctgtgccttggccatctcgatctcactcaggtactgagcagacaccttttcctgcttggctttagcttcccggatcccagcatctctcttggcctctgcttctccaatccgtgcatctttttggacttgagctgttcgagccttccccaaagagtgcaaatagtcctggtcatcgtgaatgtccttcagagtgtagctaaccacactgatgcccatgttgaccaggtctgaggaggccactttgaaaacctgttctgagaatttctgcctgtccttatagatctcctgggcaatgccagtgactgagatggggaccccatggcgagtgtaaaccttttcactcttgacattgagggtcagtgtgttgagagagatcctctggatctgttggatgcagggcaggacaaagacacgccctccagccaccatgactggggggcttcggcagaacccggagaccaccatggcctcatttgggccacaagtgaaaaacatggttcaggctggagcttccgggacgcgggcggcagcccggctggggtctcgggaagggcggggtcgcgcagggacctgggagccgggcaggggccgctcgcagaccagctttcctgggagctggccccgctcccgcgttccccaccctgccgcaccccgttgatcccgggaattccggaccggtcc

SEQ ID NO: 435493 - DNA, 867 bp, Homo Sapiens
  misc_feature (455)..(455): n is a, c, g, or t
agcggcgttgcggggggcggggtcgcgtctgccgcagcaacggggtgcggcagggtggggaacgcgggagcggggccagctcccaggaaagctggtctgcgagcggcccctgcccggctcccaggtccatgcgcgaccacgcccttcccgagaccccagccgggctgccgcccgcgtcccggaagctccagcctgaaccatgtttttcacttgtggcccaaatgaggccatggtggtctccgggttctgccgaagccccccagtcatggtggctggagggcgtgtctttgtcctgccctgcatccaacagatccagaggatctctctcaacacactgaccctcaatgtcaagagtgaaaaggtttacactcgccatggggtccccatctcagtcactggcattgcccaggtgaagctttcagagccttttccccacagtccacttccccatcacncctctctcccagacattaagacatcttctggccacagtcttctcaacccttgcctgcagagaagttcctctgctagtctcatcttttccaggcaccccaaggcacttgcctcctcctcctttctttccctgaaatggaagaagcatttcttagagggctctcccttctctctctgctttttctctgacttcatgagacccccaccacacctttcctacccctactctggctacaggtacgaatccaggggcagaccaagggagatgttggcggccgccttgtcagatgttcctggggaaagacggaagcctgagattgcccacattgccctggagacgttagagggccaccaagaggggcttcatgggcccacatgactgtggaaggttggcctaggggcagggaaccatcg

SEQ ID NO: 435494 - DNA, 281 bp, Homo Sapiens
ctgggcctttctcctgggagtaagggctgctgggctccaccctccacttcccttctgtccacaggtcccaactaattgtgcaggcggaggcagaagccgcgtctgtgcggatgcgtggggaagctgaggcctttgccataggggcccgagcccgagccgaggctgagcagatggccaagaaggcagaagccttccagctgtaccaagaggctgctcagctggacatgctgctagagaagctgccccaggtggcagaggagatcagtggtcccttgacttca

SEQ ID NO: 435495 - DNA, 1518 bp, Homo Sapiens
  misc_feature (571)..(642): n is a, c, g, or t
  misc_feature (1299)..(1345): n is a, c, g, or t
tgtggctggttgatgttcacgtgccggcaggtagtctcggaccgcactagaatgttctgttgaccatagttctcgctgtgtgcgccgtggcccggttgatatttgttttgtgccgccggcatggtagggtcggatgtgtcagagatcgcttcggttgtgttgtctaatacttttaggagtgcaattgtgtgaaggcgcgacgtgagagggttgcgggggcctagggaggaggagtaggttttggtataccgtgaggggcgttgttttcggggtgcagatttttggtaggctggtgtacctccatggggggcatccccgtcggtcgtatggcgaaatgaacgtggagagggtggggctctccgcttggtagtttgggccccgagggcaaaggggcagggtggcaacaggagggttcacaaaggatcgcccaggtgggtggagcgcaggggacgtccggagacgtcagagaggtcttcggtttttgtgggttgtcggtaagtttaacgtagtgagcgaggcgacccagggagggtcaggttggtgtgatcatgcgagaagatatacaatggannnnnnnnnnnnnnnnnnnnnnnnnnnnnnnnnnnnnnnnnnnnnnnnnnnnnnnnnnnnnnnnnnnnnnnngttgatctccaatacaccccatggggggatggggaggaaagagaagatttgtataccccacccctctccctatattacccacattttactgtggtctctctcacaattacatctaatttccttcctatcagatgagttttaagactgcccaactataaaactatcatgggaaagaaactgcaaatgaagtcaaggagcagtgaaaccacccaatggcacagatgccattacctcaaatagaggtgggagaggaaagaaaatgggagatgattctcaaagggagagcaaggaccaaacatctgggaaatgatgggaggcagtgactcaaggtcagaataactccatcagaggtgcttctaagaacatggggtggggggaggacaactgctccatttgattctcctacttcaactaagagaatctcgtgtgcattagcaaagtggatgtcttttaagatcagaatgctgcaatggacagtcaaaatgccacttaaggagaaacaaaaattactcaagatgagttacttgccgtcagaccacaacaggatagttttagatgagactggtctcttgactaagaattaaaccatctacaggtttacaggaaaggtatcagtaagtggtgttaaaataccaaattcagagcagcagatacgcnnnnnnnnnnnnnnnnnnnnnnnnnnnnnnnnnnnnnnnnnnnnnnncctattcactggcacaatcatagcacactatagcctcaaattcctgggctcaagtgatcctcctgcttcagtctcctgaatagctgagactacagcacacaccattacgacgccgttgagggttctgaaccgagtagtgccccagaaaacgttccggggacccggtaaccagg

SEQ ID NO: 435496 - DNA, 982 bp, Homo Sapiens
tcaaccccggtggtggggacacacgccctgtggttcgcagctattactccaagaagaactgaggcgagggggattgctggagtatgggaggtcaaggggtgcagtgagctgagatcacggtaattgcattccagccctgaggggacagagcaagaccttgtctaaagtgtggcaatggcaagagcgtaaggacaaacagaaacagacccacaccaggtaggtcagttgatttctgacaaaggcgccaaattaggagaaaaaagcctatgcagcaaataatctgaaagttaagggagaaatggatcctgactgcaacccacactggaaacgtacactcctgagtagggactggatacacacgcggcacacacccacacaacaggccgccacgcggcaatcaggagtctgccgctgatccacgcaaaagcctgggtgaatctcagatgctgagcgaatgtaagcagatacacgcagacatacacagacgcacgcaaagacacagactgcccagagccatgcacgtggaacccatggcaggcgggaggtagggagctgcggtggtaggagtcagaatgggtacccctgtgggactggctctgcggagtggagggcatcacctacatccttcgtgagtgcgcaccatgaccagccacacccatggaactaacactcggtatctgggctttttgtgtaactgcctcccctcaacaccatggtctcccacatacaaaagaggccattatacagtaagacacgctactccgcaattagacaccacaaaacgccagccaggctgtccataattaaaaataccgagcaccaagtctcagcaatccactagtgttctccttccacccagctgggagaaagaaacacagtccaaccactttggaatcatctctatacttggacaacacgcttcgtaagatccattaggtgcctcgtgccgaattcgccacccaggcctcgcttccttggaccg

SEQ ID NO: 435497 - DNA, 851 bp, Homo Sapiens
  misc_feature (16)..(16): n is a, c, g, or t
  misc_feature (21)..(21): n is a, c, g, or t
  misc_feature (61)..(61): n is a, c, g, or t
  misc_feature (70)..(70): n is a, c, g, or t
  misc_feature (76)..(76): n is a, c, g, or t
  misc_feature (90)..(90): n is a, c, g, or t
  misc_feature (100)..(100): n is a, c, g, or t
  misc_feature (116)..(116): n is a, c, g, or t
  misc_feature (140)..(140): n is a, c, g, or t
  misc_feature (145)..(145): n is a, c, g, or t
  misc_feature (181)..(181): n is a, c, g, or t
  misc_feature (199)..(199): n is a, c, g, or t
  misc_feature (297)..(297): n is a, c, g, or t
  misc_feature (634)..(634): n is a, c, g, or t
  misc_feature (774)..(774): n is a, c, g, or t
cccaacctccctgcancctantccccatgtcaattcttttgttttgcaactgcaacgtgtntgctgttgncaacanggcttggaaaaatncctccccccngtgtctgcccccaacngcgcaccgccctgcctcctcctancccantggacgccagcagaaaaagaggaaatgggacgttantccccttttcctgcctancaaataaggatatcaccgtattgaaaataatcctaagggaagcagggagctcttgaggatgaaaggggatttgacacacccacaacaacactggggtncccatcttcgcagcacagccaaagggtggttccagttggcacaactagaaggcagtgtgaattggagggtgtggtgctgcccagcgttctcagctgtcgcatgacaactatcaccactgcattcttccatctgcttgactccaatctttcagagggctggaagtggggcagagggtggggaagggagggttaaataaatatctgcacttatttcaaaagggggaacagttgatcataaagagtttacaagtgtacacaactcaaggtgtaaggcacaaatttacatgtggaaaacaggctattccacagatgtaaccccacgaagaacccgtgtgancaaatcattaatttatgcaaggtagcagccagcatattagttcacaccatttgtggattttgtttgctgtctcacatgcaaggtgaaatgggatggcatattgcaagctggtgccttcacagaaagtcagaaccatgganaaaaccatgttggcatcaatgagatatgatgtgccattctaaaagctttctctcctgattgctttagaaattaggat

SEQ ID NO: 435498 - DNA, 984 bp, Homo Sapiens
caggttattgtaggcaggtctccaggcttaaagggaattggaggtactggtcaaccggtttttctccaatggacctgttcagcttggttccaacctaggaaggcaccattggagaacttctccagggttgctgttgttccagccagaggttctccaggtattctgccaaaggactgaaggcattgtcccggatgcttttcagggggttgtggacagcttcagctcctccaccacccgtagcttgctcagggcagctgagggtagctggacagctggtcctgtccacgtggaatttgggcgaggttctccacgtcgtccagggccacgggctgcagggagctcaacgcgttttccgacaggtagagccagcgcaggtccttggctacctggaaggcgcctgcgcgcagctcacggatcttgcttgttgttgagctgcaagatgaagaggttgaccagcggggagagcaacccccggggcagctcagtgaccttgttgtggtccaggtagaggtaggtcagctcggtcaggtcgtcgaaggcacctgcgcgcagcacgcggatgtcgttatgggacaggtacaagtagataagttgcttgaggccgcggaaggcaccggcggccacctcgcggatctggcagtgctgcaggtgcaatgacacgaggttcggcatggcccggaacgaattggcagccagcaccgggaagttgttgcgctgtaggttgagcagcttggtcttctctgacaccttggggatcttctgcagccccaccttgtcgcagatgacgtgctgcaggtcgctgtggcagtggcagttctgggggcaggcggccagcgccggcagcagaccagccaggaggccgaggctgagcaagagcattgggcggaccatggctgggacgcctgggaccggggctgggggcagcagcggcggcggggcgcgggatcctggaaattcaggaccggtgccatctaaggttggcgg

SEQ ID NO: 435499 - DNA, 779 bp, Homo Sapiens
tttttgtaaagaaattatccagctcttttattgagatcagtggtggctctgaaaagagccttttgggttttagaagtaggcgttcgcctatttcttcttgggcgccgccttcttaggcttgacaaccttgggcttagcggccttgggcttcacagccttagcagcacttttggcagctttcttgggcttcgcaaccttggccttctttgggctcttagccactttcttggttacagtggccgcggccggcttcttcgctttcttcggtgttttcttagcgctcttcttcggagttgcgccgccagccgccttcttgggcttcttggctgccccaactggcttcttaggtttggttccgcccgcctttttaaccttgggcttggcttccccggaggctgccttcttgttgagtttaaaggagccagaagcaccggtgcctttcgtttgcaccagagtgcccttgctcaccaggctcttgagaccaagtttgatacggctgttgtttttctccacatcatagccggcggcagccaacgcttttttcagagcagccagagaaactccgctacgctctttagaggcggccacagccttggtgatgagctctgacaccgggggaccggacgccttacgaggcgtacccccagcctttttggccgccttcttctttacaggggccttctccgcaggaggcgcggcagcgggagcggcaggagcagtctcggacatgttgagaatcaaaaactcgggtacaagtggcaaagcgccgatgaagcccc

SEQ ID NO: 435500 - DNA, 535 bp, Homo Sapiens
  misc_feature (47)..(142): n is a, c, g, or t
caatgacacgtgccaccaccacgcccggctcattttttaattttttnnnnnnnnnnnnnnnnnnnnnnnnnnnnnnnnnnnnnnnnnnnnnnnnnnnnnnnnnnnnnnnnnnnnnnnnnnnnnnnnnnnnnnnnnnnnnnnntgagacaccatgcctggcctgtgtttttaaacccatgtcacaggacggtattcagcctgaacagtattcctgaacagaagacagggaggaaagccagccacacagcaatacacgcagcaggatgcagcttcggtcacattcaaaaagtgacctcatgctcatggctgcgcacatgcagattcagaaaaaacaaacccacgtgccaagttcctggccatgactgctcagggtatgcggggcgcgggacgtggggagggggacgagggccacccagggaacgagtgaaaccaagggcatgagatgctggccatcttcaacactgacagctgtcagcaatggctgcgtctgggtgaggggaactggatactgtcatttgtctagtttcctcgtgcc

SEQ ID NO: 435501 - DNA, 477 bp, Homo Sapiens
  misc_feature (211)..(211): n is a, c, g, or t
  misc_feature (423)..(423): n is a, c, g, or t
  misc_feature (444)..(444): n is a, c, g, or t
  misc_feature (451)..(451): n is a, c, g, or t
tccatggcttttcgtgtggacaaatcgggaggtggtgtaaactggtttttggtgaaattcggctcggcctcatgcgaacctatctaggtccgtctctggagtggcctgtcatcgatcgcgccctccatcgctgagcgacacaagtggaaccccccaggactgcattctgcgtaggtgacctgtgtggcgcgggccgggcggggcctttttntccttgggcaaacgtggtatactttctcagtggtggttggaaggaaattttgttgccctgtcattttcgcaagtatgggaaaaagacctaaaggaggaattttagcagcttgcagccgctggtttttattgcggtactttactagcgccaactctttaataatcgcttgttagttgttacccctgttttatgggtcaagagactcaatatanccagtactttggtaaggccangcagcangtaagttgtaaaacccagttaaaaaa

SEQ ID NO: 435502 - DNA, 766 bp, Homo Sapiens
  misc_feature (648)..(648): n is a, c, g, or t
ctttagaacttacaaaaaggatttttattaaagagaaatctgtttggtgggtcagatatgaaatagatttacagaaactttacatcaggtgtctccaagacataaaaggccgcccaggaaaagcaacgcccccttgccaggatgccagtgggaggacggcaggatggcagcccaggccacgtggcgtggaccctgcgtaggaggctgcaggaagctccaggctgcccgacagtcacggcgttccccggaaatgggttccctaggagggagcagcaggcggcgggggttccagggcatgtctgtgctgggctcggagctcgtgcacgcacactgtcctgcttaaactcctagtccatgtctcgtgggacccccaaagccgtcccctaaggaatgtgctctggtacacaaggggaaaacacaccaacccgccccttaccgagacagcgggcgcaccagcctgggccacgtgagcctctgctgagctctttggcacagcacacctgggcctttaacacctgtcacttacaaaagtagacattcctgtagtaaaacttcttaaaaacacctatttctgcaaaataatgtgtttctgtatgtggagctctgcaaatatacatgtcctttgggaagaaagcagcgtggaccganactgagggctggtccggggacgtctgagtgctgctggaggtcggtcaggcttcagtccctgcccgctgcccgcgctcacatgaggtcgttgagtccgcctccagcgccttggccatct

SEQ ID NO: 435503 - DNA, 2419 bp, Homo Sapiens
ttaatagctatggaagttttctttattgattacttaatgtgtaacaataattggcatctttttcacacattacaaaaaattatacttggctcagtatgcaaccttttaagcatagccatattatttaacaaaagaggggaaaacctattctacccaacacagcatttacaaatgcacaaaacatgccactttggcttgtatattgtctagattaaaaaaaatcttttaacataaataagttagtataatttttcagtgtttttacagagttatgtacacaggtacacttcaaatggtttttccatacacaggcaatgaaatactgtttaaagatgtagtatccatttcacttatcctacaagtgtgcttttctctacatgaaccttcctttaaaaataacactttcctgtggataaatggacagagtaagctttaaattaaaaaatatttcattttttaatgtgaagttacttacagatctttaaaaatatcgagggatttagaattattttgactgtgtttacacagcccgaagtgaaaagaaaatgagaaaattttgtcaacaaatttaataaaagcagatggtcaattcttaacattcaaaactcccaagcacctcggatttttgccccaaactacctggagtgatcaccattctgctgagtaattaactggtaaattccaactttaagagagactggggagggcagtgaggataggtttctgttgcttttttaaaaaagccacatgcagctatctaacaaactttagatagcttgggagatcaccagatctcccaaatgagaataaacttcttgtaaaaataaatagcaattatctttagccagtgttcaaatttttgtgatttttttaaatgaagtatcagctgtctctgaaagggacattacatctttaaagaaaacaattcaaacccttccccaaaattgcttctcttcatgcaagtcaaatatttatctacttgctgtaaatcaaagcaagctcttcataccccgctccacgtcagttcctcagccccaccctgccctcccttcgccaaagtttatgtgctacataaaaggtaaaaactatatacacaggtagtacaatgaagcaaataaggaaaaacctaattgcataatgctacatccaacgcttttagaggcagatcatttaagagtgcctaaaattttagtgttattgtgttgttgtttttcagtgcttatacaggatgtccattccatgaagtcaaccgatatgtatttttaaaattttcatgtatatcttccttgcttcatcaagcaagtgatgtatctgataaacaaggaaaacatattcttaattcgagctgtttacgtttgacgtcttctgaggccaggcttcttgggcgtctgctccacagaaccggcatttggggaaccgtctgaaacattttcttctgttctgttggctcttttgttttgagtagaagaatcgtcggttgcaggtcgcttccttattcctgcgcattgctccgctaaccccgtctggctgtccgacggatcagtctttgggtccaccaaatgcgtgtcctcagagttatccggagccccaattaaaggcgccgccgggcggctcccgctgacatcctggctctcctgcgccggcaccttgcaggcacctttggggggacgcgggggtctgtagtagaactcgggcaagctgcccttctccacctcttgccactcgtacttgccctctaggggtttgtgattctgaaaatcgaaattccacttgcgctggctcgcctcttccatgtctctgcagtgcttctccaagtcccgggttaactcttcgtggtccaccgggccgaagaggttcctgcaggccgagggcttggggtgctccgcctgcctggcgtccatccgctccaggctagggctcccgttagacactcgcacgtttgacatctttctcccgggtctgcacgaccgcctctctcgcactctcaaaaaaataaaaccgaaccaaacaaagcgcccctacgcggcccgaacccctctcggaagcccagcgactgccctcggagccaaaagacacagaccccgacgagccacggcccgagctctaggagcgcgcaggggctgcggggaagccccggcccggccgccgagtctccgctgatcaaatggactggcgagcgggagggcggagaggagaggggaccaggcaagcggagagggtggcaaagcccgtccgagtctgggcgggtgcaagcccgcgggtcccgcgaacccagccgctctccaaaccttgccggcgtcggagtcgcagagccgtgagcaagcggggacaggggagggggagaaaaacaccccgaaaagacgagccccctttttttagtggcccaatatggcggtggaagggaggctgacgaagaaga

SEQ ID NO: 435504 - DNA, 1056 bp, Homo Sapiens
cagagggaaaagtttattgagtcagccacagaggaacagagaaacagacacaaggaggttctgtgtgcatggaggaaatcagggcgccggacagttgaaccctgcgcaggacagaggggcgcggacagcagcgcatgccacaaacattcacctggcaaagaaacagagcagaacctaagggctcttgtgtacacacagacacaaacatgaggccactgttacccaactaatagaagagagtcatgagcgacacgacacttccttacgacctctctctcctaaaacgtaacattatgtgtttaacacacgcttaccaccactgctaactcagcaagcgcgattacagtgctccaacttaataagttgataaaaagctgtcccgtggccagttcacaatggaactaaatagtttcgttccgagatgcctggggagtttctctggcaacgaggcatttccaacaaacgggtcattctgtcaccaggggatggtctcagtccacggcacagagcgacgtgcccctggcagcactgtggagggcaagggatgccgctaggaggggtgctcagtcctcctggaggacccaaggaggggctggccaaggggccaccttgagctctggccggagggtgatggctggctttgcatgaggaggtgacaagaactttgggctgggcccccaacatgctgtgtgcacgggccttgttcaactcggaactgaactgacacctctcccaggtggtgaagggcagaacccccccaggagctctcggaagcaggggtccctcacgacaggcctgtggcaccaggcttggaggcagggagctggtgtctctcagaagcggcgcgtgctggtgggaggcggagggacaaacgaggctgactccgcagcagcagtccctcacacgctgtgtggtggctaaagctggaccaaagttaagaagcgaaacagcgtgggaaaaggtgtccatcttttctgaagccggttaatgtctagtgtggacagcaatatttggtgttttaacaaacctggtctctaataggggccgccatcgctg

SEQ ID NO: 435505 - DNA, 730 bp, Homo Sapiens
  misc_feature (33)..(33): n is a, c, g, or t
  misc_feature (159)..(159): n is a, c, g, or t
actgtctcctaccttcttttccctggaggcttncctctttttctttccgtttcttttctgagtcctcagccttccccatgactccttaggtcttaatagtaacagaatataacccagtaacacctatcacttccctgtccattaattctccataacttncctcattctcccttaagagacctaatctcacctctcattcgctgaatctgtctttacacctctgggaattctctagaatcgtctgcttcctagttctcctctttccttctccagccctgtctcgagtgttttctacccccctcagcttttctagtatctagttctcacagtgcagatattagaactctgataatatctactcctcccaaacctttccttagttgttggcccaattcccctcaacttttctctcagtcattccccacttccctccaccttccctggccgattctcctccacctttgtcaccgttctactcccttttctaagcctcctttattgtggaagtgattctcagatcccttatgttagtctctcagcttccccaacctttgcctcattcccctctcccttcaacaacgttatttttcctccaatttctattgacttggcgcctcccctagtaccccaatctgccttctactccatctaaatatctccaggccgccaacattttctcctatcagtagactcctttcccgtgcctctatgaacgcccagagataccatc

SEQ ID NO: 435506 - DNA, 411 bp, Homo Sapiens
  misc_feature (94)..(94): n is a, c, g, or t
  misc_feature (232)..(291): n is a, c, g, or t
catactaaacagtgaaaatggatgacccagtccttagcctatgttatggagttagcgaagcaagctccagtgccctgtggccttagtcatacanataaatactttactgtcacacagtggctgctcagtaaatatttatgctttttaaactaaacagtgaaaatgggtgaccagtccttagcctttgcttatgaagtgagcagaagcaaactccagtgcccagtggcttagnnnnnnnnnnnnnnnnnnnnnnnnnnnnnnnnnnnnnnnnnnnnnnnnnnnnnnnnnnnncaacaaggacactgtttggtcattaaggaaacatggaaaagtgagggatgccccctctccaagcaagcctgaccccctccgcatggcctccaacacacggctgcttccactctgggctgg

SEQ ID NO: 435507 - DNA, 1960 bp, Homo Sapiens
aaccttagtttaggtaaatttaatgactgtaaaagctgttcacatagcagctttaaagagacacgttttccactgacataaagttgcttcgccccttgcagcttatctccaccttcatgacctgtttcctcagtggcaggcaatgtctccccttcctgttggggaggattgcccaagtcagctctgaggccatcctctcaggtcagcaatatgcagaagagtccctcagagtggtcctgcagagaacatgtcccctaagtgtctgagaactggctgaggtgatcttcaccagcacatagtccccaggctgggctctgaccctgagcccagggttattgacatcctccatctctgcatcagggaagatcaccttaaggtttccatcattcctgccacacaggtcagtggcagagcgtttactgagcccttccactagcaccaactgggtacagcccacagaggtctgattggcttttgttgcttcttctcggaagatagtgatgagttcctccaaacgccttaattttacctcttccgggacatcatccttcagcctatgatatgcccgtgtcttctgtctcatgctgtaggcaaagaggaagcccatgttgtactgaacttcccggagcaaagagactgtctggacgtgatcttcctccgtctcaccacaaaagccagcaatgaaatcgctgctgaggctcacacctggaatagattctctaatatggtgaactaactccacataagcttctcttgaatatcccctccgcatggcctccaacacacggctgcttccactctgggctggcaggtggatctgtttacagatgttatctctctcatgaatcagctgcagaacctcatcaggaaaatccttggggtggggagaggtaaaacggatcctcatttcaggatctactctggagacctgatccagaagatgagcaaaacgaagtcctccttgcttggttttatagttggtggtaaaagccacgactgaagattggtaggcactgccactgttgaactggacctccgaaattgtcccgaaaactattaacattctgaccaagaagtgtcacttctttcagcccacaaaggcagacgtggcactggcgcttgtctggactggcatgacatcagcataggtctcgtccagagagagcagcacgttggcagcttgctggcgcgacttcagcaacaagccagcagccggggaaggtcccggtaggcatcaggaccagccaaaatatctaccattttctctctgttgagaatctcctccttgcaacctctcagccatgcagcctagaattccaatcctcagaggaacccgggagcggggccgccttgtcttcaaggctttaagctgatgtaaacggttccagatggtctgctcagccttctccctgatagagcacgtgacaaaggagaatcacatctgcctcttggaggttactggtccgcaggtagccactcttctgtaagatggaccaggctatctctgtgtcattcacattccatctggcaagcccataggtctcgaggtaagacttttctctgccttccaagaagttcatccatcatgagatagggaggtgggtcttccacttctgaagacagcttctcctgaggagctgaggcactttttaaaaaatgttgaaaagtcggtccagcagccagcctggagctgaaatccttccgagctccatcctcctgcctctctggactgggacacatggtactagagagactgctgtgtgccctgcacatcctcagcgacagccaagacacagaggccaatggtccccaccccagagacctctgcacttggaggacacactgtaaagggtgcatggcactaaacagcccacagtctcccgcagcagcaacagtgcccggggtcccgcagcgtaagttctgccggcaagtcggatcccctcacaggtcgccgcgcgtt

SEQ ID NO: 435508 - DNA, 775 bp, Homo Sapiens
aacgggatccctccatttcccaggaatttacttctgggggcccctgatcccggaaggaggaaccaaaacgaagttccctccctggcttgggttttatagtttggggtaaaagccacgactggagattggttagggcactgccactgttggaacgggactcccgaatgttcccgaaaactattaacattctgaccaagaagtgtcacttctttcagcccctgctcagaaagcttcttcacttcctctagaatggaggcaataggccgactcctctccctgccccggggtgaaaggaacaatgcagtagctacacatgttgtcacagcctcgcatgattgacacaaaggcagacgtggcactggcgcttgtctggactggcatgacatcagcataggtctcgtccagagagagcagcacgttggcagcttgctggcccgactcagcaacagccagcagccggggaaggtcccggtaggcatcaggaccagccaaaatatctaccattttctctctgttgagaatctcctccttcaacctctcagccatgcagcctagaattccaatcctcagaggaacccgggagcggggccgccttgtcttcaaggctttaagctgatgtaaacggttccagatggtctgctcagccttctccctgatagagcatgtgacaaggagaatcacatctgcctcccgcagcagcaacagtgcccggggtcccgcagcgtaagttctgccggcaagtcggatcccctcacaggtccgccgctgcgttccc

SEQ ID NO: 435509 - DNA, 548 bp, Homo Sapiens
  misc_feature (386)..(465): n is a, c, g, or t
  misc_feature (500)..(500): n is a, c, g, or t
ttttacaacttttttaatatatatttttataaacaggtcacgtgataaaatagcacaagaaacacttaccaaatataaggttatatcttccgcatatacaggagaatgaggtcgttatgtacaataagaaaatgattttaggggttggttggttttgttttcctctctccccttaatttttcctcctacagtcgttggaaatatcacagcttcagttgcattaatactttgggcaaatggacagctgcccctccccactaggggttgtggggaggaggggctggagaaactggctcctgaccactcagccctggagcttcctggggctggcactccagggacaggaaaatctttgggctgttgatctgtttctgattcaacagcannnnnnnnnnnnnnnnnnnnnnnnnnnnnnnnnnnnnnnnnnnnnnnnnnnnnnnnnnnnnnnnnnnnnnnnnnnnnnnnccaaccagatagggagtgtcccaagattgggtganggcgcggtatctcctggggctcaaggttgggatgggaagggtcccgcc

SEQ ID NO: 435510 - DNA, 1155 bp, Homo Sapiens
tttttttcatttcccacaatcttttattaagaaaaattccaaacatacagaaaagttgaaagaacaagtacactgttcactgaaataccagccactgcagattcaacaatgaacattttggccttatttgctttgtgtattttggggggaactatttggaattaaattacacatttcttgaaggcattcacctatataatccagcatctatctcctaagaatgaggacattttcccatgaactgcagtaccgttaaatggctattagaggaatggttggtctttgtgagggtctcacgtccaggaacctcatcaaagcgtgctaggcccttagcagagagggtagaaccggctcgccggctcccctcaccttctctcccatcccagaaaggcagaacaggggcaacacaggattctggagagctgtccagatagaggatcacaaacatgagctccacctgggaaacacagacagccccaatcccacccccactacaagagcaggcaacctgggtccaaattcagaggacaccacagccggcagagggctgcagcatgccaggtaggacggaagtcgctgggggtggggatgagcaccagcccctagagcctggaatagcacccggcgtgggctacagcctgccccacccacctcacagctgctcggctcacccatggcactgccaaagcagcaggcttaagccgccaaggcgggcacatgaagcctccatttccaggtccaggggtcaggcaaggagatctccttcagggctgggccctgcctcggccagctttgctggtggaattaaatatagcacagggagacacagttgccaggcagaagcaggaggtgctgtgaatagaacagtgccctttgtggtgacaaagctatggggagcctgctgtgcatgtgccaagacctgcagggcagctcccccagcccccacagggacctctgagctgcatggttttgtccccgcttcacatgtgaaatatctgaagttcagatgaagtcgtttccccaagatcattctgccaagtaggagagcctgaatgcacagtctagagcccacgttcctgccaccgactcacaacagccccaaggtcttcaccccagacgggtcccgcgctgtagacccaggctgttgaaccaccg

SEQ ID NO: 435511 - DNA, 430 bp, Homo Sapiens
  misc_feature (97)..(97): n is a, c, g, or t
  misc_feature (158)..(158): n is a, c, g, or t
  misc_feature (202)..(202): n is a, c, g, or t
  misc_feature (225)..(225): n is a, c, g, or t
  misc_feature (365)..(365): n is a, c, g, or t
  misc_feature (374)..(374): n is a, c, g, or t
  misc_feature (379)..(379): n is a, c, g, or t
  misc_feature (401)..(401): n is a, c, g, or t
gaccatttcccacaatcttttattaagaaaaattccaaacatacagaaaagttgaaagaacaagtacactgttcactgaaataccagccactgcagnattcaacaatgaacattttggccttatttgctttgtgtattttggggggaactatttgganttaaattacacatttcttgaaggcattcacctatataatccagncatctatctcctaaggttgaggnacattttcccatggaactgcagtaccgttaaatgggctattagagggaatgggttgggtctttgtgaggggtctcacggtccgggggacctcatcaaaggcgtgctagggcccttaggcagagaggggtaggaaccggtntcgggcttnccctncacctttctctcccatcccagnaaagggcaggaacaggggggcaacacagg

SEQ ID NO: 435512 - DNA, 787 bp, Homo Sapiens
  misc_feature (488)..(488): n is a, c, g, or t
  misc_feature (579)..(579): n is a, c, g, or t
ttttttttcagatcagaaagctcggtgttttagtgagtcaccagttttccagactgagcatgcacgcacgcacacacacatgcaaacacaaacaccgacatcccgccaagtcacgcccgcattgccgaagatgccctgggtcccacacaccctgtgctctgttctcacaaggtaaaatcaccctccaaaagtggtgattctctggtctctgctgaatgctctcttgttgagcttggaaggcacgaactattccccagctccctgcaaacacctatgcactttcatctccgccttctcagcctcttctgatttgtctgtgtttcctaaccccagccccactccactttgtaatggttggcagaagacaatggtctttctgtcctactaagggttatgctgcacttttcagggggccctgacgctggagaggtcagacagctctctgcacagcatctctggagctggcctttgtgcttagggagaggagncagctccggacgccatgcaagatttatgaatgtgttttgttaaattgcattaagtggctctgtgggaggaatggtgtgtgctttggccttnaaacaaggtgaagctcaaaagcggcagtgggagaggggacaggaccaaggctgtgtgtatgagcaccctgccatcctgggctgcatggacccccttgccctctgttccccacgctcttgctgaagccagggctctgtccctgccctcctgagctcttgtctacgttgctgctcaggccggccttcccctccttggctccttgggttga

SEQ ID NO: 435513 - DNA, 3131 bp, Homo Sapiens
  misc_feature (148)..(175): n is a, c, g, or t
tgaacggcccagagggtcccttaggcttaataaataccgaccttccccttattaggggcccccctttgttaccaaaggaaagcctggggtacgccgtaaggcttggggccccctccgaggggatacttctagagcgggccgccccttnnnnnnnnnnnnnnnnnnnnnnnnnnnngggtttaaatgacctttaatagaaactctccagtttctgacggtctgtccctctcttcagaggcatccaggacagggtgacccagtgtggtgtgtggacctgtcactcccctccccacaggcaagtagaagatcgagctgtgcacagatgcctcttctgtctcccaagaggttctctggagtcgctgtctccaggggactacggtttgctctcatgaccagccatggaggcagaagtcccagactcagggcagcccttggagtctgatccaggtgtctttaccccaaaacttgaagcagaagtccctggtgcaacacctgtgcctgggagaagctctggccatggcttctcacccagacagtctttctgggcaacttggggaagcccctgttctgctcaagtctcaccccatggaagaggtgggggaagggggccttggtttttcaggaagacaggttggagagcacgagtcactacaaagcagtaaaagtgaatggtgtctccaggggctgggtccagaacaccacggagagccccagccataaaggtgtgttccgcctctggcctgcaggaatctctttgaatctctttgattggtggctccaagagcaatgggaagtcaacagccaggaggctggactgggttccctgggaccccgaggtcccagaggctgctgggcagtggttgtcggcaaagaagaaaggtccaagagggtcaggcctggccaattagggatcgacgaaggagactgcgatgtagcgggtgcccctggtggtggggagcccctcatggtaatgcgtgagtcgtccagggtgcatgagggtccagcccttccttggggctcggatggaacagttgtagcgcaggaaccgacagcccccgccctcgtaatccaccccgactcggttcagggcgatgttgatggtgaaggtggaggcatcatggtgtggcatcagtgagggctgctcatcaggcttgtagcggacgacaaaggccaggtcaaactgggccctggtgtagtagccggggtagagcttctccgtcatgggcgcaatgtactccagcaggaatttgtgccactcccgctcaaagccgatctggttcatgtggatgtcaatagtcggcacgttctcgtagccaccctggatgcggttgtccttgttgttgcccagagaccactggccaaagtgctccatctcctccaccagctcatcacaggccacctccgtgaagatggggaaccaatagacatccgggcagggcgtctccaccagcttccctgccagggctttggtgtagttctggtggatgtacttctccttccagtcctcggggttgctgaacacctcccagaggtcgttgtgcaggtgggtggtgcggtagctgtctagggagagcagatggccaagggtgtgccggttggtcaggaacatgaacacatcctgctgccggatgttggcacagaaggccatgtcggggtccagcttgctgtggtggaagagatctgaggactgcagctcaccccgcagggcactgcccttgatcaagtagatgtttgaaatatagggcacattccagacaccaacacgccgcccctgcacaatgtccacgtagtcctcggaacgggcatagtagccatctgcactgagagccccccagaagttcgaccacagcctcccatgccgggtcatcagcggggcaatgacgttcttgttctgttggatcagcagccgcaggctgttgggctcggtcagggccacgtcagcatccacgctgaagtagtaggtgcagctgcggtcctgccggcacaggtctgcgcccatgttcctggcatctgcattcgccatccgcacctcagggcccaccagcttcacagactggtactcgctgccatgctgtgccaggaactcttccacctgagccttgtggtgctgctcgtggttgtggatgaaaagtcgcatgtgtttctgggggtagtggagccgcaggagccgctggaagaacagggacacaaacggcgtgggctgttcgatgaacacgccgaccaggaccgtgggcagagcttcatccccaatgcccttgaggctgcgcaagccttcgtcacacacggtgcagcctgtttcgaaggtccagaagcgcgggatgtagttgcccaggtagttcaactgcagcttggttggcccgttgccatggatcaggaccgggagggtgtcataggccaggttcctcgctctcacatggcccatttcaaacttgagcacgacctcatccaaggctccatccaggttctggaagatacggcagcggtggtccagggtgatattgatctgctccctcttctccgggtccaagaagatcttggtgtaaaacagctgattgctgtcgctgtcctggccctcccactcggccaccagtttgctgaggttgggggcataaccgatgaagcctccagagcccaggaacctcttgccatcggacaccaccggatacttggtctccagctgcggtctgggtagatgagctcctcagcagagaagaccacctggctcctggcctgccggaacttcttcaggagctcccggggccccgatgcaaacagcacgtcatagctgtctgcgaagagaatgaccagatcctccttgtctgcgtgcttctccagagctttcttcagcagccggaccttctgccctccacctgccgacgtccccttctccacattccagtcctcccctaggccaagcgcctggatcttgtagttgaagaactgagctgagcgcttgaagcgacggaatccctcggtctccttagtggccaccgtgaggactaaaaggttgtctgtagcgcacttagagccgccccaggtcaagccccaaggaagtcagttttcatgatttcattagtccttcccaaaacccaaggggtgagggtgggcacggatgcgttcagagatcccgg

SEQ ID NO: 435514 - DNA, 1046 bp, Homo Sapiens
ggtaccggtccggaattcccgggatccggggcgggcccagtgcgtggcagcgggacctgcggccccgtcgcgaagtttccagccctgcgagcgccgccgggtcggccgatcgtcccccatacctcggccatgcggcccctgctgctactggccctgctgggctggctgctgctggccgaagcgaagggcgacgccaagccggaggacaaccttttagtcctcacggtggccactaaggagaccgagggattccgtcgcttcaagcgctcagctcagttcttcaactacaagatccaggcgcttggcctaggggaggactggaatgtggagaaggggacgtcggcaggtggagggcagaaggtccggctgctgaagaaagctctggagaagcacgcagacaaggaggatctggtcattctctttgcagacagctatgacgtgctgtttgcatcggggccccgggagctcctgaagaagttccggcaggccaggagccaggtggtcttctctgctgaggagctcatctacccagaccgcaggctggagaccaagtatccggtggtgtccgatggcaagaggttcctgggctctggaggcttcatcggttatgcccccaacctcagcaaactggtggccgagtgggagggccaggacagcgacagcgatcagctgttttacaccaagatcttcttggacccggagaagagggagcagatcaatatcaccctggaccaccgctgccgtatcttccagaacctggatggagccttggatgaggtcgtgctcaagtttgaaatgggccatgtgagagcgaggaacctggcctatgacaccctcccggtcctgatccatggcaacgggccaaccaagctgcagttggaactaccttgggcaactacattcccgcggcttctgggaccttcgaaacaaggctgcaccgtggtgtggaccgaaggctttggcgcaagccctccaaggggcatttgggggggaatgaaaacttcttggccccaacggttccccttggggtcgcgccgggtggtttt

SEQ ID NO: 435515 - DNA, 730 bp, Homo Sapiens
ctttcaaacttgggcacgacttcacccaaggctcatccaggttctggaagatacgcagcggtggtccagggtgatattgatcctgctccctcttctccgggtccaagaagatcttggtgtaaaacagcttgatcgctgtcgctgtcctggccctcccactcggcctaccagtttgctgaggttgggggcataaccgatgaagcctccagagcccaggaacctcttgccatcggacaccaccggatacttggtctccagcctgcggtctgggtagatgagctcctcagcagagaagaccacctggctcctggcctgccggaacttcttcaggagctcccggggccccgatgcaaacagcacgtcatagctgtctgcgaagagaatgaccagatcctccttgtctgcgtgcttctccagagctttcttcagcagccggaccttctgccctccacctgccgacgtccccttctccacattccagtcctcccctaggccaagcgcctggatcttgtagttgaagaactgagctgagcgcttgaagcgacggaatccctcggtctccttagtggccaccgtgaggactaaaaggttgtcctccggcttggcgtcgcccttcgcttcggccagcagcagccagcccagcagggccagtagcagcagggccgcatggccgaggtatgggcctcgtgccgattaacacccggcctcgtacctagccgtacgctctctc

SEQ ID NO: 435516 - DNA, 663 bp, Homo Sapiens
  misc_feature (249)..(273): n is a, c, g, or t
ggaatctactgcgagcacagcaggtcagcaacaagtttattttgcagctagcaaggtaacagggtagggcatggttacatgtttaggtcaacttcctttgtcgtggttgattggtttgtctttatggcggggggtggggtaggggaaagcgaagcagaagtaacatggagtgggtgcagcctccctgtagaacctggttacgagagcttggggcagttcacctggtctgtgaccgtcattttcttgacnnnnnnnnnnnnnnnnnnnnnnnnnttttttagagagtccactgtttctggagggagattagggtttcttgccaagatccaagcaaaatccacgtgaaaaagttggatgatgcaggtacaggaatacaccagggcataattctcatagtcggtggccaggatccaatacggtgccggatgcataaaccaagaaaacttaacttcccactttgcaagctctgtgaggttaactgggggtggcttaccttccatttgattcacagttccctcacgtctcaactgctgggttaacactttgatactttccgtttccaattagtagttagtggactgcatgcagcgtgcattctcaaaggtggtggggacttcttaattcctaccatctgccgaaaatccttatcacgtaaaaatactc

SEQ ID NO: 435517 - DNA, 883 bp, Homo Sapiens
aacatggagtgggtgcagcctccctgtagaacctggttacgagagcttggggcagttcacctggtctgtgaccgtcattttcttgacatcaatgttattagaagtcaggatattttttagagagtccactgtttctggagggagattagggtttcttgccaagatccaagcaaaatccacgtgaaaaagttggatgatgcaggtacaggaatacacgagggcatagttctcatagtcggtggccaggatccagtacggtgccgatggcataaaccaggaaaacttaacttccagcttggcaggctctgtgaggttaactggggtggcttcaccttcgatttgattcacagttccatcagctctcaactcctggtttaacactttgatctttccgttttccattagtgagtagttggcctggatgcagcgtccattctcaaaggttgttgggatcttctcaatttcgtaccatcttccgagatacttattcacgtcaaaattctcctgcaccggaggattggggcacttcccaagatgaaatgcttgtccctctgccgcaccgaagaggccagccagtgcggaaagcagcagcagcagcatcaccatcttggggctgggtggctggagaagggacctggagcttttctttcaagatgaaggcagtttccagatgcagaatcagccgatttgagatgcctgtcttggtgactggcctctcccaagctattttataagcttcttcaggtctctgatgtttacttttcatgcatgccacgcccgccgcccccatccagtcaggagggttggcctaaaagcttagtctgtatcgaaacacaaagatgggatgttgtgtccatcctcctcccccgatttccttcccgct

SEQ ID NO: 435518 - DNA, 985 bp, Homo Sapiens
  misc_feature (905)..(941): n is a, c, g, or t
ggaatctactgcgagcacagcaggtcagcaacaagtttattttgcagctagcaaggtaacagggtagggcatggttacatgtttaggtcaacttcctttgtcgtggttgattggtttgtctttatggcggggggtggggtaggggaaagcgaagcagaagtaacatggagtgggtgcagcctccctgtagaacctggttacgagagcttggggcagttcacctggtctgtgaccgtcattttcttgacatcaatgttattagaagtcaggatattttttagagagtccactgtttctggagggagattagggtttcttgccaagatccaagcaaaatccacgtgaaaaagttggatgatgcaggtacaggaatacacgagggcatagttctcatagtcggtggccaggatccagtacggtgccgatggcataaaccaggaaaacttaacttccagcttggcaggctctgtgaggttaactggggtggcttcaccttcgatttgattcacagttccatcagctctcaactcctggtttaacactttgatctttccgttttccattagtgagtagttggcctggatgcagcgtccattctcaaaggttgttgggatcttctcaatttcgtaccatcttccgagatacttattcacgtcaaaattctcctgcaccggaggattggggcacttcccaagatgaaatgcttgtccctctgccgcaccgaagaggccagccagtgcggaaagcagcagcagcagcatcaccatcttggggctgggtggctggagaagggacctggagcttttctttcaagatgaaggcagtttccagatgcagaatcagccgatttgagatgcctgtcttccgctctcgacgaattcgagctcggccgatttggcctgatnnnnnnnnnnnnnnnnnnnnnnnnnnnnnnnnnnnnncgccgccccgcggtgagctccagtcgcccatagtggtcgttcgc

SEQ ID NO: 435519 - DNA, 500 bp, Homo Sapiens
tcatcttgggaagtgccccaatcctccggtgcaggagaattttgacgtgaataagtatctcggaagatggtacgaaattgagaagatcccaacaacctttgagaatggacgctgcatccaggccaactactcactaatggaaaacggaaagatcaaggtgttaaaccaggagttgagagctgatggaactgtgaatcaaatcgaaggtgaagccaccccagttaacctcacagagcctgccaagctggaagttaagttttcctggtttatgccatcggcatccgtactgagagtcctgagctatgactatgagaactatgccctcgtgtattcctgtacctgcatcatccaactttttaagcgtggattcttgcttggatacttggcaagaaaccctaatctccctgccagagaacagtggactctcttaaaaaatatcctgacattcataataacatttgatttcaagatgacagaactggggtacacgagcgtgaatt

SEQ ID NO: 435520 - DNA, 1850 bp, Homo Sapiens
cccggaagtgagccagctgcagcggcgatctgcacaaaggcatcagggctggtccggcacttctttgatgaggcctttgccaaagggcaggaactggaagcagtacaactccacgtcgtctgccaacgccttggccacctggtaggaactcttgatgaccgcctggcactgttttggaatgtcccactgcagccgtgtaggaggtgcgagcgcagggttcggtttgcccaggcagtgcccggtctccgtgtagcccaggtggaagctgtctgtgcccaggacaaactcccagaggtgcccaatgatgggagcatctgcccacgcatgctctgcattgagacccaactggccattcttgaaggaaatgagagtgaaggatttgtcaaaccacctgttgtagcagttgccatgtagcagggccttgccatagaggctgaggctggcctcatcttcggggtcataggagtaggattcctcatccagggccacgaagaaagcggcacgctcgatggcctccaaggcagccttattctttccagagctaaagaaggcctggcgtgcctgcgcccactccacccttcctcctgcagtgagggctgccagcttctcctccccaggctgaggtggggaggggtcgtccaggatcctctggtactgcatctccagatcctgaggcttgagcagacgggcgccctcatagagccacagcttgaagtagcgtcccttgtggtagacagccacgtgccggctgtctgagtaggtgctgtagcacatctgtgtccttgtccgggatccgagtggtgttgaacatcctctccatttggtaggagcacataggcactatgccccagtgccatcccaggcttggtttcttcacggtccagtttacggcgatacatgatcatggcgtggatgatgtttcccaggcgggctgcctgcacgtctgtattcttgatgagcacaaggtccatgacataatagttgctgttcaccatgagagggctcctgcctcgaaggtagatgtactcttcccaccagtcactcacatagttacttgcccaccatgacttgagcaccaggtatttctgcagcctgggggcagtcttgtcctggaattctttggccagcaactccatgcggtaatattcctcatcatccaacaaggggcgcacagactctaggtaccgctgaattgtggctgacaccctgggcacaggaagcttgggcagagatgtctggaagctgtagagcatagggtgccggctggatagaaggcggatacacatagcccagatcctggtcaagttgctggtcttgccatgcatctcaaacatccacccatggtagcagagaagcagcttcagggtttggcggaagaagaagatgcccgtcacccagacgcccgtggagaagatggccatgctgagaagtgcccgggtctgcggggtctggtaggggccacacccctgagggaggcatctctggatgcaactgaccagccccaaggagatgtccacgttgcagaaggaggaacccactgttgccatgatgacgaccagccagctggtggggctgccagggtacacgcccctgaggatgccattcttgatgcggatcaggcgtttcttccaggagttgatcccagacaggtagacgtgtttcagggcctcccgactgagccggaagtcgaccccgtctggggtcaccgtgaactggaaggccacggcctggtgagcttccgccatcctgggggttggtcggcacctaggacgggggcagatgggtgcgcgggcgcgcttaggccggccccgccgccagccgcgccgagacgcccccagccagtccgcgac

SEQ ID NO: 435521 - DNA, 111 bp, Homo Sapiens
gtgtgagccactgggcccagcctggtcaatgttttttaatatttacccacataacacatatttgccacattctttgcagttttattctccattgtgttccaggccttcaat

SEQ ID NO: 435522 - DNA, 764 bp, Homo Sapiens
  misc_feature (107)..(127): n is a, c, g, or t
  misc_feature (635)..(635): n is a, c, g, or t
  misc_feature (694)..(694): n is a, c, g, or t
  misc_feature (714)..(714): n is a, c, g, or t
  misc_feature (717)..(717): n is a, c, g, or t
  misc_feature (735)..(735): n is a, c, g, or t
  misc_feature (744)..(744): n is a, c, g, or t
gagagggctaaacaaacttacagaatcccaaccatgtataagaagaccaccactgcctcccccaggactccaggtaccaagcgataacactgtctaagcacaggatnnnnnnnnnnnnnnnnnnnnnaaagacatagctccaaggggttccctggactacaatagcaaagagctgcccttctgtgaggaaaagagactacaaggacatgccctatcattcaactcatttatgctatgaactgtttagactcactacaaatcttcttagattatattcattaccattccctggtctgaaggagtataaaggacttattttattcagagccaagataaattcatattatagatttatatataaacaagttatattgttcaaaaatagtctcttataaatatactagtgttttctttacacatgacttagaaggcattagtttctctaatgccaaatttgaaggcaccagcaaatattatgtatgaagactgacattgttttacagacatgacctggcttatgataaaagaagttttatcgcattaccacttcttttcccttttcttaattagtacactaaactagtactaattaattacacggggtattgttgttaaaatgcaaacacaatcagggnactcacataacataaacaaagttgatattgatgtgtatggcttgggctgttcaaagccngtaagattgaaatggccgtncanaacatactggggtatgtnctttaagtnttctcatagtttttaaaggg

SEQ ID NO: 435523 - DNA, 1704 bp, Homo Sapiens
  misc_feature (3)..(3): n is a, c, g, or t
  misc_feature (19)..(19): n is a, c, g, or t
  misc_feature (38)..(38): n is a, c, g, or t
  misc_feature (62)..(62): n is a, c, g, or t
  misc_feature (65)..(66): n is a, c, g, or t
  misc_feature (103)..(117): n is a, c, g, or t
  misc_feature (120)..(120): n is a, c, g, or t
  misc_feature (145)..(145): n is a, c, g, or t
  misc_feature (228)..(228): n is a, c, g, or t
  misc_feature (246)..(246): n is a, c, g, or t
  misc_feature (248)..(248): n is a, c, g, or t
  misc_feature (251)..(251): n is a, c, g, or t
  misc_feature (267)..(268): n is a, c, g, or t
  misc_feature (271)..(271): n is a, c, g, or t
  misc_feature (1383)..(1383): n is a, c, g, or t
  misc_feature (1532)..(1532): n is a, c, g, or t
  misc_feature (1560)..(1560): n is a, c, g, or t
  misc_feature (1589)..(1589): n is a, c, g, or t
  misc_feature (1647)..(1647): n is a, c, g, or t
  misc_feature (1653)..(1653): n is a, c, g, or t
gcngagctcgcgtccagtntataaagaagatgcctttnggcataatcctaaaagatcccgcnggnntacgaccctgccccgcgcagaaaccctattaatcggnnnnnnnnnnnnnnngtncccgatttgtatcttggccttttcncttgtttttctcaaatatttcatttctgggccccatccattacagggttaccaggaggcaaattttatctacataaatattcncatgaaaatagtaacttncnaanagaaaaaaaataaggnngcntcataacacaattattctttttacacttttaacaaatataactttctcccgttcggaataaatatacacccaatgtatggggcggggttcaaagtggatagtggcttgggggtgcttagacagtgttatcgcttgggacctggggtcctggggggggcagtggtggtcttcttaggcatggttggggttttggaaggtttgtttagccctctcctggagttgccttggccccctgcagcgctgctttctgaagtgtcggaacaagcagactgcgtctctaagaggtcaaagtcagaagcgtcacttcctcgccggctgctggctcgactcccggctcgactcccagcccgactcccagggcgactggcagactttttagggtctgcccgattagttttggcacctgtggaggccggggaagaactattgctggtatcaccagcaagggatgtccgactagaatgaaaagttggtgttggtcgtttcaacttgctacctgatgatgggataaccttggttccactggctggggtggctggagaagatggcatggatgtacagctgtggttactctgactagcactggagctggaacgagtaggggaagctgcccgggaagatggtttggaccttcgaccccgtgagcggaagggggtcattccctgggatgctccctctggtaggatgaatttctctctaagttcaatgttagttctacctcgtgctcggcagggatcatttttcactaaaaattcatccaaggccatccatcctccaccaacgcgaaccatcacggtgctgcgcagaatacggaccagccgcaactgctgagaatccccaaactgattgccgaggaagaaccggtatttattctctccgatctgctccacctgaaacctttttgcacatttgcactgagccacttgtcttgtaacctcatcttcgattttatctgcatcggttgttggtcgatacgcatccttgttgggatgaagagcagccacaaattcataataatcaatgtaaccatccccatctcggtcgaaaatgtcagccacagcagtcatctctaacttggtggtggggaacttggatgctaaaatgccatcgantaactcctgacgtgttatcttcccatcctggtccctatcaatgcgccgggaagaatccatcactcgagactttttgtgattcatccaacgcatatactttttccttcagacatcaaagtccaaagttgggcaatttctttcaacttctnccagccgatccaagggcatcattcagtnttcccttggccgttccagtgcttacagcncacacctgctgccaagcgggcaaaaagcgtggttgatccgtggggtttttttgcttanaactgntgaaaggattggcatggggaggaggggtttggcctgacctaggggatttcc

SEQ ID NO: 435524 - DNA, 1573 bp, Homo Sapiens
  misc_feature (907)..(918): n is a, c, g, or t
  misc_feature (1445)..(1445): n is a, c, g, or t
gttactgccaaggcaattttaatacaaaagtgtgtcttgtttctaaacagttcattggtagagcttcagtttctgcctcaattaaaaccaattgagataatcacacagcaacatggtcggagctgaagaacagcagctaaaaaacaggagccccagacagccccttttcatggtcacttggtcagttgactttattacgcacaaaaaaagacgaaagcaaacaggactggttaacaagtgtgctggtgaactccattaaaggacgagcacgtgtttgtcttacgtccacattttcagaacaggctcgtggaattcattcctcagtttgtgggaagttgatcgaccatttaaataaatagcaaaaaaagtggataaaacaaatctgaaattcacaatgtcaccaacgagcctatcccttgccaagggtctgggtcctggtgaacacaagagttactggtgtctaggctggatagggagcaacaaatcagtttaaaacccccaaatgttctgacgttttctgaacacttacatttacccctgaattctagcagctatttgtcctttgaaacacccaggtactgaacacaatatccaaagacagtattgcaatgaactccttttgctgtatcatgtgcaaatgttacttagatgaggttccctctctttagctaaaaatcacaaaacattaaacaatggaaaaagccctcccctcagttcttgctaattgaggtgtccgtgatttacaaaaaaagagttccttaaacactgcaggattcttatttttttaatataatttatcttgctgagatagcaagtcaagtttataaagaagatgcatttaggaataatcctaaaagataaagcaggtttacaaccctgcaccgcgcagaaaccctattaataggcnnnnnnnnnnnnaatacacatttgtatcttgaccttttcacttgtttttctcaaatatttcatttctgggccccatccattacagggttaccaggaggcaaattttatctacataaatattcacatgaaaatagtaacttacaaaaagaaattaaataaggcagcttcataacacaattattcttttacacttttaacaatataacttctcccgttcagaataaatatacacccaatgtatggagcaggattcaaagtggatagtggcttgggggtgcttagacagtgttatcgcttgggacctggagtcctgggggaggcagtggtggtcttcttagacatggttgggattttggaaggtttgtttagccctctcctggagttgccttggccccctgcagcgctgctttctgaagtgtcggaacaagcagactgcgtctctaagaggtcaaagtcagaagcgtcacttcctcgccggctgctggctcgactcccggctcgactcccagcccgactcccagggcgactggcagactttntagggtctgcccgattagttttggcacctgtggaggccggggaagactattgctggtataccagcaaggatgtccgactagatgaaaagatggtgtttggtcgtttcaacttgctacctgatgatggg

SEQ ID NO: 435525 - DNA, 3013 bp, Homo Sapiens
  misc_feature (2868)..(2868): n is a, c, g, or t
  misc_feature (2925)..(2925): n is a, c, g, or t
ctaaaaataagaaaaaccttgttttccaattcgaaatttccttccccctccacgtggggttcttttcaagagggccccatatttattttctttctccttcactgggagtctttcggagggctacccgtgaacaatgaacttctttgagggtgggattggggaagaaggcataaatggagatcagtacataccttggttccactggctggggtggctggagaagatggcatggatgtacagctgtggttactctgactagcactggagctggaacgagtaggggaagctgcccgggaagatggtttggaccttcgaccccgtgagcggaagggggtcattccctgggatgctccctctggtaggatgaatttctctctaagttcaatgttagttctacctcgtgctcggcagggatcatttttcactaaaaattcatccaaggccatccatcctccaccaacgcgaaccatcacggtgctgcgcagaatacggaccagccgcaactgctgagaatccccaaaccggtatttattctctccgatctgctccacctgaaacctttttgcacatttgcactgagccacttgtcttgtaacctcatcttcgattttatctgcatcggttgttggtcgatacgcatccttgttgggatgaagagcagccacaaattcataataatcaatgtaaccatccccatctcggtcgaaaatgtcagccacagcagtcatctctaacttggtggtggggaacttggatgctaaaatgccatcgataaactcctgacgtgttatcttcccatcctggtccttatcaatgcgccggaagaaatccatcactcgagactttttgtgattcatccaacgcatatactttttcctccagacatcaaagtcaaagttggcaaattctttcaactcctccagccgatccaaggcatcattcagtttcctttgccgctccagtgctaacagccacacctgctgccagcgggcagaaagctggttgatccgtgggttttttgcttcagactgtgaaaggattggcatgggaggaggggttggctgacttagggatttcctgcctccgctgcgggatttctctatgaaaggcgcgtgagtaggctctatgtttttccttttgtatgtcttggtgacccggtccacgtcaggctgtttgcgagtcatctcctccataaatgtctgatgctcagcgataagggctttaactcggtcatgttctgcgggattggctcctgatcccgctgaatgagggtggtctcagcccactggatccatgccagaagttcttccaggagctcagcattagccaccagttctgacaaggccgtttcaagacgctgctggtgctgctttagcccatgtcaggacctcctcgaagcgagctcggatgatggtgatccagtgtttgatggttgtgatgcaatcggggtggcagacagccaggatgacttctcccatggctactgctgagttaacgtccactcgcttttcttctactttcttcatgaattccttatgggtgtcaatgagagactgcagggcctctgtgtcatcaggaagtgctccccgaaagcgaagcgtttgctctgcttcagaaagccactccaacagcatgtggactgtgtctcgaaacacttccgcttgttttaaggcctgctcaagccggctttgtttggaaacagagagtttacagacagtgtcccagcgagtgctcagttcctggagctgtccttttacccaagtggtgtcatctcgactattctcaatcagctctcggcctgaccgcttcaggacctgaacggttcctgttcgctttcccagttccttctggaaaaccttgtgtgcatccatgaggttcatgacgaggtcaaggtccccgtgcacgggctggtcctcagccagctgtggctccaccttgtataaccagtcaaccaatgcctgcaaagcatccatgaactgacccgaaaagagcagggcttcctccaacttgtgctgccgctccacagacttgccacaaacagtatcccatttgtctctgacttctcctaggaaattgtcaagtttctgagtatcttcgggaagcaaagtcttttctttcagtgctctgccagttctaattgtggtatcatacacaggctgcttgccaccaagagtcttctgaaactccttatgcttagaaagctgaagtttaattttgtctgggtcattggatatctctagttctgagtccaggtgactctctgcatcttctagccagtcaatcagttttttccaagcttcatggaattgttttgcccgcttcctggcatcatctagtgatcgccctctttcaatagatcgctggacaaccttctcccatcgagactgcacgctcaccaacaaattcttgatcagaacaacatcctgcttttggctaaggaactttaattgattcccagtttgatccagctcaatgatctggtctcgatgagcatttacttcattagcaaaaaccttgtgctcttctatctgggaaaggacagtatttagaatcaggcttggtggagaagcgatgtttaaactctgctctgctagagtgagccagttgataaattcttgtagggaattctggaattctgttgccaagttgagggcctcttccagctttgactttctttcttccatcttactgctgaccacatgccacttctgctccaaaagtgctacactctgttctgtcttggagccagacccagagtcgtcacggcttagaagcatgagtctgcccttgtcaagtagttgattataagtctcttccttggctttcagctgggaatagagttccatatgtgtatcaagctgttccctngcagtttcaggaagtcctcctgtgggcttagatgcagaaagctggctctccattctngtaagttccaagaggaaatcttcaatttcactgtggaagccctgggcctgctgcagagttgactgaagctgctgctccctctcctctg

SEQ ID NO: 435526 - DNA, 736 bp, Homo Sapiens
  misc_feature (55)..(74): n is a, c, g, or t
  misc_feature (632)..(632): n is a, c, g, or t
  misc_feature (639)..(639): n is a, c, g, or t
actagtggatcccttgggctgcaggaattcggcacgagctagtcttcagtttccnnnnnnnnnnnnnnnnnnnngaaaatatttaatgctcttagaatcagtgaagaagtttccatggtgctttggctttgaaaacaatgactttacaagataaaagttaagaaaaataataaaataggctattcccttctcccactttatcttaattagtgtatcagacttttcttccaaacaagcaaacttgtcaccaacaattgtcgctcttgcaaataaaacacagtatatacatatacattatatcttctaatagttcaatttaatgaaatgtatacccttgtgtattagtctgttctgacactgctgataaagacatactcaagactgggtaactaataaagaaaaagaggtttaatggactcagtttcacgtggctggggagacctcacaatcatggcagaaggcaaaaggcatgtcttacatggtgggaagagagaatgagaaccaagtgcaaagggaaaccccttataaaaccatcagatctcatgaggcttattcactaccatgagaacagtaagggggaaaccatcgccatgatctggtgccgaattcggcacgagtctgaacgggagaangtatatntgttaaaagtgtagaataatgggttatgaagctgcccttatttttttcttttggaattactatttcatgtgtattatgtagatttggcttctggtcc

SEQ ID NO: 435527 - DNA, 727 bp, Homo Sapiens
  misc_feature (125)..(192): n is a, c, g, or t
  misc_feature (386)..(410): n is a, c, g, or t
ggggaacagatgtttcttttgtatgtaaatgtgcattcttttaaaagacaagacttcagtatgttgtcaaagagagggctttaatttttttaaccaaaggtgaaggaatatatggcagagttgtnnnnnnnnnnnnnnnnnnnnnnnnnnnnnnnnnnnnnnnnnnnnnnnnnnnnnnnnnnnnnnnnnnnntaaaactgcgttaaaggctcgattttgtatctgcaggcagacacggatctgagaatctttattgagaaagagcacttaagagaatattttaaagtattgcatctgtataagtaagaaaatattttgtctaaaatgcctcagtgtatttgtatttttttgcaagtgaaggtttacaatttacaaagtgtgtattnnnnnnnnnnnnnnnnnnnnnnnnntctgcagaaggaaaaatgtgtaattttgttctagttttcagtttgtatatacccgtacaacgtgtcctcacggtgccttttttcacggaagttttcaatgatgggcgagcgtgcaccatccctttttgaagtgtaggcagacacagggacttgaagttgttactaactaaactctctttgggaatgtttgtctcatcccattctgcgtcatgcttgtgttataactactccggagacagggtttggctgtgtctaaactgcattaccgcgttgtaaaatatagctgtacaaatataagaataaaatgttgaaaagtc

SEQ ID NO: 435528 - DNA, 1630 bp, Homo Sapiens
  misc_feature (325)..(349): n is a, c, g, or t
  misc_feature (537)..(596): n is a, c, g, or t
  misc_feature (598)..(610): n is a, c, g, or t
  misc_feature (625)..(625): n is a, c, g, or t
  misc_feature (643)..(643): n is a, c, g, or t
  misc_feature (645)..(646): n is a, c, g, or t
  misc_feature (862)..(862): n is a, c, g, or t
  misc_feature (927)..(927): n is a, c, g, or t
  misc_feature (930)..(930): n is a, c, g, or t
  misc_feature (943)..(943): n is a, c, g, or t
  misc_feature (949)..(950): n is a, c, g, or t
  misc_feature (956)..(956): n is a, c, g, or t
  misc_feature (959)..(959): n is a, c, g, or t
  misc_feature (964)..(964): n is a, c, g, or t
  misc_feature (966)..(966): n is a, c, g, or t
tttttttgacttttcaacattttattcttatatttgtacagctatattttacaacgcggtaatgcagtttagacacagccaaaccctgtctccggagtagttataacacaagcatgacgcagaatgggatgagacaaacattcccaaagagagtttagttagtaacaacttcaagtccctgtgtctgcctacacttcaaaaagggatggtgcacgctcgcccatcattgaaaacttccgtgaaaaaaggcaccgtgaggacacgttgtacgggtatatacaaactgaaaactagaacaaaattacacatttttccttctgcagannnnnnnnnnnnnnnnnnnnnnnnnaatacacactttgtaaattgtaaaccttcacttgcaaaaaaatacaaatacactgaggcattttagacaaaatattttcttacttatacagatgcaatacttaaaatattctcttaagtgctctttctcaataaagattctcagatccgtgtctgcctgcagatacaaaatcgagcctttaacgcagnnnnnnnnnnnnnnnnnnnnnnnnnnnnnnnnnnnnnnnnnnnnnnnnnnnnnnnnnnnngnnnnnnnnnnnnngcgcggccatatatnccttcacctttggttaanannattaaagccctctctttgacaacatactgaagtcttgtcttttaaaagaatgcacatttacatacaaaagaaacatctgttcccacaaaacatatacattcctcattttgcagagctaaagtcaagtcagaacttttgcatactctcctgctttgacatataaaatgattttgctttttgctgacatggttcaccttacacataggagaagaagcnatatgattttcttaatgttttatggcagtgggggagggggagctgctgcggcgcccagggccccnggnccgacccccaccncccccnncccccngcnatgantngcactagtggatgaaagaggcactacatcatgggatgaacattgtaaagtgttacagtatcctttgggtagattctgagaaggggctggagacgaaagcatcaacactccatgcttcagcaggctttggggagctccggaggcaggtcagtggctgacacgcggtattgcaccttggtgttggtgatggcgccatgcttctggcgcaagtgaagtcgcagctggcttttgtgacggaaatgcaggttacacttctcacaatggtaaggtttctctcctgtgtggattcgcaggtggctcttcagagtctgaaggtgccggaaacgggtgccacagatttcacagggatagggcttctcaccagtgtggataagcacatgggcacggaggtgggccacctgtacaaatctggctccgcaggtttcgcatttgtagggcttctctccagagtgaattcgagtgtgggttttcaggttggctggccggttgaactgggccccacagatgttgcaacgatagggtttctcaccacagctagaatatgagtactcagactgggtctctcccatctcctcagggaacgtggggccagcggtgtggaggcacatctcagcatgaagaggggactgagagccgccgattcggaaaatccggaccggtaccag

SEQ ID NO: 435529 - DNA, 2368 bp, Homo Sapiens
  misc_feature (54)..(54): n is a, c, g, or t
  misc_feature (199)..(199): n is a, c, g, or t
  misc_feature (422)..(422): n is a, c, g, or t
tgccactaatggaatgaaaagaggccactacatccatgggaatgaaacattgtnaaagtgttcacagtaatcctttgggtagattctgaagaaggggctggagacgaaagcatcaacactcccatgcttcagcaggctttggggagctccggaggcaggtcagtggctgacacgcggtattgcaccttggtgttggtgnatgtggccatgcttctggcgcaagtaaagtcgcagctggcttttgtgacggaaatgcaggttacacttctcacaatggtaaggtttctctcctgtgtggattcgcaggtggctcttcagagtctgaaggtgccggaaacgggtgccacagatttcacagggatagggcttctcaccagtgtggataagcacatgggcacggaggtgggccacctgtacaaatnctggccgcaggtttcgcatttgtagggcttctctccagagtgaattcgagtgtgggttttcaggttggctggccggttgaactgggccccacagatgttgcaacgatagggtttctcaccggtatggacggtcttgtggctggcgaggttgcccttgtagcggaaggaggcctggcagcggtcacacttgtagggtttgtcactgtgggtctgcagcgtgtgcctcttgagtgaggcctcctcagagaagcggcagtcacactcattgcagaagaaggccccgttctcacagctagaatctgagtactcagactgggtctctcccatctcctcagggaacgtggggccagtggtgtggaggcacatctctgcatgctgtggggactgagagccgcaggacgtgcacttcggggggtgcatgtagagtggtgagtggctctcgctgctgctgcggggagagcccgtcatggacctgttaacgatgttattgagccggctggcttgtgggatggtggagtcctccccgctggcactcagcttggttggggactggaggtcaaggttctcaggctccatgggtggctggcaggcaggtggggccgtgtaggctcgtggggaaaggcggcccagctcagcctgctcaggcccctctggtttggcattctggttgaggctgttgagcacgatgaacttgtatttcttccagttgcaggctttggggtcagtggggctcttggctggaggggagccagaagcctggaggatgcaggcattcttactgctgcaggactctgtgggcgagttgggctggcagtcagatttctgggggctctgtggactaaccagacccttccggttcaggggtgcattggggggctcgaaatgcagggcaatctcatcttccgaggagggtctctcttcttctttgctggccttgtcacaagggaagtagggggcatttcgggctgagggggcagcaggtttgaggccctcagccacactgtagtgcatatcacttcgtgcctcttctgggattgtttccttgggtgaatagatattgctgtggcacacattgggggacacctccaaagtcggccggctgtactcaccagggactggcctggcactatcacatgggagtgcccgctccttggggaaggggttggccacaggcatccggacatcccgaaactcctcatcggagaagaggaggctgctgacagggaggtggctgtacatggaataagaggctggcggtgtggacaggccactgtacaggctgggggcaaaggctctgctctcacacccaggggcgctcctcagtggcaggttgttctccaccacctcacgaccccgataggccatgatgtcttggggcatcagcatccggctgttgaggaactcttcacgaggaggcttgatggcagaaaccatctctgcttcactggccttaataaacttccggcaagtgtccacaacatgctccatctgcaggtacatagccgtggccatcacagccatgatgttgccctcccgcaaattgagccgagatgtgtacatgaagtccaggaggatgcagaatccctcagggttgatctcaggatctagattgatcacactaaggttgcatttcaactggtctgtaaagatgctatagaacaggccactgcaggccatgaggaccgttttatgggctctaaactgctcacggctcacaacaatgacaacatcagtcaagatgtctctactccggagacgattaaggttgagaagaacatcactggcatggcgggtgaactggatacagctgtcagccggcgaggccattttgtcttcaccaatgccttgcttcacagtccaaaattttgctcaaaacctggtgtccggcctttcctagaaacttcttgcatcaccacttctaagaaccccagtctccctgtgcataa

SEQ ID NO: 435530 - DNA, 175 bp, Homo Sapiens
tgactcttgaggatcccctgtgcagtcagatttctgttagtccacagagcccccagaaatctgactgtcagcccaactcgcccacagagtcctgcagcagtaagaatgcctgcatcctccagtgcttctggctcccctccagccaagagccccactggctccaaagcctgttagg

SEQ ID NO: 435531 - DNA, 1738 bp, Homo Sapiens
tttatggttctaacttttattattaggtcagaacgaatgaagtggcagcaaaagggtctctcctatgatctgtctttcactggtcctcagggcaaggaggaaacttgggcaggagatgattgctcaatcccagcagactctcagaatctcacttggacccgaaagtgcatctgcttggtggcattgttcttcattcctgtcttcagcatccattttgatttcatcctttggacatactgcatgtctcgctctcgcataagagccgctcctgtgctgccagtccatcccagggctctgtactgctgaagtactcggcccacggccttccgatttttggcaactgccacagctcttgacaagccaaatcgctgtttgtagtatctcatcaaggagcgatgacccactctggcaccagaaggcagaatcaattccatggtttcatcatcatattccaagttcttttctgagggcaactcctcagccttattggggtcctccccttccttgtgatctggatagctactcctaaaatcatagaagtctgcaaattccaaagcagcatcgccatctgtgaagagcttacagtggcttttgtcattcatatgtgcctgtacagcttctgtggagtagaaggacttccctttctcgttgcaccacaagcaaatcttgccaacaccaactttctctcccaagtatttaatcagtcccttaatatctgaaagatattctatatcaggaataaagaaactgtggtctttggtcatgtgagccacattcttcatcagcgagctggaatgatgggaacaaaataagcagtccgtgatagggatggcaccaaggggtgggccttcctcagcctcttcctcctctgcatcctgctccaccacatcgtccattgcttcagtatcctcacattccaattcttcatcagaatcaatatcttcccaatcgtctccatccaggtcctcttcctcctcctcgctgtcctcctcctgctgctttgccaacttcttcgcctgctgttcaaaccactggagccggggtggtttctcactcgggtctcggtcgtgggtcccacggccaccagtacccacggccacgacattcctggcctcctttgcaggcgctgggggcgccttcttgggagacatggacggctgggccttgatggcctgctggatggccgcgttcatggcatccttgtccacactgtccacgcccagtcctttctccaagttcttttcattcatcatctccactttccgattcactgcctgcacggccttcttctccagctcaacgtgacgccgggacttgaggtggttctcgtaggcgttgaaagaggcaaacttcttactgcaaacggtgcagtaggtggccgagcccttgctctcctcctccgcgacggcccgctgcgcccgcactcgctcctggaagccctcggcggtcactggggccatgctggccaccttccgccgcaggttgtagcggtgccagtccgtcttatagtgggcccgctgcatgtccgcgtcgcggaacgccacccggcaagttatgcaggtgtacgtcgccattgccaggcgagaaataagaaccgaccaagccaaacacctggtgatcagcgccgtggccccacaagaccctcagaccttaacccgcctcagcagccaggaagagccactcgacacgccgacttcctgatcctcgtgccgaattcgccacccaggcctcgctactt

SEQ ID NO: 435532 - DNA, 1004 bp, Homo Sapiens
  misc_feature (52)..(88): n is a, c, g, or t
  misc_feature (253)..(253): n is a, c, g, or t
  misc_feature (943)..(943): n is a, c, g, or t
cgatgtatagactcactatagggcgaactggagctctacgcggtggcggcgnnnnnnnnnnnnnnnnnnnnnnnnnnnnnnnnnnnnnatcaggccaaatcggccgagctcgaattcgtcgagagcgggggagaccgtcccggatggcctcggggactgccagtgtgtggaggtgagctccgggattgccggcattcccgcttctgctggttgcttcatgctgcaggctgcggccgtcagccctcgctcgcantggtggcgctgaggtgccggggcagcaagtgacatgtcgtcgggcctccgcgccgctgacttcccccgctggaagcgccacatctcggagcaactgaggcgccgggaccggctgcagagacaggcgttcgaggagatcatcctgcagtataacaaattgctggaaaagtcagatcttcattcagtgttggcccagaaactacaggctgaaaagcatgacataccaaacaggcacgagataaggaggcggcaagcccggctgcagaaagagcttgcagaagcagcaaaggaacctctaccagtcgaacaggatgatgacattgaggtcattgtggatgaaacttctgatcacacagaagagacctctcctgtgcgagccatcagcagagcagccactaagcgactctcgcagcctgctggaggccttctggattctatcactaatatcttcggtctgtccgagtctccccttttgggacatcattcttcttctgatgctgccaggagacgctctgtctcttccttcccagtcccccaggacaatgtggatgctcatcctggttctggtaaagaagtgagggtaccagctactgccttgtgtgtcttcgatgcacatgatggggaagtcaacgctgtgcagttcagtccaggttcccggttactggccactggaggcatggaccgcaggttnaagctttgggaagtatttggagaaaaatgtgagttcaagggttccctatctggcagtaatg

SEQ ID NO: 435533 - DNA, 989 bp, Homo Sapiens
attatagattccagaagcgctccagcagtttgttgtgtcaaaaggttcctccacaatgcccccaatggcatcatcctgttcgactggtagagggtcctttggtggctcttgcgagctctttctgcaaccaggcattcccgcctcctggagtctttttcattctctggcattaagccggttggcttcctgggctttctcagccatccatctggtgaccagctcctggttctcttccgtagttttcctcagttttccctccaaggcagtaaaagtgatctgcagggcatcatattcatccttcagggtctggttggctctttcaaggtcacaaagcttagtgcgcaggtctaggcactccgtctccaggtcagagatagtctgcaaacattctgcaatttttgcttcattcatctgcatctccctgtccttccgctgcatttggttattcaggtcaatcaccagttgagctaactccccacgtttcttgtgtaattcagtcagttcctcttggtgcttaatcctcagttgggccatttcttgtagctgattgtcattccatgtgccatcatgtccgggacttatctcgtgcctgtttggtacgtcatgcttttcagcctgtagtttctgggccaacactgaatgaagatctgacttttccagcaatttgttatactgcaggatgatctcctcgaacgcctgtctctgcagccggtcccggcgcctcagttgctccgagatgtggcgcttccagcgggggaagtcagcggcgcggaggcccgacgacatgtcacttgctgccccggcacctcagcgccaccaatgcgagcgagggctgacggccgcagcctgcagcatgaagcaaccagcagaagcgggaatgccggcaatcccggagctcacctccacacactggccgtccccgaggccatccgggacggtcttccggctcatgccggaaatgattttcgagagggccggaagacccgccc

SEQ ID NO: 435534 - DNA, 624 bp, Homo Sapiens
  misc_feature (42)..(42): n is a, c, g, or t
  misc_feature (339)..(339): n is a, c, g, or t
  misc_feature (535)..(535): n is a, c, g, or t
aaaaaacaaaacgagaatgtttcaactggttgaaatgctggnaaaagaaacccaaacccttggcaatcggggaaaaacagaactggggaaatggccttcagttggtccctcagcttctcctcaatgaaacttgaaaagacctttcccaacttcaagagggaactgttgggtgaagttctggcacgtaggcagccccggcctgcttcttgtgcaaagacacaaccacaaagtactcgaagagctgcctctcctggtactcgatgagttcccgggcaagtgatgggtaccgaggcgcctgcttcagccgggacttcacgttgaccaggcgctggctgtgantttcagcttctcctctgtgtcactgtcagactcactgttctcatctgtcacttttcctgagttgctctccattgactgggacagcctcttcacccgtttctttcctctccggacctcataaatggcgttgattcgcaacaccagcttgggtatctttctcttcttcctgccgttctgtgggtctccaaggttaaanaaaatgtcatcagggctgctgggagtggagggagggctgattttggaaggggacccagttccatcccgactcagcttcctagtgtccag

SEQ ID NO: 435535 - DNA, 1801 bp, Homo Sapiens
  misc_feature (464)..(464): n is a, c, g, or t
  misc_feature (718)..(764): n is a, c, g, or t
cagagaggcacacagaaccagtttatttctcatgaatttataggaccacagtcagcacagagcaaatggtacaagtgcagatggctggggtgagggcgggggcctctgctgctgccttctcttctctccagctgcctgagtactggcacacagcgggcagtgaatctgaggagctgtggcctcacagtcgctgcaggctgagccagaaaggagggccaggggaggtaagactcactcctgcaggagcgggttggtgatgaagggctgggggaactcgggtctctctgggatgaagtcacccctccttcctggccggtccccagcccctccccacctggccagctagctgggttcctgcagcagcggaatagtcagggagttcccagcagaagtgctgaatgagggaaagggaatgccgccaaaggaaaccgactctgtcagggcatctgcacagcccgcgagantcaaatgagacccattgagacccaggtcccccttcccttccctggcagttctgattctgctcccactgcctgggattccaccaagaaggctaaagctgctctttctctttatttgtgaaaagcaagccatcttggggcaggaaagcagtgaagggactgggcaggcaggacagaaggcgctggaagctcagccatctcacccccgccttggcctgcactcacctgaagaagcaggacagacagaagagccccannnnnnnnnnnnnnnnnnnnnnnnnnnnnnnnnnnnnnnnnnnnnnnaaaacactcatcgcggggtcagagggagtgccaaaaaaggtaaaaagaaacgcaagaaagaggctactggggatgaggggacacccagaagccccttcctggaggaaaagccactccttctgcagctggactctaggatactgagacccagccctgccccatcacctctccagtgtggccaaggggacaaggaccaagatgcagggaagcttggggagcctgggctacaacagatacaggccaacagacagacacagatggatgggggctgccgggcggggtcgcctcttactcgccatcccagcctcgactcatggcctgcactacggccccgtagagttggctccaggcagcccgtgtggctggtgtgaaggcagggcccagacacttctccagcatgtagagcagagactcacccactgtcgagaaggagctgagcttcacacccactgcccggtgcttcctgcccaggctggcaaggtactcctccagtgaggacaggtcttccacattggtcactgcagcatcaatcacgagcatcaccttcctgatgtggtccaggaactcaggcgaggagagacagtcctctgggctggagaactggcggcagttgtactggaagaggggcagcaggtcaggctccagggcaaacagcctggcaaacaggacggtgccgtgctccagcgggctgcggctcactgcccgccagctctgccggatcagctcgggctccgggcgctccatgctgtcccggggacgcggagcgcggggctgggaccctcagggctcgggtgccgtcaccgcacgtgccgcgccatctcctccgcgacgcggtcccctccgcccctcgtacgccccccgtgcctccgcccggcgggggccgcagccgctccttccctggcgcgggagagaaaaggcgcgcggccagtcgtaggtggagacaccccagctgtgcttccggggaccccgcttggccgtgcgccctgcgccccgcagccgccagagccgccccaccccgcgacgcctgggctgggcgc

SEQ ID NO: 435536 - DNA, 880 bp, Homo Sapiens
  misc_feature (609)..(646): n is a, c, g, or t
tcccagcggccacctttcctccctgccccattgggacagtcgagactggatctgtggggtttcccgggagggtggctcagggctggaacactctcaggcaagagtggtggagctcccgtcaggccctccgccaggcccactgtgggcttctcccctctcctccctccttcccctccaagcaaaccaccagaggtggccttcccctgacctcaggcccctgggctggaggcctgggcggtggggcagggggcgggggtgctgcgcagccctgcagtgggtggggctgggggctgctccggggctgctgaggctggagggccggcacaaggctccgcctccctccacactgtaccctctgcccctcctccccagagctgggcatttccttccacaagctgctgtggggacgtgtgttccctcaaagtctgtgccatcttctcccacccctcccgggtagaaggaggggctgacccccaggctggcaaaggtgaggtgactgaactgtcgtcctgttctcaccggttccccgcttctcctttttgccttactctctccacaccatgtcgcactgcatcctccttcccgctacaaccctttccactaatcatnnnnnnnnnnnnnnnnnnnnnnnnnnnnnnnnnnnnnntcactcgtactttctcctccatatttattttctccccactactttctaattcgctcgaaccccctttcaccattactcccatcactaattctttattccacactacaccgactcaatccctactatccagctctccctccccattccctacccttgcttaccctccctccggtatcctcccattcctgctcttctaccccaaattctcatcctcatccacgtcttcccttataa

SEQ ID NO: 435537 - DNA, 1923 bp, Homo Sapiens
taaaaaaaaggggggttttccacaccccttgtggggggaattttcccccccacctcctcttggtgtaaagaaaaccttggggtgtgccagggggaaaccccccttgaaaattggacaatgtatcttgccaccaagggtaaggaaggcgcttggccctttcgttagggggcgtgatggatgcccaatcttggtccgggcttgggcgcctgcccctacagcaaactttggtggtgatcttctcccacgttcgcagcctcggtcctgtttcaggtaggaggtgcccgaagctggcaatctcctctttggccctgggtcacgtagaagaacatcggtttatcgggttggggccactggaagtcaaatcccttcttcacacgatccgctgcagtgacaccattctggagggagccctcgtagaagatgttggatgggaaggcgctgagtgcagggtgcatccggtactggacctgcaggcggatgggccggatgcccagcaccaccaggcgctcgaagagcgactgtgacagcccggccttggccgccttcttgcacatcaccactgggcccagctggcagtggtcgcctacaaggatcagctgcttggccccgaggaccacgggaaccatgcactccggctcggtggcctgggtgctttcgtcgattaaaatggagcggaactgcatcttggccagcctcgggtcaccggcgcccacacatgtgcagcagatgacatctgcgttcatcagcagctctctctctgcggtgcgcttcaaggcccggtaccgcttctcgtcggcagacgacagctccccagtctcgtctttcagctgctgcagcttctgcagctcaggcattgctgtccatgttcctgatctggttgtgcagggccagaaaagacaccggggagtcgatgtcctcacggctcttggcgcagaggcgcacgacctttagccccgtctggtggatcttctccgttagctggtccacggcgatgttgctcggagcacacaccatgcaccggcccgttgccttgccgggccaggtggtagacgatggtggccgacgtcaccgtcttccccgtgcctggcgggccctggatcaggctcagtggtctttgcagcacagtcttcacggcataaacctgggagtggttgaggtcggggaggccctgcgccgtgaagcgcttgggcagctggcacttgatgattacgtcctccacctcgtggcccaacagcttgtgttagatgttcgccagagcactcgaggtctcatccacggcagacgtgtttcaatgcgctctgcatcctgtcaaaggaggtcgacttcgcacacagaatccacctggaagttgtgagtcacctcccacaggtgcacgcacggtgctccgcagctcaatggcgatctcatcgccataattatcagggaccgttgatgacgtggccgatccctttccacaggggcgcaaggtccccttttgtaccgcaggcatatctcatccccctgcatgagccgcatgtcagagtcagtcttgggcaaagtgaagtaggcgattctcttcttgttaaggcccaggtccccacctgacagtgatgttatcttgagtctgggactccttcagcttcattgtcagtagtcggccatccagcttgaccaggggcccgaatatgttctggtactggtaggcgtccttcgtacacgcaggagggacatgctgtcggctcctgcgtccacccccggcttctccaggtcctccagcgtggcagaagggttttccttccacagctccatccagcttgttgatctgctgtgccgtgatctggcagtgccacagcagctgctcactgctcggaggggatccttgaccagccaggacaggaacagcggtcctagatcagagcagacgcgtggtcgacgatatcccga

SEQ ID NO: 435538 - DNA, 407 bp, Homo Sapiens
  misc_feature (236)..(236): n is a, c, g, or t
cccttggtgctcgtaggcccttccttccagccctacagcaggactcatgctgggatgggcatgacacccaggtctgatcaatgagaagcaatggtaaatctgccaggggacttccttttctaaccaaaaccaacagactcttctgaaaaaaaaccttttatgactgctcctttcccaattctaccttctttgaaaaaaaatatgatgtccagcacaggggcaagccattttgtganccatgaggtttccaagcacagggtcagatggccaacatgcagaggatggtgaaaagaaaaggcaaaaagaagctgggttcttgataacattgttgagcgttgaaccttctctgatctctgcctggttttggttctaatggtttaagccactattgactgagattactgttc

SEQ ID NO: 435539 - DNA, 2034 bp, Homo Sapiens
  misc_feature (1951)..(1987): n is a, c, g, or t
tttgagaatgaagcggcccccaggccaaggctttatttcatgctgggaccagaaagacctcacaaacgccttcactgttcaccggatggacgtccacccccacctcctcccacgctctgatcccgatcctgcagagcaaagacctagaaaccaggatcactttctgaacataaaaatccgcggctccctgaagggcccagaccccggcctggctcagcctctcggtcagaacctctgctccttcatctgtgcaggtctcgggctgcctgccggagagccccaggctggcctttcgggtgaggctggggtcagagctcagggaggccgaggcttcctcttgttttccgtggccgactgtcatcccacttcgaaacacgcagaggggaaggcagcccgagggctctttctcccaggaagtttctgggcagctgccgccgggcgccaggacaagcgagggtggcctgagtcctgtgctcacatggcgtatgccgcccagtagatgacattgacggccgcaaacgccgcagggaacacagcgcgggcgtaaatgtcaatggtgtctgcgtcgatgggcctgagccgggcacggatgcccccctggcctcctgagcgggctgccccctccttcttcgtctcccctgtctccacccccaccgacctgtaggagcccatcaggttccccgggatcgcggcgctgccggcgggagatggccacgctcctgcgtgcacgccggcacgcagagagggagcaagaggacaaatggcgttcctcacgtccatctctgccctcggcctggagaccttgaccttggccttctagcttcttcctgtagatcggcgttgaaatgagcaaaggcgtactccaccagggcggcaaacacgaagacatagcagatccagaagtagacgtccagtgccttgatggctgatgcccgtggcagggaggagcgggcactgaccatgagcgtggtcatcgtcagcaccgtggtgatgcctagagacaccctggcgggcaccgccgcctggctgatccagaaggagacccaggacatggcgaccagcaggacggagggcatgtaggattggatgatgtacacgccgcggttcctccgcaggtggaagtgcaggctgagccgtgggaactggccagcggacttgaagttcatcagctccgtggtgaagcggtagctggtgatggtgaactgcgccagctgcagcttgtccagcccgtggatgtgctcctggctctccgaccagtagtagacgatgtcctccgatgagtaaccgtagctctccaggtccagcatgcactcctgctcgtccatggggtatttggccaggtccatgtcgcaggccacagtggaggtgattcggatgctgtacaggatcacgccgtcgggctgcagccggatgagcttgttctccaccgtcacgtcgtggaaccaggccgacttggcgttcacgatgaaggtgtcgggcagccacagcttgtccacgaagcggctgtccagagcccagggtctcgttggtgtggttgtaggagagcctgctgtcccgccagctctggtgcaggaacaccgtcatggtgtactccatgttggcctctgagatgtggtcgatgctggccacctccagggcaagggccacattcacgggggggcctccgatgccaggccggaagttgcgggcgtagccggctatcagcccgtccaggttggggagccaggagatctccaggttggagcccacgtagtcgccgatgtcattcatcgctctggtgccgcggagctgctgcgcgcagaggagcaggagcggggccagcagccgggcgggcgcgtccatggccgcggcgggctcgggacggggtccgcgcaaacttggctcccggcggccgcacaggcggcacagccccgctctcgacgaattcgagctcggccgatttggcctgatnnnnnnnnnnnnnnnnnnnnnnnnnnnnnnnnnnnnncgccgccccgcggtgaactccagtcccctatagataacccacgttcc

SEQ ID NO: 435540 - DNA, 828 bp, Homo Sapiens
gggggcctttgggaacccctgtccggaaggcggtatgaatgttcttaacgaaggggttttcttggttttaagagaccccgggacaccagctggaagccgttagtgggggaggaggggttgcctgctggctgtaattggtgtttaaatttcctgtttcctgcgtaggggctttccacaaatgcatttttcagccgggttggtgtgttcagcttttagagcttttttctggttggagggtcatacactgctcacatagaatcttaccattcttttcttgcttccagtgaggggtgaaatctgtgcggcactgggcacatacaaagggttcaacccgcagaagtgaggcacagcttttgccttggctgtcaatgacactctgtacgacttcttccaagcctaccatgtagatgaactcgctattggctgcactaggcaagaaatgaagtaagggagcaggaggtttagggggtgggatctccaggagtgtcttttccagctgtttgcgaagagccaatttggctgcagcctgtgagttggcagcatcagtcatggcgctggggctaggaagtggcgaggacactctgttcaccgtccctggctggatatgagaagcaaggttcatatagatggcagaggatgttgtacgctgacatggaacagaagaacttgactgcggttgataattgatggcgggattcatgttgggtgttgtggtgcgtacaaggccaggcttaggcgggccccgcttgaccctgtagctgggctgggtttggtgcaataacacgttgagacatcaacatgtgtggaagggtggtattggtagctgcc

SEQ ID NO: 435541 - DNA, 2249 bp, Homo Sapiens
  misc_feature (2061)..(2117): n is a, c, g, or t
  misc_feature (2119)..(2119): n is a, c, g, or t
  misc_feature (2126)..(2126): n is a, c, g, or t
  misc_feature (2133)..(2133): n is a, c, g, or t
  misc_feature (2139)..(2140): n is a, c, g, or t
  misc_feature (2145)..(2146): n is a, c, g, or t
  misc_feature (2152)..(2152): n is a, c, g, or t
  misc_feature (2155)..(2156): n is a, c, g, or t
  misc_feature (2161)..(2161): n is a, c, g, or t
  misc_feature (2165)..(2165): n is a, c, g, or t
  misc_feature (2168)..(2168): n is a, c, g, or t
  misc_feature (2173)..(2174): n is a, c, g, or t
  misc_feature (2176)..(2179): n is a, c, g, or t
  misc_feature (2181)..(2182): n is a, c, g, or t
  misc_feature (2184)..(2185): n is a, c, g, or t
  misc_feature (2187)..(2187): n is a, c, g, or t
  misc_feature (2191)..(2192): n is a, c, g, or t
  misc_feature (2217)..(2220): n is a, c, g, or t
caagttgctttttccctttttattaaaaatagactcaagcactttatgtatcatacaaaagtttcattcgctggtggcagccacgggaaagactggccccgtagcactgattttccacctcccctccaggggactgggtcccaggagcagtgactgggcctcagagaaagcccataaagactgcttactctggaagcagccgactaggggctgttccgcgagcagctgtccccaccccacccaatggcaaaagttagatactcgaaagtgcctcttcagtgccaagataaactaacaagtggagtgaaatggaaaaccctttgattattttactatttcccagggcctgggatttgagttttccctgcactcaagtccttttccctacaaataggggtaggaaacttcatcctcagagactctggtctcctggtgtctgagaccagaatttcactccaaacccaagtcttttctcatctgctgttctgtggtccatgatctacttgccctgtgacccaaggtttgtcctctgttcactcaaaaagaggtggagcaaaaacggattcctcccacaatcctctctgcctgagtctatgccctgccatcgcttccatgttcaggatcttgggaacagaaagacccacaaccatccctttcccccagttctgtctctccctgactgctgcccactcctgagccttaacacccctggggtacccccagacccctgttctaaagggtgcctggtagtggatatggtggaggcacgggaggggttggttggagccaggtttcccccaggggtggggcagtactcatgctggtatagactgcttggcagggccgtgggggagggaggggcatgcggaggaagggcacaccctgcctgatcccctcagtcccagccgttgtccttcaccatgtgtgacatttcaatgatgtatttcccttccttgtacttctggctcgtctcaaaagcttgctcctggtgaaggagaaagcagtgattgtaggacaaagcagtttccttccaggccccactgtcacctgtatggcccccaccccaagggtcatccacctagcccaacccagtgactagttctttctttcctctttggaccatgcaaggaaggacctgacatggtcactggtgcttgaagggccatggggactgccactttagagggtgaccctcttcctcaggtacttacatatttccagcccagtgtggttttgcagctctcacagaaaatgtcagctaccgagtggagccccgtgagcaagaggcgctgttcagctggcccgcaacccacgttgaccctgtctcaggaaacaggaaggacccagcacccagtggggttgcactgtcagtccagtccccagagagcccaagggaacttccatctggagagaactggacagcccctgcctttgataatccacccctttaagactagagcctgggccttctttttccaccgttatgatttcaattctcccccggctccccatgtgagaacttcagattgagaccctctttgcaaaaggggaggcaaagactgaaggcacaagatcacctgatggattcccccctttctccacagaggaaaattactcactcacacacaagcacaagcacacgcacaaggaaagaggtagactcacacggagttaaacaggtaggctcggccatggctcccttggaaggacttggaaataagctcatcgtgtttggccaggtgtgcacggcagtggacacagctgtaagtgcggtgacagcggggcagatagctgcggaaagtcttggtggggaggcaggcagggcccggaccggggtcacagctgggcatgacgggctggaggacaatgccctggtgggctggaggggctggcgccgtgcagcccccgcagagacggtcgcaggtgaagcagcggagcaggttggctagagccgtgtttcagggcaggagaagtgttggggggctgcccggccagggcccccccagacgagaaccagatagaaatagaagtcaccttgaggtctgctccagagatctccgnnnnnnnnnnnnnnnnnnnnnnnnnnnnnnnnnnnnnnnnnnnnnnnnnnnnnnnnntntttccgntcctttnattggnnagggnntggggntgnntgggncgtngtntgttnngnnnntnngnntngggnngcaaagctggccagctgctgggggnnnngaggttgtctctcgttctgtacctcggtc

SEQ ID NO: 435542 - DNA, 963 bp, Homo Sapiens
ttcactcaaaaagaggtggagcaataacggattcctcccacaatcctctctgcctgaggtctatgccctgccatcgcttccatgttcaggatcttgggaacagaaagacctcactaccatccctgtcccccagttctgtcttctccctgactgctgcccactcctgagccttaacacccctgggtacccccagaccctgttctaaagggtgcctggtagtggatatggtggaggcaggggtagggtttgcttggagccaggtttcccccaggggtggggcagtactcatgctggtatagactgcttggcagggccttggggaggtgaggggcatccggaggaagggcacaccctgcctgagcccctcagtcccagccgttgtccttcaccatgtgtgacatttcaatgatgtatttcccttccttgtacttctggctcgtctcaaaagcttgctcatatttccagcccagtgtggttttgcagctctcacagaaaatgtcagctaccgagtggagccccgtgagcaagaggcgctgttcagctggcccgcaacccacgttgaccacggagttaaacaggtaggctcggccatggctcccttggaaggacttggaaataagctcatcgtgtttggccaggtgtgcacggcagtggacacagctgtaagtgcggtgacagcggggcagatagctgcggaaagtcttggtggggaggcaggcagggcccggaccggggtcacagctgggcatgacgggctggaggacaatgccctggtgggctggaggggctggcgccgtgcagcccccgcagagacggtcgcaggtgaagcagcggagcaggttggctagagccgtgtttcagggcaggagaagtgttggggggctgcccggccagggcccccccagacgagaaccagatagaaatagaagtcaccttgaggtctgctccagagatctccgtcta

SEQ ID NO: 435543 - DNA, 1096 bp, Homo Sapiens; identical to SEQ ID NO: 151537
  misc_feature (205)..(205): n is a, c, g, or t
  misc_feature (895)..(951): n is a, c, g, or t
  misc_feature (966)..(1007): n is a, c, g, or t

SEQ ID NO: 435544 - DNA, 700 bp, Homo Sapiens
ccccccgttagggttttcaatttttcccccggggttccccagtggggggaacttcaggattgagcccttctttgcaaaaggggaggcaaagactgaaggcacaagatcacttgagggattcccccctttctccacagaggaaaattactcactcacacacaagcacaagcacacgcacaaggaaagaggtagactcacacggagttaaacaggtaggctcggccatggctcccttggaaggacttggaaataagctccatcgtgtttggccaggtgtgcacggccagtggacacagctgtaaagtgcggtgacagcggggcagatagctgcggaaagtcttggtggggaggcaggcagggcccggaccggggtcacagctgggcatgacgggctggaggacaaatccctggtgggctgggagggtggcgccgtgcagcccccgcagagacggtcgcaggtgaagcagcggagcaggttggctagagccgtgtttcagggcaggagaagtgttggggggctgcccgccagggcccccccagacgagaaccagatagaaatagaagtcacctggcagccgatccaggcttctggcgccaaagccagggagtcggtgtttctccctcctggggcagaagcagcctccaccattttccacagagagaagcccacgggatcccgggaattccggaccggtaccag

SEQ ID NO: 435545 - DNA, 990 bp, Homo Sapiens
  misc_feature (6)..(6): n is a, c, g, or t
  misc_feature (8)..(8): n is a, c, g, or t
  misc_feature (17)..(17): n is a, c, g, or t
  misc_feature (25)..(25): n is a, c, g, or t
  misc_feature (73)..(73): n is a, c, g, or t
  misc_feature (227)..(227): n is a, c, g, or t
  misc_feature (230)..(231): n is a, c, g, or t
  misc_feature (233)..(234): n is a, c, g, or t
  misc_feature (976)..(976): n is a, c, g, or t
cagctntntgcacgtcntctgtgangttccggatgctctgtgcacccacaccttgtgctggtctagtttcttnctcccgctgctgcagctcctcgatctctgccttgagctcaatcagtttgtcagcaatctcccgggtattgcagccaggcccccacacccctgagcccagggagtggggctgagagggactgctgagaactctgggtcccatggcccctgccttnttnntnnccctccaccccacgccccgacaccttctcgggtgggagactctactacccttcccactatgccccacttcaacttcgcactggatgctgttcttggactgttgttctcgattagcccgataccgttccaaaacattggtaatgtcgtaaatccgccgcttctggcgtacagctagggtgtcagctgcctggcagagagaatggagaatgctcagccccactctggggtgtacccccagccaccctgagacgtggtctgggaagggagtaatctggattccaaccctgtagtgcctcccaggcgctactgcagctcaggaccgcagctctgtcccataggcagctcttctcctcgccagccaggaagggccacgatgacgaacacctgcagcccgagcctggcccatagctgtagctcgatggcctcggccgaatgaatgaaacatcccccggcttctctcctgtgagaaagcacacgatggcggccggctctcggaggacccagctgggccgcccccggggttcccgctaccggcccaggcctggtccaccagcctcccttgtctccccttagcccaggccgcaccagcttgaggtcaagcacgccgtccttggcctcctgcagaagggacacgaacttggtggtgagcagtcccaggctcttttcgtgccggcttggagtgcccgggggcggcggcgcctgtggcccggcctccgccatcgcgcccgcccgccgcctcccntcagccaggccagg

SEQ ID NO: 435546 - DNA, 1200 bp, Homo Sapiens
  misc_feature (75)..(75): n is a, c, g, or t
  misc_feature (97)..(97): n is a, c, g, or t
  misc_feature (169)..(225): n is a, c, g, or t
ttctgaaggaacatcaaactccctcccaacaagctcccgaacctccatgcactcctcgtgtgggatccaaaaganttctgaacagctctttgggganttcccaaaacacctgtggggtctgccttgaatgggctccaaaggaggtaagaagggttgggtccggacgaannnnnnnnnnnnnnnnnnnnnnnnnnnnnnnnnnnnnnnnnnnnnnnnnnnnnnnnntccagcagggcagaagactgcagtggccgggtgtccagtgttgttgggcccagtgggagtgaactgagctcaccactgtccttgctatcagtcccagggccgccactcactgtgatctcagctgctgggccagccatttccctggacttctgcactgccagggacagcagtgggagtgagctgaggactatttggacgtgaggcttcctgggactgggctagggcaggcttgggcagaggtggaggtgtagaaacagcagatgggctctggagcaaatcttcaggtggtggcacaggcacagccacagggggtgagctccatgcctccttgttcaccagcagaacctcaatgggaccactcacactcttcaggtgaatctggtacttcttctgcccattgagaccctctgggatgggcacctccaggctggtgcctgatggggcccggatggccaagagggtatctccagcaaagcatctgcagatgtcctcatgagtgacgtaggccaaacagctgttctgcacgtcctctgtgacgttccggatgctctgctgcacccacaccttgtgctggtctagttcttgctcccgctgctgcagctcctcgatctctgccttgagctcaatcagtttgtcagcaatctcccgggtattgcagccaggccccacacccttccactggatgctgttcttggactttttctcgattagcccgataccttccaaaacattggtaatgtcgtaaatccgccgcttctggcgtacagctagggtgtcagctgccagcttgaggtcaagcacgccgtccttggcctcctgcagaagggacacgaacttggtggtgagcagtcccaggctcttttcgtgccggcttggagtgcccgggggcggcggcgcctgtggcccggcctccgccatcgcgcccgcccgccgcctcccctcagccaggatcccgggaattccggaccggtacca

SEQ ID NO: 435547 - DNA, 3203 bp, Homo Sapiens
  misc_feature (69)..(69): n is a, c, g, or t
  misc_feature (168)..(168): n is a, c, g, or t
  misc_feature (1467)..(1467): n is a, c, g, or t
  misc_feature (1498)..(1498): n is a, c, g, or t
  misc_feature (1507)..(1507): n is a, c, g, or t
  misc_feature (1705)..(1705): n is a, c, g, or t
  misc_feature (2157)..(2157): n is a, c, g, or t
  misc_feature (2193)..(2193): n is a, c, g, or t
ctgctgccctagaactagcggttagaagaatccgctgttcctccctcatctcctctgcctgtgtctgcnacccccatccatgtgccaaagtgtcccttgggtcacacagctaaagccgaggtgaccagttgtaccccgagtgccaggcttgtgagatgagaccaaganggaggaggggaaggactccatgggccatcgtgggccaagggctggcgagggtgggggcgggcaagggatgcaggcaggacagccatgaggtggggctgcagccggcacacccagtggtggagggccggcgctgccactcacggtgggtggccgtgggccacttccctgcaatgggtgcacacgcggctcccatccagccctctcagcgtggggctgtggctggtcctcactattccccagtctcccgctgtggggcaggaacaggaagtgacgggaaccttgaggaggaaacgcctgttttagggagagagtgggtgcggtgtagaggatgctcttggtcggctggagctagacctggctcccaccagagggacgtgtgtgtgcctgcagacgggccgggagctgtgtgtctccgccagagtcacagcagtgccgaggtgtccgcggcagaccacacagaccgtctgaaatgcgcccgcctggcggacagctcccttctgaagcagagaagcctccatggtcacgaagcagcgttgtgctgtgtgtccctcgcaagaagcacaggaaagagaagtttctttagtagccactagacaaccaccctttctgaaagcaaacagtgctgctctttattccagacaaggcaggaaagtctgagttgggagtgacagtggctggagagaagcagatctgtgcaacgtgcagggcaagccagtggcgtggcctctgcctctaagcgctgagcattgggccccttccccaccagacctttgtagctcctccagcctctgcagagactcccttcacctcgcacttactgcctgggaaccacggcccttctcttctgtgggtctgtaccaggtactccaggccagcccatgggcccggggcctgaccccaacacctgcatgctgggtccagagccttctgtttcaccgtgcgtggacactgctaggccgcctggggtcccctgcctcctgcctgtcgctgccgtggtccctgactgcgaaataggcccgcggggctctccctcctcctgccatcctcccctcccgcccttcctggctacctcctctgacatgcggtcagataagtcccgtcttgtttgtgagtaccacagaaacgcctgagagtcacttacccggccactgcttggaaggtttccctccggggaatgcctccctggaatgttccagagacggaacattctctagagacaacagtctgtgctgcagattggttggatcacagaatgtgtgtctggggcattatctgaaacgtggtgtcatctgatgcatntggaccatatgctgccagactgcagaacggnggagccggngctcagggcccctgactgcatggtgcatgagtgatctcagcctagcgatgccgctggccagaccgtgaccatgctgccagtgtgctcgccatgagctgggtcagggctggggagttgtgcaggctggggtgacccttcccccatcattgggccccaacgggcatgtctccaccgaatccatttagagaaatgtcagancgaggggtgtgtggacacccctcgctctgatgccaactgcagataatacacacctcctgcagcgtccagccacggctccagggcactgctctcctccttgcaccggtgaaactcaggccacactcaagggctgactgtccaggcgctcccttcagccgcctcgtcgtcagcgttcttagtcatgcattattcgtgttagctgaaatgcattcagactttgttctgcggtgcccacaggacttacccctgtatgtacaggatttttgtatgaaagttttgtttgattctgagactctcttgggaacgctggagagcttgtgcacagcctctggaaggaaaggcagcgctgacttcgttgggcttttttccaagcactttaacttcagaaatggtcttgacacttttttctccacatagactcttgaaatagccatttcaggggaggaaagggntggggttttctttgtttgtttgtttgtttccccccntactacctgttcttgtagatctagctcctcagagttggaggaaggctgacagagaaggtctcctctgtgctccatccacacaggatgccggagagacagccccttgtgctgtgagcagagcaggcagtggctctggaggctgcctgtggtctccttccggctgtggctgacagtggctctggccagggttgcttggagaaggctcagtgtgcctgggacagggcttaccacctgccaccaaggtttcctctcttcccccaggacctgggcagagcaggcatgagctgggctgtggtgcagagcaagcagacccagccacactgctcaaaggtccctgcgtggggaggtgtcacaccaggggcacacccagggccacctgggtgtaggagagctctggtggcccctccgtaaactcaggaagtgtcaggtgatttcctagggagaggttcccagtcccagcaggcagaatgcccaaaaccaggagcacgaaggcctgtcatccatggggccattgcaggcactctgccgcccgaccttgagggctgtgccaatcctagtgaaccaaaatgcaaacaactcacacagagtgaaaagctccctgctttgaaaacaggacatgttgacaggcagcatggtatgtttttagcctttgttacagttttagcaacattgatgtctaagaggggccgtggtaatagattgcatctgccctgtgcatgcgcatgtttaaccacaggccagagaactcaattctgatgtcgtaagttctctgtaagtgaaatggggtagactgtatgattttcctattgccaaaagaaaagaagggggccaaacagctttgaaatttccaaaaatggctagaggagagtcagtttctgagcttgtacccaaataaaatcctgatggtcaggttaatccaagcacacgcatttgggtttaaaaccagcacggaggccagtggggggatcacagacatcaccaaggtttgggttttttttcttcctgtggag

SEQ ID NO: 435548 - DNA, 1122 bp, Homo Sapiens
  misc_feature (797)..(848): n is a, c, g, or t
  misc_feature (918)..(918): n is a, c, g, or t
  misc_feature (929)..(929): n is a, c, g, or t
  misc_feature (956)..(956): n is a, c, g, or t
  misc_feature (1014)..(1014): n is a, c, g, or t
  misc_feature (1025)..(1025): n is a, c, g, or t
  misc_feature (1033)..(1033): n is a, c, g, or t
  misc_feature (1037)..(1037): n is a, c, g, or t
  misc_feature (1041)..(1041): n is a, c, g, or t
  misc_feature (1045)..(1046): n is a, c, g, or t
  misc_feature (1050)..(1050): n is a, c, g, or t
  misc_feature (1060)..(1061): n is a, c, g, or t
  misc_feature (1067)..(1067): n is a, c, g, or t
  misc_feature (1075)..(1075): n is a, c, g, or t
  misc_feature (1078)..(1078): n is a, c, g, or t
  misc_feature (1080)..(1080): n is a, c, g, or t
  misc_feature (1090)..(1090): n is a, c, g, or t
  misc_feature (1097)..(1097): n is a, c, g, or t
  misc_feature (1099)..(1100): n is a, c, g, or t
  misc_feature (1110)..(1110): n is a, c, g, or t
ttttttttaaacaaaactttattggtaatagttttcaaatatgtttacaacagcacactgttcaagaggaagtctcgtccttcgcagcacacaggttgaatcgcccccgcacccacccggggccccaccccaggcctgagaactcctcctgggatggggagaagttatgagagggggaaatacggggatgaatggggtggctccccagcggctccccacttttctattacgagagaaaaaagcacaaatgagaaagtgggggagaggtgatggacagctgacagctaagctggaggaggggcgcccaggatgggggaggcggaagctggtgggtgagtaaaacaggcagcccctccccagcagctctagccttgaaccccgggccgtggcttggggggacttggcctcttctgttcccttttgcagggatgccctccccactcagctgagggaaggctggacgttaaaatctagcggagaataaaattaaggagttggggggaaacgctgctgggaggaaagacttgggcttggggctccccctctgtctttttgggggatgactcctctttggcagggagaggggcagctgctttgtctggctttcaaagcccaagggtgaagacaggtctgttggggaaaaagagagcggaggcttcctaaaggggcctagaccctcgcaggattggcagagaggattccccggggaggggcccaggggagattagcagcggggaggttcaaaccccagcgcctccctttccaaagtcagtctgcttctctttaaaatggatttnnnnnnnnnnnnnnnnnnnnnnnnnnnnnnnnnnnnnnnnnnnnnnnnnnnncactggtgggacttaaataagattttaaattgttgtttttttaaaaaaattctagcaagccacccactgnacatgtcactnaaaatctctccttcccaggcaggattnctccgaaaggaaggttgggcgcttcgttcatttgcccttagcaagtgggggctgttgntgggttggatnggggtgtnggtngggntggnntaancgtgaccccnnttttcntacctgtnctngntaaccaccanacttgtntnnttgggttganaatcgtttaaaa

SEQ ID NO: 435549 - DNA, 2579 bp, Homo Sapiens
  misc_feature (43)..(79): n is a, c, g, or t
  misc_feature (1217)..(1243): n is a, c, g, or t
  misc_feature (2257)..(2257): n is a, c, g, or t
  misc_feature (2365)..(2365): n is a, c, g, or t
  misc_feature (2479)..(2479): n is a, c, g, or t
  misc_feature (2481)..(2481): n is a, c, g, or t
  misc_feature (2494)..(2494): n is a, c, g, or t
  misc_feature (2506)..(2506): n is a, c, g, or t
  misc_feature (2510)..(2510): n is a, c, g, or t
  misc_feature (2521)..(2521): n is a, c, g, or t
  misc_feature (2529)..(2529): n is a, c, g, or t
  misc_feature (2531)..(2532): n is a, c, g, or t
  misc_feature (2547)..(2547): n is a, c, g, or t
  misc_feature (2569)..(2569): n is a, c, g, or t
  misc_feature (2575)..(2575): n is a, c, g, or t
tgataactcactatgggcgactggcttatcgcggtggcggcgnnnnnnnnnnnnnnnnnnnnnnnnnnnnnnnnnnnnnatcaggccaaatcggccgagctcgaattcgtcgagagcggcctgccgccgccaccgccatgggcaacgcccccgccaagaaggacaccgagcaggaggagagcgtgaacgagttcctagccaaagccagaggagatttcctctacagatggggaaaccccgctcaaaacaccgccagctcggatcagttcgaacggctcaggacgctgggcatgggctccttcgggcgggtgatgctggtgaggcaccaggagaccggcggccactacgccatgaagatcctcaacaagcagaaggtggtgaagatgaagcaggtcgagcacatactgaacgagaagcgcatcctgcaggcgatcgactttccgttcctcgtcaagctccagttctcctttaaggacaactcctacctgtacctggtgatggagtacgtgccgggtggggagatgttctcccgcctacagcgcgtcggaaggtttagcgagccccatgcctgtttctatgccgcccaggtcgtcctggccgtccagtacctacactcgctcgacctcatccaccgcgacctgaagcccgagaatctcctcatcgaccagcagggctacctgcaggtgacggacttcggtttcgccaagcgcgtgaagggccgcacttggaccttgtgcgggaccccagagtacctggcccccgagatcatcctgagcaaaggctacaacaaggccgtggactggtgggccctaggggtgcttatctatgagatggccgttggcttcccgcccttcttcgccgaccagcccatccagatctatgagaagatcgtctctgggaaggtgcgcttcccttcccacttcagctctgacttgaaggacctgctgcggaacctcctgcaggtagatctcaccaagcgctttgggaacctcaagaatggggtcaacgatatcaagaaccacaagtggtttgccacaactgactggattgccatctaccagaggaaggtggaagctcccttcataccaaagtttaaaggccctggggatacgagtaactttgacgactatgaggaagaagaaatccgggtctccatcaatgagaagtgtggcaaggagttttctgagttttaggggcatgcctgtgcccccatgggnnnnnnnnnnnnnnnnnnnnnnnnnnnggtcgggggggtgggagggctggattgaacagccagagggccccagagttccttgcatctaatttcacccccaccccagcctccaggttagggggagcaggaagcccagataatcagagggacagaaacaccagctgctccccctcatccccttcaccctcctgcgccctctcccacttttcgctttgctcttaccccaaagtgggccagtcccgctcagccctcccagcccacttctgcctgttttaaacgagtttctcaactccagtcagaccaggtcttgctggtgtatccagggacagggtatggaaagaggggctcacgcttaactccagcccccacccacacccccatcccacccaaccacaggccccacttgctaagggcaaatgaacgaagcgccaaccttcctttcggagtaatcctgcctgggaaggagagatttttagtgacatgttcagtgggttgcttgctagaatttttttaaaaaaacaacaatttaaaatcttatttaagttccaccagtgcctccctccctccttcctctactcccacccctcccatgtccccccattcctcaaatccattttaaagagaagcagactgactttggaaagggaggcgctggggtttgaacctccccgctgctaatctcccctgggcccctccccggggaatcctctctgccaatcctgcgagggtctaggcccctttaggaagcctccgctctctttttccccaacagacctgtcttcacccttgggctttgaaagccagacaaagcagctgcccctctccctgccaaagaggagtcatcccccaaaaagacagagggggagccccaagcccaagtcttccctcccagcagcgtttcccccccactccttaattttattctccgctagattttaacgtccagccttccctcagctgagtggggagggcatccctgcaaaagggaacagaagaggccaagtccccccaagccacggcccggggttcaaggcaagagcngctggggaggggctgcctgtttaactcacccaccagcttccgcctcccccatcctgggcgcccctcctccagcttagctgtcagctgtccatcacctctcccccactntctcatttgtgcttttttctctcgtaatagaaaagtggggagccgctggggagccaccccattcatccccgtatttccccctctcataacttctccccatcccaggcaggagcncncaggcctggggtngggcgcccgggngggngcgggggcgantcaacctntnngctgcgaaggacganacttcctcttgaacagtgtagntagttntaaa

SEQ ID NO: 435550 - DNA, 713 bp, Homo Sapiens
aagctacggctaggtacgaggcctgggtgttgaattcggcacgagggaacacagcccacttggatcagtttgaacgaatcaagaccctcggcacgggctccttcgggcgggtgatgctggtgaaagacgaggagaccgggaaccactatgccatgaagatcctcgacaaacagacttcggtttcgccaagcgcgtgaagggccgcacttggaccttgtgcggcacccctgagtacctggcccctgagattatcctgagcaaaggctacaacaaggccgtggactggtgggccctgggggttcttatctatgaaatggccgctggctacccgcccttcttcgcagaccagcccatccagatctatgagaagatcgtctctgggaaggtgcgcttcccttcccacttcagctctgacttgaaggacctgctgcggaacctcctgcaggtagatctcaccaagcgctttgggaacctcaagaatggggtcaacgatatcaagaaccacaagtggtttgccacaactgactggattgccatctaccagaggaaggtggaagctcccttcataccaaagtttaaaggccctggggatacgagtaactttgacgactatgaggaagaagaaatccgggtctccatcaatgagaagtgtggcaagagtttctgagtttaggggctgctgtgcccagggtttctttttcttttcttttggc

SEQ ID NO: 435551 - DNA, 1108 bp, Homo Sapiens
  misc_feature (2)..(3): n is a, c, g, or t
  misc_feature (10)..(10): n is a, c, g, or t
  misc_feature (28)..(28): n is a, c, g, or t
  misc_feature (32)..(32): n is a, c, g, or t
  misc_feature (36)..(37): n is a, c, g, or t
  misc_feature (56)..(57): n is a, c, g, or t
  misc_feature (67)..(67): n is a, c, g, or t
  misc_feature (69)..(70): n is a, c, g, or t
  misc_feature (72)..(72): n is a, c, g, or t
  misc_feature (74)..(74): n is a, c, g, or t
  misc_feature (77)..(77): n is a, c, g, or t
  misc_feature (80)..(80): n is a, c, g, or t
  misc_feature (92)..(92): n is a, c, g, or t
  misc_feature (94)..(95): n is a, c, g, or t
  misc_feature (100)..(100): n is a, c, g, or t
  misc_feature (102)..(103): n is a, c, g, or t
  misc_feature (110)..(110): n is a, c, g, or t
  misc_feature (113)..(113): n is a, c, g, or t
  misc_feature (117)..(117): n is a, c, g, or t
  misc_feature (119)..(119): n is a, c, g, or t
  misc_feature (126)..(126): n is a, c, g, or t
  misc_feature (142)..(142): n is a, c, g, or t
gnnttgcaanttcccaattgggtttcangggnaaanncaaaaaatttatttttcannttatccttgncnngntnttnttntttttccaaagncnnaaagntnnaaaaagnatntagntngttcttntccctcaaagacagangagtcaggaagtccaatgggcgatgctcctgtagataagggcacaaagccaggagagttgagggtgtcccagttccatgccctgcatcaccaagaacccttctccctggcttgaaatctttggaaattcctggtttgagtcacagagaagcattgtcatgggctcagtaaccctgccacccctgttatctccattctccctttggtcacagcagctgtcttaagacacaagaccatgcctgggccctatgtaggctggctgagaaggaaggttgctgcaatggcttccgaactccagggagcaagtgctggcttcagctcaaagtttccaggggctgggaataaggtggaggaatagccatcagaagaaagggcagttggaagtatagtgtctggaagagggggctccatgtccctccagcctcagtgcctgcacgttcctcaccagctaagctgtgctgagaagtgggtaagctaggtagtagcccacagcagagcccaagaccacaccaaggaaaatccaggtgttgtaggacattacagccagcatgatgaagtagccgatgaccacctggatgacatggattagagactggccaaagtgacacaaataccacctgtggtgggttctgccaacagggaatgaatctgagcctgcagagtccccgtctgtctctgcgatggtctgctggctgatggaggttggcaggttcaccagtacctggttgagcagcttggctttgccaaccttgatgccttcatacagtacagccagaagcaggagcaccaacaccgaaagggccatgccagcaggactgtggacactccagaaatcaaacagaagcaccgctgtatctgagaagatgaaatgcatcgccatggtgagtgcgcagggcgggcgccagggccgcgtctgctcgctcgggtctcctcgctccgagtcagttcaaccgccgccgccgccgcc

SEQ ID NO: 435552 - DNA, 1829 bp, Homo Sapiens
  misc_feature (58)..(96): n is a, c, g, or t
  misc_feature (797)..(797): n is a, c, g, or t
ttaacgccccccttttgggccccctctttacacaaaaaagggtgcggccaaatggggnnnnnnnnnnnnnnnnnnnnnnnnnnnnnnnnnnnnnnngttgtttcgggttacgatttgtgtggttctgtttttttgactatgttaaaaatatatatttactaaaatgtatcttgtttgtttttaattcccaaagcttacaaccatcttttcatctaatctgtgaggtatttagtatacagcagtgattttctctctttccttttttataaagtgaagaggttcaactatccagagagtcccatctaactcaaaaaatgtaatggctttggttggattgcatcttcagtcagtacctgccatggcttaatcagtattttaagtgaatgaatcatgtttccccactagatcattacgagtaagcagtaagtaataaatagagaatattaagtattgaacattattagatgcagctttttgttctgcatagaagaaagatgaggataaaggagggcattgaggccacgaagagcttcccagacacccacggccatcagatcttcttcttcctgcaggcagtgccttctggtggaaggagctcagtctatcagagaataaaccaggagcctgaaagcagtcctgtgtctctgcctttaatcagctgtcacttattctctccccaagaaagggaaataggtctcagcagtttctgccatccatcatgaatcaatgaaatcatttcattaaaaatttttttgtatgaatgtgcaaaattgccaactaggagttcaatgggaganataaaaaaaacttagtttgtcaacatgatccatagacgagatgatcttcatgtgttccaaaggcagaaaggtgagaaaaaggatctagcttggtctctgtccctcaaagacagaagaggtcaggaagtccaatgggcgatgctcctgtagataaggcacaaagcaggagagctgagggtgtccaggttccatgccctgcatcaccaagaacccttctccctggcttgaaatctttggaaattcctggtttgagtcacagagaagcattgtcatgggctcagtaaccctgccacccctgttatctccattctccctttggtcacagcagctgtcttaagacacaagaccatgcctgggccctatgtaggctggctgagaaggaaggttgctgcaatggcttccgaactccagggagcaagtgctggcttcagctcaaagtttccaggggctgggaataaggtggaggaatagccatcagaagaaagggcagttggaagtatagtgtctggaagagggggctccatgtccctccagcctcagtgcctgcacgttcctcaccagctaagctgtgctgagaagtgggtaagctaggtagtagcccacagcagagcccaagaccacaccaaggaaaatccaggtgttgtaggacattacagccagcatgatgaagtagccgatgaccacctggatgacatggattagagactggccaaagtgacacaaataccacctgtggtgggttctgccaacagggaatgaatctgagcctgcagagtccccgtctgtctctgcgatggtctgctggctgatggaggttggcaggttcaccagtacctggttgagcagcttggctttgccaaccttgatgccttcatacagtacagccagaagcaggagcaccaacaccgaaagggccatgccagcaggactgtggacactccagaaatcaaacagaagcaccgctgtatctgagaagatgaaatgcatcgccatggagagtgcgcagggcgggcgccagatcgcaggaattcc

SEQ ID NO: 435553 - DNA, 1373 bp, Homo Sapiens
  misc_feature (173)..(222): n is a, c, g, or t
  misc_feature (501)..(501): n is a, c, g, or t
  misc_feature (1224)..(1224): n is a, c, g, or t
  misc_feature (1250)..(1250): n is a, c, g, or t
  misc_feature (1256)..(1256): n is a, c, g, or t
  misc_feature (1330)..(1330): n is a, c, g, or t
tttggtttgggttgggtaaaagagaaggagacaagggtttttttcccccgtttggttccaggggtggtttcttcgaaatttttccaaattttggggggaatccggtcccttttttggtttttccccaaaagggcttgggataataagggggtgaagccagggcccaacatccnnnnnnnnnnnnnnnnnnnnnnnnnnnnnnnnnnnnnnnnnnnnnnnnnnactaggaactccctaacgggtaggatctgggaatgggtagctggaaacaaaacattttcccattttccttttttaagacataagcctaaggcatcccatcttgagatgctggctggttgatatcagaacgttggattagaccctgacacataccattctccttcctccaagggctcgcaatctgcttttttcctttccaaaactagctccagttcaagggtatcttgttcctcttcctcctcactttctccagattggacaacactgcaaagatcctcntgagaagggtcttctatattgtccaacataatttcctgtggctttactattgttgttgcttcttctactgttgtacttgtttcttttacttctgaaactggctcctctttacaaattacttttcttctccatctctcttcttcttcttttattccctcaggcaataaaggagcaagcagcgatgctgccacccctttcttctcctcctcactatttgagagagcctgaattccttcatttacttcctttttaacttctcgcttggctatgactggtccacttttactactggaaacagaaatcgttttctccttagaatatatgtctgtatttaccacaaaactagtttcagcacctggcacagaactgggctggtaatgctgtaatccctgtacctgtgtggcaagatattggggtaactcccaagtcacttcatttgtttgtgtattccaataataataacatcccgtgttctcatcccagacttcctgccaatcgcccatctcaattccgactgtggaagtttcagaggattctgttgaatttgaatcagtgccagttttgtctttcaaggtctgtttggcaagagtctcatctctattttcttgtgcttggctttcttcttcttcctcttcaccatctggaaactcccactgagactcgcccgactgttcgtttacatagaaataccgtctatgatccctaaattacaagaaagaaaanacatgttttaaaacccgttctcctanaaaganacttccatttggtcctgtcccaggacagcagtctgctttcacagggacgaacctcttaatggactgctattcanaaaggcaacaaagagctttgacaattgagaatggagaaccaag

SEQ ID NO: 435554 - DNA, 677 bp, Homo Sapiens
gttcctagattgtcagatcctccgaaccagtcaggacactagacccacagctgttaaagcaacagctggtctatgcttgcttggtgcttatgctgacagtgatgacgatgacaatgatgtttccgaaaaacttagcacaatccaaagagacaaatggaaaccagttaactgatattgatagtacattggccaacttcctagcggagatcgatgccataacagctcctcaagcctgcagctcctgtaggagcttctgctccacctccaactccacctcgaccagagccaaaggaagcagcaacatctaccctttcttcttctacttcaaatggaacagactccacccaaacatctggttggcaatatgatactcagtgttcactggcaggagtcggaattgagatgggcgattggcaggaagtctgggatgagaacacgggatgttattattattggaatacacaaacaaatgaagtgacttgggagttaccccaatatcatgccacacaggtacagggattacagcattaccagcccagttctgtgccaggtgctgaaactagttttgtggtaaatacagacatatattctaaggagaaacacgatttctgtttcccgtagtaaaaagtggacccagtcatacgccagattactcatcgggtccgcgctcgattcta

SEQ ID NO: 435555 - DNA, 975 bp, Homo Sapiens
  misc_feature (429)..(429): n is a, c, g, or t
  misc_feature (912)..(912): n is a, c, g, or t
ccgttgccccagacaatctagggttataattaaaatgttaattcccatcccctgcagggaatatcaccagagaggcaaatagtcccacttcgaaacatcttcatttcactgtccacttttgtgtttcacagttgggattacaactgtggttcatgaagcgagaataatttccttttgggccggcatcaattatacggtcctgggtaacagttaacatataaaaattagttacactgttctcgtgggctcgcttgattcgcaatctgcattcttcttcatcaattaattcaccgacgtattcatttacaaattcacccttcttaatgctccttttggtcctgaggccccagcctctccgctcccgttttgatgatctctgcatcagggtatagtctctttgtaaagcactggttctgacaacgatctccnagctgggcacacctgcgggtggcattcatactgcaacattctgttcaggcactccgattccaagccacaagggttttcatcagctggcttgcagttacagcggggaatctctgacaggtcagcaacctggatctgcacctttcctattactttgttagctttgatgtgtttgtagggagggggttttcttgagtttttttcaatctctagggcttctttactttctctttgtgctttcaattcctggaaacgttttgcagcttcttccagtgcctttttgaaggtcttgttaatactagtctgcccttcagcaaagcttttgtctccttcaacataagggaacactctgccctggtgtacccagtagtagtcatgagaaccaaagaagaatacagggaagtcccccaagtcatgtttaaggccctggatgttcagtggcacagacctggggttgcagatctctgctggccaccatctgaaaanaaaagcaattttagatcaagagggcaaaaacgaaacaaaaaaccactatttacaagattggca

SEQ ID NO: 435556 - DNA, 1903 bp, Homo Sapiens
  misc_feature (1672)..(1684): n is a, c, g, or t
  misc_feature (1809)..(1828): n is a, c, g, or t
ttttttgtttttagacaagatatttattttgaagttccaaatgacattagcagaattgtgatttttatgtttactgaatggtgcatgggataaaaaggggttctaaaacactttactagatcatccaaaccctacaatagacacttatgcatcaaaattcttgtaaaaggaccacttccctactccctccaccctcccctcaaaatacccatgttcacaaagaacaaaaccttacagcttaaccaacaaaaaacgtgtcatacaataattctaaggcaatggttctatgaagacaggagaggtagcaggctgaaccgcattcactgaccctatctctcagctgctcctcctcactagtcaggtttttcctgtgtaccccacttcattatttccatcatgcttacctctctgtttactggacattccccttgatctaataccaaacttagccagtctaactgtaactcagatgataatctgaccacttcctggtaagaacaaatggttaatgttgtcacagtgattaataaatacaaatatgaattaatttaacaatgaattacattttatcccatccaggcatgaagaagttaaaacctggactcactgaccctgtgttaaaatttagtgctaaatgtaagcaacaacactggagcattgttattttatcaagacacctgaacatagcaaaattaattttgttcatttttattaacataggacatactaaccaaatattatcatttaataaaatcaacgttacaaagaaactcactagcaaataaacaaacgatattcacttgactcttctcttggttgaatgattttctattaattagtagtacacagctatttttatcaatttatgcttaaactgccttatgatttcaatgaaatttcttagcttttacttgttgaataattttttcaattgggaatcttttcataattcaaaatagttcctgaaaattaatgcatccttcaatgtcttctacttaagctgggtgcatttaaaatgcaacacaattctttgaaaggagactatgacatttgagcataaagcctataagaaaaagaaatgtcttccctccccccatgcttcacagagactatatgaatgttccatactcttcatatttagcaacaggagttccttagagatcaaacagcagaaaacaggaggaacttaggccatcaatggacttgtaaaacagataaaactccaaatgtattttaagattccatcttctccacagatgagaaagtgctgaaagggctcttcaacttttctttagcgacatcctctgtgccccaattagaaaaagagttgcaggatggtagtcctccttaaacagcacagactcaatctggaaagagtggcagaaacccctctcccccaacaatgtatccccgaaaataaactgccaagtgcaagagggacaatcttcagaataaataatattctgaaggactgacaaaacagactatttttagacaaagaacacaccaaatactccgaaatttcaggataaccatacatcaagtacttcgtgcaagtaatatttttaccagttaaaagtcattatgaaacacacattcttttaactgaatttcatatgttatataaaacttgaaaagtgtggcacatttctactattaaccattacattgnnnnnnnnnnnnnaaaaaaagtatatattaatcaaaagtatacattacccagaccttttgatttaaaatataactgaaggaaaatataaactctgagtaaacaggcattcttctacacaaacatgagttatttcagtnnnnnnnnnnnnnnnnnnnngcaatttcaatgtaattaagccacctctgattaatacatattttcatgcatgtggaaaacctgcagcccggggga

SEQ ID NO: 435557 - DNA, 1063 bp, Homo Sapiens
  misc_feature (489)..(501): n is a, c, g, or t
  misc_feature (777)..(777): n is a, c, g, or t
  misc_feature (852)..(852): n is a, c, g, or t
  misc_feature (865)..(865): n is a, c, g, or t
ggtaccggtccggaattcccgggatgcaatgtgtatgcacattctctttagttaaggcaccaattgttttggttggttttcctaagacatactttaaaaagatgttctataaatttcctagttaaattatggggattttggagtatgtacatgataaattataatatgtatatggttgaagttattttattttttactaatgaattattttaatattccttattgaataaatgctgtaacttgtttgctatggaacttattcttaaagttctagttaaaaataatttttccacatgcatgaaaatatgtattaatcagaggtggcttaattacattgaaattgctttgttgttgttgtttttttactgaaataactcatgtttgtgtagaagaatgcctgtttactcagagtttatattttccttcagttatattttaaatcaaaaggtctgggtaatgtatacttttgattaatatatactttttttnnnnnnnnnnnnncaatgtaatggttaatagtagaaatgtgccacacttttcaagttttatataacatatgaaattcagttaaaagaatgtgtgtttcataatgacttttaactggtaaaaatattacttgcacgaagtacttgatgtatggttatcctgaaatttcggagtatttggtgtgttctttgtctaaaaatagtctgttttgtcagtccttcagaatattatttattctgaagattgtccctcttgcacttggcagtttattttcggggatacattgttggngggagaggggtttctgccactctttccagattgagtctgtgctgtttaaggaggactaccatccctgcaactctnttttctaattggnggcacagaaggatgtccctaacagaaaaggtttgaagagccctttcaggcactttctcatctgtggaagaacgatggaactctttaaaactacatttggagttatctggtttacaacgtcccattgatgggcctaagtcactccctgtttctgcttgattggatctccaaagggaactccctggtcgctaaatactgc

SEQ ID NO: 435558 - DNA, 1781 bp, Homo Sapiens
  misc_feature (294)..(373): n is a, c, g, or t
  misc_feature (902)..(902): n is a, c, g, or t
  misc_feature (1280)..(1292): n is a, c, g, or t
agccccattttcttaaaacggtgaaaatttccaggatggataaatttttggcccaacttttccttggtaaaggaaaccaaaatgggttaaaaggttgttccaccagtgggtttaaattaaattcccaaatttggaaatttaattttaaccaatgaattaccattttattcccatttcaaggcatgaagaagttaaaaccctggattcaactgaccctgtggtaaaaatttagtgctaaatgtaagcaacaacactggagcattgttattttatcaagacacctgaacatagcannnnnnnnnnnnnnnnnnnnnnnnnnnnnnnnnnnnnnnnnnnnnnnnnnnnnnnnnnnnnnnnnnnnnnnnnnnnnnnnaactcactagcaaataaacaaacgatattcacttgactcttctcttggttgaatgattttctattaattagtagtacacagctatttttatcaatttatgcttaaactgccttatgatttcaatgaaatttcttagcttttacttgttgaataattttttcaattgggaatcttttcataattcaaaatagttcctgaaaattaatgcatccttcaatgtcttctacttaagctgggtgcatttaaaatgcaacacaattctttgaaaggagactatgacatttgagcataaagcctataagaaaaagaaatgtcttccctccccccatgcttcacagagactatatgaatgttccatactcttcatatttagcaacaggagttccttagagatcaaacagcagaaaacaggaggaacttaggccatcaatggacttgtaaaacagataaaactccaaatgtattttaagattccatcttctccacagatgagaaagtgctgaaagggttcttcaacttttctttagcngacatcctctgtgccccaattagaaaaagagttgcaggatggtagtcctccttaaacaggcacagactcaatctggaaagagtggcagaaacccctctccccccaacaatgtatccccgaaaataaactgccaagtgcaagagggacaatcttcagaataaataatattctgaaggactgacaaaacagactatttttagacaaagaacacaccaaatactccgaaatttcaggataaccatacatcaagtacttcgtgcaagtaatatttttaccagttaaaagtcattatgaaacacacattcttttaactgaatttcatatgttatataaaacttgaaaagtgtggcacatttctactattaaccattacattgnnnnnnnnnnnnnaaaaaaagtatatattaatcaaaagtatacattacccagaccttttgatttaaaatataactgaaggaaaatataaactctgagtaaacaggcattcttctacacaaacatgagttatttcagtaaaaaaacaacgaacaaaaaagcaatttcaatgtaattaagccacctctgattaatacatattttcatgcatgtggaaaaattatttttaactagaactttaagaataagttccatagcaaacaagttacagcatttattcaataaggaatattaaaataattcattagtaaaaaataaaataacttcaaccatatacgtattataatttatcatgtacatactccaaaatccccataatttaactaggaaatttatagaacatctttttaaagtatgtcttaggaaaaccaaccaaaacaattggtgccttaactaaagagaatgtgcatacacattgcatcccgggaattccggaccggtacc

SEQ ID NO: 435559 - DNA, 2007 bp, Homo Sapiens
  misc_feature (952)..(974): n is a, c, g, or t
ttttttaaagttagtttatttcagtttctaccttctgacaactcaaggtgcaatatatacacgtttttcttcacagcaaacacctttgattttagcactgttttgagatcttcacccttgaaactttctcaaccttaaaacagagtttgtagaacatcaccgagcgggacacaagattgcaaaaatgcaacagagaagatactggtgtcactgcacgccacttgggggctaccaacaaggtaatgtctggatgtgagcaccgcgagtctaggaaagagaaagcagagggcgtgtgcatgggagacgccactgatagttccaacgggggccaccaggttcaagaaggcggcaggtcaaccgtgttctgacacatttacatgttttaaggggatccatgtgtgttgtctgaatttctagcttttcctagtgttccaacgtttgccttctctttctccacgtgtccacccagaagaccctaagcaacagccccaggctcaccgggatggcagggactcctccccaacagccaaagccaagccaagctgtctcttgcagggagatctggagtccaccccttagggctgcacctcccagagtgcatgcggtcgtcccccacctctatttcatgagcaaatcatctaggattaaggagggagcgggcgcagccccccagttctagtcaatgcacaggggatttactgacaggcatcccctttttaaagtgcaaagtcccttatagcgctgctcaagggagttcaggctgcagtgcactcaggctctgactgttttgtcaggtcccagagtctgcagataaagtggggagctgggttctccccaaatcgtactgtcctgcaggaggggtgtagaagggaagttggagtaaacaaacccagcccatcgtctctccccttggatatggtgaatttttccctttccaacagtaactaagaannnnnnnnnnnnnnnnnnnnnnntgtgggagcgctgtcccactgaaatcccgtggccacgtgcatccccaggcacagctacaggcagcgccgcgctcccaaggactctcactcactggactctgcaggctagagacacccacacaaacccaatcccttgccagcaccagaggcagggctcccacggcggcacccatccttgcgagcccatcggtcacacgattgattccgtccctttcctggagagcatgtgatacccaggcccagggatgcacgggggactgaggcgcagaaggcaggccccctgagggcctgtatggagggcggcttccgggccagtgttggccgcaggagaacagtcttgatgtgcttcttccatttggtgtctcaggcaccaacacattcctgttcctggcccgcggcagcaagggttcctggggtgcgtggcctgtgtggctccgggaagccctgctctgtctgtggtcttagcctgtgcgagccaggcggggtgcagctggcatccgactcccctttcctgtggacgcagctgggaaaaagtgaaacctatctccaagaatcatcaacatgaatacacgatttacaggacaagggagtgagacggctgcatcctaagaaaaatggttcagcagaagtgaatggctcagtgggactggaaacgggacaggaaaaggagtgagaacaaccgtgagtgagaatctggccgtttcgccttgtggctgcggaaactgaggagggaccagcctcagaacacctgcctgctgggcccagagggggctctccctccccgtccctgaggctggggctgggccactgccaccctgcgagcatcccttcctctgcagaaagggaccctctaatttttaaagttctctttctcaagctccacactgttcttggaaacactactgggctccctggctgtgctgtggtctggttttaggtaattcagtaacaaagctgatctaaccacacgggcctagctggatccttcctaactaaaaagccaagagaggcaggtgtgatgcctcacgcctgt

SEQ ID NO: 435560 - DNA, 437 bp, Homo Sapiens
  misc_feature (47)..(47): n is a, c, g, or t
  misc_feature (56)..(56): n is a, c, g, or t
  misc_feature (103)..(104): n is a, c, g, or t
  misc_feature (214)..(214): n is a, c, g, or t
aaaaaatctttttaaaagttagtttatttccagtttctaccttctgnacaactcanggtgccaatatatacacatgtttttcttcacagcaaacacctttgannttagcactgttttgagatcttcacccttgaaactttctcaaccttaaaacagagtttgtagaacatcaccgagcgggacacaagattgcaaaaatgcaacagagaagatnctggtgtcactgcacgccacttgggggctaccaacaaggtaatgtctggatgtgagcaccgcgagtctaggaaagagaaagcagagggcgtgtgcatgggagacgccactgatagttccaacgggggccaccaggttcaagaaggcggcaggtcaaccgtgttctgacacaagtacatgtttttaatgttgtctgtcttctgtgctgttcctcatgcctaact

SEQ ID NO: 435561 - DNA, 2161 bp, Homo Sapiens
  misc_feature (28)..(28): n is a, c, g, or t
  misc_feature (88)..(88): n is a, c, g, or t
  misc_feature (1014)..(1038): n is a, c, g, or t
  misc_feature (1046)..(1243): n is a, c, g, or t
  misc_feature (1248)..(1484): n is a, c, g, or t
ctcagttgtttttaaatttttgcctgcntttttagactgaccctgcttgtgaaccaaccagcaatctccagctgcagctcagaaagancaagagggatgggtaatgtaaaaaaatctggattagtattctagttatgagcaattatcctgcaaattctgctaggcaatgggaataaatagggtgcccatcatccagaggtttccttttgggaaagtaagaccaagggagctaaccaaagccaagcaccatgcacccaaatcctaccaaacataactgtagccaccagttatctgggtgtgtcacaagacatccttttctctcccttgttggaggactcagttccacagtttttccttagcatttggcttacgagaaggagtccatgcaacccctcaacccctgagcataagtgaggtctagggaactccaagactactgacagcaggggtgatagggcattcatgggtagaggagataattcccaccctctagacccctgcttcatggatgcaagccattttggcacccatggtagcactttcgaaggttgcatggggatgcaaggatggaagaggacgctattccttctatccctcacgtaccccaggtatttgctaggaaaagaaccagggatgcctgctcccctctttctatgtgggtagccatttatcttcagtctgcaccactttcaaatgcatctggaacccttcggattcctttgaaaaaatgccttcttttttcctttctcctcctcggttcacaatgacaatccttattgtgtctccatactatgggacactcccctcagatgcattttccaaactggaaagagttaatttcctaaaccttaaactggctggcttaggattggtttcaggggaagggaacccagaagcccaacatgccagcaaaagggtaaagttgtttaccattcggacttttggcccccttctccgtgtacaaattggtaaaaagcctcaggatttttgagctgtccttatccctccccttgnnnnnnnnnnnnnnnnnnnnnnnnngagacagnnnnnnnnnnnnnnnnnnnnnnnnnnnnnnnnnnnnnnnnnnnnnnnnnnnnnnnnnnnnnnnnnnnnnnnnnnnnnnnnnnnnnnnnnnnnnnnnnnnnnnnnnnnnnnnnnnnnnnnnnnnnnnnnnnnnnnnnnnnnnnnnnnnnnnnnnnnnnnnnnnnnnnnnnnnnnnnnnnnnnnnnnnnnnnnnnnnnnntgccnnnnnnnnnnnnnnnnnnnnnnnnnnnnnnnnnnnnnnnnnnnnnnnnnnnnnnnnnnnnnnnnnnnnnnnnnnnnnnnnnnnnnnnnnnnnnnnnnnnnnnnnnnnnnnnnnnnnnnnnnnnnnnnnnnnnnnnnnnnnnnnnnnnnnnnnnnnnnnnnnnnnnnnnnnnnnnnnnnnnnnnnnnnnnnnnnnnnnnnnnnnnnnnnnnnnnnnnnnnnnnnnnnnnnnnnnnnnntgagccactgtgcccggccatatgtgtttaataacccagtttgtctcttcttgccttcaggacatcaaacggtcatgctactggaagctcggaccatggccccttctgctgggcacccttagataggcctctgagggagatctgattgccattttcccgaaacagtgccccctatcagcaggaagcagttaagatctgtctttgtccctattcttatcctagtggcagttagatagacttctttagagcgaggaatgagccagatgggaagggttccctggtaaaactccaactggcctgtgcactgctctggggtggagccacagaagttcgctcctcagtttgcagctgggaggagcctggccctcctcttcctcgggagaacctgggatttaatctgtgaggtgggaagcctacaactaggagaactctggctctgctgagtccctgttcccctttttcttcctttacacccaataaaaccctgccttacccttcaaattgtctgcgagcctaatctttcctggcgtgtgacaaggacctccaccgtctttagctgaactaaggaaaagtcccgcaacattttcatgtgtgcctttgtatttttattacatatatggatgtccctaaacaacatacattattgttttgctttatatattaaaaaggcattctgc

SEQ ID NO: 435562 - DNA, 948 bp, Homo Sapiens
  misc_feature (155)..(222): n is a, c, g, or t
catttacaaaaataagtttggtcttttattataaatacttctagttgtaaaaaattcattttcacatttgaatgtccttgaaaattccaaaggattcattctccttctgcattctgcttctcagaaagtacttttgggttagatctgttccgaannnnnnnnnnnnnnnnnnnnnnnnnnnnnnnnnnnnnnnnnnnnnnnnnnnnnnnnnnnnnnnnnnnnaaacaactaagaggattgggaccacttattttcttgcgcttttttccttctactctgttcagtgttttttcacctaaaccctgttcctctttgagatgtttgatactttctttctcatgcactgagacaagctgacctgactccactgcttttacaaaggcaattgttttgggagaaggtttgtccaaaaccatagtgttctgaataataaacatgagaggaactccaggcttctttttactttcacagacaaattctgatcctgtgttgccacgaaataatgatgaggatttccctcttcaaccatggaaagcagacattctgatccactcactgcattcttgaaatgaggacaatttcgaacttggcatttttgtgcaatcagttttgccccatataagtcctttcccaatgtttctagctcttttaacacacatcttgtggtgcacagctgcgtctcccccatgaggtagcggggcagctgctcccgcagctggatgcggccccgcagcgccgcctgacagaaggtgccgtccagcaggatctggtacggctcgcggactccgaagttgttgcggaagaagccaagatgcttcttggcatgtttctgccttgtgatcttcatgcctggcttaccgggaccgaggccaccggaccaggaagcatcagtaaacgcctcacgcacgccccagtaccctcaatgccagtttcacccggaaatccgct

SEQ ID NO: 435563 - DNA, 919 bp, Homo Sapiens
tggaaatcttgtatccttcgcggtcaaccgggctccgtctgttgatgggtaacagcaatatggcttccctgtaaaggaaggtagagggcgatgcgtcttcagagtttcaagtccactcatattcatcgggtgttccaagtcagagtagacgtcggaaatctgtgtcattgactcgctgtagatgcgtaggccctgatagttgataggccagtgccagggtttggacgtgaactcattgtccttgggtttgaggccactggttcccccggatcatgaccatgtgggattccagcaagatctcaggaaaactgggctgtagcacatccaggctgatgtttggcaacttgggattgatatggtcctccacattccagatggagttgaggctttcttgtcaggtatggggtgcaagtaacttccaactgctcccagccccacttgggcagaacctttcccgaggagcccaggacacaacctgtgaccaaatggatgaagcgaattcgacttctcagcactttgatccggtttccaaattttctgtttacgacctcaatccgccagaaatcatttgagtcccctgttccatttatgccatagccggtgacctgatagtgcttccgggtcatgggggcctcatgatagtgactgtgcaagttccgggaagtttctttgtgttctagtcgaataatgtctccatgtcttacaaactccactgggaaggaagggtctaggggatctgagtttgtgttatgtttcttgataatccacaggttgttgtagtccttgtgcaaataggtggtgacctgctgctgacgggcaccaatgccctcggggtagaggtgcctgtgggagtgcagatagccgatggccatcacggaggttcttcacagtgatcacagagccgtaggccaggtgttca

SEQ ID NO: 435564 - DNA, 792 bp, Homo Sapiens
  misc_feature (440)..(453): n is a, c, g, or t
  misc_feature (475)..(488): n is a, c, g, or t
  misc_feature (735)..(735): n is a, c, g, or t
aactctcactttgtagtggtatatttaggatttgatgtgacacagttatttattgctgagtgagcaaacccctagcccccaagtggggactacaggcttcagtgcttcccccacactgcctgagctaccagcccttctgcactggccctcctgccaatactgcctgcactgtccccactccctctggctcccatgatcaccagatccgccctgcaggctccctgtcacctgtggggccctatccagaccccctaatccacttgcctagcagccccactcttccctcgatggctcagatcctgagatccaaggaacaccctgggtttcccaaccactctcttactgcagaggtctgtctatcctgccctggtctcctccaccccaggagagttttcaaaggtagagaggaccctttggtctttattcaccaccatcatacnnnnnnnnnnnnnngcttttaaaaagtggaggtggnnnnnnnnnnnnnnctgaaggtgggagaaaagtaaaagcaaaaataacagctggtgaatccaagagcagtgccctcactgtccataaacacaaacaccctaaatagttctgttctctcctgtgtatgaaggggggccctgcaccctcgtactcgggtttcttccccatccctgaggtccctatgcttacaatttgggtcatgcctcacacttttctcctaaagcccacactctcttcaccctttgcccccaccccacggtnacagcccctttcccgggtctcccctctgctcctcaccttccctctccaacccctcac

SEQ ID NO: 435565 - DNA, 1140 bp, Homo Sapiens
  misc_feature (396)..(396): n is a, c, g, or t
tggtggtggtagatgtggttgaggtggcagtggtggtggaggaagcaccgctgccagaattagcctgtgcttctgacaccttgttttctgggagagcaattgagatgagagaaaggagtctgaggagtttctcagttaagagagagctccggcggatgactgggtgtgacaacatgttcatgagctgccccagtggagaggcctcgaggctgtatggagaggtttccccctcaccgccagcgctcactggcactgacttcacggagttctttgcctttccggctgacattcatgttgtccagttttaccaataagtcccagaagtctgtgcaaatgccacctgctggaggactgtgaggagcatgggctacaggccttattgcccctttcccgatnactctcacagtttgtttctttggtccgctgctgtgtgaagtggctgggaaataccttggccaattgaatgagtgtatccaaaacgtgtctgcagacaacaggagcagcttggggatggatgtggacggtggagccaccgcttgcatgcttctcggtatgtttacgcccccctgaacgctggatctgaaatatattagtcctgcagcctagggctgcatccatggatactgagagccaggaaagctggttggagctctttgactccatcttgtgtagcaggtccaggggacggttctcatggctacttgacccacagctcttgctcgactttttgcccttttcctcacttgtagtgagtttgggtgtttcaatgcatagctcactctcactgctgcgctgcaagatggagagcagactgcggatgacccagtggcgggtctgggcatggtagcagagatttctcagtactcggtgtagacggctagtattgagctttggctcatccacaaaaagtaggaccaagagacaagaaagggcttcgtggtccagaaggagccgtcctcggaggcggaggagagtatctacattactgcccgaaggcctgttatggctgctgctaccccccatctggaaggtgccacctctctgcacagcaaggcgagtatactggaccccacggttgccacttaagcgactggtgaaagccgcccattcgcgacttgtctgagacgacggacatgttca

SEQ ID NO: 435566 - DNA, 757 bp, Homo Sapiens
cttctcttagtgcaatggtatacagcctgtctttttgaaggggtcacggtagataattatgctctgttaacctcatttgttgtcagggaaaattaaaactaagggtagtgtcagtaggaatcttggttcctgccagttttgttgtttgttagcatatcttcctttacaggtagtatggtttcattttcgtaaaaatgctgcataaacgtggctgggtatgttactcatttcagtgcctgctgatttcgctggaccccaccctgcttttgctgcccaatgcgatagcatatgggacagagctaaattcctactcagctgtaactctgcttattttcaggaaaaagaatgcctgtgtttcgaagttccttcttaggacgaaaaccagctgaagctggcgaaatcccaagatggcgcctctgaaagagcctctggctttatcatcatcctgttctcatgctaaacaacactcccaccagcgccgtgacaactgacggtcgccatgacaacgactctgaaacttcccagctctcacaagctaagttgatttcagatcttccaattccatagccattgaatacagcctgcactgcttgacacactccctttcggtttcgtgcattggcctcaccacgcaacaggaaacaaccctttttgggataaccgggactcccggtaacatttccatatatacatatcttaatgtatgcaagggcgtcttcttgttttcccaatcttatttattgtcacagccattccc

SEQ ID NO: 435567 - DNA, 665 bp, Homo Sapiens
  misc_feature (368)..(380): n is a, c, g, or t
  misc_feature (547)..(547): n is a, c, g, or t
gctgggtgtttcttccaagtctttgttcaaaatgccaagaacctaaacaacttgcagtcaagaccctctactggtaacatattctggtgagctagccaggagagaaggtaggcccaaagtttgggatttctttttctcctttccccttttacatacagggaaatcttcctctctccatcttttcctttccaactgaggaccctcagtggacagcacctaagcacaaagacacttgcaagtttctggccagggccattctctggtgaaactggaaggtttccgtgtggaagtgcctaactgccaccgcttggttaaggtgaggaacctgagtccttttcctcgtttttgtttttctgagtcctattccnnnnnnnnnnnnnctgagttattttccttttctcctttttcagtctttcagcggccgtttcctagtagctcgttggtaattgaggggaactgactggggccactctctggtatcctctgaaggccaaggagtgaacagggatggctgccctgcccagaaagggaaaagactcatttctgnccttttcagttataatccctgatccctatgtgtgatgcagttagcagcagcagctcgtccagggcaaactcacaggtttcaggtgacttatgctgcttttatttatgctaaattcttc

SEQ ID NO: 435568 - DNA, 1577 bp, Homo Sapiens
ttttacacttagagtttataattttggggcaggaaggaagtaactgtaaaaagaaaaacaagtgcaagttttctttaaaaaaataataggctgatgggacttgctatcgaaggggttgagttttatgccctggaaagggctgggaaaaagccagtttttcccaacatgggtagaaattataaagcaaaatgtggcattttcacttcatggtagcagttctgaaagtttatttacacagtaagttccgagctagaagtggacagtctccagtcttcctgtcagactctgtagttatggggtgttcccagtcagccaaagcagcaccaagtgcagtgggaatgaagagaacccagataaaaaactgactcagtattcttgttttattggtttatggcttgtgggcagctggctgaggccaggaacaccagaggccctccttgtatttccctctcccttatcaggtaattccacacttagcaggtcccatacctggaagcagcgggttgaccaggtaggagtaggatgcagtgggtatactaggaaaacccagctcttcccactaacactggtaccgtagtttactatgctagaactgatagggaggtaatgaacttggtccccactacctagcccaagaaccagcctgggtacccacgtaccattaggagcggggaggggaagaacaggataggggaaaaagatgaccttcatcaaggagctcttgtggtggaggacataaggaagccctgaggctgccatcctttctccaggcagccttgatactgaaggcagtaatgttagagccataaagcactgtatttctcatactcttggtataatgctagtgccactgtgtgatgctttagtcaaataaatggaggggccattagagagggtaggaaggcaatgaaaccactctgaattatgtaaagatcttgctacttcttatagcctaataggaagaaatccaggcaggggttatagggcatcagctgttgaatgaatgttcaacattatgcttttaaggattagatagaagaggtctcctacctattccttttagcaccttggctgcaaagctccagaggaagatttgggggaaagagtgagcctatgaccaggaagacagagcccagccctgctatagtccagttgctctcccacagggcacctggagcttagggggttaggatatttccagtgctgcctatcatatgtagaataaagggtggttcagatagagacaatgaaattaatatggcagaaattcatgtgttaagtggaacttcttagtgggcacttcatttaagagagctaaaaaagagctctttggctagataagcccttcccatctcacttttggtcaggctgcaaccacagaaaagaaaacattgaaaacaacacccatcttctgagatgggatgctatcttggagatgaggtctaaaactaggactggtgagtggttgtgtttctgcctttcctagctttgatcccactattccctgtctttgtactccctctccttctcctctttccagccgcccccatttgtataaatagtcaatctagtttttt

SEQ ID NO: 435569 - DNA, 1130 bp, Homo Sapiens
gcgaaagggccgccctttgggatccccttcctgggggggcccattccccctgttccccccggggttcacttttctggtggccagtgcagtttaacaatttcttccaaaggggaatgttcatggcatagtccccagtagacgctttttttcatagttcaggtccccccccaggacccgttcatcagttgggttgggtgtcccttcaaggttcatgacgtcagccgtttggtgcagggacaggtaccctggccacagctcccaggtggtccctgggctgaacaagaacgttgtttgcccatagagaggggtgcacgggagttctgatgcagggactccacgtagtcgcgggcagagagggatggccggtcatccatgctgccactggaatgcctcttctggatacagagggcaggacgcttggtgggcgagtcctgccgcacgtgggagctgtggatgcggtgcctctggacaagttcgtcagccgagggatcggtccagaagtgatctgcagtcttcatcttggtgtactctagggcacagggccccaccaacaaagatgcaaggatggggccgtccacagggtccatcaggagagcttccttctcatagtatttactagctgttttccacaaggtaatgcacaattttgtccaggaccttctcaaacaaggctgtgcgaatccacagatgcttgatggcaagtggggacaagttgggacagcttcggcagcttccgcacattctcctggaggccttgaatctggtttctcgcgctctcgatcagctgctccaggtcttgcaccttgcggctcagatcctcagccggcgggaagttcttgcccactttcataaagagggctgcaatcttattgctgcgtaggaagccagccgcccgccgccgaagcccgtgcagaacgcaggcctccacagccgcacagaaggagatgatgtggctgctgtcttcgtggacaaacttgcgtgtcacagcctcctccatgatctgcttcacctccttcttgacggtgcgtagcagcctctgtcgggtctccgcctccgcgggggccgaggccatggctccgagcgctgcgttccgagtcccaggaggcggtgcgcatcgaggaatccggacc

SEQ ID NO: 435570 - DNA, 771 bp, Homo Sapiens
cccctggattactctcaaatacagtgccagagactggaatgttaaatggggaggtaaacttgctccatgctgtagctaagaattattaccctcctgcagaccatcccgccttttgaacgccctttcaaagatcatcaagtgtgccttgagtggatacatgggttatatttggaaccttcgggcaaacaggatttcacagtgtcctctggaaaatgatgtggttgccctgcttggctttccttatgcctccagtggagaaaacacaggcattgtcaagaagttcccgaggtttcggaaccgagagctggaggccactcgatgccagaggatggattacccagtgtttactgtttcattgtggctttatttactccattattgcaaggcctacctctgtgggattctgtactttgttgactctaatgagatgtacggcacaccttctgtatttcttacggaagagggctatttgcatattcagatgcatcttgtcaaaggggaagaccttgctgtaaaaactaaattcatcatacctttgaaggagtggtttcgactggatatctcttttaacggaggccagatagtagtaaccactagcattggacaggatttgaaaagctaccacaatcagaccattagcttccgggaggatttccattataatgacacagctgggtacttcattattggagggagcaggtatgtggctggcattgaagggttttttggacccctgaagtactatcgcctttcgcagtctgcacccccgcc

SEQ ID NO: 435571 - DNA, 1385 bp, Homo Sapiens
  misc_feature (6)..(6): n is a, c, g, or t
  misc_feature (10)..(10): n is a, c, g, or t
  misc_feature (32)..(32): n is a, c, g, or t
  misc_feature (107)..(107): n is a, c, g, or t
  misc_feature (123)..(123): n is a, c, g, or t
  misc_feature (125)..(127): n is a, c, g, or t
  misc_feature (129)..(129): n is a, c, g, or t
  misc_feature (131)..(134): n is a, c, g, or t
  misc_feature (137)..(150): n is a, c, g, or t
  misc_feature (152)..(152): n is a, c, g, or t
  misc_feature (157)..(157): n is a, c, g, or t
  misc_feature (242)..(242): n is a, c, g, or t
ttactncttnctggctggtggcttccatatantaccaccacacattgtaaagctcacttctactgtactgccaaataaagtccctagcacagcccccagggtccttnaaagttatcatcatcncnnntntnnnngtnnnnnnnnnnnnnngngtgtngcggtttccatcaggagtgaagacatatttgtggaaggtcccatctacgcagatggcaatgacagagttgacgttcttggaagtnttgcgaccgaagcgcagatgcaagctgactcagcaggcacagtgaagctcgccaggctccactgagagtccacgtgctgcccaatcataggccccaccttgcccacgcgagcgagcgcggaggcgggttgaggcgggtttccttgagagctaagatatggacagtacctttatcactggaagcgcagaggaaggaggagtggtggctgaagttaatgcagtagagggtggcagggtcagtgcctcggcgcagctccaccagtttctcccttggattgtgtgtcaaagaggcgaataagggtacccttctgggaggctgaggccactacagtgcctggctggtttagagacacacaggctatgtcactctgatgtgcattgatcgtgaatggagcagacgaggtgccaggctttgtgctcgccaggtccacaagttgcagactcccacacttgtgtcccgggaacactagcagttgcttctccaggctggggcagaggtcacagagccccttggggttgtcccgggtatcaaactcaaacagctttcggggattgtcggggaaggagtacacatagatgcggttcttcagcacgatcacgatcttgtcatggcgcatgcgcacagaaagcactggcttggtgaaggtgaactccagcaccagcttctccttggagtccttgccctcccgggcatcgtcccagatcagcactgagatctctgagaacttgggactactaccaccgcccaccaaggccagaaggttggagcggtgcagcatctccaccaagcccatgctgcccacctgctcgtggtccagatgccccttctccatcaagggctccacgttgtagatgcgcacacctgtctccatggcgcagcaaaagcagctttggtcttggttgaaacgcaggctggtcactcctcgaagtggctgttgagtcatggtgcaggattgttcctcctgggatcgtgctccagcttcctgccgccttcaccggcctgacctccgcgtgtccctgacccgggccccagctgtcggtgccgcccgcggcccggttttctgacctcccgggccttggagcccggctcgggtgtttacatcaggccctacttccgatcccgggaattccggtccggtaccag

SEQ ID NO: 435572 - DNA, 1390 bp, Homo Sapiens
  misc_feature (690)..(690): n is a, c, g, or t
  misc_feature (723)..(723): n is a, c, g, or t
  misc_feature (826)..(826): n is a, c, g, or t
  misc_feature (864)..(864): n is a, c, g, or t
  misc_feature (867)..(867): n is a, c, g, or t
  misc_feature (899)..(899): n is a, c, g, or t
  misc_feature (957)..(960): n is a, c, g, or t
ttttgccattaagggccttttattcgtattcatcacatcggagatcatctcttcctaggaagcttttaaaaaatccccaggttggattagggcactccctctgggtccctggcaatttcctccaggttagggatcccaaggggtcgctgccttcctgggtctctggcctggcccttggggcacacagtcatcaagaagtgctggggggaagtgagctctttatttagacatagctctgctgagtggaaagtgggcaccagccccattaatgcttgctggctggtggcttccaagcacgccccactgccaaggctcagctctgcagttctgccactgcaggtccctagcacagcccccagggtccttaaaagtcatcatcatcacagatgtcaaggtacacgtcgaaagcctctctgtttgcagtttccatcaggagtgaagacatatttgtggaaggtcccatctacgcagatggcaatgacagagttgacgttcttggaagtattgcgaccgaaggcgcagatgcaagctgactcagcaggcacagtgaagctcgccaggctccactgagagtccacgtactgcccaatcataggccccaccttgcccacgcgagccagcgcggagcggcggttgaggcgggtatccttgagagcaaagatatggacagtacccttatcactggaagcncagaggaaggaggagtcgtggctgaagttaatncagtagagggtggcagggtcagtgcctcggcgcagctccaccagtttctccttggattgtgtgtcaaagaggcgaataagggtacccttctgggaggctgagnccactacagtgcctggctggtttagagacacacagacnatntcactctgatgtgcattgatcgtgaatggagnaagacgaggtgccagtctttgtgctcgccaggtccacaagttgcaagactcccacacnnnnttgtgtcccggggaacactagcagttgcttctccagggctggggcaggaggtcacaagagccctgagatctctgagaacttgggactactaccaccgcccaccaaggccagaaggttggagcggtgcagcatctccaccaagcccatgctgcccacctgctcgtggtccagatgccccttctccatcaagggctccacgttgtagatgcgcacacctgtctccatggcgcagcaaaagcagctttggtcttggttgaaacgcaggctggtcactcctcgaagtggctgttgagtcatggtgcaggattgttcctcctgggatcgtgctccagcttcctgccgccttcaccggcctgacctccgcgtgtccctgacccgggccccagctgtcggtgccgcccgcggcccggttttctgacctccaggcctt

SEQ ID NO: 435573 - DNA, 524 bp, Homo Sapiens
  misc_feature (70)..(70): n is a, c, g, or t
  misc_feature (82)..(82): n is a, c, g, or t
  misc_feature (334)..(334): n is a, c, g, or t
  misc_feature (417)..(417): n is a, c, g, or t
  misc_feature (419)..(419): n is a, c, g, or t
  misc_feature (421)..(421): n is a, c, g, or t
  misc_feature (434)..(434): n is a, c, g, or t
gcaagcccaacacgaaattaacccggcccaagatggaaccaggaacatccctaaatgtggaggggaaagncggcccctgggnccctgggcagggtggccctgaaaagcagggactggtacaaaaccccagagacattggtgggtagcaaaggtctggtttcccaaatgcattttgtaagaaagtcaagtctgtttagaaaaagggttttaaaaatcaggggaaaggtacaaagttctgagaattctcaaagaggccggggtggggctggcctggggtgagggctggagggctccgctgcagctccctggtagccatgctcttcccctgggggantcgtaccagagccacccaccttgctcggtaagagtgggcagggctcaccgctgaggggccagcgcttggcccggctcctatcncncnactccgtgtgcanaaaaatcttggcctctttctccagctttgaggagcccacagcctccgagctgaggggtgtgtgtgatgacagctccagccagggcaccct

SEQ ID NO: 435574 - DNA, 736 bp, Homo Sapiens
  misc_feature (312)..(312): n is a, c, g, or t
  misc_feature (621)..(621): n is a, c, g, or t
  misc_feature (680)..(680): n is a, c, g, or t
atctccctacctctctacagcatcctctctgccctcaccatcctcgggatgatcatggccagtgcttttctcttcttcaacatcaagaaccggaatcagaagctcataaagatgtcgagtccatacatgaacaaccttatcatccttggagggatgctttcctatgctttcgtatttctctttggccttgatggatcctttgtctctgaaaagacctttgaaacactttgcaccgtcaggacctgggattctcaccgtgggcttacacggaccgctttttgggggccatgtttgcaaagacctgggagagtncacgccatcttcaaaaatgtgaaaatgaagaagaagatcatcaaggaccagaaactgcttgtgatcgtggggggcatgctgctgatcgacctgtgtatcctgatctgctggcaggctgtggaccccctgcgaaggacagtggagaagtacagcatggagccggacccagcaggacgggatatctccatccgccctctcctggagcactgtgagaacacccatatgaccatctggcttggcatcgtctatgcctacaagggacttctcatgttgttcggttgtttcttagcttgggagacccgcaacgtnagcatccccgcactcaacgacagcaagtacatcgggatgagtgtctacaacgtgggggntcatgtgcatcatcggggccgcttgtcttcttcctgacccggggaccagcccaatt

SEQ ID NO: 435575 - DNA, 1116 bp, Homo Sapiens
cccggggggagaattctgggatattaacccttttaaaaacccctttgggcacagggattttcccaagtttcagatccttccagagggccatttgcctgatttccaggcccaaagggacatttcccccttccgcctttagtactttatgtcattccaggatctccaaaggtgttgtcaaaatgaaaaagatactcaaaactgtccactgaagatgcggcaatctatgactgtttttctgcttgtattgatgattatgaatggcagctgaatggtagagttcagagccggcggggccctgtttttgctgctcattttgtcgatttctctgtaccaggtttttgaaagcgatttgctgtaggagaagttcttgcagctgggcccgcttctgctttatccgttctatccgcctctgcttctctatctccagattctgacattcctgagcagaattggtaggcaggccaatccacttgatttcttttttttcctttgaaattatgttcattgccattagcacatttaaagcatcataaactcttcgcctaatgttcttctgatcataagccgaatcagcagccaaatggttatttgaattggtgaactctgacaccagctcatcagcgacttcattgtacgatgttgtaccttttcgttgaactttctcacacactttcattgaaaagtgtctcaagcctttcccatttttatctccttttttgcttcgtttactttctgaaaaatcagagtctataaattttctagcccgttttctatcaccagggacccagccagtagcttctgctatgtgtgtctgagtaaccattgctggtgcaggggtatatggactcccaatcagaacacttcctgaactggttagtctctgtggtgtgcttataatcatttggggtccaacattcacatttattggtcctaaggtttttggtaaaatctttgtaggtgagttggtattggaaactggaaatgcaacaaatgaaatgttgcctggtctaaggaagcatgcctctcactgcagtaccaacaacattctacagtctttgttaccattcagtggaaacttgagactgtatcccgagaattccggaccggtccagcctc

SEQ ID NO: 435576 - DNA, 2822 bp, Homo Sapiens
cttgaaatagacttttctttaagacaaaagtaatgacatttggttcattttcacaaattgcacactgggtgagatcatacaattactgcagtgaactgtaggcaagcaatttggtcataggaatttgtttctttgtcttgttttaaatgaaaaagctatatgaaatgcatagctttgattaacctaaagatacagtttccttctttgtaaaactccagatttaggatgctggcaaaggcagtgctggcaaagtatttaatgcacatggaaatgctattctattttggcttccagaaagtagcccttagtaaattctatggcaccaatgcattgggctaataataattttcagttttactataaattatctaaatgtcacttaagtacttaagaagtagcgctcgctcttttctagaagctgtctaaggcagctgatgcgtaaagcacctcatctagacctccaactagttcagcagttcaatctgtgcccctcagccacaggactgccctcagtatccctcactacacagctcccctctcctggggacttttcatgttcatttctgccttgtcaaaggcagtccaggcaaggaagagaaacgtcagaaacacgatcgtcaaggactgctccgtgtagcaatctcaattctaagaataattacatgggtgtgaggaacacaaaaatcccacctcacagaagataaatgagttgcactcacactgccaactcttcagggattatccccactatctcctcagaaagcatgctttctttgttatatcatctactgctctgttggccagactttcattcacactatgttaactttcatctcaatcatctcagccttcatgtgatttgcttattgtgtttctctagttttcactgaacacacagtgcaaacaaaggcaaagactgaagcaatcatttcaaaaacaagagctcacactacaaacacacatgagcatcacatattgaaacgtaggctttctcttgtctttattctggggaggaggaatcctcctcatcatcttcctcatcttcatcattgaacgaacagggggtctcgcctcgggactcggagcagtgagaggccgcactgctggactggtgactgtttggggccaggaactgcccagttgctaaggccacttctgcatccaagcataacccttggtttacacttgactggggttaaggtggcaccagtgggtcaggtctaaatttgaaactgattgggtagagttcagaagtagtccctgatttaaccaagaaggtcctgtggagatatctgtgatataaccttctaaagcctttggcaccagggatttcgcaagtttcagatcttccagaagaagcatttgcctgactcccaggcccaaacgacaattcccatcccgctttagtacttctatgtcatccatggatctcacagggtgttgtcaaaaattgaaaagatactcaaaacttgtcactggagatgctgcaatctatgactgttttttctgcttgtattgatgattatgaatggcagctgaatggtagagttcagagccggcggggccctggttttgctgctcattttgtcgatttctctgtaccaggtttttgaaagcgatttgctgtaggagaagttcttgcagctgggcccgcttctgctttatccgttctatccgcctctgcttctctatctccagattctgacattcctgagcagaattggtaggcaggccaatccacttgatttcttttttttcctttgaaattatgttcattgccattagcacatttaaagcatcataaactcttcgcctaatgttcttctgatcataagcctgcgaatcagcagccaaatggttatttgaattggtgaactctgacaccagctcatcagcgacttcattgtacgatgttgtaccttttcgttgaactttctcacacactttcattgaaaagtgtctcaagcctttcccatttttatctccttttttgcttcgtttactttctgaaaaatcagagtctataaattttctagcccgttttctatcaccagggacccagccagtagcttctgctatgtgtgtctgagtaaccattgctggtgcaggggtatatggactcccaatcagaacacttcctgaactggttagtctctgtggtgtgcttataatcatttggggtccaacattcacatttattggtcctaaggtttttggtaaaatctttgtaggtgagttggtattggaaactggaaatgcaacaaatgaaatgttgccatatgacccaggcaattccacttctaggtatttaccttttgttggactgagattctgatctataaatcctcttacttctgcatttgtggaagtcaaaccaacattttttgccgtcatgtcaaactgtattctatttaagattctgtaaagccattaaaaagataaaaagaagagacccttcgtcttcaataattctttaaaagaacaaccgccttcggctgcagaagaactggcggccaagcgaggctgtcgggccgagccaggagcgcgtcttcgggcgccgccgcttctgtggcgcccgcgcttaggcggcggccgggtcccggtggactcacacccggggagacgcggcctgcccggtcaaggcccaggagtttgaggccccagaacgccaaccgtgcgcgcgccctcgagcctgcccaaagatgaagggtcagggcgcgccccgcgggccgggcagctgcggcagcgccgcagccgagatcgctaccgatttcgtccgccctctgcctgcccagctacagccccgcttcccccgccccgct

SEQ ID NO: 435577 - DNA, 753 bp, Homo Sapiens
ggagatgctgcaatctatgactgttttttctgcttgtattgatgattatgaatggcagctgaatgggtagagttcagagccggcgggccctggtttttgctgctcattttgtcgatttctctgtaccaggtctttgaaagcgatttgctgtaggagaagttcttgcagctgggcccgcttctgctttatccgttctatccgcctctgcttctctatctccagattctgacattcctgagcagaattggtaggcaggccaatccacttgatttcttgtggtgtttcctttgaaattatgttcattgccattagcacatttaaagcatcataaactcttcgcctaatgttcttctgatcataagcctgcgaatcagcagccaaatggttatttgaattggtgaactctgacaccagctcatcagcgacttcattgtacgatgttgtaccttttcgttgaactttctcacacactttcattgaaaagtgtctcaagcctttcccatttttatctccttttttgcttcgtttactttctgaaaaatcagagtctataaattttctagcccgttttctatcaccagggacccagccagtagcttctgctatgtgtgtctgagtaaccattgctggtgcaggggtatatggactcccaatcagaacacttcctgaactggttagtctctgtggtgtgcttataatctggtctaaggaagcatgcctctcactgcagtaccaacaacattctaccacgct

SEQ ID NO: 435578 - DNA, 2107 bp, Homo Sapiens
  misc_feature (2030)..(2066): n is a, c, g, or t
taaaagataattttttgttaagtaatgaacactcgtaaaacagcaatgaaatggtattaaaatgtctgtgattacttatttctcagcattcatctggtaacttaagcagcatgaagcaagagttgcactttaaaaaatgacaagaaaatagctattcatttagtcgacagagtaaggcccatctcatttccaggatcactagtttctgcttatgacggggtgagcatccgccagcgcggtgattgggaggcgcccctgtgtctttaggctgaggcagtgcccatagctgcagtgcctcgagtttccggagcaaccgcggggctctttcttgaggagtcttgggaggggcggtggcctgcctccccatcctagatcagcgaggtcccaagagtgcgtattgctgcggggtagctgtggagtgtagacacgttccggaggtggcttgacatcctgaggctggggtggtgtgaagggaaagaaagaggggcaggtcccgggctttgctggctctgcttctcagggtcaggccaatgggtctgcagagcagtgcagcggggctcctgccagccgtggtgttgcctctttcttcccagccccattctcgtcttgcagggaaggcgtgtggactccggggggcacaaaggactccagcagggccacagacagaagagtgatgtgtcccttgtcctctgcctattgcaccgtattccataaaaaataaacacttttttggactgtttgtatattgctaatgcggtggcactctgggcactggcaggctgcagagagccgcgttgccattcatccaccagaatccatccagagacagccttgcgggctgggatctttggaagctttcctttggaaggattagcagtgcccgtctgtctggtgctctacacagtgctgtgaacatgaaattaaagggataaaaacaaaataaatccatgggtaggaaatcccagggcttcgtggcatcatttggcaatcatttgtactgtacagcatcatgcggtatgcctgcttcctccacgtccacacagacctggccccgggtgctccccctccattcgcaggaagctcacaggtggttgttcttggagaggtaggcgatgagggccacggccacgcccacatagacgccagtcccaatggtgatggacagcactgccaggaatagggcccgccgggagctggtgctggcctggtgcaagtccccccttggccacggctttgttggtctcatgggacaagtagaaggctgcgatgcccagaggccagaagcagcagagcatggagaagacactgaggcccaggtggtcccgcgggggcatcatgaggaaattgtcctcactctctgtgtcgcttgagtagtcgctctccagctcctggaactcctcctcctcctccacatcgtaggacagggtgtggatttttatgtcatcagctgagaggtcaatgaacttcccatccgggtactcgaggctgtctttggtgggcgaccggtcctcgatgaaggtggtctcgcagcagtcggcggccacaccgtccccccaggagcgcagcacgccctctgaatagaggatgatgttgggccggtagcgggactccactgactgctgcagggtgttggggtccagcagctgctgcatcggctcactcctgctgctgtccaggctggccggcactgtgctggcccccacccggtggctctggtactggggcgctgggtaaacagacaccagaccatctctgctctcggccatcaagtttctggtgttaattaaaccattcctcttgccagcatcactgattttactgtgcaccagcatgctcttctgttcaatgatgccatccatggtactctctccctggctgggcgtcaggctggtgggctgggaatgtaggttacacttgcctcagggaagccatttctcctccgggacaaggtgacccggcaagtgcgcccaagcggccgcccgcgactctccgctctcgacgaattcgagctcggccgatttggcctgatnnnnnnnnnnnnnnnnnnnnnnnnnnnnnnnnnnnnncggccgccaccgcgttactccgattcgcccatagtgatcta

SEQ ID NO: 435579 - DNA, 917 bp, Homo Sapiens
cttatgggaaggcgcccctgtgtttttaggctgaagccagttcccataccttcagtgcttcgagttttccggagcaactccggcgcttctttccttgaggagttcttgggaagggccgttggcctgtgcgtcccccatcctagatcagcgaggttcccaagagtgcgtattgctgcgggttactgttggagtgtagacacgttccggagttggcttgacatcctgaggctgggtggtgtgaagggaaagaaagaggggcaggtcccgggctttgctggctctgcttctcagggtcagcccaatgggttctgcagagcagtgcagcgggggctcctgccagccgtggtgtttgcctctttcgttcccagccccattctcgttcttgcagggaaggcgtgtggactccggggggcacaaaggactccagcagggccacagacagaagagtgatgtgtcccttgtcctctgcctattgcaccgtattccataaaaaataaacacttttttggactgtttgtatattgctaatgcggtggcactctgggcactggcaggctgcagagagccgcgttgccattcatccaccagaatccatccagagacagccttgcgggctgggatctttggagctttcctttggaaggattagcagtgcccgtctgtctggtgctctacacagtgctgtgaacatgaaattaaaggataaagacaaaataaatccatgggtaggaaatcccagggcttcgtggcatcatttggcaatcatttgtactgtacagcatcatgcggtatgcctgcttcctccacgtccacacagacctggccccaggtgctccccctccattcgcaggaagctcacaggtggttgttcttggagaggtaggcgatgagggccacggccacgcccacatagacgc

SEQ ID NO: 435580 - DNA, 452 bp, Homo Sapiens
aaatatgccacccattttaatttaatctagatacaggtactttatttacaaatatttagattaatagcattttgttacatcaaatgaagagtacagcagtctgaataaatccttcagtcacaaaaacaataaaacccactgtaactaactttgggagtcagggtattgcacctcaacaagccgcagtctttagtttgtgattgctaccttatatcccaatgggtggtttgtttgttttgtttttgtaaatatacacacacaccagcaggtcatggtccctgggtgagtcccttgtgatgcaacagtgtaagcaaaatggatcactgtaagtctttaacagaatataccaatctactccagaaatcttattttttaaaaagttaaacaaagacaaaaataaaaatgaatccacaaattaaccaaagcctactttctgcacatttccagttttg

SEQ ID NO: 435581 - DNA, 1619 bp, Homo Sapiens
aaaaaactctgttgtaaaaacagtttaacacaatactaaactgctaaacaactagatgtaatcaggttatcaaaggcaagtagagtaataaatctctcctgcatggtaaatctagactttttttcccccttgtcctcgtgataagtatgtcaccaatatatgatttaaaccgagcactgatgctggacttcatgatttttaccctccctttggcaaggctttgtctcattgtacggtttaatttggtgatatcttaagcctttcttcccatccttaactgttcaagtatgtctgttgtaaccaataagtttattgctgtgaaattacttctgatggtagagaaggggttctataactgcttttgttttgttttggataaatttcctgttgtgtgggtggcatttttcttaacgagatttgcttctgtcttagcctcacacagggaaaatatccatttatcttctctctcgtgcttaattaatagctttatctttttttataccattttatccttttctctttaacagaaagtaaatatgtataaaatttgaaggaatcgaactaacaatacattctgtgtatattattttaatgaagaaaataaattgattactggcattggaacagtataaaataccagtttgtacagtatgacctatatgtgaccatgttactcccttccatttcacacaaagaaatagacacaactgcagttcacaagtagtactggctccaccccttggtgctggcagtgtttggggacattatgctggaaagagctcctagcatcagaggattaacactagcagattctgttccatctttgcactgttgcttacctgctgattttcttaactgttcttgtgcaatcgacaatgtgctaacctgcttttctctttttgtaaacgtttttgcattacaggctgcattcttgccttactgtatagaaaaagaaaaaaggctgggtttactattgcacattttaagcttttatacctttatcttcttggaatggtcagattctgaactggacagtcagaaccacaggtctgctgttaagggattttaaattgtgcatttttaaccctacagtgaaataacttaagatatccctgtgttcacagtgtgaggggctgttttatgtcatgttggcataaattgttttgtaaaagggaaagtgtttctaaaggtgtttcagcgcttgtgctgatacaaagtaagttattactttgcaccaggtggtttggccactgaattaatactgtatagcaagagaaacaatcttatttttttggacaacatgttttattaagttcttcatttctgttgattttttttattgcatttatgattcagtggctgggaattgagaatttatttgaaatagaataggtaacacctcagcgtactatagaaaatgcactcagctcaactgctgtgtttaaaatacacattttaaatccctctttacagacactaacataaaagtacatctttctgggttgtaaacatgtggtagtaccagagtattgtatagtcaatgttaaataaaagccaaaactggaatgtgcagaaagtaggctttggtaatcttgcggattcgccatcggtaccgaccc

SEQ ID NO: 435582 - DNA, 554 bp, Homo Sapiens
tttagcaaatgtttatttatatcaaaatacaaaacatttctgaagcagagtaatgttacatgaggagcaattaaatactaaacgtcttttcatcagtttaacttgcaacactcccggggtacctgcactggctgcacatctcatcatttgatgtgtgccttcttttttctcatttgcttatgcacgtgtttgctcattttgatttgtaattcaggatatgaacatgcagtgttactggggatgagttggttagtacttagcaagcctggaaataccagcgagtggagcctggcgtggtagcctgagctgaggcaggctgcaggttctcttcctgactgagtctggggtgtcactccatttttgactgccaagtcaaaggacaaagggatcaccatcatcagcagccagggcaggcgtctattgcttagggccgtagagcaggcgtggctttggggtcatctccagcggggtcttctcagtgtttgggaagaaggggcagggcagtctataggcccaggcccagcagcaggatgcccagggtccctgcaggaaga

SEQ ID NO: 435583 - DNA, 729 bp, Homo Sapiens
gaattttggtgcttttccctttggtagaaggtggaggtatctgaggagttgtttctgtcttgctacctctgtctactatatagagcaagagtcgggaatagggagatgtgtgagaatcactctcccatggttcagtgtgggccctgtccctcttccctactgtcaccaaccagcagcttggggaaaaggctctgtcgtggatttttgctgcctgcttcccgcttccactcttcttggcggtagatgttcatggtgatccactttgggcggtctgaaagtaggaggtgggggaagaggcaagcctgcacacacacttcctgtccacagggggttgcctgtggcattggagggtggagtctcagagtccagggactgggaggaaggtatcttgatgggatgttcttgaattcgtggaactttagactgaggtgttagaaaggggaattgttggctaggggagaagagcagtttaacgctccacttgctaagtcgtctgtatcagtgtcagaaggtcttgacctcccattcagatttaatttcctaactgctaggtgtggggctggggatagagggcccagaagggggcgcagtcactgacgtgaagggaccacatcccgcttcatgtcagtgactcctgccccttggtcttcagtgtttttctcttccccaggagggactttgatcatgcaggatagaattctcccacctggcttccctgtgtctgtctgt

SEQ ID NO: 435584 - DNA, 711 bp, Homo Sapiens
  misc_feature (606)..(606): n is a, c, g, or t
  misc_feature (679)..(679): n is a, c, g, or t
gctttttggaccaattcgaagatgacgctgatggatttatttgcccaatggatgataaaataccatcaaaatgcagccaggacacagggctttcaaatctccatgctgcctcaatacctgaactcctggaacacctccaggaaatgagagaagaaaagaaaaggtttcgaaagaaacttcgggattttgaagacaactttttcagacagaatggaagaaatgtccagaaggaagaccgcactcctatggctgaagaatacagtgaatataagcacataaaggcgaaactgaggctcctggaggtgctcatcagcaagagagacactgattccaagtccatgtgaggggcatggccaagcacagggggctggcagctgcggtgagagtttactgtccccagagaaagtgcagctctggaaggcagccttggggctggccctgcaaagcatgcagcccttctgcctctagaccatttggcatcggctcctgtttccattgcctgccttagaaactggctggaagaagacaatgtgacctgacttaggcattttgtaattggaaagtcaagactgcagtatgtgcacatgcgcacgcgatgttaacggnacagacacacacagtagtgggagcttttcttaacactaggcagagattaatcattacagttaggacaacattnattttacagaggattttacattgtttttttcc

SEQ ID NO: 435585 - DNA, 497 bp, Homo Sapiens
  misc_feature (316)..(316): n is a, c, g, or t
caggatgtcctcacagaataggcaatgggcagctcagcaactcgtgcgcactcttgctgcacacgaccgtgacaaccaaacgacgctgcagacacttgctgatatgggaggagatcttagaaaatgctcctttatcaaattggaggctcatcagaacagagtaatgacatgtgtttggtgtaataaaaaaggtcttttggctacaagtggcaatgatggcaccatccgcgtatggaatgttaccaagaagcaatattcactgcaacagacctgtgtgttcaacagattggaaggggatgctgaggaaagcctgggntcacccagtgatccaagtttctcaccagtttcctggagtatcagtggcaaatatctagcaggcgctttggaaaagatggtgaatatctggcaagttaatggaggaaaaggttttagtagatattcagcctcattgggtattctgccctggcttggccagaagagggtccggctacagcctg

SEQ ID NO: 435586 - DNA, 1173 bp, Homo Sapiens
tggaaggaaatcgtctcaattgtttattcgactcacagtcagtgcacacactctaccatccaaaagtcgaagctgtgacaatcgactgctacaggcagtgcatggatgtgtaaacaaacacaaatgaaaatgcaaatcagagtgggcggggccaaggcccactgttacattcacagcacagggtaagtgcaaaagaacaggatgtcaggatggggggcggggagcacagggtccttcctgccctggaggctgcctccaggcatcagcctgggaggtgggttagtgcccatggaaccctcctgcccaggaagctgcctccgggcatcagcctgggaggcgggttagtgcccatggatccggtgtctgggaaggggcccacagaagatgggccacacccagcatcatctcctctctgtggtgcgccctcccatccccagacccctttcccattcaggggagaggggccctggtcacaggagccagtcctctgacctcctgagtgtggaaacccaggaggggagtgtgtttctcctgcaggcctctcaacctggaaagggcagagccacagcagaacgcgttgggtccacagacactcgctcaggtgaagacactgagaagacactgccgggctgacaggaccccgcggcggggggacgtcgctgctaacaggactctctgcaggcccaggggaggctctgcccccatgaggccccaggagcgtttgtgcgttgaactgaaggcaaagtgctgggcagtttcttgtcctaatgaaggtggggaagctggtccggccacatacatcctctgacctgcccccaagtggtccccgggcccacaggtgacaggggcctgagcgatccctggtctgagcccccagctcagagcctagcaccacccagggaggtctgggctcatggaagggggatgggcgggggcaggagggcccagccccacctccgcccgtctttggtggtgacagaggtgggaggagaaaagacgatctttggtagggcgagggaatgtcaaaggacactgtcaagggcccagttcctgctcagaagagagcacaggagtgggaggcccacctctgccccatctctggatgggccaggcctgcctcgtgccgaattcggcacccaggcctcgctaccttatacccgtgaggttactgcc

SEQ ID NO: 435587 - DNA, 373 bp, Homo Sapiens
  misc_feature (44)..(44): n is a, c, g, or t
  misc_feature (47)..(47): n is a, c, g, or t
gcttcctctaattttcctctattatataggtattttaaactttnccntttttaaaattctgtacaactattatgattttaagagggggaagagttagaagcatttacagacttttcacaacaatgaccttgcttggtaagtcccatttgttcccctccttgttttctcacacttcacgggtgagttttaagatttgtgttgctttccccaaatatccaccaatttgttcatcttttaacagctccatccagacatagaatacagaaaaccataggaaagtgtcatagacttggatgagggtcatcaaagcgcctctcaaagtatcaaagaactattatcttgctgttttaaaagcattgaagcgttatttttc

SEQ ID NO: 435588 - DNA, 1089 bp, Homo Sapiens
  misc_feature (1049)..(1049): n is a, c, g, or t
  misc_feature (1051)..(1051): n is a, c, g, or t
ggccttactgtaggttgccttactttaatgctgacctagcagccccgacaggaagctttaacataaagccttgaccctgagaagcatgggtgcgtcttgtcgtgagcaggttcatggctgtgctccatcctcagcccgctgatttttgggtcttttgtcctttgatccagcagttcccacgtggatgttgtactgcttctgtccttgatgttgatgccgtgggcagtcaggccccggcgcagggtgtcgcatgcttccagcaggggctgcctttctaggagctgctgccgccgggcgtcccccgtggcctcgggcatgggcagcgcatactgccggaccttctgccggaaccgcaccagctcgtccaccacaccatgcaaggtagcctcgctgccgtctcctgaaacgtatgtgcctgtgacttctgcacattctgagagtctttgagcataaacgtgtgtgcagagctggcgacattctgttgctgagatggactcatctctggttctgcgcacgagagtttgccaactgttgatttgccagagaaattccaacagtttcaaaaaactgttcaaagtaagagatgatggcaccaaacacagcaggacttctcgggccttcaggttccttcagggacgccctgagctgtccattcccgtggtgtgcaaggcccaggatggcatcaaccacctgggtgtgtcaaaatcatctgccaaggccgccttcacggccctcttggtgctggagagcctctcccacagcatcgcttccctgacggagccgcaggccagctgccccttcatgtaggcacgtgcgtcctccaggaaagagcccagccccaggagcagctgctgagcttggagcatggcgctgtcactgtagtcgatggctgagcggtagctgctccgcaggcagaagaaccggaagacatcgggggaaaaggtcttcagaaagtcctggtaaagcgagaaacaggcagtcacgaggctttgctttataccttcgcactgttcagagaatatgttactttctacaattacataagttancnctacctatcaagaaatcaggaaccttgatgaaaatgag

SEQ ID NO: 435589 - DNA, 839 bp, Homo Sapiens
ctgggtaagcgtggtaatcttggggcccttcgagggaaactgtaggggcggcgccgcggtgtgtggtggtttagttgccttactttaatgctgacctagcagccccgacaggaagctttaacataaagccttgaccctgagaagcatgggtgcgtcttgtcgtgagcaggttcatggctgtgctccatcctcagcccgctgatttttggtcttttgtcctttgatccagcagttcccacgtggatgttgtactgcttctgtccttgatgttgatgccgtgggcagtcaggccccggcgcagggtgtcgcatgcttccagcaggggctgcctttctaggagctgctgccgccgggcgtcccccgtggcctcgggcatggccagcgcaaactgccggaccttctgccggaaccgcaccagctcgtccaccacaccatgcaaggtagcctcgctgccgtctcctgaaacgtactgttgatttgccagagaaattccaacagtttcaaaaaactgttcaaagtaagagatgatggcaccaaacacagcaggacttctcggcccttcaggttccttcagggacgccctgagctggtccattcccgtggtgtgcaaggcccaggatggcatcaaccaccctgggtgtgtcaaagtcatctgccaaggccgccttcacggccctcttggtgctggagagcctctcccacagcatcgcttccctgacggagccgcaggccagctgccccttcatgtaggcacgtgcgtcctccaggaaagagcccagccccaggagcacgacgcgtgggtcgacgatatcccggaattccggaccgtaccaggccat

SEQ ID NO: 435590 - DNA, 1314 bp, Homo Sapiens
  misc_feature (576)..(632): n is a, c, g, or t
  misc_feature (1151)..(1205): n is a, c, g, or t
gtatccattaaggtgttaggactgttttaggttacttataaattcccggtaaaggtagtgtcactagcctgtagggcccgggttcaaaacaaaaccaatgggccacttcagaaatctgcctttcatttgtgcccaggatggaggcaagtaatttttctttttggcaggtgctgtgctcttgggctcagtaccagcccaaattatgaggagatcaccaagtggtacctggggttggaagtcgatgttctcagaccaaagtgctggcacatccatctgtcaaggacaaatttaatgaggcactttgatatcatgaaccgggcggtgtcctccaacgttggtaagtgaggattcccattttggatgtcctggccccaagtttcagattttacacatgtaaatgacacagaatcagagttttctggttcctgtaggcagcctaaaccttaggtcacacttttgcacatagcaacagactctcaccctgctgactggggtacatggtcagctggcacccactgcccaggtctaccatgactgagaggggcatcttccctgagtggagactgacttaagctnnnnnnnnnnnnnnnnnnnnnnnnnnnnnnnnnnnnnnnnnnnnnnnnnnnnnnnnntggccttttaaggctcattcatgcctgagcatgctgcttaggtgacgcatcttacagtgtggagtttggcacgcggtctgacacttggtgattgctcagccttaatcagccccattttacctgttaaacagtaagatctactttataggctaaaagggagagtgagttcatgcttgtgtatagccttcaataggtggtgtctgtgttgtcaaaaacaggcagttcactgttcgtgtactatatctattcccaagttctaggtaagtcattctgcctagatcataagtaagtgagagtatatttatgtttctacatttgggagcctatttcaaccagtcctgtgctccagtgttgctcattagccgattcgcagcattgaaatgggatcgtctagtctgtgttttacagataagcccagcgaggctgagagcctgttcaaggtcacatagttaaagggtggcagttagaactggaatttctatttcctgagtctttaattcttgttatttaatagcctannnnnnnnnnnnnnnnnnnnnnnnnnnnnnnnnnnnnnnnnnnnnnnnnnnnnnntttaaatacgaggatttgtgtattgaccaccctgccaccacgttgtgaccctcctctactaaaatgcattaatcaccagacgcgtttgtccctgctcttctctgcctgc

SEQ ID NO: 435591 - DNA, 1028 bp, Homo Sapiens
tcttattggttaccatttattggacatttgccatgtatcagaagctgttccaagcactttatttgctttatctcagctcctctcagcaaccctatggggtaggggatatggtatccctgttgtgtagacatggaagctgaggctcagagagtttacatgcaagggcactttagctaccaggctgactccaaaatccatattcataagtgctagactgtttagctactataaatccctgtaaagtagtgtcactagcctgtaggaccaggatcaaaacaaaacaaatggccacttcagaaatcttgccttcatttgttgccacgatggatgcaagtaatttttctttttggcaggtgctgtgctcttggctcagtaacagcccaaattatgaggagatcaccaagtggtacctgggttggaagtcgatgttctcagaccaagtgctggcacatccatctgtcaaggacaaatttaatgaggcacttgatatcatgaaccgggcggtgtcctccaacgttggtaagtgaggattcccattttggatgtcctggccccaagtttcagattttacacatgtaaatgacacagaatcagagttttctggttcctgtaggcagcctaaaccttaggtcacacttttgcacatagcaacagactctcaccctgctgactggggtacatggtcagctggcacccactgcccaggtctaccatgactgagaggggcatcttccctgagtggagactgacttaagctggattcagatgatgtcagtctaaccccaggccccgccctcttaaccactgtgctgtgtggccttttaaggctcattcatgcctgagcatgctgcttaggtgacgcatcttacagtgtggagtttggcacgcggtctgacacttggtgattgctcagccttaatcagccccattttacctgttaaacagtaagatctactttataggctaaaagggagagtgagttcatgcttgtgtatagccttcaataggtggtgtctgtgttgtcaaaa

SEQ ID NO: 435592 - DNA, 1118 bp, Homo Sapiens
  misc_feature (20)..(20): n is a, c, g, or t
  misc_feature (57)..(111): n is a, c, g, or t
  misc_feature (140)..(158): n is a, c, g, or t
  misc_feature (477)..(477): n is a, c, g, or t
  misc_feature (757)..(757): n is a, c, g, or t
  misc_feature (809)..(809): n is a, c, g, or t
  misc_feature (859)..(859): n is a, c, g, or t
  misc_feature (883)..(883): n is a, c, g, or t
  misc_feature (907)..(907): n is a, c, g, or t
  misc_feature (924)..(924): n is a, c, g, or t
  misc_feature (946)..(946): n is a, c, g, or t
ggtaatgcccagccaacctnaggaaggctgaaggcaagaaagaaatcgcttaaaacnnnnnnnnnnnnnnnnnnnnnnnnnnnnnnnnnnnnnnnnnnnnnnnnnnnnnnnctaggtgacaagagcgagactcggtctcnnnnnnnnnnnnnnnnnnntagcctattctgtgaaaacagagattaagtaataaggcaaatatacttctctgcttctgtaattatcaagttttttctaaaaactcttccttagctacccttggcttcatgtttccaaaactgttgcctgaatatacccctcaattagcacttagcatttatggtcttggtattatcctttaaacactcatttcagctccctaaatatatgtgaacttctttcaggatgggggccctgtgtgggtaggttaaaaataaagccagtgtgggccctatgttttcaaggtactaaaagctgcctctttggtggtggaaaatnaaaactctacagagcaaggtgggaacagaagagtagctgagaactctctattaatgtttccagctctgaaggaagaaatcccttgcagatacttcattttaaaatgttaaatattaataatctggttactagatactagccaggaaccttctaaacagtttttatgtgatactggccagtcgtctacaacttcctccacacagttgtatctttgaggcagagctgcccttcagtgagtcacaagcactctggcacacccaagacctgggccaagccacantgtcaacttccatacacctggaaacacctctcctcaccgccctgtcctcctntatcttaggtgcctacatgcagccaggagcacgggagaacattgcctatntcacccacacggagcggaggaagnacttccagtacgaggccatgcagnagaggcgggaggctganaacatggctcagaggggcattngcgtggccgctagctctgtgcccatgaactttaaggacctcattgagaccaaggctgaggagcacaacattgtcttcatgcccatcattgggaagcgacacgaagggaagcagctctacacctttggccgcattgtaatctacatcgaccggggaatggtctttatcccggg

SEQ ID NO: 435593 - DNA, 1372 bp, Homo Sapiens
ttttgaaggtgatctaaaaatactgtttatttacagtacatccctcttaggggcaagtctctgactggttctggacctgccacagttcacttggccatgtcgatcaggctctgcagtgaggtgggcacccacgtcttctcgccctggacaaagaccactccccggtcgatgtagatcacaatgcggccaaaggtgtagagctgcttcccttcgtgtcgcttcccaatgacgggcatgaagacaatgttgtgctcctcagccttggtctcaatgaggtccttaaagttcatgggcacagagctagcggccacgccaatgcccctctgagccatgttctcagcctcccgcctctcctgcatggcctcgtactggaagtccttcctccgctccgtgtgggtgagataggcaatgttctcccgtgctcctggctgcatgtaggcaccaacgttggaggacaccgcccggttcatgatatcaagtgcctcattaaatttgtccttgacagatggatgtgccagcacttggtctgagaacatcgacttccaacccaggtaccacttggtgatctcctcataatttgggcctgttactgagccaagagcacagcacctgaagccacttggggaagaagtgcttttcaagaagtcccaccaggctagagacagagatcatcccttcccagtcaatcacccaatagaatgcatccatgtgctgctggtgggggttaatgactagctcaccaagacacatccccagcttgggcactatgtttttgaccatgaatgcttcccaggagccaggagtgaagacatccttccagggctggaggatgagcttggcagaggagtcgctggggtgccacttctgcagggcgctggacagcttactacggatgggggaatagagtggctccagccgtgcctgcataaggggcagccatgggtggatccaagagtggatgggaacagtgtctgtgagcgggttccagttttccacctccttttgcagcttggggaagatgagttggtccagtatgttatctaagatccacacaggaataatgtgcacccaactatccaaaaagtccaccatcgggtcacagttccttggctgccactgggtgacaatatttcgaacaaaaggcatccagacttcccatatcaacctgtgaaaggcatctgctgagaggtcctgtccgccatgggacaagagctggtcattctctaggaggcttttccacttagagatgatctcggtgccataagtgcagtctttgaggggatcccactccttgaagtactccttcatgagtggatagacgatggccacagcaaggtccacacggtcggacatcctgtactcctcatagtac

SEQ ID NO: 435594 - DNA, 1609 bp, Homo Sapiens
  misc_feature (1387)..(1449): n is a, c, g, or t
  misc_feature (1466)..(1466): n is a, c, g, or t
ccagtttgtccaaaaacctttattggaaaaatgtccaacaagtgatatcactagcagctgaaggggctgccaggtgagagggggagcacctgaggctccatggaagacattggagtagtgcagtgcagcatctgcctctagggtcagacaattccttttatttgctggggtaagaggagtacccacagaaacacccctctctgagggccagaggcaagatgtggggcagctggggatgctcagagtcctgatacaggtgaaatggggcccccatttgggacctaatggagtagggtacaactagtgactctcccctggaccggggaatggaaggagatatcccatctgatatccactccccaggtccaggggcacagactctgaacagacctaccttctggctctgctcacagtggaaagaggatgggtaccaggcctgagattgtgggagtggcattaccctctgggagtctcgggcagatcaccatcttgggctccccctgaccccatccctatccccagttgttagtgcatctctcttctgggtgtgtttcttcactcaaacgtcgatggtgttgatagatggtgactttttctgtcttgtccccactggccttccctgaggactctgttccggcccctttcccttctccttgggattgttgttggagtcattgtccttgatgatgtcatactgacggcagaacagcccaattacagcagcccacatgagcaacaccaccacaatgatgaccacttccccagtctgcagtggccgctctccatccagaccttccactgtgatgtcacctgggcttgaactgtttgaaggtagccggtcagaacccttgagagttcggaagtgcacccggggccctgggggactctctccccgaaggccgatgctcctgacctgcactgtgtagtcactgtcttcagccaggccccagagggcacaggcccgggtggtggtgttcacctcccgaatcacacgctgcccggggccattctgccgttgctgggaaatggagtagccaatgacgatgttgccttctgggacgtcccaggacacagtggccgagttggctctgaggtgagtgaccgtcacattcacaggagagggaggccggtctgctcgcacgaagcccaggtcacagctgaccagcaggaggaccgtggggcttagatatggggaaaggggcaccagcgaagccatgtccccacggagtccgctggggggggaactgtggcatccgcttggcatccgcttgacatccaggcggggctcctccgccggtcctcgcggttggtcaggcctcggggggctgctcggtgcccagagggcggcccatcgcccgactcggtggcgctgcccctaccccatccnnnnnnnnnnnnnnnnnnnnnnnnnnnnnnnnnnnnnnnnnnnnnnnnnnnnnnnnnnnnnnntgcggagcccccagggntcgagcgggccacggagtctgtccgggagcagggggcgttgcccggacgctggcctgggtccccggtgcgggaggcagtgcggcggcctccgcccgcccctgcagcgggatgtgaccgtcccggagagccagccgccgccatc

SEQ ID NO: 435595 - DNA, 433 bp, Homo Sapiens
ttttgcccaagaacctttattggaaaaatgtccaacaagtgatatcactagcagctgaaggggctgccaggtgagagggggagcacctgaggctccatggaagacattggagtagtgcagtgcagcatctgcctctagggtcagacaattccttttatttgctggggtaagaggagtacccacagaaacacccctctctgagggccagaggcaagatgtggggcagctggggatgctcagagtcctgatacaggtgaaatgtgggcccccatttgggtcctaaggtagtacggtcctcctagcctctctcctcctggccttcggaatgtaagtagataccccatctgatattccactccccaggctcacgggtccatcctttccacacccttcccttctgtcgtcttctcgcagccgtatagtagtagtaggc

SEQ ID NO: 435596 - DNA, 1013 bp, Homo Sapiens
ggccgcgcgtccggccgggctgcggcggagcgagcggggccagcgctgcagaaggcggcggctggctctccgggacggtcacatcccgctgcaggggcgggcggaggccgccgcactgcctcccgcaccggggacccaggccagcgtccgggcaacgccccctgctcccggacagactccgtggcccgctcgagccctgggggctccgcagacccgcgcccgctccgcccgcagctcggccccgcgctgcccgcgtcgccgggcccgcgccgggatggggtaggggcagcgccaccgagtcgggcgatgggccgccctctgggcaccgagcagccccccgaggcctgaccaaccgcgaggaccggcggaggagccccgcctggatgtcaagcggatgccaagcggatgccacagttccccccccagcggactccgtggggacatggcttcgctggtgcccctttccccatatctaagccccacggtcctcctgctggtcagctgtgacctgggcttcgtgcgagcagaccggcctccctctcctgtgaatgtgacggtcactcacctcagagccaactcggccactgtgtcctgggacgtcccagaaggcaacatcgtcattggctactccatttcccagcaacggcagaatggccccgggcagcgtgtgattcgggaggtgaacaccaacacccgggcctgtgccctctggggcctggctgaagacagtgactacacagtgcaggtcaggagcatcggccttcggggagagagtcccccagggccccgggtgcacttccgaaactctcaagggttctgaccggctaccttcaaacagttcaagccccaggtgacatcacagtggaaggtctggatggacaagcggccactgcgcacgggaaagtgccatcattgtgagagaggtggccatgttggccgccggaatgggctggactgccccagataacatccgcagggacaaggatccaagaacatcccagacacgcaaaggc

SEQ ID NO: 435597 - DNA, 725 bp, Homo Sapiens
  misc_feature (95)..(95): n is a, c, g, or t
ccatttcttaggcatgtttccttatctcataggtcaaaaccaatcagtttcagaaagtttagcctagtaagtgccaatggcataaacaagactanccataatgctgccaaagtattaactattacagccaggaatttaatgttaggaagtacaactacacttttcagatccaagtttctcaaattttcttattaagggaagctaggtgagccaaaaagatcagactcattttttaaaaagtcattattgtatattatcgatgttctgtatgttaaccaaattattttattcctcaacagatggtattgagccactgatgctatttaaataattttatttattatttacactagctctatttcaaatcttctccttttaaatgaagaaagaagtgaggtcaagacctagtttgtgtatactgtcagtaaacagatccactactcagatgctgtactgaaatctatgagaagacataagtaagctatagtaagacttgtgccttgccacagctagaaatggcactaatactttaatatttcaagtaatattttatagtattttgcagttaaagagattttacataactactatgaaactactaagattagacactgttaggaaattcaaaacatgcacattgacatacaacgcttgtaaatatgtaagtgcattttccaggcaagatgcagaaatcgattttaataacggagaatttagtgagaata

SEQ ID NO: 435598 - DNA, 637 bp, Homo Sapiens
  misc_feature (215)..(229): n is a, c, g, or t
  misc_feature (502)..(502): n is a, c, g, or t
gtaccctgtgaaaacgttttaaatttttacttgcccttcccctcaggtcctgagtgaggcagtggctctctggcggtgctcgcatttaaataggagtgtgtaggcttacagcaatgaaacatctaggagcttttaactttggatctatacctgggtgtgacatttccttggtgttctctggctgcctttctggctctgcagccctgagggaactnnnnnnnnnnnnnnntctctggagaagggaagtgattatggcagagaggctcctttagattctcctcttaaacctctttgggaacatgtttgaattccagaagtgaatgaacttcattcattctctcgtccagatttcagaagggactaaagtgaacggaggctttttcactccctggcatgctaagagccacattccctagctctgtgcctgcacagtgagtcttcagaatttggcccatcacaccctctgctagtatcgtttccaccaccctcctcatcctctgtnatctttatttcattctcatcgtttatctctacctccagttcagatgccatgctggctgtggctctttttttcatcaccatcagagtgaggcaaagatgtatcctgggcctagtttattaaagacggtttattaca

SEQ ID NO: 435599 - DNA, 375 bp, Homo Sapiens
  misc_feature (250)..(250): n is a, c, g, or t
  misc_feature (287)..(287): n is a, c, g, or t
gcagtaatagtcagtcataatatgcaagtctttcaccaggccttgctgtctttctgctttcttttgcccagagcggggcggtggtcatctatcacgtcaccgctcaggggtcaccttcctcatctcctatagaaagtggattccccttgttactctctatttcatcactgtttctttctttcacgtgctaatcataagctgatatggtttggctctgtgttcccacccaaatctcatctcggactgtaantctcacatgtcaagggaggaacctggtgggaggtgantggatcatgggggcggtttcctctatgctgttctcatgatagcgagggagttctcatgagatctgatggttttaaaagtggcagtttc

SEQ ID NO: 435600 - DNA, 1370 bp, Homo Sapiens
  misc_feature (1234)..(1285): n is a, c, g, or t
agttttcacggctgtgcatgtggtagagggccagattgaggaggaggggtacagggttttccaggattagaaggaagccaagtttagctgcttgggcactaggttggctgggagtgtagggagaaggatggggggtggtcacagcctctctcaaaagcaagaagggcttcctggcagaagaggctggaccctcgacttagcccactaccctcatgactccagcttgactttagtcagtgtctattgagggggtctggaggccaagagacccaaggaaaggaggtatcactgtgagggtgaagaacagggcagcagaggccctgtctctccccagaccagcatgtcaagcctgaaagcccaggagatcacagcacacggggtgcccaggaggaaaggaaggccccccaccccctgcctccctggggcaggactggggcagggcaggggaccctcctgccttccaggagccaaagggaagccgaggccccagcgccactctggcccaggcatgggcagggccccaggcccagcgggcaactaggccttcttgggtcttcggccgacttggtaatagtagtaaatgctgatgacgacaaaaaggaggcggctgaccaggagcagcaggatccccagggacatgaggcccgtctcagctagcgtggcagtgaccaccaagaactggaccccgaaatagcaagcttcggtgagcagggtccatcgaatgatgaccttctcagccgtgtagagagcgttccacatgatcagggagatgctgaggagggcaccgccgtagaggcggatgggggtcttgctggtcacctgggctccatcaaagaccgcatcatagagctggtcagggaaggcaagcgccatgatggcaatgccggagaagagcacagcagagacgaactgccagaccctgagccccaaaggctcccgaatggtaaacttgatttcattgcctaagacctggctgatcttggagcgatgcacctccccgtcgtcatcctccccgcccacgccgaggatcttgcgggtcttcaggcggctcacgaggtccgtctggctgtgcttcttcatcagaggcgggggctgcttggccgccatcttctcctccagcccggcctctgcagaaggggggcctcgcgcgtgccggcgctgggctacgtggagctgatgccaggcggaggctccgggctcggacgcctcacatcgcgccgcccgtaccgggccnnnnnnnnnnnnnnnnnnnnnnnnnnnnnnnnnnnnnnnnnnnnnnnnnnnnaccgggccggcatcccagaaatgccgggccggtgccagccgacatagaaggagaggaacgcgaggcggccgtacgtcgtgggggg

SEQ ID NO: 435601 - DNA, 695 bp, Homo Sapiens
  misc_feature (565)..(565): n is a, c, g, or t
gttggacaagattatgataattcagaagtgaagtaaaatgcctccctctgatggcaaaaagccaacctgtttgcaaaatcacccttattgaagggtggcatggctgtggtccctccctcctgttacttgcatcaccaaccaaactaaaccaaaccatacctgggcctgttcagctggacttgaaatcagtttcctttttctctcccctttgcagcacttttcagtttccagctttgtcattctgtggcctttgctgtgacaatgctgggaagggttagaaatcctgtcacctccatccacaaaggcacagttccacgccctgtgataagatatcccctcttctctcccagactgtctccttaagcctttcaaactgagccccttgctgttggggtaatcacccttaaggccgccttgatgcccctctctccaatcaagtccaatagtagcattaactgagaagcactacacctgactggcttcactgaagctttaagtggttgagggatggaatcttcggtgtaaaaatcttttactattaagggatattattttaaaatatttncataatcccatcaagttgggaggttaattttatccatcacaatgaggtcatgatttgttggcacccaaaaggagcagaaacacaggtgatgagatatgggaggtgggcaccatggtgctttggaggcgtt

SEQ ID NO: 435602 - DNA, 2127 bp, Homo Sapiens
  misc_feature (64)..(72): n is a, c, g, or t
  misc_feature (144)..(144): n is a, c, g, or t
  misc_feature (627)..(637): n is a, c, g, or t
  misc_feature (694)..(726): n is a, c, g, or t
  misc_feature (1002)..(1027): n is a, c, g, or t
  misc_feature (1362)..(1362): n is a, c, g, or t
aatccaattagggaagaatctagaaaggggagattatggaatcttgaccagtccaatttggcgnnnnnnnnntgggtaaagggaacacccactgaggaagggaaatagaggattccagcataagcggagcgttgaccaccaggngaccaagcgccagatctctaaacaccccaatatcttgtgttgaaagaatataccggacggcaccaaagtaatctatgaaagggaaagaaggtgcgccctcgccaaagagcttagaggcaacgcgcaccacctgggagaatggtttatactccttccaaaggcttaaagtgtaatacaagatgggttccaaagatgtttcaagaggagggttaaggacttatttaacaaagggactttagaccattagttaggacaccaatatttggagatggcccaatatacggcggaccactgggggaataaccaaatactgtcacaagaaaagactatgtatggagattgaggctcaatatggaccacgtaaagctgggtaaggaacgcctcaaataaattttttgttgtgtaaagtgaacgtattgttaaacataataattcacgctgctaacaaacaggggcccgtaagcacactataatgttaatttnnnnnnnnnnngagctgccaatgcacgttaccagaattacttaataccaggaaaccgtaaaaaacacnnnnnnnnnnnnnnnnnnnnnnnnnnnnnnnnnacaaacaagactagcttatagcaaattctctatagctaagggtcaatttaaaatccttggcttatatctccccctcactcaatgactacatgatgcaaactaattttattaacaccttaagcaaaacatactggaatttcacaaaatgtacaagatttcaatatttaaggaactggggttagaaagcagaagtggctttcaggtcttccagtctttctctcaagtaataaagctctgctgtgaatattcaaagctattgggaaattaccggtagannnnnnnnnnnnnnnnnnnnnnnnnnccactatgttgtttctctagatatgtaagcttactctattaaccaaaatcttagcttgaccattcttgataagtacctaatcgacatgtaactttttttctgccttaaatatgtataacaggacagagcccttaaatctgattcaattattaattcctgttttacaagtgctatggtgagctaacagaacttatcaatgcctttattgcactttactagccaaatttagaaggttggaattagtctctcctatctagtattctgtcagtttgcccagcttgtacttttaattttgcttctaatggtaatctgccctatcccttgaaataaaatanatctacattttgggagggctaattcttcattgtgccaggctgtcccatgcactgcaggggtgagtgtctttaggcttaaatgccaacagaagcccctagtaaatatgacaaccaaaaaagtgcccctacacatttctcagcaatcctctggaatgacaggttactgcctctagttgaaagccactggcacaactttggtttttaagctcttatgccatttattttaattgcccagacatcaattccacctaaattcttagtcatagcctggttccttgaatttgctggattagtaaccacagattaaggtgtttcaatagttaagacaggactttggaacaagagtttttaaattgtataatacttgagaggatctatgaatataaattgggtcctgtttataattagttttacataatgaactttaagattgccttttcatggtgaacagaagtttggaaattactgttttggcacaaagcagattatcttagtagaaatacagaattactgcaatctgtgaataagactgcttttaaatatttctacttgtgtgctatcttacatatagaatgtgtacgacagttccaaattttagaataaatccatttctagcatctaacaaaatctgatcctgtatcattttaaaacaaagtgtttactttaggcaggattttttaaaataaagcagcaatacccacgcagataagacaaaaaagctaaaatatctcacacctcctaatcctggagtgcaatcttttttcc

SEQ ID NO: 435603 - DNA, 478 bp, Homo Sapiens
  misc_feature (342)..(403): n is a, c, g, or t
cggttttccactatgttgtttctctagatatgtaagcttactctattaaccaaaatctcagcttgaccattcttgataagtacctaatcgacatgtaactttttttctgccttaaatatgtataacaggacagagcccttaaatctgattcaattattaattcctgatttacaagtgctatggtgagctaacagaacttatcaatgcctttattgcactttactagccaaatttagaaggttggaattagtctctcctatctagtattctgtcagtttgcccagcttgtacttttaattttgcttctaatggtaatctgccctatcccttgaaataaaatannnnnnnnnnnnnnnnnnnnnnnnnnnnnnnnnnnnnnnnnnnnnnnnnnnnnnnnnnnnnngagtgtctttaggcttaaatgccaacagaagcccctagtaaatatgacaaccaaaaaagtgcccctacacatttc

SEQ ID NO: 435604 - DNA, 674 bp, Homo Sapiens
caatcccatttttacgattgacagtagttgcctgggatggacgaattgtcctcttggtggttgccatcagtgtctgggagacagtggtcatgatgcaggaagcaaggacccatgtggagctctgccattaagtcgatgtgggaacaatcaccctcgactgaaatatgggcacttctaattcatctttcctccagaacaacctgcttccataactggcagccctgccccaccagtagactatgtctaaagcttcctgtgctctcagggccaactgaagccacccaggactgcagactgaagatgggaactgtagccagcactacctggggctcaccccaccagccaccccactcccaacccagctcgctaggctttgccaagcaccaggccaggctcagcagcttgcgagccatgtaacatgccagatagatagtggagggaacatgtaactgagtaaccagcaccagagctgggccacacattttttgtttttcatgcaacctgtatttgcgggagggtggtggtattgatggctctgtgtgccccaggggtctctgtccaggcactctagtgcttctttggtggctggcccttttcactggtccatatttcaaactttaatttgggggaatgggccattagcctagcatgccagaggacccttactgctttgg

SEQ ID NO: 435605 - DNA, 952 bp, Homo Sapiens
  misc_feature (3)..(3): n is a, c, g, or t
  misc_feature (5)..(5): n is a, c, g, or t
  misc_feature (11)..(11): n is a, c, g, or t
  misc_feature (16)..(16): n is a, c, g, or t
  misc_feature (26)..(26): n is a, c, g, or t
  misc_feature (28)..(28): n is a, c, g, or t
  misc_feature (43)..(43): n is a, c, g, or t
  misc_feature (57)..(57): n is a, c, g, or t
  misc_feature (69)..(69): n is a, c, g, or t
  misc_feature (73)..(73): n is a, c, g, or t
  misc_feature (80)..(80): n is a, c, g, or t
  misc_feature (88)..(89): n is a, c, g, or t
atntnccactngggcngatccctttntnacacaatacagggtntctggcaccccttnttgtcccggacnccanccaaccnaatggccnnaaaagtggcgcagccatccaggaacatggctcagggacagcttccgagttcacaggccctgggtgggctgcatagcaggtgacgccagtggcctcaagctggttggcgagctcccgggcaaacagtacattagccagcttagtgtcagcatatgcccgcagctcctgccgccagcccaccactgggcggtccaggcgtttgaagtcaagacgtccccgacagtgggcagctgaggctaccaccaccacgcggctaggggcacatgccttcaggcaaggcagcagcagatgtgtcagcagaaagggaccgatatggttcacccgaagcagcaggttaaacgcctcacgggtccggccacaggaactgataccggcattgtggatgaggatgtccaaccgtggctcagagctcagaaaggcagtggcaaaggcccgcaccgaggccagactggccaagtccaaggccatgaagatgacctcattgttcccactctcctggcggaggtcgaaggcagccgcctccccgcgctcctggctgcggcaggccagcaccacgcgcgctccccggcgcgccagctccagcgccgtcatctttccgatgccgctgttggcgcccgtgaccacggccgtgcggccccgcaggttgcccatgccgccgcacggcggggccttcaccaggttgtagtagacaagcacgtaagcgcccagcagcaaccccgcgcccagcagcagcgcctccatgccggccgcgcctcccggctcccgcccaggccccgcaccggcctggatcgccgccaggcggctgccgatccgccctgcacaggcctggaacggcgcccgggcgcgtcagcctccgaaggcgga

SEQ ID NO: 435606 - DNA, 1141 bp, Homo Sapiens
  misc_feature (564)..(564): n is a, c, g, or t
  misc_feature (856)..(1052): n is a, c, g, or t
tatacaatgagcctgtgtttagcaacactcagcttcgttttattattgcgttttatgaagttgccaagacaactgaggccaagtaacagaaccttgactttatgcgccatgaaaatttaataaagaattttgaaaggctttttagaggcaggagctgcagtctcttaaaggcagagctcagcacagagcggagggggctggagcacgtggggcctctcaccagacctccaggagcctccgctgtcaggggcgtggaggtgggcagacgtatttcctggcatccgtcttgtttccgcacgtcgagacccttccttttctcgacagacatgtattaagacacttcccaggtgccaagtcccgcacccggttctttaacatacattacgacgtgatccccactatctaggcaaggagcagggatcagagaggtaaagtcactggcccgtggtcatttaggcagagcgcaacagatagaacaaagtgcatatgaaggtctgactgcaaagccctcgcttttccagaacagttcacggcctcttctgggattctcagccctcgctttcnccattctgatgcaacaggttctgaaggaaaaatatccctgcgttctgcgaggggcttggggagcagtcagtgttctgtggcccaagactgggtcctggttggaatcttagcaaacaccttcatgttggaggacatgtttcccgtgagcctcttggtgagcacaagacactaccgcagggctgcaaagagccctctccactccgctctttaaataacactcggaagccaatcaccagaaatgagaaaaacatcgtaattttgccattttctaccaaagctcaacggtgctcannnnnnnnnnnnnnnnnnnnnnnnnnnnnnnnnnnnnnnnnnnnnnnnnnnnnnnnnnnnnnnnnnnnnnnnnnnnnnnnnnnnnnnnnnnnnnnnnnnnnnnnnnnnnnnnnnnnnnnnnnnnnnnnnnnnnnnnnnnnnnnnnnnnnnnnnnnnnnnnnnnnnnnnnnnnnnnnnnnnnnnnnnnnnnnnnnnnnataagcattatgctgcgtggtttttccagttatataaaaatcaagacttttggctactagagataaaggtaaatgaagacgtggcctcc

SEQ ID NO: 435607 - DNA, 881 bp, Homo Sapiens
  misc_feature (785)..(785): n is a, c, g, or t
  misc_feature (795)..(795): n is a, c, g, or t
  misc_feature (804)..(804): n is a, c, g, or t
  misc_feature (843)..(843): n is a, c, g, or t
caggtggtctttgtctcttccagtgtttggacaagactctttcttagctggaatctttttatctgaaggacttgagatcttagacacaagagctgcttcgacaaggccctgctccagcaaggagtcatattttatgctcctcttcctgttccttctcgccttgttttctggtttttgtccattttcttctgactgagacacatcagcagcactgtcaccacaaatggaagattcaaagagaggcttgccattcctgtatgttttaggtgattttcagcttaatttctggagagccatttttgataggggtagtgttagggggtgtcccaatccctttcatttcctgggactcaaaacgcagtttggcatcgtgtgcgccgggttctccattaaacacccgggaagtaagatctttcagcttgtcggctggaataaagggcagggcgtcgtggccgttaaacttctgcatgaccccctcctgcaggctactggagagctgggctttgctgaggaacacagaacactcgcggttcacctcgcagctcggagtcttcccgttggcactgccgaaggatttctggtgcctgcttcatctttatgcactttacaacactctgaacagaaaggggactctgcttgatgctaaattccatccagcccagatgcttccgttcttagaacactctgatgggttgcggtcatggatgctgctgcatctcctgcaacgcacaggatgcccgcgcaacagggctatgcggcccgagatgtccacagtactgaggtgnaggacacctnacgtgcagnaatagggggctgctggtgtctgcaacccgcagtctccanagaaaagcagacagcagttaagagttaccagtggttct

SEQ ID NO: 435608 - DNA, 1831 bp, Homo Sapiens
  misc_feature (471)..(472): n is a, c, g, or t
  misc_feature (480)..(480): n is a, c, g, or t
  misc_feature (1232)..(1240): n is a, c, g, or t
  misc_feature (1411)..(1443): n is a, c, g, or t
tcttcttggggaggaccagaaaggaggggttgaagcccccttcatttccccttaattgggaagttaaagaaagggctttttcttgggaggtggggggattgaaaacgggaaaaaatgaaattttgaacccatgagggaggaggctggaataatttggccagaataagcccccggaaacccaggttgccaccccccggaaggtgggcagtccagtctgtagaaaggtgcttcgaagggaggtccatgagcagggcaaggactgtggagctcccggtttccagctctgcagctctgcctgggaccctcgtggaaacttactctagttaggagcaattcctccaggccaagagagggcgccctgcaccctcaggcctcgatgcatgctgctctacctctcatcagcccacagtctgacacgaggtcatctttggtctgtggtgaggtatggatgtctgcagtctacacaacagnnccctgcangaacgggcctggacaacccttgggggataagacagccacacatggctcaggctgttaggtgtccactgtcacagtccaaagagaaaggtacggcctccaagggggcagcttaagccaacatgtaagacttgggcacgatgaaaggacgggggtccagctacgaatgtttttgttcttgatgtcaagttgccagctactggaaggcaggagcagtttcttctttttcccactctgtgctgggtacttgggagaggcgaaataaataccagactgtccactcctcagcctaaggtccttctcaagtcctggcacactcagcacttgctctttaacgtggcatatgttcccccatcttccacctggtaatgaaatcctcagtgggcgcaaacattttagggccaagaacattgacttggaaattgattctatggcgtggccttgtggcagaggtttaaaatgactaccgtaacctggcatgggctccagcgatcccccagtagggaagggccattaaaagcggtttaagctggagctcagctctcccgcagtctcagctgggacggacatacacccaccaatggcaaagaaagattccgagcagaaaatgtgagcaaaggcctcttttatcaagaggtggtcttagactcagggttttccaaatttttggaggtaccgcaagctgtccgtttgccctgggatgtaaggtaaagtagttgtcacaattgtgttaataagcaggggtgaggggaagnnnnnnnnntctctgcccaccttttgggctgccatttggcctgtgacctactgaaatgtgtgagcaaggggcggggggaagaggcaccgaaattcagagggagggtcacttgattccctggaagccctccgcacacttccctgctaatggcagagaaaagtcatggacacgagggaaagnnnnnnnnnnnnnnnnnnnnnnnnnnnnnnnnncgagatctcagtcccagcttggccactatttggaccttctccctctgaaccttaattttctcactatagatcagggctggtcctatccgcctcacaggcttgccgtaaggattaaaggagcgtgtgtgtttaggcactggtcaccagcccggtgcttggcaccattgtcacgatgggcctggacactttctagagccatgactccaggggagttctgcatatgcgccatcaatcgctcacagaatagcgaccacagtcctggatggggtaaatctaagtccccaggcaaggacagctaggagagtgactggccaccctgacccacccactgcctggggaagtgtctaccatttaggaaaaggagctggatacagatcccgggaattcc

SEQ ID NO: 435609 - DNA, 977 bp, Homo Sapiens
gtgtatgtggtgaataatggcaattaggtttttttaaagaagggatgctcattaaagaatagacactctttttttaaaaaaagtatgcctgtaagaatgtaaaatgggtgacatgtcagaatgttgagtggtgcatgcatttcccactgctctaggtcaaagtgccatccacaccatttatattaggaacacaacgggacacagcaggattcgtggcctgtctatcccagaggtcctgaggccaagcttcccaaggagggagttgggagtcacaagaggaggccaaggagagttgtagctcctggtgtcaccaggaaaggatttgtgtgtggggagcatgcaaatgacaatgtcaagagacagaattaattctcattgttaaaagtttaacgaacacataaagataggccctgaccagacaggagcactaggatcccaactcggaccttgtgggtctggtacagaaagaaccgggtagggagcacgtgaaggatgttttatctctggcttttgtgccattaggaaccctatcccgaatctcagcatcccagaactaaagaacctttgaattacagatacaaaactcttaagggtcaaaaccctaagagccctgatcccccctcatggcctccacatttccaaaaggacacacagaattcatccaacccaaacccacccagcctccagggcaccagtgggtctccccagagctgctctcattggctcagttcgacccactgtgacccgtcaggacagcccctagatgttgggagcaggctctcctagcagccaacgtcgcttgttccttccaatttcctcttggtgcatgcaatgggccctcccttccccgccttctgcacactttaagtcttcctgagcctctgctgactttttttaacagccgtacatgagttcttttgaaagaccctcccggtcttcttctgccctgaacccctcccgcatcccgggaattccgg

SEQ ID NO: 435610 - DNA, 1171 bp, Homo Sapiens; identical to SEQ ID NO: 322017
  misc_feature (141)..(141): n is a, c, g, or t
  misc_feature (149)..(149): n is a, c, g, or t
  misc_feature (334)..(334): n is a, c, g, or t
  misc_feature (470)..(470): n is a, c, g, or t
  misc_feature (624)..(633): n is a, c, g, or t
  misc_feature (825)..(837): n is a, c, g, or t

SEQ ID NO: 435611 - DNA, 716 bp, Homo Sapiens
  misc_feature (703)..(703): n is a, c, g, or t
cattttatccattttaactcatgtaatcctcatgtgagtattcctgtttaacacttgagtaaactgaggcacagagaacataagttgcatgccatagtcacacactgtgaaagtgaaaagagaatgtgtgcaaaacacgtcacagtcctggtttctgagtaaaggcaggctgttatctttagaatcaagctatcacagggagataggcaatgctgtgggtgttggaggaaggtgagagcctgttgctaacaatttcctggttttaaagctaaggctgattttattggggaagatctcacatgtgtgtggcccctgagagttcccagtgccttttatttgcagtccttccatttggacctcctagctgccccatcaggtcatctccagggctcagaggggtgagaccatttcccaaggtcacagaaccagctctctagtcaccaccctgcctctccctctcacccagagtcagtaccagttttatggctttattacaaactgctgggtccctcccattttcaacttgattgatgggatgtcatcccttatcctgtctgacatttgcctctggcttggttgctagaagtttgccccaggggcaaggaagttggaaatttgggttcctgaggtggggctttgtggtttgcgtccctaaagtgagcccattactggttgcttgtccatgggccaacaccagaaaatnccctgaggattac

SEQ ID NO: 435612 - DNA, 679 bp, Homo Sapiens
ctctttccttctttcttttacaatggtccttatgctggactcatttatcttgaaatggtgggcaaccacagaccccaatctatggtatcaagcaactcaactttttcttgtaatgtcatgactcttctgtgcttcttgggagcacttctatgactggtggtgcttcatatgggtcctgcagtttttatgtcctcaaggtttacagtattgcactaaccatgaaaaatatgcaagaaccgcaagggatcactttttactgtgatccacggtttatggagagatgaactgctcacacagagatgattagcatcacatggtgttttaaacagatcttttgacacttgagttcaccacaatagcaacaggaggtaactacaaaataattatagtagctcagtatgtactacagttaattttatgcagttatgatttaatactgtatctttgtttacatttctctcaaccgtgaatggtgccatgtacagtttgtttgtatgtttttataaattttaactttttataatagatttgtgtgtattttatagtaaatgataaaataggctagtatctatataactttttgaatttttcctatatttctaggctacatggtttgttttttccaaattgccacaaatctcaaaaaaattttccaatatacttacagaaaaaggcctgt

SEQ ID NO: 435613 - DNA, 1211 bp, Homo Sapiens
  misc_feature (697)..(755): n is a, c, g, or t
cacgctttacacgttttaacaagatatattgagtccacgtttggtagcatcagttgttgagttaaaaagaaaattattgcatttgatctggatggattttaaaagaatataatgttcaatattaaaaggataattcacatttgccaccataatgttcttttttatgtaaaaagaagaacttggagacattaacatgaaaaagtcttttatcattagctcatgtatttgaggaagagcagctgtctttttatatgttttttgacaaatcatattgtattcttttgtacaaaaaagaactacttgtattctagaagaaatatgaaatgcttaatttataagcgggctggagattttttccaatattgttttctttgaaaatgaaaggggatcatctattttagttttggggtctgggaactttttgaaaatttaatttgtggaccaatgttttgtgaaagctaaagagggcaggggttaaaatagggcttgaatttctcattctgtatagaccagcaaacttccctgtgcaaggcaagtttacatcacaaatccaagaatgtttgcatcctaaatgctagtttgcttcagcccctaggttaacctcaggacttggtttgcatataaaaggtagacagctgatatgttttcatgaataaatattgtcagccagaaaaggttggtgtcaggtaatgcatannnnnnnnnnnnnnnnnnnnnnnnnnnnnnnnnnnnnnnnnnnnnnnnnnnnnnnnnnnaaagaactctcagttctgcctaggtgtttttgggggagccctgttttccatagtgtaattcccatttaagaggttgtctaaaagtctttttaattaatagaaagattttaatatccaagagtagtcaaattaaggatataaactttccacaccttcctgtcgtgacagataaaagcacagaaaggacaacccttgaaatcatgtaacgttggtcatttcaatattttgtacctgttttaaattctgttagtgtatttacttcattgtaaatatttttgagggtacctttgtattttgcttttgaccttggttctgtgatttggatgtcaacaacttccctaaaaagcaccagtgtgttaggttctaatgtcatgacccaatttgtgttattcatctttaatcctgttttcagtctctatgtgtacagcagtatttttaataaagaattacagagat

SEQ ID NO: 435614 - DNA, 1560 bp, Homo Sapiens
  misc_feature (99)..(99): n is a, c, g, or t
  misc_feature (679)..(679): n is a, c, g, or t
  misc_feature (1247)..(1247): n is a, c, g, or t
  misc_feature (1252)..(1252): n is a, c, g, or t
  misc_feature (1255)..(1255): n is a, c, g, or t
  misc_feature (1259)..(1259): n is a, c, g, or t
  misc_feature (1279)..(1279): n is a, c, g, or t
  misc_feature (1290)..(1290): n is a, c, g, or t
  misc_feature (1312)..(1312): n is a, c, g, or t
  misc_feature (1319)..(1319): n is a, c, g, or t
  misc_feature (1322)..(1322): n is a, c, g, or t
  misc_feature (1327)..(1327): n is a, c, g, or t
  misc_feature (1359)..(1359): n is a, c, g, or t
  misc_feature (1361)..(1362): n is a, c, g, or t
  misc_feature (1367)..(1367): n is a, c, g, or t
  misc_feature (1372)..(1372): n is a, c, g, or t
  misc_feature (1374)..(1374): n is a, c, g, or t
  misc_feature (1376)..(1376): n is a, c, g, or t
  misc_feature (1380)..(1381): n is a, c, g, or t
  misc_feature (1386)..(1386): n is a, c, g, or t
  misc_feature (1388)..(1388): n is a, c, g, or t
  misc_feature (1391)..(1396): n is a, c, g, or t
  misc_feature (1402)..(1402): n is a, c, g, or t
  misc_feature (1434)..(1434): n is a, c, g, or t
  misc_feature (1440)..(1441): n is a, c, g, or t
  misc_feature (1446)..(1447): n is a, c, g, or t
  misc_feature (1451)..(1451): n is a, c, g, or t
  misc_feature (1453)..(1453): n is a, c, g, or t
  misc_feature (1465)..(1465): n is a, c, g, or t
  misc_feature (1468)..(1470): n is a, c, g, or t
  misc_feature (1474)..(1476): n is a, c, g, or t
  misc_feature (1480)..(1482): n is a, c, g, or t
  misc_feature (1488)..(1488): n is a, c, g, or t
  misc_feature (1492)..(1493): n is a, c, g, or t
  misc_feature (1496)..(1496): n is a, c, g, or t
  misc_feature (1513)..(1513): n is a, c, g, or t
ccgtgcaagcccctggggctttgaagaatctcccctaaaattttgcctttttgcctccctggttgccctaaatccctccctttctttggcaacaaggtncttggtccaattaaggaagaaaagggccccagggttctggctggaaccaaagaaggccgctgggccctggtggtccttttggtctctagagcaggcctgcatcctggggccaggtgctggggtctctggagaaacccacggcacctgccctgagtccaggcgaggatacatcagtccatatttttgtcttcattttgttttgttaaaaaaatagctctattcccctggcccttctcctggccatctctgatggcctcatcttctcccctggggccaagaggacagcggggaggggcacgggaggacattgggtgctgggcagtggtgggtggggcgagtcttcaggcttcaggccataccctctactggatgccccggaagaggcacatggcaaagatcatggcgaaaagctcgatggccagtaccccgatggcaagggctccggccaagtagacgtaggtctcgaaggtgttgaggatcaccgtgtaacagccctgcttgtttaggaataggctccttcccaggaggcactcctcccggctcagcaggacccccgtccccgactttggggttccctccnggcagcaggcttccggcacttcttcactatccagggtcaggagtcgaaacacagatgcaaacttaaagtcttcaggcccgttgaccccgcagcaaccaaatgtgatcatgaccgagttccaggtggcagagaagatgtctgtgtcgttattgccctggtagtgcttggtgagctccttggtgaagaattctcgggtgagattttccctgaagatgaaggccaggatggctgctgagagctctgccaggaagatgatcaggatgaacaggaagaaaaatatgaagaaattgaatacaaacatcagatacttcatgcagctcagacagtcgccttccatggtgctccacctggagagccagcgttgagatgtctgcaaaaggattatgctcgcgtctccagaaatcaaattcaaggggttcccagttgctttgatggtagtgttagaagttcagctcacctgaagcttgagggtggtccaggagatgctcacctctttcacactggtgtctttccctttgggcctcagaggtgccaaggttctcttaacagtgtcatacataacagtagnatctnganacantcttacagcagcagctaccngaccaagcacnaaatccagccggcgaacgagangaaaatnacntgatngaaggggagaaatagcaaatagcccggcgcangnngaaancacanananaacnnaagananaannnnnnaaaganaggcggcggagaatagaatcggggatcggggnagaaannggggnnggananggggttgggacnggnnnaggnnntggnnnacgggnggcnncgncgcggtccgcggtggancgctcggcgctacgtccgccccgcagcctggagccccgcgatcccgg

SEQ ID NO: 435615 - DNA, 739 bp, Homo Sapiens
  misc_feature (32)..(32): n is a, c, g, or t
  misc_feature (61)..(61): n is a, c, g, or t
  misc_feature (76)..(76): n is a, c, g, or t
ttcccggcctaatctttcctagggtaacaaanggtccccacactacccaaagagaaaaagnaaaaagctcactgangctttaaacccctgagaagaactcagagaaaatactctgtgctggtatctccacaggatataccctggaaaagaaaactaatttcatttgttctatctctagtacaatttcctacaaggtaaaatggaaaactcacttcaagtgtgtgggttactaatatttcttcctaacttcacaggaagtttgtcacctttccttgcaggatactgactgtaaacctgcagaatactacatgataccctacttgaaaaggccacttgagcttttccagggatgccaaatgtcaagattttgtgactgttttctataaaaagaccatgaaacgagaaaacaagtttatcctatcaatgggaactagagttttctaatactacctcaagaaaagcaaaggtattattgttctctctaaggcttacagtccaaaggaaagtgactttaggtagctcagtcaacctttatttctcaatgaaaaggacaattttcagtataatgtgatctgctactcctttccacaatcagaagactccagattcaactggaagatcaacatagagagaactgaaatcagtcttcttgaacagtttttgaagctatgaaccaaacatctcatgacccagacactgaattaggaggatgaatgagcataaaagtgataggtttttt

SEQ ID NO: 435616 - DNA, 810 bp, Homo Sapiens
  misc_feature (80)..(80): n is a, c, g, or t
ttctgtcatctggacaacatggataaccaggaggacattatgctaagtgagagaagccagtaacagaaagataaataccnataccacataagtggtatttgtggaatctaaaaaagtctaactcttaagaggcaaagaatggtgtttaccagagactgaaaaatggggaaaagggagatgttaattaaaacagtacaaaatttcagttagtcaggagaaataaactttgttaatcgattgcatagaatagcaactacataaataatgtgttgcatgtttcaaaattgctaaaagtagattttaaatgttttcaccacaaaaaagtgaggtgatggatttaattagcttgatttaatcatttcgcattgtaaacatagatcaaaacagcatattgtaccctatcagtatataaaacatacaattattatttgtccatttttaaaaagttacttttctcataccttataacaagactggacttcctcaggggacacagagcagagtccccgccctcgggagctcataaccgatcccccacgctcgccctcgcggccacactttgaaagccctcccctaccggctctacactcaaacagcccgaggcttcgggcagcctcgagttcggattccacttctcagccttctggggtcactgaaaccctcagaactccgaggacaagtcggacacgccttcgcctcagccatcttcgccagcgcaataagtctctgtgtcttcacactcctggtagagggaaaactaaaacctccgggagccagcgtccggcggtgcctgcaatctaaccgggattt

SEQ ID NO: 435617 - DNA, 1025 bp, Homo Sapiens
  misc_feature (7)..(7): n is a, c, g, or t
  misc_feature (17)..(17): n is a, c, g, or t
  misc_feature (19)..(19): n is a, c, g, or t
  misc_feature (21)..(21): n is a, c, g, or t
  misc_feature (27)..(27): n is a, c, g, or t
  misc_feature (35)..(36): n is a, c, g, or t
  misc_feature (45)..(45): n is a, c, g, or t
  misc_feature (53)..(53): n is a, c, g, or t
  misc_feature (56)..(57): n is a, c, g, or t
  misc_feature (59)..(59): n is a, c, g, or t
  misc_feature (62)..(62): n is a, c, g, or t
  misc_feature (69)..(69): n is a, c, g, or t
  misc_feature (79)..(80): n is a, c, g, or t
  misc_feature (83)..(83): n is a, c, g, or t
  misc_feature (97)..(97): n is a, c, g, or t
  misc_feature (104)..(104): n is a, c, g, or t
  misc_feature (109)..(110): n is a, c, g, or t
  misc_feature (144)..(144): n is a, c, g, or t
  misc_feature (158)..(158): n is a, c, g, or t
  misc_feature (166)..(166): n is a, c, g, or t
  misc_feature (179)..(179): n is a, c, g, or t
gttttancagacccccntntntattgncccctcanncatacgtgncaaaaccncanncnctnccccagnttttgtgctnnccncaatattactcccncccgcanccatnncatcaatggattttgtcttttttgttccccaagnccgggcagtaaagncatagggnttagaggttaggncccctacagggcagatatcaatgatattcccagacagttcagacatgaacatcttttcaatgtatgtgccaactttgcatatcatttcctctgcctgttgttcccaaatcatctactcctgcaatctcacttgcaaacctgatgcagcgagtacactgtatacatcttgtcatgatggtctttaccaatggcccaatgttcttgtcttccacagcacgcttcccctctaaaaatcggctcctatcatttccaaacatcatggactggtcctgcagatcacattcacctccctggtcacaaataggacagtccaatgggtgatttgctaataagaactccatcacaccttccctggcttttttggatttttctgagtttgttaggatattccaacccttcattactggcatggcacaagcagctacaaccttaggggctttctcaatttcaacaaggcacatcctgcagtttccagcaacagacaacctttcatgataacagaatcgagggatctgcatgccaaccttctcacaagcttggaggacggtcgttcccggttccaccatgacagactgaccatcaacaaatacttcaatcaagttgcttgctgctgtggcagttgttcgaacacatcctttaggagacttagaaaggcctactaaggcctttcttacaggtatccttaacatattgcttctccccggagccgcggaggctgttctgctaaactgtctggaccacgacgaccccctaggaggccgggtcgcttattcaatatggcggcctcggctaactctgtcagccgggcctggagaacggcctcgtgccgaattcgccacccaggcc

SEQ ID NO: 435618 - DNA, 3793 bp, Homo Sapiens
  misc_feature (61)..(71): n is a, c, g, or t
  misc_feature (101)..(101): n is a, c, g, or t
  misc_feature (133)..(133): n is a, c, g, or t
  misc_feature (138)..(229): n is a, c, g, or t
cgcacaacaggacaagctttattttcttttatggtctctttgtcgtcggccggcgggctcnnnnnnnnnnncttggccctgtatctgtgagggggtgtttntcacctagcgttttctggagccctgattgcgnggtgnnnnnnnnnnnnnnnnnnnnnnnnnnnnnnnnnnnnnnnnnnnnnnnnnnnnnnnnnnnnnnnnnnnnnnnnnnnnnnnnnnnnnnnnnnnnccagcaggagccacagcatttattctacagacgccaaaggttgtcaaaagagccagcccctattgggaagagggatagagatcatgcggcattaagtattgcacgtggtccttttattctctgcagcaaaaacgattcctacttgctgacgcggaaagctcaggtctggagagccgttatctatagatgcgagcgtgacgatcaacagcaatgcggggttagtggttctagaccgatggcactgacgtggagggctcagggcagaaatttaaggggcactgagacataggactgctcccaagtgtgttccagttactgctgggttaggaggggctctttaaaggtcccaagattcaaatgttcttgtagcagatgaagagctcttggctggacggatggatccagtgggagcctcctccttccccactcagttctttacatccccgaggcgcagctgggcgaaggaagtggccagctgcagcgcctcctgcaggcagccaacgttcttgcctgtggcctgtgcagacacatccttgccaccacctttaccgtccatcaagcctgacacctgctgcacccactcgctggcttttaagccccgattggctgcattctgggggacttgacacaggcacgtgatcttgccagcctcattgtccaccgtgaagagcatggcagaagtctgaggggagtgcatcttgaagagcttcaaggcttcattcagggccttggctgaggcgccgctctccatctccaggatgacaagaggctggttggggttgctgtcgatgaactgcttcgtcttctctaacactcgtttctggacatcggctttgctggctcggtccaagtcatccatgaccttctttagggatttgagagtctcccgcaattcatccttctgccactgggggatgactgcagtggccagggcctctccaaggtcagcgatctccctctgcacatccttgtttggagcagtctgagccttcactttggcttccatgacagagagacatttcttcaagctctctgctttcctgagggccttctgggcctcggcacctgtgacagccacaatcctccggatacccttggcaatggcttcttccgtcacgatcacaaaagctcctgcatgactcgagttccgcaggtgcgttcccccacagaactcaacagaagtcagggagccagcaggcccagaggggtcatccagcaactcggacaccgggaccccaatggagacgactcgcacagggtcaggataggtctcatcaaacacagcccgtaggccctggatggctttcgctgctgccagggggcaatcctgggtatagacggccttggctgcctcaatcatctcattagcaatctcttcagccttcttgatctgttgggtggacatggctcccttggcagtaaagtcaaatctgaggcggtcaggagcaaccaatgagcctttctggtcagcttccccaagcactgagcgcagggcgaagttcagaatgtgcgtagctgtgtggttgctcatgatgggtcttcgtcggggctcatcaataaacagccagacctgatcccccactttcaggtcaccgtagatggttccaatgtgtagcacataccctcctcggacctgagcattcttcactgtaaactctgttttatcttcactgctgtcatccaccttcaccaggtagccttcgtcatagatctggcctccttgctcagcatagaaacaggtcttgtccagcaccactccacactcctggcctgtggacacctcttccacgaacatcttctccctgcgcagagccatcaccgtagccactgtgttctcaaatacatagctaccactggagtccaaatggtaattgtactttggggaatcatctgtgacctccagaccccgtgcccggagctcttcgatagcgtaaatgtccagcataatgaggtcttccccaccagctcccttgccctgtgatttcagctgggccagtttcctctcctcttcaaagccatccatgtctaccaccaggcccttctcttcagcaatcagtccagtcagatccactggaaacccataggtgtcatagaggagccaagcagtgtctccgggaatggtcttgctgtctcccaggctctgaattttcctgtccaggatgcgacgccctctgctgagagtcttgagaaactgcacctcttcttcattaatgatgtccttcaccatgtctgggtccttcttcagctcaggaaatgcatctcccagggactggacgacaacatccactaacgtagcaaagaagcccctgctggcattgagcttttcatgggcgtatcggacagctcggcggagaatccgtctcaacacatatccacgccctgtgttgtcaggccggccaccatcagccagtgccacagtgatggtccgagcgtggtcagccagcacccggtaggccatgtcaatcccatcggcatcctcagcaccaactttcccagtgtatggtcgggcacctgtgcccttctgaatggcttcaaagtaagggacaaaaaggtcagtgtcatagttggacatcttattctgcagcacagataccagtcgttccaggcccatccctgtgtcaatgcttttcttgggaagaggtttcagaatgccatcagcttccctgttatactggatgaacacaaggttccagatctccagcacattagggtcgtcctggttgacaagatgtgcggcgtcccgaccaccaatccggtcgtagtggatctcactgcaaggaccacaggggcccgtgtcacccatctcccagaagttatccttcatgttgcctgggaggattttggtgtcatccagccccaaattttgccagatctgtttgcattccagatctgcttctaagccagctgcttcatccccgccaaagtaagtaacataaagtctttcaatgggaatgccaaactcttgggtgaggagttccagagccatcttacatgccaattccttaaagtaatctccaaaagaccaagagcccagcatctcgaagaaggtgtgatgatagacatccttgcccacatcgtccaggtcattatgtttgcccccagcccggatgcacttctgggtattggcagctctgctcagctttgccatggggtgagatgggtcaattgtgttcaggaaaatgggtttaaactggttcatgcctgcattggcaaagagcaaagtggggtcatccaatgggatggtggcagacgagtgaacatacgtatgctcgttcctcttgaagaaatctataaatcgctgccggatttcacttgctgttagagtagagtccatcttgaaagtcaccccaaagaactctcctagggtcgccgtccccagctcctccctcagagtcccccgccaagggcccgctgcacctattcccgcagacgcgcagctgtaccgggcactcagaccacgacctaccacaacacgccacgccgacgcgtggtcgacgatatcccgggaattccggaccgtacagcctgttgttaaacaacggtcatagtcaaggcgcgagagag

SEQ ID NO: 435619 - DNA, 707 bp, Homo Sapiens
ccagcaccacttccacactccgtggcctgtggacacttcttccacgaacatcttctccctgcgcagagccatcaccgtagccactgtgttctcaaatacatagctaccactggagtccaaatggtaattgtactttggggaatcatctgtgacctccagaccccgtgcccggagctcttcgatagcgtaaatgtccagcataatgaggtcttccccaccagctcccttgccctgtgatttcagctgggccagtttcctctcctcttcaaagccatccatgtctaccaccaggcccttctcttcagcaatcagtccagtcagatccactggaaacccataggtgtcatagaggagccaagcagtgtctccgggaatggtcttgctgtctcccaggctctgaattttcctgtccaggatgcgacgccctctgctgagagtcttgagaaactgcacctcttcttcattaatgatgtccttcaccatgtctgggtccttcttcagctcaggaaatgcatctcccagggactggacgacaacatccactaacgtagcaaagaagcccctgctggcattgagcttttcatgggcgtatcggacagctcggcggagaatccgtctcaacacatatccacgccctgtgttgtcaggccggccaccatcagcctcgtgccgattcaccacccaggcctcgtacctagcctaggttt

SEQ ID NO: 435620 - DNA, 796 bp, Homo Sapiens
  misc_feature (31)..(31): n is a, c, g, or t
  misc_feature (262)..(262): n is a, c, g, or t
  misc_feature (431)..(439): n is a, c, g, or t
  misc_feature (757)..(757): n is a, c, g, or t
ggcagagcagaagcctggccacagaggagcntcctaaggcagcagctgcagcaagcgcaccctctccccactctccccacgccagagcggcttccagagcagatgctgtttccatcctcctcgtcaaaaccattctcgctgctgagcttgacaatctgggcaaggcttgtggggcgcttgacaaacagaatctgccctgtgccgcctggttccgtggcctccagcatgagcctgcaggcagggcgctgcgggaacccagttntgctgccccagcccatgcctccgggtctgcttgtgcatgaatgagtgctcacttgtcccgggtttaggacgtggtcaagtgaacagcagggtctaactgtgcttacttagcccagttcaaacagaacaaaggaaaaatatagaaagcaacatctgttgatcatttaggnnnnnnnnnaaaccaccatgtcactttgagtccttcatgggtttttgaacagcatttatcaagaagaaaatgtgggctttttcccctctcccgtgttttgtttgtcctgtagatagagggaggaaagccgtgcagtggcaggcgggaccccctctggtggcgggaccccctcttgcggtggtcttgcggggccagccgggacctgtcactttattatttaaggagtgtgtgtgtagagtcgctggcttattaacagtattgtgtgtgggttgggtttttagtttgttccttctttttgaagtcccttcatttcaatccttgactctntctccccttcccttgcccagctctgttgaatgctgctgt

SEQ ID NO: 435621 - DNA, 608 bp, Homo Sapiens
  misc_feature (343)..(343): n is a, c, g, or t
  misc_feature (399)..(400): n is a, c, g, or t
  misc_feature (402)..(402): n is a, c, g, or t
  misc_feature (422)..(422): n is a, c, g, or t
  misc_feature (438)..(438): n is a, c, g, or t
  misc_feature (450)..(469): n is a, c, g, or t
ccctactctcggaccatggtctcaggccctgagcctgctgcgtcagaacaccaggtgtcttgcaaagagggcctagcgaattgcctgggcacactgcttccaggcacagggtctgttctgaattcagggaaggtgaagagaccccccttctatccagctcaagcccaagaacaaggcagacagagctgtggacagcacccgaccacagacacggttctgcctgctgctggagtgagaggcctggtttctgaggctgcagcatggcactggcattgcctgtgctacagatggggactcctgcgagtctcacaaatacagggagaatttcagttcacacaacccnagggccctgtgttcagagcggccctcacacgcgcacagcagcattccacagaactnnancaaggggaggggaaaaaaantccaggattgaaatgnagggacttcccnnnnnnnnnnnnnnnnnnnncccaacccacacacaatactgttaataagccagcgactctacacacacactccttaaataataaagtgacaggtcccggctggccccgcaagaccaccgcaagagggggtcccgccaccagagggggtcccgccttcca

SEQ ID NO: 435622 - DNA, 1082 bp, Homo Sapiens
  misc_feature (282)..(282): n is a, c, g, or t
  misc_feature (391)..(391): n is a, c, g, or t
ctttcctcctcagatccatggtgggactgagctcttgtcagtcttcgatgctggtgaatctgtttctgttcctcaattagtctcttctctatacattctttggcaattctcaatgcctcttttaactttgtagggatcttaaactgtggtttttcagaagtggttagtaaaacatcgctgaataatggcatctgtaagagccgggagatggtaggcatgccatttttacaggcttcacaagacagcgtagactccaacacggccaccacagccatggacggngcaggagggaaggagtccacaggcaccgagtctggcggtcgtccataagtcatttcatacagtaagtggccaaagcagtggacatccacactttccaatgtattgattntcctgaattgtgaagccggcaagtgtccccatcgagcatcacattggaggcgtgaagatgcccataagggaatcccttgtcatgaagaaacttcagtacctctaatatttgccgtccatatgtttttatttgctggagttccaggccctgaatcttcttagggttgcagtacttctttagaaatgggtcttttggttttgccttgtagatcagatccttcaatgttcccttttcgttaaacatcctaattagcaacgctgaggattcattagctgtggcaaaggtaacccgatagatgtaagggtgcaaacaagaaggcagaagtttgattagacactgaaaatctttatctgacaaatacttgtctgggccaaggtcagcccagcttaacactagccgttcctttggctgatttttaatcttcatcaagaaatatttcttccttattctccaacctatgtctttcaaaggttccaccacctcccactttggttctgatcggaagaacatggaaacctgttgcaaggcaatctcgtgtgggactgcaggctctggctcgcctcgatggctgctgtcagcggcaccgtgtcgtccagcagcaccttgccggctggcggcttctccatgaaggccatcccgggacgcccggccgccgccgcctagggacgcgaggtaggaacccgaggccgct

SEQ ID NO: 435623 - DNA, 874 bp, Homo Sapiens
atcttctaggttcagtacttctttaacatggtctttggttttgccttgtagatcagatccttcaatgttcccttttcgttaaacatccttaattagctacgctgaggattcattagctgtggcaaaggtaacccgatagatgtaagggtgcaaacaagaaggcagaagttttgattagacactgaaaatctttatcgtggacaaatacttgtctgggccaaggtcagcccagcttaacactagccgttcctttggctgatttttaatcttcatcaagaaatatttcttccttattctccaacctatgtctttcaaaggttccaccacctcccactttggttctgatcggaagaacatggaaacctgttgcaaggcaatctcagtatagtttgcggaatagttgtttggatctaaaaacttcttaaccagctcacaattagacaagatatgatttgttgtgatcacgttgagatagttctgaagacctttctgcctttcagctatgaattcacgatccatgttaccaatcaattttttgggaggaagaggtagacttaggcctgcaatctgtaagctgttgttaagcaaatcaaagtcactgtatcttctaacaatctgccagctgttttccacagaaattcctctttgcactcgaataatatattccgtgtgggactgcaggctctggctcgcctcgatggctgctgtcagcggcaccgtgtcgtccagcagcaccttgccggctggcggcttctccatgaaggccatcccgggacgcccggccgccgccgcctagggacgcgaggtaggaacccgaggcgccgactcccgccgcccgcccggttccaccgccgccgctgtcaacacgcccgct

SEQ ID NO: 435624 - DNA, 451 bp, Homo Sapiens
gagaattccttattgggcctgccttccttctaccgatcttatttttcacaattcaggaaaatcaatacattggaaagtgtggatgtccactgctttggccacttactgtatgaaatgacttatggacgaccgccagactcggtgcctgtggactccttccctcctgccccgtccatggctgtggtggccgtgttggagtctacgctgtcttgtgaagcctgtaaaaatggcatgcctaccatctcccggctcttacagatgccattattcagcgatgttttactaaccacttctgaaaaaccacagtttaagatccctacaaagttaaaagaggcatttgagaattgccaaagaatgtatagagaagagactaatttgaggaacagaaacagattcaccagcatcgaagactgacaagagctcagtcccaccatggatctgaggaggaaag

SEQ ID NO: 435625 - DNA, 477 bp, Homo Sapiens
cagatcctcaacagtgttataagaagaagaaatgaagaaatttggggatttgtaagggaggaagatgtgccttagtacattaattgttgacattttatactttcccatctgaaaagccaatgaaattgtggccagtaaattttttgaaactggttttgtagccctgccatacagttaattgagccttttcttacataagcaggagatacagtataaagtgccagcttgcatcatactgtcaaatttcaggattattccatttttctgtctggagccattttctgtttgccttgcagtgccagaagtagaaggggaggcagagagcatcagctccctgtgctcacagatcaccaatgccttcagcacacctgaggaccccttctcatctgctccgatgaccaaaccagtgacagtggtggcaccacaatctcctaccttccaaggttggtgccctctggacctgctcagctgtttctt

SEQ ID NO: 435626 - DNA, 1141 bp, Homo Sapiens
tggcataggaagggctacacagctcttccatcaaggcctggcattttctactggtagagatggatttttctacagaagagctcagattttatctcactcaaaagacgtgcttgatgttttaaattggaaatttacaaaaggagtgaaatgaagtgtgagtagtaaggtagtgggtgtctgtgtacatcctcatgcccaaccccagaagcattgaagcctgaggcttagcctctcccaggcattcctcaggtcctctgaaggaccttccgtcacacaagctgagaacttgctgaatttgaaaagcaatttgccctttggcatcatcatataaagagatttacctccagatgataataggtgaagacaaagacttacaggtggttgattgttgttggtttttaaagccaactgtgatcccatcaatgtatttctaaggaaaatgtaaactgttcatacattctcttaaacatcacagtgaaaagcaagtacccgtatgtgtgatagggcaggcagagggctccacctgctctgcccttggcaaaggcccttggctacactggtgaaaatgccagctcggcttctgcacggatacactatgttgtgccatccaactggagtgccggtggaccccaaaggcagggcagggcagggggagggggtattttgaaatgttttcaggagctctgtccagctgtctctgtcttccagcccggaactgtctgcacaaagctacaaggacactgatgagaccatggatcttgctgctgttctctaggggaagacttggcttggagtgtggctgcctggatttctgaaagtgtggtccttgactccatggagtaattcttgtagttttgcttggcagattgccaaaagtttgatggcctcttcgtttctgtcttgctccataagcagcagggccagctccagcagggcgtttgggatcaagtagtggtcatatttaatcttcttttcattggcagagatgctcctaaaattctccttggtctcctggacacggcccaggtatttcagacacaggcctttcaacaatttcaccaagcactcgtcatccactgagtactcgttctctgaaaataaggggatgtgaggggaaaaaggacagactttgttcatttct

SEQ ID NO: 435627 - DNA, 1144 bp, Homo Sapiens
  misc_feature (692)..(763): n is a, c, g, or t
ttttgcaaaatctgttatcagctttattagggaaaacatcaggtctctttacacgttgaacaggaactgctggttaacaagacacgattaacttgctaggaatggacaaggacagcgacaggatggtgcttcacagtgcctcctgctgatggcaccttcattctggctgcagaattctcccaggaagggtcccgggctcttcaggaggcatttacttggaagtacaggtcagcgttatccaaagttgtccagcctccggcctggcccatgtcttcaggcagctctgaggcaagaataaaagggacgagttccctgccccctttttacccgctggatcagcttctacgacttggtcaaactatctttctttctgtctgccatgccaggaaatccagtgacagcaagacccagagtcaggcacatttggagggcaggtccatcggccactcctcacttctgtgggctccgatgccagcagagccacctgagcggcttgctacctcttgccggaggcagtttcttctggcctcacccacccaaccatgggcctacgtcagggcagaagggagagaagaaagagagatgagagatgaaaggatttaaaatgggcaaccatctttgaggtttcccacatctgcaccgctccacagtgtgaaaagggctttctcactttcacatgatccctgggggcnnnnnnnnnnnnnnnnnnnnnnnnnnnnnnnnnnnnnnnnnnnnnnnnnnnnnnnnnnnnnnnnnnnnnnnnactaggtctatgtccagtgctctttccagggtaacaggttgcttctactcattttaaaggactaaaaacagaaaaacaggcacccaactgacccttcctccctgacgatctagaacttacacattacgtgctgcctttgcacatgccccagctggaatgccctttttcttttctgcctaaacctgccctttgaggccccactccatctctctcctctggggcgtgcccaggctgagcctgagccatcatcgatgactttccctgagctgtatacccagcaggcttcatcaccacaccatctcaccgacatgattgtctcctctaagatactgtggggttcccttgagggcagagaagtcctttttcatctttggagacaga

SEQ ID NO: 435628 - DNA, 687 bp, Homo Sapiens
  misc_feature (264)..(290): n is a, c, g, or t
  misc_feature (665)..(665): n is a, c, g, or t
gctggtttttgagattcagatgaggaacttcagttgaaaaagtctgttctagataaaaatttctagtcaatgtagatatcgccaatattttttcttagaatgtcacccacttgtggcatctagcattgaatggaaatccttgattttttaaaattacaaataaccattgattattttaaagcagtatttattaattgtagaaatttcagaaacacaaataatctaaaaaataaaagcaccaaatattcttccaggtcgtttccnnnnnnnnnnnnnnnnnnnnnnnnnnnatttgcttgccaaaatacaatcgtgttgtatgaaatgttttataatctgttttttgttgttgttaataattgccatctttacatgtcaataaatttttatttaatatccagtccagggcatactccggtttctccagttgttccagaaatgtgtttttacagctggttcatcaaaccagggtccagtctagatcttcacgttgcatctggttatcttgtttgttgtactaggagaagacataaggccctgccccagcctctcccatcaagccgtccctgagcgcagtgtctctccagccctggtgtgtgagggagcaccttccttcagggtctggggcgaagacaagtcgagggcctgcgctcacccctggcacntgtggtgccagagtccacgaga

SEQ ID NO: 435629 - DNA, 366 bp, Homo Sapiens
  misc_feature (156)..(156): n is a, c, g, or t
  misc_feature (158)..(167): n is a, c, g, or t
attttttcttgggttaagtgcatgttttgggataaggggttagcatttaagtgctggcagctgggagttaaggtatatatgagaaagtctatatgataatgtattcatagatctaggtgcgtcctctttccatccccactgctacttacccctgtncnnnnnnnnnnaggcctatggatttgtcaactattaagaaaaacatagaaaatggactgatccgaagcacagctgaatttcagcgtgacattatgctgatgtttcagaatgctgttaatgtacaatagctcagaccatggatgtctatcacatggcagtggagatgcagcgagatgtcttggaacagatccagcaatttttggccacgca

SEQ ID NO: 435630 - DNA, 123 bp, Homo Sapiens
tcttatcccaatcctttggcaggcatgcagctccacaggcgatttcttcaagcagctgaagtgtttagccctcctgggttaagagccagataaggagaaatccctttcctaggtttggaatgt

SEQ ID NO: 435631 - DNA, 1095 bp, Homo Sapiens
cggtccggaattcccgggatctggagccagccggagcggcggcccctccgcggagcccggtcacagtcactgcagcagacatcatggctgtggatgtggcagaataccatctgagcgtcatcaagagcccccctggctgggaggtgggtgtctatgctgcaggggccctggccctgctgggaatcgcagctgtgagcctgtggaagctctggacgtcggggagcttccccagcccctctccgttccccaattacgactacaggtaccttcagcagaagtacggcgagagctgcgcagaggccagggagaagagagtgcctgcctggaatgcccagcgggccagcacgcggggaccacccagccgcaaaggcagtctcagcattgaggacacctttgagagcatcagtgaactggggcctctggagctgatgggccgggagttggacctggccccctatgggaccctccggaagtcccagtcggccgactccctgaactccatctcctccgtgagcaacacctttgggcaggacttcacactgggccaggtggaggtgagcatggagtacgacactgcctcccacacgctgaacgtggcggtgatgcagggcaaggacctcctggagcgggaggaggccagcttcgagtcctgcttcatgcgcgtcagcctgctgccggacgagcagatcgtgggcatttctcggatccagagaaatgcctactccatcttctttgatgagaagttctccatccccctggttcccacagccctggaggagaagagccctgcggttttttgtatttggcatcgatgaggatgagcgcaacgtcagcaccggggttggtggagctgaagctttcctgtgcttgacctcccgctgcagccccttcagtggctgggtctatttacagggaccagaacaaggcccgcccatggcttgggggggaaaaatcctgctctccccttaggttccttccccccaagcggaaggcctcaccccggggccccggggtcacaggccaagaaacctccttgtgggagcccaggaaaagaacccacggggacccccttttttccaagggggcacccattcg

SEQ ID NO: 435632 - DNA, 2702 bp, Homo Sapiens
  misc_feature (731)..(731): n is a, c, g, or t
  misc_feature (2239)..(2250): n is a, c, g, or t
  misc_feature (2269)..(2277): n is a, c, g, or t
tttttttgaatttctctctttattaagtctacccccagccacggaaagaggagtagaccatgattactgtgaacccccccttaccccaggacactgtgaatctcttcttgcctgtgccctccccctccccctgcccaataaataaaaaggggacaaggaagtacacagcgagggaagggaggagtgtgcacccaggacagtgtctgtgtagagggtgagctgggcgagaataaatagaccatggaccccatggtggggataaggaaggacctcgcattggccaaggcaggggcaggcgaggcgctgagtgcccttgcccaaggccaggagcagagggtgggagcccgcctgcagctggagcctagctttgcggggcaggggaagatccctgatggcagcttcctggtcaagcttgcccttgtcaagtcctgccacgaggggctgagcattctgttgccaagaccaccattgcctctcctcgtctccccccagtgaaagctgggctgggcagggagtcctcagaagccactctggcaaggccaggggtaggtgtgtttctctctgggcccctggacaggagagggggtggggggactgacagctctgggtttagcttttccccttctgaggtgctgtctagctctgacccccactggcggccacctggggtgtaagccgctggaggggggcctccttggccccctgggtcccctgtagccggcgtagcaagnctcctccagaccttgccataactcctgacgctcctgggccttctgctgctcctgctgcttttccagcttgtaggaggctgtgagctcatcaaacagcttcccattcatctccatgaaggtcttgagcacattgtagatcagtgatacgatggtttggttccagtgctccttggagacttggtagagggtcccaaacacagcaggcagcacagtgtggcagttgtcctcaatgaggcttaggatatactcattgttccagaaatacagagcccgctctgcaacctggaaatgggggctggaaacacagcgagccacctgcttaaaaaggggctcctggatcttcacaaactgggagggctcgatgacatcaagaatctcttccatctcccccagaaacatcacctccttctgggtgcaggtttttggccagtatttgagcagcccccggatcacgtgctctgtcagagtggcatccttctccaggaactgcaccacacagtatgccagctgggcatggaagacagacagcgacttgacagagtgcagggggatcaggacgcgaaccaggaactgcttgtgctccgtcttcaggggcagcgcaaagccattgatgatgcttcctaggatctccagcagctcagccacaccattgaagtgctcgaattcatagatgaaccggaggaagatgtggttgcactgtttgcggatgtaggcccggagacccaggaacttgccatagacccggtgcaggatggtcttgaggtactcacgctcccggggatcctcactatcaaatagctccaggagcatcaggacaaacttttgatccacatatctcttggccacggagggctggaagtctgggctctccaagaaacgcaggaaaaactatataccagctgcaggtgtggccacgaaggctcaagattgggctcatcctcttcagggtcaaattcagggttctcactgggcggcagagtccggaagatattcactgagatcatgcggatgatgtctgggtagacgggctcgatgaggacaccccgggtgctccccacacactccaccagctcgttgagggctgcccgcttcacctccttccccttgaggtcggccacacagtccaagaagtcaaacatcaccccacactgggccagcttccggctcagcagctcgtgcagctcggaagccggcacatctttgagcaggggcagcggtgtgagctcttgctggttgctctgatagcggaactgagaggagctgtgggagcggcggggccgggctctgcggagggaacggcgggagaagccgtccaccttgtcgggtgggggtacaggcgacagtccgggggaggaggggctagtgggggtgcttgcagggggcagcttcgtctccatggcggtcaggcggcagggcaagctttcagagccccgggggttctctctgggcctgggaggtgctgggtgagactggacagactaacttggtcccatcctgtccggcctttnnnnnnnnnnnncacaaccacagtcctgggnnnnnnnnnagggcctcctgcaactgcccagtcctggggggcagacagggtagaaaggaggatggctcaggcctcagatccttcctgggggtcccgaagagtccagttagggttcccaccctggctttctcgaaaacctagacttcggtcgccaacccccgggggctgcccgtagggagggcgacggccgttcagggccccttcgcagcggttccgctcggggcgctggggctgggcggcggcgctcctgggttctctcccgggctccgggggggcggctagagcatgcccccaactcagccccgggccgggactgggcgctcggcgggctctgcaccggccgtcgcagcgcgcggatctccgctgaagtcctgggactccgacccaacgcggtgcagcgcaacgggagccccggctcggctccgtgcgcaccg

SEQ ID NO: 435633 - DNA, 466 bp, Homo Sapiens
  misc_feature (95)..(95): n is a, c, g, or t
  misc_feature (399)..(399): n is a, c, g, or t
actgacaactctgggtttagcttttcccctttctgaggtgctgtctagctctgaaccccaactggcggcccacctggggtgtaaagccgcttggnagggcctcctttggcccctgggtcccctgttaagcgcgtagccgcagctcctccagaccttgccataactcctgacgctcctgggccttctgctgctccctggggagagagggtgaggcagctccctttcctggggccccccacagtccagactccctcacagtccagactccctcactaccaccccaccggcaaagggaaggcatggaaccatttttgttctgtgactccataaaaaccctctactgagggaagagagcagaggacagacagatcccagcctgcagtcacagagaagatgacngggtggggcctgagtggttctggcttctgtaggaagctacagggagtcagaacaagtcttagctact

SEQ ID NO: 435634 - DNA, 441 bp, Homo Sapiens
ttttttttgaatttctctctttattaagtctacccccagccacggaaagaggagtagaccatgattactgtgaacccccccttaccccaggacactgtgaatctcttcttgcctgtgccctccccctccccctgcccaataaataaaaaggggacaaggaagtacacagcgagggaagggaggagtgtgcacccagggacagtgtctgtgtagagggtgagctgggcgagaataaatagaccatggaccccatggtggggataaggaaggacctcgcattggccaaggcaggggcaggcgaggcgctgagtgcccttgcccaaggccagggagcagagggtggggagcccgccttgcagctgggagcctagcttttgcgggtgcagggggaagtttccctgattggcagttttcctgggttcaagttttgcctttgttcaa

SEQ ID NO: 435635 - DNA, 784 bp, Homo Sapiens
aaagaatcagagaagactgcagagtcccagacccctaccccttcagccacatccttcttttctgggaagagccccgtcaccacactgcttgagtgtatgcacaaattggggaactcctgcgaattccgtctcctgtccgaagaaggccctgcccatgaacccaagttccaatactgtgttgcagtgggagcccaaactttccccagtgtgagtgctcccagcaagaaagtggcaaagcagatggccgcagaggaagccatgaaggccctgacatggggaggcgaccaactccatggcttctgataaccagcctgaaggtatgatctcagagtcacttgataacttggaatccatgatgcccaacaaggtcaggaagattggcgagctcgtgagatacctgaacaccaaccctgtgggtggccttttggagtacgcccgctcccatggctttgctgctgaattcaagttggtcgaccagtccggacctcctcacgagcccaagttcgtttaccaagcaaaagttgggggtcgctggttcccagccttctgcgcacacagcaagaagcaaggcaagcagaaagctccgcaccaaggtggagaacggagaaggcacaatccctgtggaatccagtgacattgtgcctacgtgggatggcattcggctcggggagagccctccgtaccatgtcctgtagtgacaaaatcctacgctggaacgtgctgggcctgcaaggggcactgttgacccacttcctgcagcccatttatctcaaatctgtcacat

SEQ ID NO: 435636 - DNA, 975 bp, Homo Sapiens
  misc_feature (37)..(37): n is a, c, g, or t
cttgcagggtctgggcctggtttgccgcaggactgancacaaggacctgggtctgggcctctttggacctctggttcttgccatggttgaggtccggggagtagatttgacagagaataactccggagccagtgttccacgtggccggtaggctgctgcccgggcctggtctcttggtctcttctccggccccgaaaaaggcccttctttgtattccactgcagtgggctgagaactgcatttgcgatggggaagttcacatcctgccattgctcaggctgggcccgctgcctgcgacatgctcagttcttttcctgcccctccaagcacagctcctaccttgtcaaagaggcccttcctgtttccctagccctcagagccccctgagtccacacagctgggctgccatcagcactgagcagatcctccggggcaggggagctagtcttcctgatgccctaagggccgggtcttcttcgtgttacccctgctggtgcctagcacagtgcctggcccccaagattcactgggttccagaacatagcccggctcggcagctggcctaccgggaggagcagggttgagtcctctgtccctggcccagccacagctggtcctcagcaggagcagaccctggggccctggacacagagccacgcccactcctctgctgcaatctggacagagagaccaggatgggtcatgaggactctgccaggggaccccagtgttcacggctccagctgggctatggagagggcatcagacagagctgagtgggtaccgggctccagcagctccattgcccaactggcccgccctggttgctagtttcgccggacagcgtgccacatggacacgggcctgcgcagcgtggccaacatctggttccaatgtgtggttcccatgccactggctgacggcccaatgatgacatggcccacgttgtccccacggccgtcgctgctgctctca

SEQ ID NO: 435637 - DNA, 499 bp, Homo Sapiens
  misc_feature (390)..(391): n is a, c, g, or t
  misc_feature (425)..(425): n is a, c, g, or t
ctttgtcctgcccaacattttactaacccaaaagcaaaaacagtgttttcccatgccttttgcattcatgtttcctgtgttctagctcccccaagccctaaacatgtgcagaaaagtcactcactaccagaagagccctggatgacgttgacaatgggcgggatggtcctgggggagatgggggatagaagagattgctcctgcttgggcccactgaggtctggcagcacgtggctagttggttctgtgactggcctgtggtgacggaggagatccccatcaaagatcatctatctcctaattcgagaagacacttagaactggatcagctccctcagaaatccagctcctccaaagtagggctcgatataatgtactgattttctatgnnaccaagcagcactgtgaagagtacttgataaagnttttaattaaaatttctgtttcagcaccttccactgccaggagcagtcatgttcctgaaagctggtgatttagc

SEQ ID NO: 435638 - DNA, 489 bp, Homo Sapiens
  misc_feature (33)..(33): n is a, c, g, or t
  misc_feature (162)..(162): n is a, c, g, or t
  misc_feature (380)..(380): n is a, c, g, or t
  misc_feature (416)..(416): n is a, c, g, or t
tctctcgggctcaaaaaggtatagtgctacagntattaatgtaggtaattgtatatggcatctcgggaaagtgaaagatgtgagatggtacatgtgcctacatgtgcatgaacgtgtgtgtctatgaaggcatagttgaggttgaagggtttcacgataagnactttctattccttgctgatgcattcatcaccatgcctaactcaggcccagttttgcaataggttctaaatattgctttctcagtgctgaatggtctccaaagactgtgcctctgaaactgagagctattgctagcagggtaagaaagactgtaggaattctccacctgctgttcccgtgtccttccctgctgcctgacttcctgcccgggaaccaanctagtggagatgaaactgaaaaatgtggcacctttngaatcccagctatgacagtccccagtgaatagctggggctaggaaggaagaggaggaaagtgttccaatcagt

SEQ ID NO: 435639 - DNA, 2033 bp, Homo Sapiens
tttaatagacagaagaatttaatacatgtgatgctttgccttccatttacactatcataaattacaaagtattgttcacttcacaaaataaaaccatttccagataattttttgacagtatcaagaagtacataaactacaacaaacaaatctgtacagttgggaggagggataatagcagggaagaggtcaaacctccctgtgccaatggagtccatctgcatagcccttgggactgtccaggtcaacagtcacacaatgatgctccacgtaaaatagtcattctcttctgctcactccaaagcaagactggtgagtttacacaaatcatctcaatcaaaggaaaagacattgcagttggattttttaaaaatctagatttacagtttttgatgttttaaatatttcacctatgttacaaaatatagaaatcttggtgtgaaaggctcatgctaagataaatataaccaagtgactggaactgtagtaataaaatcatattatccacacagagctacttttgtcaaggaggaacaaatatttggtaaaaaccaaccttattctcactttaaaaaataggtttgtaaaacaagaatgaaaaacgttggcagttattctgcagattcgcttttcaccaatacagaaatgtggcaaaaatacaatttgatattaacagatgaattcagagggcttggccaggaagaaaagagggtaaagtgctaactttttacacagaccagatacatccagtgttctcaaataatttcaggtaaaatgaccgcattctgtatcttctgggatacacactcatgatacgaaaagactatgaccaattccaaagcatactttgggaattcacaaaatttgtatgcatagaaagtgtgtggacatttcagaccatcctacaattgctataaatacataccatacaatagaagaatgccaatgcttaagagcaaaaactgtccaaagcaggaacacaaggggcaggtgaaatttcattaaaaagcactgaggaggacagaggtatgtcaagataatactgcatttgtggtcagctttttcagggtgtcacagcaaaatgagggacaaggtacacagggtaataaccaatgcactgcattgagttctatttgctaaaaataacaacattctcgtgggtaaaataaaaatacattttacgatacaggtttcatttaacagaattgtcttctttttgtaagtggaaaatgtataactgtatcaagtacctgtatgaattaagttcccttttattaccaataagactgaagtttaaaggtctacattgttttttaataaattaaagatgtattaatcactcttccagcaaaccagacatacataggaggcacagcaaaagacccaaggtgaggggcttccctcaccttcacccttgttctcacgtggaggtggcgcatgtctatgagacacagtaccccactcagcgatcctctgcagtccagcaaattctagcacttgcttggaaaacaaatcaagtggtaagaaatgtttttattcctttagctgtgtcaacttggatggtgctggggccattcagctcatttccctgatggattagaataaaacgtcttcgttttctattaaaatctgcacaatcagcttttggtaccgcatatcatgcagggtggtccagggtgctgtcctcagggggcctcatcagagtgggcccaaacacgatccccagattttctgcattcatgaaattgtctttttcattcatagtaacctttttgaggtggatcattaggtaccggagggtttcatagtgggcaggaggcagcagcatcagcacttcatgggcagcttccagcctctcatctgcattggagatttttgctgcatctataaatttggaataggtatcatatgtgatgacagggatgggtaagtctctgaaatacagtttaagggctccagtgatgatgtttatgtctggatagacattggcagatatatcggccttttcaccatctctgtcaaatgccattttg

SEQ ID NO: 435640 - DNA, 1616 bp, Homo Sapiens
  misc_feature (841)..(993): n is a, c, g, or t
caaattgctaaaaatgtgttgtagtctcacaaatgcaccacactgtaacagtctctcttgtgatgtatcccccggagttcttaatctcacgtccaatatgattaagaagcacagacacaagggtgaaattggagtaaaagtttaataagtgaaagaaaaaagctctccacagtggagatggggatccaaataagttgcccagtatgaggctggggtccggggtttttatggactgggaaggggaaggaatgcacttagcctgcgggctgtcttggagaaagcgtgattcagcttggtctgggaccttggcccgggaccaatcaggaaccgaagtgatgattcataagggctattcagcttggcccgggaccaatcaggagttgaagtgattattcctaagggctattcagcttggcctgggaccaatcaggagctgaagtgatgatttacagaggctgggcttttccttttccacaaaagaaagtgccaacctgaacctactgaagcccactgtgttcatgcccacaaaagaagaaactttttcctcggagcctgctgattatacaaaggacaaaggcatttctgtgtctggtcttgttcccttaactgagtgagccggaggtttgtgcgagtttttacctgaatgggctggaggttcttctatctgtgcaggcatgggcatgtctccaggcacaatcccctgtgctagttcccttatcagtgcctgtagcttgattgtcttccccaggctgctttttgtgttatgtggggatgagacactgacccctttggctgggggtctccagggacccttcccttgctgtctaccaactcctctcannnnnnnnnnnnnnnnnnnnnnnnnnnnnnnnnnnnnnnnnnnnnnnnnnnnnnnnnnnnnnnnnnnnnnnnnnnnnnnnnnnnnnnnnnnnnnnnnnnnnnnnnnnnnnnnnnnnnnnnnnnnnnnnnnnnnnnnnnnnnnnnnnnnnnnnntaatgataaaagtatatccagattcaagcgcctcttgtagcgtctcccacaatcctcacatttggatgggttttccccactatagtctctcggctggtctttacggtatgtcctgtgtacaagcctctttccacagtcctcacatttgaaatggtttttttctggcagtggagtctcttatgattcaaaatacttgaggcccggctaaagttcttcccacattccttacaattataaggtctctctcccgtgtggaccctctggtgcaagtcaagattaaacttagtaacatagcccttcccacactcctcacatttatatggcttttcaccactgtgggatctctgatgggaagacagttgtgaatttgtataaaatcccttcccacattcttcacatttgaagcttttttctccactgtggactcgctgatggttcaaaaggcatgaggaccatctgaagctcttcccacattctttacaattatatggtttctctcctgtgtggaccacctgatgcttataaaaatctagcctaccaataaagccttttccacactgctcacaatctgtacggtttctctcctgtgtggaccatgcaatgcctattagtgctgatctctg

SEQ ID NO: 435641 - DNA, 548 bp, Homo Sapiens
actattgtaaagaagctttatttggccccatctgatacatcctaagccaatattaaatgtttcagtttcttagggaatcggctatccaggacatttccaagccaaactaccagctaatgctaaaaatcaaggcaaagtaaaaacaaaggaagagtaactttggcacaagacaaacccgatgcaggcagtcatgggggatgactgttttttacccagaaatgcaaacaggtggccttctgtgccccatttaaagaatcccaaacgggagagtttcctgccaatgtgcaaatccgtcaatactccctgagccatgtggccggcaggtccaatcctaccgtgactttccaagcgcaagcctcgtctagttctttttgctcagttgttgtctcactgacgccctttgccactgagatccctgtaagtcactacagaacaaatggcaactgcacatttaggatgacgtcccttgtgctactcaaacaggccaccaaaggaggagctctagaaaacccttactatttcctatgctttgagctgcccaaacctat

SEQ ID NO: 435642 - DNA, 1106 bp, Homo Sapiens
gggtgaggcaggggctgagagtgcggagtaaaagctacccccgtgaaagggtcactgggcactcggccccatgtggcttcactgcggttacacttctccagtgtgctctggtcgatgaccttgcctgagggcaagcaagcatgggacaaggcatgatctcccagggtgatgggatccaggaactcctcaggcacatcctgaatgatctcggccagcttctgcaggctggagggagcctgctggctctcaggctggtccccagggtcacagtcactttccatgggcaaggctggagcctgcagagccacatcctgaggcaggttctctgaggtgaccagcaggatgctgtctatcacttcctgggagcaggtcttggccggctgaccccacacttccaaccgcttgatacaagggataccgccgcctgtcacatgggtgatacagatccttaagtgggccacgtggctaagggaaagagcccctttattccagagctcctgggccacaacagcaggggaggggagtgtggcttccatcgcgccaaaagggggcctggccttgaagcccctgtggctaaacaccacttggctctggtttttcagtaagactttgcctaccaaggtgaacgcctccttgtctgggacagatggctcagctgggcccagggtccggcactggggcgtattccaagacactctgctagatgaggcagatgtgtacatttccaggccagtgacgttctgacctcccccagctgtgaggtctatgttgatcctacagatttccacattaaagggaaatgaaactgtcacatagactggtggcttaatgaaatactctgtcctgaaaccatgacttctctttgtgagatcttcagagatgagattttctacttcgtaaccatcagctgatatcttgttgcagtgaattcttggtctgaactgtgggaggcaaagatttattaccatctttgtggctgagaggatatcttccaagcatcagaagcagcctgatcctcccgaaggtgggcgccgcaacaccaaaccggggacgccgcgggcggcggcgacacagatactggctcctccggcgactccgagcctcac

SEQ ID NO: 435643 - DNA, 1110 bp, Homo Sapiens
  misc_feature (983)..(1029): n is a, c, g, or t
cgccctagatcggctaaggggtaagcgaaacggccgggggaacggtgattattttggagcgggaccggaaacgcgcggaggtatttgggggaagcacacgtagtggaatgtggtggggccaaatagagggggaaaggtctcccgaggggctagggtggacgggcaggagggggcagtggtttttctgcgagacgaggggctttcacacgccggttggtttccacgcgggcctgtaaaataccatgttgggccgggggccagagtcaggtggtaacccagaggagaaggttgagtctgtgagcgtgatatttgcctcaaactcccattcgcagacctgaacggggtcgtgggccatttgggtagtgagttgcaggggccccgcgtgatcccacattcaatgtagctacccagtgtacagcggagtacttcccagccagtgtcaagagggccccctcttcgcctggccgccggtgataaactagctctcctcccagcaccagccgatgagtgaggctctgcaggaagtgagcaaccatgatcgccggctccccaatcaggtcaggatttcgtagggtcagagtggctgtgtagtcatctccccgatactcgccatcaaactgccatgtcaggaacttggccatgctgcgtctcagtgggactgagctgccaatcccctgcataggccgcatggaggtgatatcccggcaagcccagggcactcatgtgtatagtgtgcgccacctggaaatggctgctcagaaccttgttgacaacgagcttcactccctccatctgtgctgggaatacatctttgcatagacggtgcagctcatcagaagctcccagggttgggcaggggttcctctcggcgggggcctccggcggggcaaaagtccccattggtgccaggcaccaatgtgttccccattttagtccagaggactgggaagagccgaggttagcctgtgaaaggacgctattgnnnnnnnnnnnnnnnnnnnnnnnnnnnnnnnnnnnnnnnnnnnnnnngcctcagaaactgccacatggtccgacgctacaccatctcagaccatcatgctgcccctttccccccggcacaccccgtca

SEQ ID NO: 435644 - DNA, 2508 bp, Homo Sapiens
attcagtacagatgcaaagtagtagctcagaggctctgggtaatagcattcctgagattgatgacatccattacctcactagtccaacttctccagactaacgcagacttttctcttcccttggcctttcctctcctcgccattgggccaattccttcgatttctcatttcccttgaagttagggccattcacagtttcatggtcaaagccagttccaggttcaatagtctgtgatttatccaggctctgaggtatgcaccgcttctgttttgctcgttcctccaagagctagtttggccagaaaggggatgctttataccatagaacacatccaccttctagaacctgctctagaaggccaggccctcagattccacatggttggagttctggccaagtctggagctttcttcacactcggctctcagagctcctgggttcagaaaaaactgagcatggtgagagaagacagtgtcagaccgaggccccctggaggacctttggaacctctgatagtctgtcataccagagcatgattttctctaatgttcagacctggcttcactgaggaatagttcaggggatcagggcctagagacaagactcccaactgccttatttccctcctgttttcctggcaaccccactacttcctccaaaggtttctgtatgcgaagttgctaggcctgctggctgagctccggagcattaatgaggcctacgggtaccaaatccagcacatccagggcctgtctgccatgatgccgctgctccaggagatctgcagctgaggccatgctcacttccttccccagctcacctggaacaccctggatacactggagtgggaaaatgctgggaccaaagattgggccgggttcaaagggagcccagtggttgcaatgaaagactaaagcaataactgccctcttcatgcggtcatggggatagtgggggtgaccataggaacaaagttgttctctggaagcacagaagatgggaaggaggaaacctcagggctaagaggtaaagaagctccttctgggaatgggtgggccccacttcctgagaccaaacatctagcccttcagccctactttcccagccttgggaggctctgggatggaaaacaggatggtcagctaatcccatgcaggattaaccaaagggaaaggaagaaggaagcctgagggcaaggggtgccgggggaattcagccataccccttaatccttctcccttagtccacagccacaagagcatggggaaggtgatactggggctggtagcagaggggggatcctcggagcctctgcctcatcaactgcccctgtggcagctccagttctgaggagggcatggtcctgtccaccactctgctcctgggtcctagagatcacccagcaaggtgggctctgaagaggggcctagtctttggccctagggcacctgactcagaggttccagctgctgtgggggctggctctggacaacctcagcccacagtgatgctgaagccacaatggaatctgttgcgccagtgattgaggaaggctccaagggctagggtgacaggcagagggggcatcttcttctccagcacagcacctacacaccagttactatccaccaagcctctaaataccatgttggcctggggcagagtcaggtggtaaccaaaggagaatgttgtgtcttgtagccttgtgtttgcctcaaactccactccaacctgaacctgttcatttgccctgtggtagtaacttgcatgggccccgcctgatcccacattcaatgtagctacccagtgtacagccgagtacttcccagccagtgtcaagatggccccctcttcgcctggccgccggtgataaactagctctcctcccagcaccagccgatgagtgaggctctgcaggaagtgagcaaccatgatcaccgactccccaatcaggtcaggatttcctagggtcagagtggctgtgtagtcatctccccgatactcgccatcaaactgccatgtcaggaacttggcctgctgcgtctggaagacagccttagctcggagccgctctgccaagaggagcaagacctgggcgttcaggctgccactgctgtccatatcccctaccacagtggggaacacctcagtgggactgagctgccaatcccctgcataggccgcatggaggtgatatcccggcaagcccagggcactcatgtgtatagtgtgcgccacctggaaatggctgctcagaaccttgttgacaacgagcttcactccctccatctgtgctgggaatacatctttgcatagacggtgcagctcatcgaagctcccagggttgggcaggggttcctctcggcgggggctccggcggggcaaagtccccattggtgccaggcccaatgtgttccccattttagtccagaggactgggaagagccgaggttagcctcctcgtgccgattcagccacccagcctcgtacctgaccttactttgctg

SEQ ID NO: 435645 - DNA, 605 bp, Homo Sapiens
agtgaggctctgcaggaagtgagcaaccatgatcaccgactccccaatcaggtcaggatttcctagggtcagagtggctgtgtagtcatctccccgatactcgccatcaaactgccatgtcaggaacttggcctgctgcgtctggaagacagccttagctcggagccgctctgccaagaggagcaagacctgggcgttcaggctgccactgctgtccatatcccctaccacagtggggaacacctcagtgggactgagctgccaatcccctgcataggccgcatggaggtgatatcccggcaagcccagggcactcatgtgtatagtgtgcgccacctggaaatggctgctcagaaccttgttgacaacgagcttcactccctccatctgtgctgggaatacatctttgcatagacggtgcagctcatcgaagctcccagggttgggcaggggttcctctcggcgggggctccggcggggcaaagtccccattggtgccaggcccaatgtgttccccattttagtccagaggactgggaagagccgaggttagcctcctcgtgccgaattcgacacccaggcctcgctacctagccgtagtttgt

SEQ ID NO: 435646 - DNA, 435 bp, Homo Sapiens
caaaaacttttcaataaacataaaagtagagacaccagtttaatgagctatcatatacccatcacatagatttaaaaactattaacatttgcaatatttacttcatttgtttttctgaagtatttacaaaatagttgacagtagttatgtaattgcatcctgatattcatccctacgtaatttactttccctctaaaaacatgagggcactttttatatgatcattgtcatacctaatcaaattaccagtaattccttaatatcctctaggatcaagtttacattcagatgtcttgtcctcaaaatgtcatttgtgattatttttttctttgaccaaagatagtaagatctcaagatttaatgacagagattccatgttagccctgatgtctaagctctgtggtccattgtggctttaacttgaagtctgaggct

SEQ ID NO: 435647 - DNA, 1083 bp, Homo Sapiens
  misc_feature (17)..(17): n is a, c, g, or t
  misc_feature (29)..(29): n is a, c, g, or t
  misc_feature (42)..(43): n is a, c, g, or t
  misc_feature (51)..(51): n is a, c, g, or t
  misc_feature (77)..(77): n is a, c, g, or t
  misc_feature (101)..(101): n is a, c, g, or t
  misc_feature (103)..(103): n is a, c, g, or t
cctgcacccggcccagntttgtgtacatntcagagttttaanntttatagngggagaagcactgaccatcagttttngcgacaatgggtcatccaggacgncnttcttataatttccaggtggggacaagccacatcttgtcagactctctgttatctgcctgtgtgccctcaattctggtgttcacagtcctctccaaagatggtgaacattttctccttccaattcttgggcctcccaggaggaacaaagccagtttgctttttccggtcaagtatgcgcctgtcaattttctcttccctttcaatgatcctgacaactgagaccagcaaggtggggtcacggcggacagtgaccagtgacctctgcagcaccatccacagctgcttagccagctcatcagagagcccctgcgtgctgccaaagtagccatggatgagggtcatgtcacgcgtgttcccactgtccatgcggtactgctcgtacatcagcccgtcccgggagcattccaggtccatcagcttccggtgggcttgcaggagtgccccttgttcaattaggtcctgggtctccctcacaatctcaggcactgagaagatgttcttgaggttctccacggctgcggcgagctggctgtgctgcaccacggcgtctttgacgtccttgaggctctcaatggtgttgatgctctgcctccagtccttgctgacgtctgccagcgactgctggatgtctttgacgtcattcagggcgttgtggagctggctgaggcctgtgcgcaccccgtccaactgtgactggatggcggccttcaatctggcctccacggaggccttcttccgcgcttctctcctgcgatactgctccaccttgtccagctggtccgggcgctggagcatcccagcaaccctttgcactgctgtcgcaacggcctcccggtctgtctccttcatggtgaaaaagctggtggaatcctcacactgttcatgctaggggtgttctctgtgcacctctacggctacgccgccgccgccgcgccgcggtgcagatcttggtggtggtagcaaatattcaaacgagaag

SEQ ID NO: 435648 - DNA, 1387 bp, Homo Sapiens
  misc_feature (43)..(43): n is a, c, g, or t
  misc_feature (85)..(85): n is a, c, g, or t
  misc_feature (95)..(95): n is a, c, g, or t
  misc_feature (213)..(213): n is a, c, g, or t
  misc_feature (228)..(228): n is a, c, g, or t
  misc_feature (240)..(240): n is a, c, g, or t
  misc_feature (1353)..(1353): n is a, c, g, or t
cgcaatggggttttttgcacagttattcccgttcccaccgttntttcccccccgaaaacccgcggaacgcccaggtttcccgganacaggaaggncgcagctgctttctgccctcccctaaccattctttctcgggcaccctcccttgcgttcctcccggggctccgggaaggaaaatgcgcttctgccatgaaccgccccgcaggtactccnacccacccacgcgcncggtgcgcctcnggccgtcatcctcttcttaatacggctttttaattttggcaaaatcgttgaaatagtcttcccacggtgacacagataatgtctacagcgtttgaccctaatagccacttcttcgtcatcaattcattcagatgttgctcccaggtcccaggaagacctcctccagcaaaccgctgcagccctccttcgcgatggcgtctaaaatcccgtccatgctgggctggctcggagacacaccctcttccacttcattctttaaatactttctttttaaactgactatggattccttgaaggtctggcagttgttgatgatggcgatcatgtactgaacgtagcagtgagggtgctgccgattcctcaggtgctcttctttatgacagctgcgcttcatctttatatctgcttaggaaagaattcatctgctgaagacataaaactagtacctttgttttcaaatcttcacttatctgagcagcaacttgaagattctgttcaaacatctggaagacaatggcagggagtgtggtctggtagtacccgtcctggtcggcttctggctctgtctctttgacccagtctttcttgtctgtctccagcgctttccgcagccaggcgatgatgtttgaagtgagcgtggacatgtacgtgtcaagcagctcagagaccacgtgtggagaaagcaatggctcccagggtgccgacatccacttccggggccagctccacgttcctcatcatctcagtacttgtgtaggtgtttaagacccacgtcaagaggctcacgatctcattggcttccaggtcttccgatgcgaggtcctgcatccgcgtgctcagggcttggtggtacatgttcaggaggttcttaaagatctcatagtggggaggaaagcactgaaccatcaggtttttggcgacaatgaggtcatccaggacgtacttccttataatttccaggtggcggacaagccacatcttgtcagactctctggtatctgcctgtgtgccctcaattctggtggtcacagtcctctccaagatggtgaacattttctccttccaattcttgggcctcccaggaggaacaaagccagtttgctttttccggtnaagtatgcgcctgtcaattttctctgccctttca

SEQ ID NO: 435649 - DNA, 1147 bp, Homo Sapiens
catttctctgaggaagccgagaaactttaattaggtgacggggttccgagcacttaagcagatggggtgcggtgaaggcccagggaggaggagggcagggaggtgcacgtcctctgtgccccacacactttcaaccactgcaacaaacaagcacccaagagaggctgtgcggcagagccctgcacccacaggcctttgacagcacagtgaggggcctccgcacgtggcctcgggacgctcactcgacgcacacccggtgcatcacactggcacctaaagacaggccgtgcagctaaaaggagcacgtttggccaaggagagcaatcagctgtcccgcgtttctaaaggcagggaccgaggctgtggaggggcgagcagggcaggccggcggaggctacttgagcagcttggccacgttcaggctgggcaccacaatgtccttgaagaggggcacgtagctggggctggcctgtgctgggccctgctccagggtctccatgatggtctgcttcatgtcacggctggcgtccccacgcacagccagcagcgcaccgatgtggtcatccctgatgtctggatacttgctgaccagagtggagacctccaggtagagcagagaagggtctgtcagcttgatcacttcggccacagccacgatggtgtcgcagtatccgtccacgtcttccccgaaaccggacgccagcttccggaacaggaagcgcagctgcctctgcctccctaaccatcttctcggcaccctccttgcgctcctccgggctccggaaggaaatgcgcttctgcatgaccgcccgcaggtactccaccaccacgcgccggtgcgcctcggccgtcatcctcttcttatacggctttttaattttggcaaaatcgttgaaatagtcttccacggtgacacagataatgtctacagcgtttgaccctaatagccacttcttcgtcatcaattcattcagatgttgctccaggtccaggaagacctcctccagcaaaccgctgcagccctccttcgcgatggcgtctaaaatcccgtccatgctgggctggctcggagacacaccctcttccacttcattctttaaatactttctttttaaactgaccctcgtgccgaattcgccacccaggc

SEQ ID NO: 435650 - DNA, 780 bp, Homo Sapiens
agcgccttcttccagaactggagcctgtggtccttcagagcccggcccaccgcaggctgtaggttcagctgcaggtattgctcctcctggtcgaacagcggccagtgtggcagaccctcgccattggggttcccatttctcgcaaagttggcccagtacttcatcatcttcctgcttagctgctcctcttcctcagtgaatttaatgtagttgcccccaaagaaacttctgaaaacaaaaggaagctcatcaccatggtctgccttcatgtgcggtggcctgatgttcttgagccagctgggctgatgctggaactcgtagaagtacacaggggcccgggaacactgaaaatgtgctacttggagtgcagggatcacaaacatggagtccgccatcatctcctggaactgcgcttggagggtctggggatccccattgtccccaatgtactcctccctcagcaggtcaccaaatgtaggaggcaacatcagcagcgttaacattttctgcagagcagcctgggaggcctctctgtccatttccttctgggtatcatagatcctcatgaccttggggatgagccagccgaattcattgttgttgacaccaacaatgctaggacaggctgaaagtcggcagaggccagcagctcctgggggtgcctgggcaggaagaccccatccaccactccggggatcatcttgaaaggcttgttaattgcaagaatctcctctttactcttgccccgcaggcagcccaccagggcctcagagtcaactt

SEQ ID NO: 435651 - DNA, 1147 bp, Homo Sapiens
agcacgccggccagcaaacacaagcgaccggatcacgtctgttgtgcctggctggccggtgtatactctggcctcagccatcctcccatctcatccttcccaatagctgggattacaagtatgggccatcatgcctgagtaaattcttaataaatgctttctgaatggatggacggaagtatgaatgaatggcgaagtgaatgaaggaatcaacttctttctccttagtgggtgtgtgtgggcacagcaggctgaccctcgcctgtcagcgaacccaccccctcctccccggcacagggagctacagctctgtgtgtctctcttcaggctcctcgagctcctggatcttttggggcagcgccttcttccagaactggagcctgtgggccttcagagcccggcccaccgcaggctgtaggttcagctgcaggtattgctcctcctggtcgaacagcggccagtgtggcagaccctcgccattggggttcccatttctcgcaaagttggcccagtacttcatcagtcttcctgcttagctgctcctcttcctcagtgaatttagatgtagttgccccgcaaagaaacttctgaaaacaaaaggaagctcatcaccatggtctgccttcatgtgcgcgtggccgtgatgttcttgagccagctgggctgatgctggaactcgtagaagtacacaggggcccgggaaccagcagcgttaacattttctgcagagctagcctgggaggcctctctgtccatttccttctgggtatcataaatccctcatgaccttgggagatgagccagccgaagtgcattgtatgtttgacacccaacaatgctagggacaggctgcaaagtcaggcagaagccagccagctacctggggagtgcctgggcatgaaagacgccgatacgacgcaattacggggggcaatccatctttggaaagggcgttgattaatgtgccaacgaaaattctccatcttgaaaattcagtgacccacggacaggccagccaaccaatggccttcctgaagtcaacattcgtgtccaagaggccgagaacggttggacccctcacagtgtagaaataccttacgcttaaactggcacgtaggccggcacgataggacccagactgataaca

SEQ ID NO: 435652 - DNA, 389 bp, Homo Sapiens
cctggatcttttggggcagcgccttcgttccataactggagcctgtgggccttcagagcccggcccaccgcaggctgtaggttcagctgcaggtattgctcctcctggtcgaacagcggccagtgtggcagaccctcgccattggggttcccatttctcgcaaagttggcccagtacttcatcatcttcctgcttagctgctcctcttcctcagtgaatttaacatggtctgccttcatgtgcggtggcctgatgttcttgagccagctgggctgatgctggaactcgtagaagtacacaggggcccgggaacctgtggggtggacagcccatgacacggtggcccctccccctgaagacttcttgcctcacccatggtgataagatac

SEQ ID NO: 435653 - DNA, 755 bp, Homo Sapiens
  misc_feature (133)..(186): n is a, c, g, or t
  misc_feature (657)..(657): n is a, c, g, or t
  misc_feature (662)..(662): n is a, c, g, or t
  misc_feature (672)..(672): n is a, c, g, or t
cagagctggccgtgggggaagagcaatggtgtgcggaggtggggtgaggccctatctagggacaagcagaaaacttagggtgggcagatccccccgacccctgtgcaggggctgccggagaccagagaggctnnnnnnnnnnnnnnnnnnnnnnnnnnnnnnnnnnnnnnnnnnnnnnnnnnnnnnctccacggagggattgagcatggacatggagggccccttccagttagccattctgggactccctgcacctgtccccaggggagggtcctgagctggcctccacgtggctgctgttccccatagtggaaccttgtgtgtggagacggctggaaggtcccgctggagcaggtgagccacctcctgggctggctgctgggctgtgtcatcctgggagcaggctgtgaccggtttggacgccgggcagtttttgtggcctccctggtgctgaccacaggcctgggggccagtgaggccctggctgccagcttccctaccctgctggtcctgcgcctactccacgggggcacattggcaggggccctcctcgccctgtatctggctcgcctggagttgtgtgaccctccccaccgcctggccttctccatgggggctggccttttttcggtggtgggcaccctgctgctgcccggnctggntgcgcttgtncaggactggcgtcttctgcaggggctgggtgccctaatgagtggactcttgctgctcttttgggggtaagtttggtgggagct

SEQ ID NO: 435654 - DNA, 818 bp, Homo Sapiens
  misc_feature (87)..(87): n is a, c, g, or t
  misc_feature (89)..(89): n is a, c, g, or t
  misc_feature (182)..(182): n is a, c, g, or t
  misc_feature (736)..(736): n is a, c, g, or t
taaagatcccagttcgtgcatgttttttgaaccattgcttactatatcactaaataggactttcccttttagcctgcagtatatctntngcgcggtaatctgcaggtgcactacgtatgatggaattgatgggctccctctaccctcaattttacaggattttttaaaagagtatcattatnaaacaaaaagttagagttcgctggttggaacgagaacccagtcaaggcaaagtaaactctccggtccccaaaggttgttaactaggtccgctttcatgtgcatcagacagtacacctatagcaagcacacgtagcagtgttaggctttttcatacagtatgtaagcttagtgttagtatctgtcagatgctacctgctgttacttattcagataaacatggtgcctattggaacaatagcggatagagctacaggtgttcagtaagactacaaaaacattttgcctatttcgctaacagtttggtttttaatggctgtggtatttgagtgaggcaactctggggcatttgttatgaagaattctatttcttactgaagaacaaattattaatatttggatgagtatttcaacagtgtgactaatgtttgaaattattttttctaagagtttttctataaccttccaaaagtcgtgatgtttgtagttactataaatcaagctttggaagtccaaaaagaataaaagactgccttccttttagaaaatgcaattntctggccacaagggcatagtgcagttcacttacgtgatgatgtagtttataatcagacgccttttctcttctgcggactgtt

SEQ ID NO: 435655 - DNA, 514 bp, Homo Sapiens
  misc_feature (20)..(20): n is a, c, g, or t
  misc_feature (32)..(32): n is a, c, g, or t
  misc_feature (46)..(56): n is a, c, g, or t
  misc_feature (202)..(202): n is a, c, g, or t
  misc_feature (324)..(325): n is a, c, g, or t
ctggggccccggaaaccctnttaaaaccgggnctttgggaatattnnnnnnnnnnngggaaagtccgggttgaacatttaagggctttgcttctaggcccagctatacattcaccgggcaaattcacttaacttcctaaatttttttaaaatctgtaaaatggggatcagtctaatatgcctacctcaaatgatgacagaantgacatctatatgcatatgaggccctacgttagttgaaagatgctataaagatataagggatttgttacttgtctttcttgaaatgttacagttggggtgcggttgcttctactcttcttgnnggacctctgcccattcagcatacagctagaggaatctttgggcagatccacattctttagcactagctaggctttgactccaaagctatctggtctaccttgatgttctgagcaggaaaactgaggacctcaagaaccattccaaatttctactcattctccctaagacccagagcagacccaggacct

SEQ ID NO: 435656 - DNA, 885 bp, Homo Sapiens
  misc_feature (812)..(839): n is a, c, g, or t
  misc_feature (853)..(854): n is a, c, g, or t
agtttccagttaaccagcccaagaggtcctaagtggacaaaactctttcctcccctcaaaacccttagtttcccctactggagcctccatatccccatgcctttgaatttccagagttttacctggtgcctagaaagaaaaccctaaaaggcagtgtgtccagtaacaattgtttaagagcaggtgaattaagctcgattctgcctgacacgtctcttttctgggtgacacagtgagtcactcaggaccagacagaaggtgataaaaacaatcagtccctggaatgagatttctctggcaagttagacccttaagaattgagatctcttaaggatgcataagtttctgtaagtgaaagtgacacctgaaccaccaaaatgatgttgacagcaaatctccttttgagaaatggtgtgaaaaaaccctcattatttagacaacacagcgaaatggcctttctagacagcttgggaggatgaggtgtctaagcacaattacttccagcatattggaaagcctgctccctcatctcttgtgaaaacagaacaatgtttcaccaccacttgtttttgtgcaattgcaggagagaaggaatcatgcctcctggttgagtttgattccctggttcatcttgaggctgcctctaaggaggggcatgtgagccaggcccttcccaccactgtctacaatagggggcagttctgtctgcgtggtgacaggcttcaccttgggatcttctcacctcttcttcaactcttctggtggacacccctgggaaaggtacccctgtttctgttaatcattacaatctnnnnnnnnnnnnnnnnnnnnnnnnnnnnggccgggcgggacnncacgcctgtaatcccaacactttgggaggcc

SEQ ID NO: 435657 - DNA, 1400 bp, Homo Sapiens
tccccgccaccacagaccttcccccgccccacccctctgcagacttagccgtgcattgcaggcatggaggattaatcagtgacaggaagctgcgtctctcggagcggtgaccagctgtggtcaggagagcctcagcagggccagccccaggagtctttcccgattcttgctcactgctcacccacctgctgctgccatgaggcaccttggggccttcctcttccttctgggggtcctgggggccctcactgagatgtgtgaaataccagagatggacagccatctggtagagaagttgggccagcacctcttaccttggatggaccggctttccctggagcacttgaaccccagcatctatgtgggcctacgcctctccagtctgcaggctgggaccaaggaagacctctacctgcacagcctcaagcttggttaccagcagtgcctcctagggtctgccttcagcgaggatgacggtgactgccagggcaagccttccatgggccagctggccctctacctgctcgctctcagagccaactgtgagtttgtcaggggccacaagggggacaggctggtctcacagctcaaatggttcctggaggatgagaagagagccattgggcatgatcacaagggccacccccacactagctactaccagtatggcctgggcattctggccctgtgtctccaccagaagcgggtccatgacagcgtggtggacaaacttctgtatgctgtggaacctttccaccagggccaccattctgtggacacagcagccatggcaggcttggcattcacctgtctgaagcgctcaaacttcaaccctggtcggagacaacggatcaccatggccatcagaacagtgccgagaggagatcttgaaggcccagacccccgagggccactttgggaatgtctacagcaccccattggcattacagttcctcatgacttcccccatgcgtggggcagaactgggaacagcatgtctcaaggtgagggttgcttttgctggccagtctgcaggatggagccttccagaatgcctctcatgatttcccagctgctgcccgttctgaaccaccagaacctacattgatctgatcttcccagactgtctggcaccacgagtcatgttggaaccagctgctgagaccattcctcagacccaagagatcatcagtgtcacgctgcaggtgcttagtctcttgccgccgtacagacagtccatctctgttctggccgggtccaccgtggaagatgtcctgaagaaggcccatgagttaggaggattcaccatatgaaacacaggcctccttgtcaggcccctacttaacctccgtgatggggaaagcggcggagaacgggagttctggcagttctccgagacc

SEQ ID NO: 435658 - DNA, 1288 bp, Homo Sapiens
  misc_feature (245)..(308): n is a, c, g, or t
cgcgcgtgtgctgcgcgcgcgcggccgtggccaaggtggggcagctgttcgccgcgtggaagctgcagctgctagaccgctgcaccgcgggttggctggccgatggcagtgctgcgctaccccatcgtgaacccgcgagcgcgctgcggaggccgcaggcctggtgtgcgcagcctcggcttcccggacgccacccgacggctcttcggcgtctactgctaccgcgctccaggagcaccggaccnnnnnnnnnnnnnnnnnnnnnnnnnnnnnnnnnnnnnnnnnnnnnnnnnnnnnnnnnnnnnnnnatcctgctgcctggacccctctgcacgtctaggctgggagtaggcggacagccaggcgcttgaccactggtctagagccctgtggtcccctggagcctggccacgcccttgaagcccttggacactggccacattccctgtggtcccttacaaactaactgtgcccctggggtccctgaagactggctagtcctggcagaacagtactttggagttccctggagcctggccagccctcacctcttctggatagaggattcccccaactccccaactttctccatgagggtcacgccccctgaggacctcaggaggccagcagaacccgcaggctcctgaagactggctacgcctcctgagaccacttggaaacagaccaactgcccccgtggtcgcctggtggctggacccccgggattgactagagaccggccgtacaccttctgcatctcactggagactgaacactagtcccttgcggtcacgtgggacactgggcgcctcctcctccccctcctcctcacctggagagactacaggaacttcagggtcactccccgtggtcacatggaggttgtgggccgaggcgcttattttcccttatggtgacctgagtcctggagactcccattctccccctctccctgagagtcccctgcagtttctgggtaacagggcacaacccctctagtttcatgggcgagcacccccatctgccacctcagactgacacacagccagctggctcacttactgggggccacgtcccacccctcagatatttctttgaagggagagcaaacccaccctgtcctctgacgtccctttcccaactgtcaccaaacagaacatcttccaggcctggggaccggtaagatccatgtcactagttatgcagaagcagttgacttgggatccactgtcaccaaggcaaccagtcctggtggtacctgtcactagagtcacaaagccgttcctca

SEQ ID NO: 435659 - DNA, 370 bp, Homo Sapiens
  misc_feature (136)..(136): n is a, c, g, or t
  misc_feature (288)..(288): n is a, c, g, or t
gtaatttgtaaaatattttacctttttttccccctgccctctccagaaatgttacagaaaaagattgagtacatttctgccatgatgcagagaaagaaactggtccattattactcattgtgtaacaccataaganggttcaaaggagctcataccttctgtatgttgatgccaggaactgtgtataatgaactggccttctatagttaggattggtacataccgctcattcagcaaatgagtattacagtgatattcaacatgtgtccattgactacagcatcagangcactaagtgctattaaaatgcagattctaggcctcatcctactcctgctggaatccagggtatctcaggaggggattcatg

SEQ ID NO: 435660 - DNA, 1966 bp, Homo Sapiens
  misc_feature (51)..(63): n is a, c, g, or t
ggaaagggggaagcatgaaggcttgcccaaggaaaaggagtttggaggggnnnnnnnnnnnnngcaactgaaatccaatgaccagggataaggctactacaggtaagagaacccatcaaagctagggtaggtaactgcatctctgcctccaggactgtgtggttaatgacagtcatttcaatgctttctactggttgcactaatcccgttgatttctcatatgtacaaaagtataagaacagtaaagtgcagtgtttcagttacacttttccttgctttaatatttgttgtctttttctgcttttgaaatgagctctcaattacaaaataccaaactacactcaaaagagggtgtagaaaaagccagccattggcacagcatggagaagcccacaagtaaggacagatagcagcagcaggtggcaagaggtgggaggtgactgaagcagtggttacaaatgttcacaggaagctaaaactatccaacaggttgtgccctaatgttagcacaggttagactagttactaccttgctaggtggcctcagtgtgttcagattctacgcagcaatacaatttcttccagttaagagttcttgacttgcaccgatcacagcatggttgaagggtactggaccagtcttgttagtttttcaaaatgctgtcgtagacctgatagatgtattgagagacttcaggagctctacacttcagtgacagcgtgtaattggggtttcctggctggatacgtagttcggccaaaatccaaatgccattagtgagcttcagggattggtacagcatgtcctgcccttccacattcctcttggcaatagtataaacattgttgttttgcaacttgctggaaacagtgtcagcatttaaatgacattccttaatctgaaactgaagttcattttcattgggaatatccttccatgttgcaaggaagacctggcgctccattttgccatcttctacaaaaagcacattgagtgggatgaggcagctgaagtagaagacatcgatattgtttttcacagccacctggaggttattcagaggttccatcttcatgactgggcccaaggtattgagaggcagggagacatcaatgctctggtttggcatcagtggtgtatggatggccagaggagtgctggggatgacaccaaagctatttttgttaaactggattgcaaaatctgtcatgtgctgcagagctttattggtgaagttcatttccatatagatgtgcccttggcggtgagtaaatgttccggaaatctccaagcctttagcctttactgcaggtagccagacagccttaggagccacatatccaccaggtgccatgcctatccctgtggagagttcaaacaggtcattcagtccactgctgaccacagcaggtgtaggtgaaggagcaaaggttgcaggcaccgatgatgggatgaaggattgtcccactgccggacttcctccaatgcccccgccaaggtcactgccaagcagactatctagtcctcctcctaggagatccactgctcccatctgcatggaggacacctgtggcacattgactgggggaccgaggtcaaggtttaaaagatcccctagaagatcaccttgagaggggataacctgaggctgttccaggttcgttgcagtggtagtgccaacagggctgtcacctgcatcagtgctcccatgatgaattggcaagtgtttacgatgaattccatgacttccttccacaaaagcattgggaggcttatgatacacagaggccaaagaaccaatgtggcagattagctcatccagcagagttggctcaataaggtccgtctcctcagagatcagtggcttctcagacaagactacttctttagctgtaacagggtcagttgagagaaggcgccaataaatatagccccggtctcgaaggtcaggattatcagaatcct

SEQ ID NO: 435661 - DNA, 2640 bp, Homo Sapiens
  misc_feature (359)..(359): n is a, c, g, or t
gaagaccgggggtccccttttgcctttttttccaaaaagccccttgagtgggatgaggccactagagtaagaagccatggattatgtttttcacaggccccttggagggtatcaggaggtcccatctccaggactgggcccaaggtattgagaggcagggagacatcaatgctctgggttggcatcagtggtgtatggatgcccagaggagtgctggggatgacaccaaagctatttttgttaacctggattgcaaaatctgtcatgtgctgcagagctttattggtgaagttcatttccatatagatgtgcccttggcggtgagtaaatgttccggaaatctccaagcctttagcctntactgcaggtagccagacagccttaggagccacatatccacgcaggtgcgatgcctatccctgtggggagttcagacaggtcattcagtccagtgctgaccacagcagttgtaggtgaaggagcaaaggttgcaggcaccgatgatgggatgaaggattgtcccaccaggctatctagtcctcctcttaggagatcctctgctcccatctgcatggaggacacctgtggcacattgactgggggaccgaggtcaaggtttaaaagatcccctagaagatcaccttgagaggggataacctgaggctgttccaggttcgttgcagtggtagtgccaacagggctgtcacctgcatcagtgctcccatgatgaattggcaagtgtttacgatgaattccatgacttccttccacaaaagcattgggaggcttatgatacacagaggccaaagaaccaatgtggcagattagctcatccagcagagttggctcaataaggtccgtctcctcagagatcagtggcttctcagacaagactacttctttagctgtaacagggtcagttgagagaaggcgccaataaatatagccccggtctcgaaggtcaggattatcagaatcctgtgttgccaaactcaagacctgctggactagctcctgtgtttctgatggtttcttgagaaacagcttcactatggcagtaagcagagtgagctgcacctgggtgctttcatcgtgaaaaccctccaggaagctttctagtaactcatctgcattgtcaattctttcagcatattctcccacaatccaaatcatagctgctcgagcatctggctcatccagcgagtctaagttctcacacagagtggcgatgatactttcatacttgttggggtatttgcggaagatgtccctgatgacaacaattgcttcttggaccacataattcactttggtctggattagatccaagcaatgtgcttacacagcgctctgcagattgctccaccttgatggcacaccgtccaatggcccgcacagcttttcgaacaaagtcaacatccacctctgtagcatattctttcagttctgccagaacctgagcaatgttggcttgagatgccaaacgaatcatgatgtccaacttctctagtttaacatagatgggatcattgtacttcacaaagaagactttgatttcctgcttcaagatttcaggccttttctggacaattaagttgatgttcctcagggcgacatactgcacttctggctccccagacagcaaagtgacaagtggaggggctaacttcttcagcagcatattgtagtagtcagaatccttaggtaacaattctagaaacttcattaggacttttaccgctgaaagcaccactgctgagttggcatgggatagccggggagttacccgctcacagatgctctgagcctcccgatcatctttagggttgtaattagacaggcagtccaggatgaaaatctggccccattcagtgcattcattcagggctgtcagcagcttattaatgttctgtgggttcagatcaagtaagttgctgtttgggtgagactcactgatttcagataatgccgctacggcattagccaccaccattggatttgaatctgctatgagatcccgtagagaatccagaaatccctgatcttccaccatttgggcattgatatcatggagttttgccacgcagactgctgctgttttccgaacatagggatcctcatccttcaagcacttgcggagcggctcacagagatattctgtaattttgtctacccggatgcaccccatggttctgactgccaaggctcgaatcaaaggattaggatcttcacagtccttcacaaagctgtttacagccatgatggccatgtctggctgactcttggcgtagttcatcaagtagagatacacaagcttctttagttccagattgtcagtctgcatacagttcactacgtctggaaagagagaactaacatccttccccacggtcatagcagcaatcactttcttcacagcctcctttctcttttctttcttttcattgttgagttcagcttttagttcaaatatttctccttttttattggttgtgaaatacttggagtcagtcatgactttggatctttaatgtgcaccggaggcggaggcgaaggcgagggcgggggtggcggcgggagccggagagcacagcccaggtggtggtgtaatggtttcctgcccgtcacgattcttttcta

SEQ ID NO: 435662 - DNA, 2604 bp, Homo Sapiens
  misc_feature (27)..(27): n is a, c, g, or t
  misc_feature (2152)..(2177): n is a, c, g, or t
cgacaagaattgtttttttggttatangatggtgtttggtgtaaatgtgagtttattgacgaagacacaaggtcaagcttcccccaacccccaccctcccgaaaaacaggacccaataagaacagaggaatgagaagcattcttagggcaacatttcccctgccccccctccccatttctttccagagtctcaagcttcacaacacagacacagagcaggcttgggtgaggacagacactcagggaatctctgaccagcaaaagagttctgggtgtttgcttctcctgctctttgtatgatgccagctgacattacaaagacacactcaggcagaggaggggggatgcagggcaacctccatcccacttccccaatttggccaagcttggaatgagccaagagggaagccgtggtggaggcaacaggttttgcctctcaggagaggtccttttatgggaagtagaattcctccctaactctgctcaggggtgtgatgggaggtggcttccccaaggagtgaagagttcatgggttggctcagtcaggtcagctgagaataggagctgttatccatcactggtggggaggctgagagaagccttgtttcgggggttgagggacatattctgataggaaattgtgttgtctgcttgccctgacacacttttccttctggaatgatagtttgctttgagatgagaacactatttgcagtgtgaaccttctgcactacttgtatccactgactccaggaataagtcccaagaagggaactttaccaacctgcttttccgctccacacatcaccgacctatccacctcccacatacaatcctatgctgtttcctactgccatgtgcttcaggggtggtgtgcaagggacatatttcctccctccttccccaaatatttttctcttggagattctcaaggtttaagaaagtgctttgtgggaccgctccccacaagctttgcaactggtatgaaacagggttatttcagacatgaaataggggtgtggggtagttttgctcttgttttccacgattcctcctctgagtccagtgagttaggtctcagtccaacatgacgcctgtggagcctgaagtgcccctgatttaagcagggcatctgagaagaccagtcttagtcatggaccctgaatattgggtgccaggcaatgcaacaagtgcccgcagatcaaacagtgtaacactgctaaacaggctggtattttgggcatgaagcattctttgaaaaatcatatccaacgcattaagtggggtagggggaagatttcatatcccccagtcttttcagagatgacaggaactgcctgaacctctgggatgatcttaatatgccctgcagactaagtatcatgaagaaagagcagatcagagagctgaagggataaagagcatttgcaacatctctaagctcacttcatctctgcacctattctgctggcctcaataagtggggctccaggggcatatgggaaacactggctacaccttcattctggcatctggctttaccttcgagtaattcaaaagatattcagctgccacctgatgccaatatacagagcgtcaaaatcaatatggaatatgtgaagagccaaaaactaggcacagaaaaggcaggagaaggcattaggggaaaacgacaagagacagtcctgtggtgaaaaccacactgacggggacttaggagactcggtctcggctttgccactacacagctgacgggccttggcggtaacctttgtgccttttatctttctcctttgtaggaaaagagggttagataagttattactctgtttcaactctaaaagtagaattttagatttgaactggacctgagaaatacaggagagggggtgaggggacagcatctgggttcttgttccccatctctactcaaattcctgaattagtgggattagcaggtttgttcaggggaaaggaaaggagtaaggtataacttctgtcagctttggtgctgacaggctctatagtttttgcacactgaaacatcattcaagaagatcaccgttcccaactgcagagcaatcaaatgagattataatatggaaagggggaagcatgaaggcttggccaaggaaaaggagtttggaggggnnnnnnnnnnnnnnnnnnnnnnnnnntccaaatgaccagggataaggctactacaggtaagagaacccatcaaaagctagggtaggtaactgcatctctgcctccaggactgtgtggttaatgacagtcatttcaatgctttctactggttgcactaatcccttgatttctcatatgtacaaaagtataaaacagtaaagtgcagtgtttcagttacacttttccttgctttaatatttgttgtctttttctgcttttgaaatgagctctcaattacaaaataccaaactacactcaaaagagggtgtagaaaaagccagccattggcacagcatggagaagcccacaagtaaggacagatagcagcagcaggtggcaagaagtgggaggtgactgaagcagtggttacaaatgttcacaggaagctaaaactatccaacaggttgtgccccc

SEQ ID NO: 435663 - DNA, 399 bp, Homo Sapiens
  misc_feature (35)..(35): n is a, c, g, or t
ttagatggatggtcacaggacagcaatttaaaacncaaatgtgctttatgtgctaacaaccaaaagaaaaataccaaaaattcacctcagaagagcagcacctaacatccttccccacggtcatagcagcaatcactttcttcacagcctcctttctcttttctttcttttcattgttgagttcagcttttagttcaaatatttctccttttttattggttgtgaaatacttggagtcagtcatgactttggatctttaatgtgcaccttttccctctcaatggtcacacccgacggttccctgcatcatcaacggtctcgctcttaggatttcctcgcctccgccggtctccgacccagcctggtgttacccttctctccgtccccgaccccgtcccc

SEQ ID NO: 435664 - DNA, 1221 bp, Homo Sapiens
  misc_feature (3)..(3): n is a, c, g, or t
  misc_feature (66)..(66): n is a, c, g, or t
  misc_feature (74)..(74): n is a, c, g, or t
  misc_feature (77)..(77): n is a, c, g, or t
ganttatttgcattactttcttcacctaccaaagtaggagaaaaacagatatataatgcagaaganattttggnggnataaaacagctaatgttttacttaactattctgaaagtaactgacaggtaataaaaatgtgggttttattagtccactacagtcacaatacaatcgtcatagatttccccttctgtattcatcccaccaaacaccaaacagagcagtgtagcagtctggctttcctcatgtgagtcaccactgtggctcattactttgtcagctgaatcctctttctcagcttcatggttcagagtgagagagttggaatcttctttctcagaagcacacgtcactggccatggaatgatacacatggaatggtccaatcgtccagggggtagaagagtatcaaatttaagcaaggtccaatgctgctcttctgtgtgatactggtacattgtgtccagtgctcctgcaggagtcattccaccaaagatgtacacatgttttcccatggccacagctgagtgggcagcacagcctgctggagcagccccagtgggatttagcttctgccatttcatgtcacttatatcaatgcagtggaggtcatcatagaatctgtcccccgccaagcctccgtggatgaagagctttgtccctgctgccaccatcacatgaccatgccggggagatggaggatttccaagtgtctctggctgtgaccaggtcagagtgtttgcgtcaaacacatgcagcttcgtgtcctgcacgggctgggcacctctctctccgcccccaaagacatatagctggtttccaatggctgccgatgatgtgtggaatgttcttggggatggtggggggctggtcacttcttgcgtggtccacgtcctggtttcaggattcaggacttgtagacaatttcgatttcctgattggttggcacctccaaatacccagatacggtcaggtgtgcaggagggaatgaagctagcatgttcataccggggcaagaggcccttgcaggtatctaagtcccactggtgttttcccagatccatggtgtgcacgtctgagagctcagttaggctggcttcacgtgggcgggacctcccgcagcagccgccgctaccagcccagcaaatctcatccccacgtggcagttctgcggcgacttaggccagtcgcgagccgtgactccaccccggagcggcccgct

SEQ ID NO: 435665 - DNA, 974 bp, Homo Sapiens
atcaggccaaatcggccgagctcgaattcgtcgagagcgggagtcacggctcgcgactggcctaagtcgccgcagaactgccacgtggggatgagatttgctgggctggtagcggcggctgctgcgggaggtcccgcccacgtgaagccagcctaactgagctctggactttggggacagctgtcagtggcctaggccgcaggacaccatgaagcaactgccagtcttggaacctggagacaagcccaggaaagcaacatggtacaccttgactgtccctggagacagcccctgtgctcgagttggccacagctgttcatatttacccccagttggtaatgccaagagagggaaggtcttcattgttgggggagcaaatccaaacagaagcttctcagacgtgcacaccatggatctgggaaaataccagtgggacttagatacctgcaagggcctcttgccccggtatgaacatgctagcttcattccctcctgcacacctgaccgtatctgggtatttggaggtgccaaccaatcaggaaatcgaaattgtctacaagtcctgaatcctgaaaccaggacgtggaccacgccagaagtgaccagccccccaccatccccaagaacattccacacatcatcggcagccattggaaaccagctatatgtctttgggggcggagagagaggtgcccagcccgtgcaggacacgaagctgcatgtgtttgacgcaaacactctgacctggtcacagccagagacacttggaaatcctccatctccccggcatggtcatgtgatggtggcagcagggacaaagctcttcatccacggaggcttggcgggggacgaattctatgatgaccctcactgcattggaataagtggactgaaaatggcaaaacctaaatcccccctgggggcttgctcccaccaggctggggctggcccactccacctgtggggccctgggg

SEQ ID NO: 435666 - DNA, 930 bp, Homo Sapiens
  misc_feature (29)..(29): n is a, c, g, or t
  misc_feature (79)..(79): n is a, c, g, or t
ccattccccgggggagatgggaggatttncccaagtgtcctctgggctgtgaccaggtccagagtggtttgcgtcaaancacatgcagcttcgtgtccctgcaccgggctgggcaactcttttttccgcccccaaaggacatatagctggtttccaatggctgccgatgatgtgtggaatgttcttggggatggtggggggctggtcacttctggcgtggtccacgtcctggtttcaggattcaggacttgtagacaatttcgatttcctgattggttggcacctccaaatacccagatacggtcaggtgtgcaggagggaatgaagctagcatgttcataccggggcaagaggcccttgcaggtatctaagtcccactggtgttttcccagatccatggtgtgcacgtctgagaagcttctgtttggatttgctcccccaacaatgaagaccttccctctcttggcattaccaactgggggtaaatatgaacagctgtggccaactcgagcacaggggctgtctccagggacagtcaaggtgtaccatgttgctttcctgggcttgtctccaggttccaagactggcagttgcttcatggtgtcctgcggcctaggccactgacagctgtccccaaagtccagagctcagttaggctggcttcacgtgggcgggacctcccgcagcagccgccgctaccagcccagcaaatctcatccccacgtggcagttctaggggataggagacggggtcgggaaagaacaggctgattcggtcaaagtggccgggacggagccagggaaggcccttccccgttctttgcacccggcttgggcccactcccctaaaagattcagactccctgcccgagaccgtgatagacccggtatccggggaccctcgcccctaccctccagccccggactccc

SEQ ID NO: 435667 - DNA, 1673 bp, Homo Sapiens
  misc_feature (110)..(110): n is a, c, g, or t
  misc_feature (195)..(195): n is a, c, g, or t
  misc_feature (252)..(252): n is a, c, g, or t
  misc_feature (254)..(258): n is a, c, g, or t
  misc_feature (302)..(339): n is a, c, g, or t
  misc_feature (353)..(362): n is a, c, g, or t
  misc_feature (366)..(374): n is a, c, g, or t
  misc_feature (376)..(376): n is a, c, g, or t
  misc_feature (381)..(381): n is a, c, g, or t
  misc_feature (386)..(386): n is a, c, g, or t
  misc_feature (439)..(447): n is a, c, g, or t
  misc_feature (468)..(468): n is a, c, g, or t
  misc_feature (478)..(495): n is a, c, g, or t
  misc_feature (533)..(571): n is a, c, g, or t
  misc_feature (610)..(610): n is a, c, g, or t
  misc_feature (670)..(670): n is a, c, g, or t
  misc_feature (750)..(750): n is a, c, g, or t
  misc_feature (784)..(784): n is a, c, g, or t
  misc_feature (787)..(787): n is a, c, g, or t
  misc_feature (800)..(800): n is a, c, g, or t
aggagtcacccgcccccatgggggcgaggagaaacaagggtgggggtgtcaatgtgcgggcgcgaaacgggatgaggttgtcttccgctctcggccctcttgcggggggnaatttcgtccgccgctgccggggagtttcccacacgatacgtctcggcgggtaggggcattgccgagtgggtggattgttggggntatggggtttagaatgtaatagggggtagaaaggcacagtgttttccccgcctcctntnnnnngtgttttggtggggtagggggaatgactatcttcgccctctaannnnnnnnnnnnnnnnnnnnnnnnnnnnnnnnnnnnnnggtacttttccggnnnnnnnnnnatannnnnnnnnanagganggagnaaaaggaggcccgggggccgggcgcgggggcggcccgtggttttttttaaagnnnnnnnnntgtcctgaaggccgggggggnggccccgtgnnnnnnnnnnnnnnnnnngaacaaacctaggttttttgggcgccgccccccgcccnnnnnnnnnnnnnnnnnnnnnnnnnnnnnnnnnnnnnnnaggaaaccaaccaccccccctttaaaattctgtgtggcngcgggggttttccttgaagaggaaaaacacgggttatgccccattttgccgtttactttngggggcccggggggcccaaacggaatggttcttagaaaaaggttttttggatgggtccgaggccgggcccggcaaaaggnaccaaattttttctagggtttgttcccttccaanccngccccaccatggngaagctattatataagggttttatttttaataagatgaatagtttaagcttcgtgtctagccctgcaccctcttagcctaacagcacacctcgagcgctgtgccctgggctgctgacgtggcggcaggccgctagcagcagtcggccacctcctgaggcgggcagcacaggcctgctgtggacactctaggtctggccttgtattttgtggtctcagaagcctttgtggggacttctagtgtagggaaggcagtctctctgggagctcctgcaatgccaaactcttagcccaggttcactcctccgatccaagcctggcaggggtggggcatcatggtgtgtaggtatcaggcaggacttgtaagccatcccgtcaagtcaaattctggcttaatgtgtctttaggtagatgacctctgagccacagtttcctattctatgaattggggtttagtaaatctctcgggactgagagccaatgaggccatgtgtgcacacaaaatgctgggcacaaatgaggggctcagcggggctgagaagtacatcccatccagtgccgacatccgcttgcatggtgccctggtaaccttgcctctgccctccccaggccacctcaccgatcagcacctggccgagttcctgcggcgctgcaagggcagcctccgccccaacggcatcatcgtcatcaaagacaacatggcccaggagggcgtgattctggacgacgtggacagcagcgtgtgccgggaccttgacgtggtccgcaggatcatctgcagtgcaggcctcagcctcctggccgaggagagcggacgcgtgggcgacgcgtgggtcgacgaatgcccgataaaatctccacggggcccgggtacc

SEQ ID NO: 435668 - DNA, 1651 bp, Homo Sapiens
  misc_feature (52)..(113): n is a, c, g, or t
tttttttgtattttaagtagagacggggtttcacctgttagccaggatggtnnnnnnnnnnnnnnnnnnnnnnnnnnnnnnnnnnnnnnnnnnnnnnnnnnnnnnnnnnnnnntgagccaccgcgcccagccccattttattttttactttaaatgcctgccaaggagcagcctcaagcccagagaagactgaggctacggggaacttcccttgctgcaggctgttgtaacactttaagggccccaggtctccactgccaagcaggacttggcacatgagcacccaccccacagcaccatcaggcagcacccatgggctccaccagcccagctctgtccctcccctaggtaaagatcacactgaagtcttcaagtccccagcaaccaagttgggggtggtttccttcctcttcaggcagccaggcccatggctggaaggccgggctggaggcccagggaatcggttactgatgtggccaccctattcccacatggggagcaccaggagccctggagccccttccacccaatcccatctcgcaggagagcagggtctgggctcctgcctcaccgctggttcagcagcaccctccccgccgggtcccaccttgccttttgaagaagagcccgcataatgagtggacggcagacagctatatttagtggtgcctcgacactcacgaaccgccagcgtggcgcctggatcttgcccagctgccagctccccccaccaggactgtggttcctcagtttctcctgccagccccggctcatctcagggcaaagctatagacatggtagatctcatcggggaggttctcctgcctctcctcggccaggaggctgaggcctgcactgcagatgatcctgcggaccacgtcaaggtcccggcacacgctgctgtccacgtcgtccagaatcacgccctcctgggccatgttgtctttgatgacgatgatgccgttggggcggaggctgcccttgcagcgccgcaggaactcggccaggtgctgatcggtgaggtggcctatcacccactggatccagatcacgtcgtaagagtccggctccggggtgaagtcctggagcccacaacagaagtagttcctcaccctcttgccctcctcccccaggtaggtcttggcttgaaccaggaagtcctccgttatgtcgaccatatccacctctctgaacagcggcaggagcagccgcttggtgatcctcccaatgccagctccacagtccagggcacaggacgttcctgtcttgttcgggccttccctcaaaaacctctgcagaaacttccgggagctgttgatgtcgatgctggagatgtggccataccccccaagcatgccgtccaccgtgggtgggatttgtttccagtaggtcttggccttggaatagaattgcttctcgtcttctatcacctcgctcgtcatgctgtcaccaaccacggctctactcaagcaccacgatcagcaaccgcgactctctccgggcgggggctcccgggaccgagagaagaagatggggaagaggaagggagggcggcggcggcggagacgccacaagccaaccgcagctccgccagaccacgaccagacgcgacagctcgcggatcccatacccccggacgtaccagccgctt

SEQ ID NO: 435669 - DNA, 919 bp, Homo Sapiens
caagaatgggagaaggaacggcaacagggaacaaggtcagagagggaacatggaggaggggagcctggaatggaccaaggtgccaacagaagctccaagggcaagccatgaacaagaagtgggggctcccaggaattgggggtcccaagcctggtacagaaaaggcctgtggttggagcagagggtggaaaaccatggcacataactaggagttcttccgtccagaatagcccaacaccctcagtccaaaacacccgtggacatggcaggagagcaaggttttcgtccctggcgaaacccaacagttgaagagaggtttgcccaattcaggcacctcaattctgcctaacagccagctcctgtctggtaaccttgaggctaagtccacaatctaaaagttaccccactgtgcccacccagcccagctcctcaaggctttggggtaggtaccaagagatagccaacgatcctgcagtgttacatgtgtaaaaggtggcaccccacatggactcggcagtgccaccagagccacagcctctcctggagagcacgccagacctgcctaccctcaaaacctctgcagaaacttccgggagctgttgatgtcgatgctggagatgtggccataccccccaagcatgccgtccaccgtgggtgggatttgtttccagtaggtcttggccttggaatagaattgcttctcgtcttctatcacctcgctcgtcatgctgtcaccaaccacggctctactcaagcaccacgatcagcaaccgcgactctctccgggcgggggctcccgggaccgagagaagaagatggggaagaggaagggagggcggcggcggcggagacgccacaagccaaccgcagctccgccagaccacgaccagacgcgacagctcgcggcgcgcgctccgct

SEQ ID NO: 435670 - DNA, 962 bp, Homo Sapiens
ggaccttgcaaaccccgcgggggaatagggggcacacaacggaagaatataaggtgcgggagtttttcccttagggtttggggaggggccagttatcggacgggcaagggtgggtgaaatgtattaaacaggcctccttccggtgtctcccggggcccggggaggggaaagataagggtttccccacaagcttaaggcccagggggctttcctgatttataccataatggtggagaccagcaaagggggatggcggcctgggcccagggttccgtgaacaagggttcccactggcccccctggaaaagcccctggcgggtcaagcctttaaagcctcccaattcatcttggagggtcagaatcaggccatacggcctttgggatggagtgagacttgcaggttcactctccactgggaaaggtgagatccttgaagggaggggcttctggcccatagcacttctgtgctcccaacaaggaggcctgtccctttgacaccctggccaagtacagctcccagggtcttgagcagccgccgtgggctcttcttggccaatacttccaaactctttgaggacaaagccccgagtctgagatggtcttccgcctgtgtcctccagacatgtgcgaggtggaggaatgtggcggcatagaagctgttcaccacggggatgaccttctgctgccgattacactctctggagagacactcctctctcaaggcctggatggcaatgtgggtgatgttcacggacatcaaacagaaagggaattgctggatgtggtgacgagacaggcggaaaatctcttgcgccatcggcaaggtctttgagtccatcaccaggtagagcagatgcaggagggcaaggaagcctgcgcctctcaggtctgtggctggattcgctccctgaaagcccaggtcctcccagtggttccagaaggcacatcaaactgatccagaa

SEQ ID NO: 435671 - DNA, 552 bp, Homo Sapiens
  misc_feature (267)..(267): n is a, c, g, or t
  misc_feature (270)..(270): n is a, c, g, or t
aaaggggtcgccctgccaggctccttacatggctcacttaccccctaaaagcccctgcagctcagcctttaagcctcaattcatctcggaggtcagatcagccatacgccttcggaatgagtgagactgcaggtcactctcacctgtgaaaggtgagatccttgaaagggaaggggcttctggcccatagcacttctgtgctccccaacaaggaggcctgtccctttgacaccctggcccaagtacagctcccagggtcttgaagcnagncgccgtgggctcttcttggcccaatacttccaactctgcaacagagagaattggggagcagaaggcttgagggggctctgggtgacacaacagtcaaggcctcaagcctagcagctctagggagtacccccaacccctatcccatggagagaaagtgaaggagcctcagatggagagatcaccagagaggtaggctagggagccagctacagccacagggaccacacactctaccttgtctgcacaattgcaactttgaatagtccaactattggaccctgg

SEQ ID NO: 435672 - DNA, 339 bp, Homo Sapiens
  misc_feature (34)..(34): n is a, c, g, or t
cttgggcgggttctcgatgcagctttcaagagtncgtattcggtccacggctacagggaggctcacgaagtgtcctctcgtggcgctggcatctcttccctgccccgggcatgattcggaaggccaggaacacgggcttgtggtctcccatgcagacgttgggcccaatgtggtcataggtgacaaccttctcctcgctctccgaccgcagcaccagctccttggcagacggggacatgaggatgcggtcacaccaggctgggcaccgggtgttcatgtactgctcaccctggggggcgtcctcactgtacgggtagctgggagggaacgagatgtcca

SEQ ID NO: 435673 - DNA, 1346 bp, Homo Sapiens
  misc_feature (41)..(41): n is a, c, g, or t
  misc_feature (78)..(78): n is a, c, g, or t
aggtggccgcttggccgggttcctcgatgcaagctttcaanagtgcgtattcggtccacggctacagggaggctcacnaagtgtcctctcgtggcgctggcatcttttccccaccaggtcattgcaggacacaaacacttgtgcacatgggcatgagttttacctgccccgggcatgattcggaaggccaggaacacgggcttgtggtctcccatgcagacgttgggcccaatgtggtcataggtgacaactttttcctcgctctccgaccgcagcaccagctccttggcagacggggacatgaggatgcggtcacaccaggctgggcaccgggtgttcatgtactgctcaccctggcgggcgtcctcactgtacgggtagctgggagggaacgagatgtccagttcatacagtctgtccttaaagacagacaactccttgtcaaactccaagagcgcggtgccgttgttgtctcggaaaacctcctggttgaagtagtcgaagagtttcttttctaactggagcataaccttccggtcgttgtccgactcacgaaatatgagcttcaccacttcattggtgtcggcggcccggaccgtctgcatggtggcttttgtgcagagcgtctccacgacggacttggaatccagccggaagttgaaatcaccaaatacaaagtaggaaaccttctcgaatcgctgatcaatgattctgtccagcacgtagcccagtgccttgtgccggattcccgagtacacggaagggcttgtttcccaggcgaccagattggaagcatcatggaaaagatggatattcaccaagtcaaaggcacagtctgcaatgcaccacctcgtccggatgaagccttttcttgaccatttgcactcggggaagtagtcctgcggaaacttctccttctccagcatgggcgtgctctctaaggtatccgagtagatctctttgccagcgacctttctatacttcttagctttaaagtcaaactggtagatgttttttaaggactcatgaagaaaataaaagcttcctagtgccgtgaagtgctcctgggatttgtagttttcatccaggtagactcgagccctgttatattctttcatcgcatcactcgacaatagttctttgacgaacttgtccacgtgggacatggaggcctcgtagttcttccctccaaactcctgacagtgcaaggccatgaagtgcggcttgtgtgtgtgcacgacctggtaaaattcccgaagccagttcttctgcaggttttctgggtcgtcgaagagcgagcccacgttggccgtgaccagcagcaccgcggtgcccggggcggccgc

SEQ ID NO: 435674 - DNA, 866 bp, Homo Sapiens
aagaagtgttggtttgtagaaaaacccccgggctttgtgcccttttcccacctttcccccagctcacccaaggtgacacctgggctgctgctgaaatggcctgagcagtcttgcattagcagggccagccacctgccagcctgctgcatccccagtgcctcttgacgcagaagtgccgagcagctgaccggcagcgaggcctggagttctacacacttgccttggagccttttatttagggcctcaacttgcctggccttggcccttttgtaggtggccacctagtttggctcagctctgcatctcggggaaggtcacacagaccctcagccagaagttgagcgctctgttgaggccgtgcagcccctggaatgctgtacctttgccttgcttttttctgcctctgtacaaaagaccagcccatgccctggggctgggtcaatggccggagtctcaggtagagctctgggcagctcacactcctggaggagtgcacagcaccattacccagagtgcaggctatgtccaggctgggcagcagcaaaaaaaacgatgtgagatttgtgctcatcagccaggattttttaaaatattgtgatttcaacatctgcctcctggcaaaagacttctctttgttctgagcagagcttgtccatcttctcaaaagctaaccgtcctttttcaccgaacgacagtgtggtttcccgggctgccgcccgcacggcctccaggtcagactggcacaggctggcagtctggtcgatgctttcaatgcccttgaggtgtttgagcgctaggcactggcctgctggagccttgcgtcgttctctgccagggcgttggtgtagaacagcaaagcctgggga

SEQ ID NO: 435675 - DNA, 1331 bp, Homo Sapiens
  misc_feature (227)..(267): n is a, c, g, or t
agagctatattgaggtggggcagtggtggtggttgggagactagatagatgcaagcgacaactagtcgtgacggagtcagagagtgagacgtgtgggaatatggcggagaggagcagggggtattgttagggaggggggacatatgcgggattaacacggaggaagaggaggttacggtggaaggaggttaaacatggaagggatagggcggtagattggggagacnnnnnnnnnnnnnnnnnnnnnnnnnnnnnnnnnnnnnnnnnagaaatcttgtatgaggcgagaaccacggtagagtacgcagcaaagggccctgaaggttctctgcggtgtaaaggggggcatggaggtgaaaaaccgggaaaaggttcggggcattgtggagaaattcgcttattactccggggggacttgagggggctccaagccagggcagacagcctccttcggtccccccagaggggaaaccggggctccccaggttacctgtgaagtttcttggttctggttgtttttctcctttttaaactggtccacgaggcggaatgttaccactgcgactgcgcttgggcaagatccagcatcacactctcttccgtcgccgggctctgcggactggcagagccacggggtgtctgccagcctcctgagctgtcggtccatctcggcaagagcactccccagctgctccttctgaggcggatccagctgcagggccatcttcccagacagcagcagctccgtctcactgcgcagagctctgaagttattcaccatttccaggacgaagctgcagttgagcccctctgtggttctgggcttgccatacacacggtccatggacttggagctggcattgacggcgtgggccagttcctgctccatgtcccggtgagactgagctatttctcggatactgtgaatgaggacccctgctgcctgcccaaactggtccatctgggtggcctcctcctcggacagcatctccgggtgcagggaacaggatggagggcggggcagctcgcacttctgcttgtcttcccaggacttcagggtgctctcaaatgccctgtctctggtcagtgtctgtgcccggttcttgtggacaatccgaaatgtaccctggcggctggacccaggcctctccgtccacctgcacaggcacgccctcatccccaaggatggagatcttcaccgtgcgacactgggcgatccgatgatgctgtagcctgatgactcgagagacggccatctgcatgctgccgaacacggcgaccaccgacgcgtgggtcgacgatatcccgggaattccggacctgtaccagca

SEQ ID NO: 435676 - DNA, 1896 bp, Homo Sapiens
ccatccataaacatatgtctttattctctttctgtacatatgggcaatgataaagcttaaagatgcatgtcctaagaaatatgcaaaaacaatgaatttacataaataatttatacttcagaaaattaaagttgaaaaatattttccacattattagagttcacagtatttaaatcaagctttcccacttatactccagactatattgtcttagcagagagtgataaaatctaatcaggaataaaatgatcaagtttctgtttttattcagtgcacgagtagacgctatttcagtatcaggccgcgccaagtgtcgaggctgcagcctctcatcctgacccttcccctcctgagtggctgtgacccagcggaggtcactggcgtggaatggttacagcgtcaccaaaccactccacggtggacacattcaaccgagcggtaacatctggtggtctgatgcctcatttccaagtaatactttttatagccctgaaaatggaaaccttggcatctaagcaaacagagctgaacatgtgaacactaggacaaggcactgtactatggggttttggtttctttatgggaaaaggtgtttgcatagattgctagctatttagtgtgcaggaaaacagagcccccagcgtgcatggctttgtgaggggtgaagctgcatggtgctccttcagccccaagagagcgcagtctctcattctccagccccagccttgtgggctgtcccgctggtgctgtcctttagaacccctacaggagagttttttgctcaaaaagctgcaggtcaaaacggacccagacctccccggtggggacctcatgcagcagcagtcggcgggtcatagggcctttgctttcctgttctgttcgaatttttgccactggaatttcagtacgacccaggaaatcatctggtgaaaactggtctctgtcaaacagggtgagacacagcacgtcttggtagagatccttaataaagaactggcagttaaaattccacttgggattgagtgtgtcctggatggtcctggtggtgtagctctgggagcccatgctgatttcacagtatgggttgctctttccatttggtttgcaggcttttaattctgtagcttcaatgacatgcaccatcaggcgcccaatgcctgaagtcttttgggagcgggcttggtaagctttctcacgcttcttcttctcggtgtcgatgtactgctcagacgccgccttgatcttctgcacccaggtggtcctctcattaatgttgtctgttcggagggtgtagacccgatcaatgtgggaaatgtggaagacaggctcatcgctggaagggtctgtgggcagttcaccaagacttcattcaggaaaatgggcgttttatacattttgaattgagcattggacttcgagctgaaaagtttctcagagccagaggaaacagcaaactgcttgaccatgtaggtaagaagcaggaagtcattgaagaggaatccgtgcagttccttgttgctcttggtcttgtatagtttcccactgtgtaagagcttccggggccccaggcagttggtgagagagttgaaaataagttgcttaaagagaaagaaaatttcactttttaaatcctggcacaaaccatccagtgcccctgagaggccagtgccctgggcctgaggatactgtggtggagttttctaggtgggaatgtggctagaatcattcactttgcatgaaagatccttaaatacattactcttcagagtccaaactggcccagtgaaaatcattacttctagccacagaacactgattctaccagctgaattcaaagaactcaaaacaaaaaatcccagtgttctctccttaggagaaaggaagatgacaatcccc

SEQ ID NO: 435677 - DNA, 1431 bp, Homo Sapiens
  misc_feature (1344)..(1352): n is a, c, g, or t
gggtccggaattcccgggatttctgacttagaattctgagcgctggggcagaagacaaaaagaatgtgaattagcattttaaaaataggggagtctaacaacaccattgctttttattctcattacttctctttcagtgtcttaggatctgattgctccctcacctctaaagtgtttccaagtagagtctggcagtattagtttcccccacaaacaaattcaggtagagaagttgtagtcgaagggaatgttgggactcctcactgcatggtccctggggtgtctggctcatccccatcatgacgtgagttggtagcagaggactaggtgttaggacagactctcctcacctcagttgctgctgctctgggccaggaaatctctctatggattccctcatctcctgccacactgctgcagcatcaagtgtgctatgagagctgtatgtgcccaggggtgggccctgccactggccaccccgagcccaggacgcattctggtcatctctgagcccacttgtagtgtagcttcttctgttagagatgttagccttttctctctgtggcgacttttctgccttcccttcttctgttttttgtgatcattcttagctacctgtgccaagtcacagttagactacctcagaatgtagtcaagaattcacccagtgttctttggatgtcccttccctagggggaaaggctggggaatgttgctgggagcattcccagctgcctctccaaagtggtcctaactctgccttggctatggtgcagacattccaaaaagtgttttgtatacagccctgtacatctagttttcttggttctccctggcaagttcgctaccctagcttaggctgacgttctgatgagtctctgcttgctgagctcatcactgtgggatggtgacctgcagagctgcagattggagcaagtggacagaggagggagccagctaagccaaatccgtcactgccacttggctggcaggccttataagagggcggatctgggcccgtttgcaggaggccattgcctaccctctccccacagtgagccagcagccatcagctgatcccacctgggaaaccttcatgcctctctgatggttactgcccacccttaccccacccctcagctcagcctggtatggaaagcaaggtgcacgttggtctttgattgttctgtcctcacagcagagccagctttccccccatgttgctgctgcttttgctgctcatgctgcttgttgttttctcttccttatctttccaaattgtttccttgaaatgcttgtttccaatttttcttagattatgtttctaatttttattccaggtgnnnnnnnnncttacttgacagaaaaaaagaaaaccccaacaatatcttgctgtattatcacattttttataaagttaaagcattactc

SEQ ID NO: 435678 - DNA, 464 bp, Homo Sapiens
  misc_feature (32)..(32): n is a, c, g, or t
  misc_feature (43)..(43): n is a, c, g, or t
  misc_feature (319)..(337): n is a, c, g, or t
  misc_feature (431)..(431): n is a, c, g, or t
  misc_feature (435)..(435): n is a, c, g, or t
aacttttcttggtatcttaaaggttgcccccnaatttcctcanagacaatgtccatgccctcaggatgccttggtccacaaaatggagaaatgggcccatggaagagtagatgtgaagtggcaggatccagaggcacaaggaggcagtatactgtgccactgatttacatggtctggggggtaaagaggctggagagctgcaaacactgggaggcaaggttcagggctggactcagagcagtcagagctgctggattcagggcccccaagggaactgctccatttagttgcaaggcagcagcctgggcggcggcggcgnnnnnnnnnnnnnnnnnnntgcttggcagttggattccagcgccttctgccagttttgccatgagctgaaaacgtccacctgctgatcccagatccagctcctggtccccatnaggnaaagtgatgtctgtgccaccatccagtcg

SEQ ID NO: 435679 - DNA, 755 bp, Homo Sapiens
ttttctcttgatgttactaatgttttatatccctagaaacatcataagttgggctaatgagaagttgtcagacacacaacaaagaccacacacaaatgggcaacagctgccacaaggaggaggcttgccttttgtacaaagtttttatgtatatatatatgtatatatatttatgtacacagacacaagggtataaaatccagtgagaagggctcacacatgcccaggtaagggatgggagtagctataattgccagggttgaggccacagtagaggcacacaggaagtggtagagtagcagcctccctccatcctcctacctcgggccaaagggaggaaatgggaggaaggacaagtatacaaaggaagatggaagatactggaaaggcatactccaccttttactaaattcctgaaagcccctaaatgcctcacaggacagatcactctcacacctcctggcaggacagatcactctgaggcctcctggcaggatagatcacttccatgcctcctagcaagatgctgaggctacagtaggtctggcctcaagctgcttcaagctaaggtctgaggctggcttctcaatgcacgtccatgctatctcccagggcccttgtagcagaaagagcaccttcaaggttcacccacaaactcagtcctcttgattcagaggtcctaagggttttccttgacagactaaaggttaaaggtacaggaaaaggagagaggtcagttccttcagttgtgacgg

SEQ ID NO: 435680 - DNA, 1087 bp, Homo Sapiens
aaaaggccggctggtacggtcgggggtacggatcggcagagctgccgccattttgcgggaagaggaggcgctgtacctgcagtgctgcttttcttgcctagactctaggaactatccgagctccactccccacaacatactcaaaggaacggagagaaccgggacccccctgcggggacccggaactgatctgacaggatggcatctgatgactttgacatagtgattgaggccatgctggaagctccctataaaaaagaagaggatgagcaacaaaggaaagaagttaaaaaggattatcctagcaataccaccagcagcaccagcaacagtggcaatgagaccagtggaagcagcaccatcggggagacaagcaatcgtagtcgagatcgggatcggtatagacggagaaatagtcggagccgaagtccaggtcggcagtgtcgtcaccgtagccgtagctgggatcgtcgacatggtagtgagtcgcgaagtcgggaccatcgtcgtgaggatcgtgtgcattacaggagtcctccacttgccactggttatagatatggacacagtaagagtcctcatttcagagagaagagcccagtcagggagccagttgataatctgagtcctgaggagcgtgatgcccgcacagttttctgtatgcagttagctgcccgaattcggcctcgagatctggaggactttttctctgctgtaggcaaggttcgcgatgtacgtatcatttcagatcggaactcacgtcgttctaagggcattgcctacgtggaattctgtgaaatccagtctgtgccactggccattgggctgactgggcagcggttgctgggagtggctatcattgtacagggttcacagggaaagaaaaaccggactgggaaccatgggcaacaaccctgcaaaaggggcaatggtggaaccaatgcgccctcctattgggggttccccgggcactttcaataatcacttgaaaaaaattgcctcccgggggcattttttggagcccccctttggggtaaaaatttggtaaataaattgggcccctggaatagaaaggaacctccacaaa

SEQ ID NO: 435681 - DNA, 770 bp, Homo Sapiens; identical to SEQ ID NO: 162546

SEQ ID NO: 435682 - DNA, 761 bp, Homo Sapiens
ggaggcgctgtacctgcagtgctgcttttcttgcctagactctaggaactatccgagctccactccccacaacatactcaaaggaacggagagaaccgggacccccctgcggggacccggaactgatctgacaggttggcatctgatgactttgacatagtgattgaggccatgctggaagctccctataaaaaagaagaggatgagcaacaaaggtaagaagttaaaaaggattatcctagcaataccaccagcagcaccagcaacagtggcaatgagaccagtggaagcagcaccatcggggagacaagcaagaagaagaggagtcggagccataataaaagcagggatagaacagcgcagtcgtagtcgagatcgggatcggtatagacggagaaatagtcggagccgaagtccaggtcggcagtgtcgtcaccgtagccgtagctgggatcgtcgacatggtagtgagtcgcgaagtcgggaccatcgtcgtgaggatcgtgtgcattacaggagtcctccacttgccactggttatagatatggacacagtaagagtcctcatttcagagagaagagcccagtcagggagccagttgataatctgagtcctgaggagcgtgatgcccgcacagttttctgtatgcagttagctgcccgaattcggcctcgagatctggaggacttattctctgctgtaggcaaggttcgcgatgtacgtatcatttcagatcggaacctcacgtcgtactaagggg

SEQ ID NO: 435683 - DNA, 1592 bp, Homo Sapiens
ttggctcagccggaattcctttttcccggtggggaccatggggcaggaagcgttttctggggatttttaagggggggcccccaattttcctcaggaggacaatgttccatgcccttcagggatggcttggttcccccaaaatgggagaaaatggggcccttgaaagaggtagatgtgaaggtggcaggatcccagaggccacaagggaggcaggtattcctgtgcccctggatttaccatcgtctgggggggtaaagagggctggagagctggaaaccactgggaggcaagggttcagggctggactcagagcagtcagagctgctggatttcagggccccccaaggggaactgctccattcagttgcaaggcagcagcctgggcggcggcgggcggcagcagcagcagcagtgcttggcagttggattccagcgccttctgccagttttgccatgagctgaaaacgtccacctgctgatcccagatccagctcctggtccccatcaggaaaagtgatgtctgtgccaccatccagtcgctcagtcacatggccaaccctcataggtcgaccagcaagctcaaacccattcaactgttccagggcccgccgggcacactcagaatcagagaacgtgatgaaaccataacctttagagcggcctgtatctgagtccttcatcaggacaatattatcaattttaccaaagggctcaaagatgccccggagcatgtcttcagtgatattgaagtgcagggaacccacatagaggcgcattggtccaccattgcccttttgcaggttgttggccatggctgccagtcggtttttctctgcctgtgaagcctgtacaatgataggcactcccagcaaccgctgcccagtcagcccaatggccagtggcacagactggatttcacagaattccacgtaggcaatgcccttagaacgacgtgagttccgatctgagatgatacgtacatcgcgaaccttgcctacagcagagaaaaagtcctccagatctcgaggccgaattcgggcagctaactgcatacagaaaactgtgcgggcatcacgctcctcaggactcagattatcaactggctccctgactgggctcttctctctgaaatgaggactcttactgtgtccatacctataaccagtggcaagtggaggactcctgtaatgcacacgatcctcacgacgatggtcccgacttcgcgactcactaccatgtcgacgatcccagctacggctacggtgacgacactgccgacctggacttcggctccgactatttctccgtctataccgatcccgatctcgactacgactcttcttttttatagggagcttccagcatggcctcaatcactatgtcaaagtcatcagatgccatcctgtcagatcagttccgggtccccgcaggggggtcccggttctctccgttcctttgagtatgttgtggggagtggagctcggatagttcctagagtctaggcaagaaaagcagcactgcaggtacagagcctcctcttcccgcaaaatggcggcagctctgccgtcttccagaaccttccccaatctccc

SEQ ID NO: 435684 - DNA, 749 bp, Homo Sapiens
agcggggggtaggttctggaagacggcagagctgccgccattttgcgggaagaggaggcgctgtacctgcagtgctgcttttcttgcttagactctaggaactatccgagctccactccccacaacatactcaaaggaacggagagaaccgggacccccctgcggggacccggaactgatctgacaggatggcatctgatgactttgacatagtgattgaggccatgctggaagctccctataaaaaagaagaggatgagcaacaaaggaaagaagttaaaaaggattatcctagcaataccaccagcagcaccagcaacagtggcaatgagaccagtggaagcagcaccatcggggagacaagcaatcgtagtcgagatcgggatcggtatagacggagaaatagtcggagccgaagtccaggtcggcagtgtcgtcaccgtagccgtagctgggatcgtcgacatggtagtgagtcgcgaagtcgggaccatcgtcgtgaggatcgtgtgcattacaggagtcctccacttgccactggggagccagttgataatctgagtcctgaggagcgtgatgcccgcacagttttctgtatgcagttagctgcccgaattcggcctcgagatctggaggactttttctctgctgtaggcaaggttcgcgatgtacgtatcatttcatatcggaactcacgtcgttctaagggcattgcctacgtggaaattctgtgcaatccagtctgtgcc

SEQ ID NO: 435685 - DNA, 485 bp, Homo Sapiens
tagcttagcttgtatctccctttatgcctaactcaggatttcttttgcgtcctggataggttcgcgatgtacgtatcatctcagatcggaactcacgtcgttctaagggcattgcctacgtggaattctgtgaaatccagtctgtgccactggccattgggctgactgggcagcggttgctgggagtgcctatcattgtacaggcttcacaggtgagcaggctgagaaacagacataagattttaaggggagagggaatgtgggacatgacccatcatttcctccttccccaggcagagaaaaaccgactgtcagccatggccaacaacctgcaaaagggcaatggtggaccactgcgcctctatgtgggttcctctgcacttcgatatcactgaagacatgctccggggcatctttgagccctttggtcaagtgagtagaagtgagagaaaccttgaagggaattggaagaatgccacgggtga

SEQ ID NO: 435686 - DNA, 738 bp, Homo Sapiens
  misc_feature (580)..(642): n is a, c, g, or t
  misc_feature (662)..(662): n is a, c, g, or t
tccattagatcctgggcactggtccctgaagaggtgttgcgtgacattatcacagacactgaaataccaccctggagaccgggagttctttccttcctaagtggttctgtccctaaagcaaaacacagaaacctgtggcatgggccgcagggagagggggcgggcacgccatcaggtcggggggatgtgagcctgaagcagtagcagtgacagctttggacgtggccgatggaggccagcccacatgaggggcaagccccgcagtcgactggatccaggtgaggggtctccttgtgaagggccttctggagccttccacagtaggaagagctcagacctggtggccgcacccccacccctcaccaaactggcttctggagttaaggaagacagggcaaggtggttataaaccaagccccatcttgtctgtcttttttcttcctgtatataaatatgtgcatatacgtgagtatgtgtacacacaccgcagttccgtacatcgcagtagagtaatactattgtgttattgcatagaagagacggctttcgggcgctgggctaggtaacggtctgggagcgnnnnnnnnnnnnnnnnnnnnnnnnnnnnnnnnnnnnnnnnnnnnnnnnnnnnnnnnnnnnnnnctcttgctccctggcatgcncctcataccactcctggatctcctcctggtacatcttcaggctcaggtcgctcttggtccttgatcgccgtcccag

SEQ ID NO: 435687 - DNA, 444 bp, Homo Sapiens
ggtacccccaagccccatcttgtctgtcttttttcttcctgtatataaatatgtgcatatacgtgagtatgtgtacacacaccgcagttccgtacatcgcagtagagtaatactattgtgttattgcatagaagagacggctttcgggcgctgggctaggtaacggtctgggagcgctggcggctgcctgggggctgctgggcggcgggggctgcactgctgctgagttgtctctgctgctcttgctgccctggcatgctcctcaataccactccgtggatctcctcgctggtacatcttcaggctcaggtcgctcttggtccttgatcgccgtcccagaaacaccatggaatgttgctggtatctctccatctgggagagggtctccagcagcctgggacatccgaggagccccccgtgcctcccggtagagctcattaccgg

SEQ ID NO: 435688 - DNA, 778 bp, Homo Sapiens
  misc_feature (16)..(16): n is a, c, g, or t
  misc_feature (690)..(690): n is a, c, g, or t
  misc_feature (694)..(694): n is a, c, g, or t
  misc_feature (745)..(745): n is a, c, g, or t
  misc_feature (748)..(748): n is a, c, g, or t
  misc_feature (750)..(750): n is a, c, g, or t
gttggacttgcggccntccagcatcttctccttgtctaggtcctggttcacaccagagggaaccagcttggtcctgggcagccactgccaggttcgtttgttgtcaaagaagaggacgaggtagagatgctctcgggcttcctgggtcatctgctcccccaagtttcagcacctccagtgggggcacagggatgggaaccccatggtggaacataccttctcggggcatctttggatcaatgatcagagctgggtatgatggatagcctcggcatttggcccacacgaggtccagagcatccagcggggagtcctcatcctctgacagccagccagctccccggcccagactcttccttaccatgctgtggcccacgccgcggccagtgcccacggagtaggcctcattctcagtgcctgaggtatcctcactgctgtcctctgggaaagtgccccgagagaaggagggtttgccccggccttgttttgagggcgttgtgctggtccggtctgaagcagcgctgctactgctactgctgctggactcagagtctgagctgctccggggaaggctgcagtcattacggtataccaagaaactcttcttcactggttggtttccaccgctgaagccattggctggtaagtctttgcttgtctcctggctgctgctctcctctgccgcactanctgnctgcccatccttgtcacaggctgccgggtggggtgtcagactaccccggcnccnanggccatgccgctcagggccatctctgcc

SEQ ID NO: 435689 - DNA, 1354 bp, Homo Sapiens
ccccaggcctctaggcagctatggattctcctggcatgagcagatagagttgttgggatgccctgttttacgcagtgtcctaactgtggcccaccaccccgccctacaatgctgtgaggtctctggagctttttctgacttgtgggccctccctctccttgcgctgaactgccattggcccttggagtgttctgtacagtccagctgcacttaggccaggaaactcatgatggggagctgggggggccccacaggactgcctccgtggctgggggtcatctggctctcccggtttttggggggccggcccgggcctcttgggcggtccagctgtcttcgggttctttttggagaacagaactgaggttctcctgcccacctcatgtgcgggggttgaggacatgttgggacccaggcctttgcttgtctcctggctgctgctctcgtctgccgcactatctgtctgcccatccttgtcacaggctgccgggtggggtgtcagactacccccggcttggaggggccatgccgctcagggccatcacgtcccgtctctcgctgatgggcaagcttccgccgcagtgccgtcatctctttcttgatcatctttgcacgccgtgagcggcccacactctgcttgctggcattcacttcgtccagccgctccagaagcagctttagctgttcttccactggcaggtgcttctggttctccagcaagaccagccgctcttcctcggcatcttcagtgtggtgtgtggcctcatctccagccaggctgtgggggatatgcatgcccgtctcaaagtcaatgcccattttttctgcctggcgccgggcctggcggagcacagcaccaccctgctcacgaagccgcactgctgcccggtagaagatggtgtccttggcgttatacttgaggcagttgctgacgatgaggttgaagtcctcctcaaaatcatcaaaattcaggtagcggtaagcctccaagttctgcttcatggtgaaaaagtccatgggctttttgatgtggtctaggtagtcaggtacttcgtccaattcggttacctcagacagagggaccggctcgctgaagatgttgcctgtgtccttctcttggagctgctccaaggttttgcgaaggaggatgaggaaaggagtcagctgcatctccatggcaatctgctgaaccttgatcgtctcccttttgagtttttcccgcttgcggatcaattccacgagcagccgagctcgctccaagtcatgccggagccgctgccaggacttgagctgttctttaagggcccagttcttatcctcagaatctctcccaacttggtcacagttcctctga

SEQ ID NO: 435690 - DNA, 446 bp, Homo Sapiens
tagtaccaaatgactctggcgcgacccggaaacgcagttacaaatgagaataatttaaattctccgataattacagtatttacaacagcaggggagggagtcacctagtgcccctcttccaggctgggacagaatgcccactcacctcacgaccggtaggggccccaggcctctaggcagttatggattctcctggcatgagcaggtagaggtggtgggatggcctgttttacgcagtgtcctaactttggcccaccaccccgccctacaatgctgtgaggtctctggagctttttctgacctgtgggccctccctctccttgcgctgaactgccattggcccttggagtgttctgtacagtccagctgcacttagggcaggagggacctcccccacccagcttcccctgagactggccccaagaccagaaatgagtcagtgcaga

SEQ ID NO: 435691 - DNA, 729 bp, Homo Sapiens
  misc_feature (180)..(208): n is a, c, g, or t
agtaccaaatgacttgggcgcgacccggaaacgcagttacaaatgagaataatttaaattctccgataattacagtatttacaacagcaggggagggagtcacctagtgcccctcttccaggctggacagatgcccactcacctcacgaccattctagaggccgaggcggccgacatgtnnnnnnnnnnnnnnnnnnnnnnnnnnnnngggatcacttttatttcaaacaattaaatacaaaccaatattttaccccttcatagatgaaatcacatcttttcaggatatgagtataaagtaacaagcctagggcagagcttgtactgacaaagtcctgaaactacaatgagaggaaacacattgctctacttcgggataagtcatgaccgagactcaatttcagagacgctctatgaacagaggtgcttgaagccacagtggcagaagggaaagatggggaagtgtgccgaagagcctccaggcatgacagacagtcccctgaccaagcacaagtaacaggccctttgggtctctgcttctcactggaaaatgatgaagcctagatctgatgactcctagtgccaacatttaacaaagttcgaaagttatgcaggacttcacacatgtacggaatggctgtatcacagaatattatgcgttagaaagttcacggtcactatacctagctctaaaatttttcagagaaacagcagactaataagtgaatc

SEQ ID NO: 435692 - DNA, 1264 bp, Homo Sapiens
tttttttgtggtaaggaccagtattgtatttgactttttaaaaaaccatttttaccctggagctaaaatacgaggttatactgttctgcttaatacaatactggcagcctaaaaatgcttcaagaaaccatatccccaacagcggcagagcatcgggaggagaccctctgtctctgaggcttcggtgcacttctgctcagacggtggcgggagtggaggtcgctgctgaagggtgacggtgtggccatgacacgggcagcacgggaacggaagacgccggagacccagaaggcgcatgactgcctggcctcgagtcactaaaagcagtttgatttcactcttgtcttacttttctagtatggcttcctctactctcttaaacttcttcagttcgacaacgagttcccagtatttgagatagagccacatgagtctgccattctggcgtttgttggtgttccagacatcaccacagtatgtatcatgctgaaatatgtcggtgagaccggctgccatctctaggtcagcggcgacggggtcgacggacgctcgcaccagtaagctcttctctatctccagccgcttgctgcgaggaagaaacagactgcagtagatattctgtctttctgtgagaacagcttcaaattctttcagcaaaagcctggctctcctttgccagttttcttccctttgcaggcagctcaaatacgcacttctcaaaggctgcacctgtcttttttcttgcatcacctgggcccgttcctgttccagaagcttcttttcttctaccaacttgcgtccctgagagataagggcttctcggtaactagcagttctgttttgttccttttcgagttccaaggacaactgagcgacagcacgccgattttctgagatcatggcgtggtacttggcttccagatcctgttgaaaagcagcagttctccgacggtaggcttctctctctttttctacttctttctgggactccctagaccaaatccaacgaaaagcagccaatcccagcattggaaccaacagggcataattccacctgcttccatcaccaccatccgccctggaattaggccggatattccaatttgggggatcatttaggttattcatggagatatacctcggtcggggagcgcgggacctcagcgttcccttaacgccaccgtccgcgggtccgctttgcgcaggcgcggcgcccccactcagtacccgctccgggcgtggcatggtgcgcaggcgcgatccc

SEQ ID NO: 435693 - DNA, 1459 bp, Homo Sapiens
  misc_feature (1412)..(1412): n is a, c, g, or t
  misc_feature (1437)..(1437): n is a, c, g, or t
  misc_feature (1456)..(1456): n is a, c, g, or t
  misc_feature (1458)..(1458): n is a, c, g, or t
agcggggtggctgcggcggggcgggaagccatggagccgcgggcgctcgtcacggcgctcagcctcggcctcagcctgtgctccctggggctgctcgtcacggccatcttcaccgaccactggtacgagaccgacccccggcgccacaaggagagctgcgagcgcagccgcgcgggcgccgaccccccggaccagaagaaccgcctgatgccgctgtcgcacctgccgctgcgggactcgcccccgctggggcgccggctgctcccgggcggcccggggcgcgccgaccccgagtcctggcgctcgctcctggggctcggcgggctggacgccgagtgcggccggcccgtcttcgccacctactcgggcctctggaggaagtgctacttcctgggcatcgaccgggacatcgacaccctcatcctgaaaggtattgcgcagcgatgcacggccatcaagtaccacttttctcagcccatccgcttgcgaaacattccttttaatttaaccaagaccatacagcaagatgagtggcacctgcttcatttaagaagaatcactgctggcttcctcggcatggccgtagccgtccttctctgcggctgcattgtggccacagtcagtttcttctgggaggagagcttgacccagcacgtggctggactcctgttcctcatgacagggatattttgcaccatttccctctgtacttatgccgccagtatctcgtatgatttgaaccggctcccaaagctaatttatagcctgcctgctgatgtggaacatggttacagctggtccatcttttgcgcctggtgcagtttaggctttattgtggcagctggaggtctctgcatcgcttatccgtttattagccggaccaagattgcacagctaaagtctggcagagactccacggtatgactgtcctcactgggcctgtccacagtgcgagcgactcctgaggggaacagcgcggagttcaggagtccaagcacaaagcggtcttttacattccaacctgttgcctgccagccctttctggattactgctagaaaatcatgcaaaagctcccaacctttctaaggacaagactactgtggattcaagtgctttaatgactatttatgcgttgactgtgagaatagggagcagtgccatgggacatttctaggtgtagagaaagaagaaactgcaatggaaaaatttgtatgatttccatttatttcagaaagtttgtatgtaacaattacccgagagtcatttctacttgccaaaggattcgtaacaaagcgagtataattttcttgtcattgtatcatgcttgttaaatttttatgcagcatcttcagaacttgtcctgatggtgtcttattgtgtcagcaccaaatatttgtgcattatttgtggncgttccttgtcacaggaagattctncttctgttgccttattgtntnc

SEQ ID NO: 435694 - DNA, 2280 bp, Homo Sapiens
  misc_feature (62)..(62): n is a, c, g, or t
  misc_feature (135)..(135): n is a, c, g, or t
  misc_feature (2200)..(2200): n is a, c, g, or t
  misc_feature (2265)..(2265): n is a, c, g, or t
atcagacagcttggaaccggggctggaaagggaagccctgagccctcagcaaacatcatgcnccaagggcggttggatccctgccacttgggtctcaagcaaaatgtctgcggccatcagagaaattcttcctgnaccaagggatgcctgaggccctttccttggacaactctgactccagtgccccggggcaagctttatttcctgctccaagaacacgattcttcacacaaaagtcagcaatcagcggtttcacaagacttccctcccctccccccacccacagacagacacacagaacagatccagcacatgctctgcggcccggccccgccccacccgtgcccgctgctgagagggcggcgccatccagatccgggagaaccccggtctgacaggtgaggctgactgttgagggacccctctccgggacatggatgctcccagaggagccagcaggggttggggtggaagagggacacacagcacgcggatgggctgtggccttagtgtgggaggaccacaatcgtcctgtcttagcttaaggatgggtgtgccatcagcaatgggtggtacagggggagtactggcagaagagggaattttggaaaggggtggcctggctggagacagatggtcaatctgtcaagacatcaaagaccccagggttgccacttcagcctcatgccatgctcagcacacgacaaggggctcagggcgcccactaggcagggctggagagctcctctggccccaccccaccctgctgactggctcctaggaagccctctcagccatccatcctaagttgacaggctgtccacactgatgaaatctccccctccctgttgctatctttcctcaggatggcaagaaccaagggcttagcttcctcccatgacttgatctggggccacactgatcggcctgcccacaggcctcggggacccagcatctctctgtggctccgtggcaaagccctgtgaggctgcacagagagcccactcctcctccagtgctcctgtgatctagtcactccacagcttcaggttgggaccagcacttgggaccctttctctgccacttgagacttggccctggccccacttggcatctcctcgtctccacccccctccctgcctgaggcccaaccccttccctgcccggtgtccagatggtctcctgcatgggcaggcctgtccttccagccctggcctggcctctgtggcctgccccgggtcacccagatgggtagtagggggtatcactatggtagttgtaatctgggcacaccttctggaccagccgatagtccgtgctgtagaaggcgatgtagacacagacgactttgaagggctgggagcagctccaggtggctgagctctgagcgtggtctcgggagcagatcttggctgggtcgtgggtgcaaagcgaggtccggcggccccgttctaccttctcccactccatccggcagttgaagattttggaggccttggcttcgatgaagatctgctgttcctggtggaactctacagctttactggggggcacgaggctgatggagatgtttccctggcctgtggcattgtgttggaagtggacgctgaaggtcccattgccatggtccacaatcttccctgtgacgagcaggttcagggccaccgtcttgatgttggagtagaagtcgccccagccaaagattttcttcaccttggctgagggtggggggctgtggttcgggcggttggggggctgcccaagaatgccccaagcctccccaggcggggccagcagccctaggagagtggaattggccatggggcgggacttaggtgagatgtggccccgcttccgaggcacccggggccggggctggccctcgtggtcatcacgctcagggtcctctgagccgggaggaccatcatcctggccacagatgaccagatagaggctaccctgcaccaggaacacgaagcagcagcgagtcagttgcatcttcctcctccgctctcgtcccctcgctctccccttctcttttcggggtcccaggcctccttccccttcctgctccttcaggcgcgccgtcccatgctccagtccccggcggcccgcggccctcccctcagcgggtcgcccagggccgaccccgcgcccttcggtccagctgtgcagccgccgcccccctcccctggtccantgcgcgcggcacggcccccgctcgaggtcccagatgtgcgccccgagcgcctcgaagggccccantgcgccgtggctctg

SEQ ID NO: 435695 - DNA, 901 bp, Homo Sapiens
  misc_feature (516)..(563): n is a, c, g, or t
  misc_feature (572)..(821): n is a, c, g, or t
agatatcacatgaagcccagagcacaaatccgtgaatgtcatttttaaaaaacttaattgtattgtctgctctagtgatacaagttttactagtgataaactattttaatcaaccatactattcttatggaaaaaaatatctattttggcaggtttctgtgcctttatttccctcttctgaaaaaaagtctgtgttttcatagtttggtttgcattgtatatcaataattaatcaggaatgggttttggtgcctgaaaaattggccatggaggcacaccaaagcttcaagcacaagtcttgtacatgggccatcactgtctggtttcacttcgtgtgtttcctaaacacatttagctgcttttttaacaaactcagccccatacttgagtcccttgttgttgggagcatttccaggcatcttttaagggaactgtgacaaacagcctcgggcagatgaacacggaggctctctgttgtctgtctctgagatctttgtgtctgggaatgcctaaagnnnnnnnnnnnnnnnnnnnnnnnnnnnnnnnnnnnnnnnnnnnnnnnngagacagannnnnnnnnnnnnnnnnnnnnnnnnnnnnnnnnnnnnnnnnnnnnnnnnnnnnnnnnnnnnnnnnnnnnnnnnnnnnnnnnnnnnnnnnnnnnnnnnnnnnnnnnnnnnnnnnnnnnnnnnnnnnnnnnnnnnnnnnnnnnnnnnnnnnnnnnnnnnnnnnnnnnnnnnnnnnnnnnnnnnnnnnnnnnnnnnnnnnnnnnnnnnnnnnnnnnnnnnnnnnnnnnnnnnnnnnnnnnnnnnnnnnnnnnnagccgtgaaaaccaccctgccccagcccgaaaaactagaatttttcttttatggccctcccaccccccctttctttaata

SEQ ID NO: 435696 - DNA, 481 bp, Homo Sapiens
  misc_feature (370)..(420): n is a, c, g, or t
ccgattctcaggctccctctccggaatcgaagccctgattccccgtcacccacaatgagtttgatttacaaacaaaggaaagcagggttagccagtataaacatgcagctggaaagctagaagatttaatgcttacaaaacactgcttaaagggtgtcaaatggccatacaagatataaaacgttagacagcttatgcgctcaattgcttgctcattactctctctgtctcttacatacctacgccatacttgtttcttaagggtaccttcaggtctgacagagctgagtcccaccaagaaattaaggttggagaggaccctcctgccagtctctggcctgaaagacccttcccaccctctccatcctgnnnnnnnnnnnnnnnnnnnnnnnnnnnnnnnnnnnnnnnnnnnnnnnnnnncctggagtgaaacccagaagcttctttagaccttggtgcagctgctatccacccagaagtt

SEQ ID NO: 435697 - DNA, 790 bp, Homo Sapiens
aggtaaggtaaagttaaggatcttgctggggaaggggtgggggccccctctgtacaggcaccaagaccaaagtttccccagggattgcctggggcctatagactcagcgggatactcaccaaacttggcgtcagccgtgagcttcaggatcttctcatactatggggaaaggagaccttcagggggtgccaggcccctgctcaccagcccctcacccccagcctggatcctgcgataaggaacagacaggctggaaagaaggaagggaggtgcccagagaggttgagaggctggctcacccgtctcctgggcctagtgcagagtttcagggcagtggtggtcataaggtcatgggacaatggggtgctggatcttgtactcacatcaatcccctgtcccagcagctcctttagtacctggctgcagagcagccgcaacttcacagaggactggaagggaagtccttacatcagccaggctggcaaacctcacccctccttcctggggactggctcagagcaggccagccactgatcaaggtcacaaagcatggtagcacaggctgagagcactgaggccctagccccagagaaacctcaccatcctctacacccacaatccccacccccaacacccctcctccacccagactagaccctgtgcactcaaccatcttggccagcgtgctgatttctgccaggacccagtcgggacagtccagatcaccacagaaccggaacctcatcgcgccaagaagccagggcccgggaatttctttttccggtcccgc

SEQ ID NO: 435698 - DNA, 988 bp, Homo Sapiens
ggcgcgatgaggttccggttctgtggtgatctggactgtcccgactgggtcctggcagaaatcagcacgctggccaagatggttgagtgcacaggtctagtctgggtggaggaggggtgttgggggtggggattgtgggtgtagaggatggtgaggtttctctggggctagggcctcagtgctctcagcctgtgctaccatgctttgtgaccttgatcagtggctggcctgctctgagccagtccccaggaaggaggggtgaggtttgccagcctggctgatgtaaggacttcccttccagtcctctgtgaagttgcggctgctctgcagccaggtactaaaggagctgctgggacaggcggattgattatgagaagatcctgaagctcacggctgacgccaagtttgagtcaggcgatgtgaaggccacagtggcagtgctgagtttcatcctctccagtgcggccaagcacagtgtcgatggcgaatccttgtccagtgaactgcagcagctggggctgcccaaaggtacgggttgtgggtgggcagctgggcagcctgtgggccaagggctgctagagaaggggacaggccctgtgaccctgaggtgtacctgccctgtctgggccaggagcccaagccaggccccgagatgctagctccagagctactccattctacccccagagcacgcggccagcctgtgccgctgttatgaggagaagcaaagccccttgcagaagcacttgcagggtctggaggcctacgcaggtacgtatgaggccagccagggtccgggactcatctagaaggtgcacgcatacacaaagtgccatggcagagtccagggagaacgagtaagccaggtcacatggttaactaagcaacggtagagctgggaactgtgcctggtcttctggaatcccccagggtcttgtactgaggtctgctgtgggtgatcagagggatatgggcctggcgggtccga

SEQ ID NO: 435699 - DNA, 692 bp, Homo Sapiens
cgtgtcgcttaataaccttcctggttaagttttgtgcgctgcttatgaaaacagccaacaattgcctttcaagggaagggaaggtaatgctgggaaaggtcctcaggagccctgagccaagttctcaagagagaagtgaggcagctggggatctgggaggccagagtccgggccagggcctcagcatcctagaaccagggctgcctcccgaagagcagttcagagggcgtgactccatacgggcagggcggctccacacaggcctggaacacccttctcctcagcccagggagctcatcagggtctgggcctgcttcagttctttgggcagccccagctgctgcagttcactggacaaggattcgccatcgacactgtgcttggccgcactggagaggatgaaactcagcactgccactgtggccttcacatcgcctgactcaaacttggcgtcagccgtgagcttcaggatcttctcataatcaatcccctgtcccagcagctcctttagtacctggctgcagagcagccgcaacttcacagaggacatcttggccagcgtgctgatttctgccaggacccagtcgggacagtccagatcaccacagaaccggaacctcatcgcgccaagaagccagggcccgggaatttctttttccggtcccgcagggtcagctgagtcgacgatcacg

SEQ ID NO: 435700 - DNA, 1016 bp, Homo Sapiens
catttgtgccccgcacctgagtaatgcctgggtgattgttgtggtgattgtccgttatacttctgttaattttgtcctgcttatgaaaccatcccaccgattgcctattcaagggaagggaaggtattgctggaaaggtcctcagggagccctgagcccaagttctcaagagagaagtgaggcagctggggatctgggaggccagagtccgggccagggcctcagcatcctagaaccagggctgcctcccgaagagcagttcagagggcgtgactccatacggggcagggcggctccacacaggcctggaacacccttctcctcagcccagggagctcatcagggtctgggcctgcttcagttctgccaggaggacctggaacttgtctgctgagagggacatggcaacaggctgggctggggtccctggggcagctgccacctccagccgcaggtgcaccatgggctcttccacggattgcagcaggctggagctcagggtgtagtccacccgccagcccacacctgccaacctattcatgcgtaggctgcagacccgcaagtgcttctgcaaggggctttgcttctcctcataacagcggcacaggctggccgcgtgctctttgggcagccccagctgctgcagttcactggacaaggattcgccatcgacactgtgcttggccgcactggagaggatgaaactcagcactgccactgtggccttcacatcgcctgactcaaacttggcgtcagccgtgagcttcaggatcttctcataatcaatcccctgtcccagcagctcctttagtacctggctgcagagcagccgcaacttcacagaggacatcttggccagcgtgctgatttctgccaggacccagtcgggacagtccagatcaccacagaaccggaacctcatcgcgccaagaagccagggcccgggaatttctttttccggtcccgcagggtcagctgagtcgacgatcacgtgacttggactaactgcctctggg

SEQ ID NO: 435701 - DNA, 826 bp, Homo Sapiens
  misc_feature (748)..(748): n is a, c, g, or t
  misc_feature (772)..(772): n is a, c, g, or t
  misc_feature (786)..(786): n is a, c, g, or t
gggcctggatgcgattcggccgaggcttctagcgcgatgagtccggttctgtggtgatctggactgtcccgactgggtcctggcagaaatcagcacgctggccaagatgtcctctgtgaagttgcggctgctctgcagccaggtactaaaggagctgctgggacaggggattgattatgagaagatcctgaagctcacggctgacgccaagtttgagtcaggcgatgtgaaggccacagtggcagtgctgagtttcatcctctccagtgcggccaagcacagtgtcgatggcgaatccttgtccagtgaactgcagcagctggggctgcccaaaggtacgggttgtgggtgggcagctgggcagcctgtgggccaagggctgctagagaaggggacaggccctgtgaccctgaggtgtacctgccctgtctgggccaggagcccaagccaggccccgacatgctacctccagagctactccattctacccccagagcacgcggccagcctgtgccgctgttatgaggagaagcaaagccccttgcagaagcacttgcgggtctgcagcctacgcagtaagtatgaggccagccagggtccgggctcattctagaaggtgcacgcagcacacaaagtgcatggagagtccagggagacgacttaaccacggtcacatggttactagcagccgtagagctgggacctggccctgggtctcctgactccccccaagggtttcttgtcactngaggtctgcctgtggggtgatcangaaactgattatcnggggcaccctggccctgttttctgaagccctggggttcag

SEQ ID NO: 435702 - DNA, 768 bp, Homo Sapiens
tatgggccggaggtcccctgggacagaactggtgcaggacagctggcactggccatgcaaaccgtggtgtccggcccggaatatgtgccctgcgggttttttgtgtattgattggtatacttctgtttatttttcctgcttatgaaaacagccaacaattgcctttcaagggaagggaaggtaatgctgggaaaggtcctcaggagccctgagccaagttctcaagagagaagtgaggcagctggggatctgggaggccagagtccgggccagggcctcagcatcctagaaccagggctgcctcccgaagagcagttcagagggcgtgactccatacgggcagggcggctccacacaggcctggaacacccttctcctcagcccagggagctcatcagggtctgggcctgcttcagttctgccaggaggacctggaacttgtctgctgagagggacatggcaacaggctgggctggggtccctggggcagctgccacctccagccgcaggtgcaccatgggctcttccacggattgcagcaggctggagctcagggtgtagtccacccgccagcccacacctgccaacctattcatgcgtaggctgcagacccgcaagtgcttctgcaaggggctttgcttctcctcataacagcggcacaggctgccgcgtgctctttgggcagccccagctgctgcagttcaccctcgtgccgaattcggccacccaggcctcgctaccttatacccgcgagggttactgccgtcg

SEQ ID NO: 435703 - DNA, 1141 bp, Homo Sapiens
cacgatacaaaaagagtgtgaaagacggtcagggtaggagatagaagggattcgcttgaggagtagtaggggggagatgtaggcgaattgtgtataaacagatgtgtttgctcgtgtaaggccgggagtgtgccaggtgcccatttccgttactatcgttagtcggcccagcgcagaagaaagcaccaaggagacggagcatcattaaatgtccccacaaaaagttgggtaggttattcccctgcgttaggagtgccaggccaaccaattgcctttgtcaagggaaagggaatggtaatgctggaaaagggtcctcagggaggccctgaggccaagttgtcaaagggggaagggaggcaggtgggggttttgggaggccagagtccgggtcagggccctcagcatccttagaacccagggctgcttcccgaagagcagttcagagggcgtgactccatacgggcagggcggctccacacaggcctggaacacccttctcctcaagcccagggagctcatcaggggtctgggcctgcttcagttctgccagggagggcctggaacttgtctgctgagagggacatggcaacaggctgggctggggtccctggggcagctgccacctccagccgcaggtgcaccatgggctcttccgcggattgcagcaggctggagctcagggtgtagtccacccgccagcccacacctgccaacctattcatgcgtaggctgcagacccgcaagtgcttctgcaaggggctttgcttctcctcataacagcggcacaggctggccgcgtgctctttgggcagccccagctgctgcagttcactggacaaggattcgccatcgacactgtgcttggccgcactggagaggatgaaactcagcactgccactgtggccttcacatcgcctgactcaaacttggcgtcagccgtgagcttcaggatcttctcataatcaatcccctgtcccagcagctcctttagtacctggctgcagagcagccgcaacttcacagaggacatcttggccagcgtgctgatttctgccaggacccagtcgggacagtccagatcaccacagaaccggaacctcatcgcgccaagaagccctcgtgccgaattcgccacccagc

SEQ ID NO: 435704 - DNA, 1371 bp, Homo Sapiens
aaaactataaagattttttaaaagctctgtctcagctagaatttttaagattataactgaacagtatagcccttttagttgtttgaaaattacataatgattcaaaagcttgtttcactgcctttcccagcactaagaaaattaacaatcatttcttttaatttccttgaatcagagccattctaaagtgactctggaccagcaattctgagctatgatttcatgatacatgtattaatatctaaatgagttgtgagttgacataagaaccatagttccataataattatcttcaaatcaatggatatcttaaatgtgtttttttcttccttagagattattattaaactgatgtatttgataataaagaattttaggactgagaaagttaagtttttcttaccaataataagatattgaaatatataaattataaaacagaaataaaatgaaataaaggaggttatccctaaagtcatttaccttagtcacttgcaattaaatatgggttacttcgggagaagaagtgtggccctaaagctactgtaacatgaatcatgccctaatgtgcactatatatgaactactttggtcagaaggcagcggcgggtaaggatggcttcctctcacagtgcttcttaggctatccatttaccaaggaattctaatctctttctctcacttcaccaggaaaggagggagtttaagatatagaactgggcatgctagcctcttttttcccttttgtggatttgtcataactgcagagaaccgatgttgtggtctcttgccagctacattgtgaaccttgcagtgaaagttctttgcctctgcaaagggagatttgtgcttgtgcagaactgcccatgccttagtaagcaggtctgtctaattctaagttcaatatctggtggctattgttggcataaacttaaagtacatcctctaacctagcctttttcagcagtaaacttaaaatattgaatctccatctgtctgtgtctcaagtggttcagaggtcaggagaggagagggacattattttatgactcccttaaactttaacaaagactagtgcagattatatttcgaagtcagcatgagatctattaaaaaccacatgtggggaattctttcctaaattttaaaggttctttttttaataatgggaatttctattgcaaatttgaataacggctaaatacacaggccaacagggaaaacaatttttttcccaaacactttaacaacgcttcgctgacccttaaaactccttaccatgacccaaatttcctgaaagctttacattgcactttttccaacccaaaatattcctacaatcgcgtttcacgatattcccctcccctccct

SEQ ID NO: 435705 - DNA, 973 bp, Homo Sapiens
  misc_feature (471)..(487): n is a, c, g, or t
agcgggcgaatctttttcattgaatttgaaccatttgtaaaatctgtgatgctgaagcagagtgtgtcacaaagtgatgagaacattactaaaatccacggacgcactgcgacctaagggctcaacggctgactcggcagcgggcagccaccccacgctcccctgcggtcactcgcacaccacagcctgaagctcccccagcgcctgcacctcgcacacagctaaggtcaaagttcaaacgcactccacacggaagctcattctatacccgaagagcagtctcagaaagcaagattacttttgttttttttaaaaaatggattctttaaatgtatttttctaaacattctgattggaagtagtggattcctaaatgattccaaagtcatctgtaattcttctgttttgttttgttctgtcttttcttcattttggctttgggtggggggaggggcaggtgacacaaaggannnnnnnnnnnnnnnnnaaatttttggaatcttttccaataaccagctaaagatttgcactgaaatacaacttgtatgccttttgcatttttaaagcctgcttcctggatttaagcagagtgatagtgttcaaagagccagttcagcctgtaacatatttgaaaaagatatgtctgcactttgaggtcccttttgaatgccattcactagacctctcaagcattttgtttcattgctacatccaagcgcctcacaagtccacaatgcgggacagcatcaaaagctcaagactttggaaaaagcttgtgggcttgcactgggcggagggaagggaacaaaatttgtgtacttctttgtttaatttagaaataaggcatccaagagatgccattattttctgtgtttcaattgttgtgcctttgagttaaactgcatttttgtcttttggttgaaatctgaaatgtactgtcccaatataaaacagtaattatttgacctttaaa

SEQ ID NO: 435706 - DNA, 841 bp, Homo Sapiens
agggcctccaaagtccccgacccgactttgccggtccccttgttaactgccgcctcctccgtttttaaccgccgcccctttggggccccccctgttacaagaaacgggggtagactcaaattggggcgcccccgggataattctttagccgcgccgccccctttcttgtgagtcctctgtcgagtggaggttgtgtgtgttttaacatgtcatcatgtgattattccgtacgagtgtacacacagttattttacttaatcttgatgccaaccgtgattatccttattttgagagggccagagaggttacataacttatccaaaccaaggtcaccgcctcaataagacagcagagctcagatttgaacgctgactccaaaatccaggttggtgaatgctgcacggtcctgccttcctgcgtgacactaatttactccatctagttcccatcatctcctggtcagaatcctggccacaactgaggcagagggaacctgcagtttaccagaggaatctggcaggtctgtgatagggacaggacagtcagccttcaccatggtgccccggaagcaggaggaagtgtggtaatctaactccagcgacctggagaagggcaggctgcgggatggggaagatttcagagcagagggagtaacgggcttggtgtgatggacaccgcgcttcggaggagcagggtggagagaagaaaaccgccagatgctacactgggccgacagaaaagagtagctttgcaaaacgacggcagcgcgctttacagtttatagggaactctcacctaaagcacttcagtggaccctcacataaacctgaaagcgagagaa

SEQ ID NO: 435707 - DNA, 2727 bp, Homo Sapiens
gccttttttttggcctttcatgtcgcttctcatttattaattcagtctgttctaagttgtgtacagttatgaaaataacaaaaccaaagctggaagcccagaaatatttacactctcttgggtactgaggtcagtctatgttgttgcacagattggttatgtttggtacctcaaagtgtttataattcagacaaaatcagacagattaacaattttatatacagtaaaacaaaagggaaagtcattcaagtatcaaaatacagagacaaagattaaataacattttcattacagttcagtccattgccacaccatgagcaacaatacttctgagctgctttctgctggcctgggcatctcaaagacagacccaattcagactggttttctaatgtctctgactgcagctctgcctgctccctgctcaaacccgagcatctcgggaactcccattagtgtctgacgctggagggcccaggagggacgcagagagctgcacacgcagagcctgtcgggaaggtcttatgcgctgagcagctggtgggcaggggagaagaggtggacaagaagcctgtggctgggacaggtactgagcccatctgaagtctcccacccgaatgggctccttcacagttcagaaacgcagcgacagggtctgcccctggtgtgacctgcacttggagaagtgcaaaagtaggggccttcccacttgaagcctgtccttaaagttataataacctttctaggaaagggagactacccatcccagaggagaagaaaagaaagaaaggcccagtcattttcctttcttgaatattcagaaataagccaatctctaaacagaacccagagctagagcagactagccaaggcttccaatatgaaaatacccctgaataaataaaagatgatatagcagcttcaagcagaagaaacacctatggatgatctaagcacaaaagacagcttgaggagtgcatcgtagtgtctgcggtttctttcggacctaccgccccgcccccgacagaggcccacttggatgtggcctggccccttaggaggaagacgggcaccagcatgcgcgcagtggcagcgcagtctactctggatgctttagggttcctggtcaactcttggaagaaagccggggccgagaactgtacagcggtagctcatgggcatcctcacaggccctgaaaggggcaggaaatgaagtaaaactgcaaggtgtcgagatcttcgtttagtaccaagaagtggaggagggcctgcctctaccgcagagagagctgagtcccaggccccaacctgctgggtgcttagcagatagaaacccacaaggcctggcctctagccagtcagagacacagccccacttctgatttctggccaaccacatgggttaagaatgtgcctaacagtactccctgcacatacataccaacaaagaattcaaattcacagcctttgctggctgggaaagaggagtgttgctgaagcctggattattcatcctgggacctgattgacctatgccaggaaagctcggagcctgctaaagtgcccacaggaggaactgggcacacagctgagccaactttgcctctcaaatccacagcagtttcccctgcatttctactctagtccagagggaagaatgcaacccaagttacttttaaaaacaaagcgagcagcaggaaagcttaagaagcagaggcgcaccgggatgccagcctgccccaaaggccacgcgggggagcatcgatgcactgtcaccttatttagccttttccacaccgggggccagggatgggcccagcagccaagtgtaaccgtcaaaccgataattcagagaatcaaaatgagccccaatcacacaggctgattagacaaatcacaaattggcaagtagcaaccttagctgaccccactccaagcattaatgccccaaacaaagctgcttttcctattctctgacacaacgcaggcagtacggcgccggccagcccagggcagtgctccgatcactgacaggtaagaggccagggagaggcctggcgctctggtgctggctaagacttccccagcactagaaactgcacatttttcttccatttggccactgaaccttccccatcgggaaccccaggaaatggaccggaaacctttgagttgttcaggtgcctctaaggctgtgttcttacgagaagcctgtgtctagcccctgaaagggacaggaagttgggcagttcataaagagcagcagctgatatggttgggtttgaaaagcagacgcaccgtactcaattctgcctgagcctgctccgttcccctcacccacaggccaccgccttctcttccgacccactgagctgcacccaagttccgtcctgaggacagaggctatgcaggctggcctctgaaccaacctcagctcccctgtcctctgccccatggccatttgtgtaaagattggcagtatgacctagaggtttgagccaagtgttaaaagttcattttataaaaagattttttttctgttaaaaacaatgtgttctgaacaagtcacttcttgaccctctggaatgccagtcccatctgctagcggcctggagtgcttctccacagccaaggcagggctcgttctgcaggacgtggtggtggcaggcccaggccaagtggccaagaggaggtcctgcaggcggaggtgaggcctgggtcttcaga

SEQ ID NO: 435708 - DNA, 449 bp, Homo Sapiens
  misc_feature (226)..(226): n is a, c, g, or t
aagcaggcaagcaatttattggctggctgctgggttgatgtacttgcccacgccctggcggaaggtctgggggccctggctccctgcctggggctggctgcttttcactttggtctccggggctaccttgagctgtgtcttccgctcctgcgcaatctgggcatcggcctcctcataggggtccacgaacactgtagtggcatcaatgcggatctcctccttaggncggtcagttttggggtcactctccacattctccatggctgtcagtacgtcaaagcccccaacaacccgtccaaagatggtatgcttcttgtccaggtaggcacaggagcgaaacgtgatgaagaattgagacctgttgctgttgggcccggagttggccatgctgaggatgccgcggcccgtgtgcgagaggttgggccggaactcgtctttgaagggcttcc

SEQ ID NO: 435709 - DNA, 578 bp, Homo Sapiens
  misc_feature (98)..(98): n is a, c, g, or t
aaccatccagccctcctccccagcttcatcacgtttcgctcctgtgcctacctggacaagaagcataccatctttggacggtaagggaagcggctgtntgaagcctggggggtcagtgggctaggtgggttccttccccacctgaggcctcctcactgcctttttcgtggacctgagtcatgtgccatgctggccatcactgctgggggttgagggctatgcagagctgcgatggagggtgctccatgtgccagggaagtctggctctctagacccaccgggctcaggagaggaggaaactcgcccatgtggcctggacactgccctgtctcagacccagtggcgcgccactcgcaagcctggccacacccagctcccttcaccctctagtccaggggtctttccagcgttgtgggccacgtggtctctgacgcccacccagctgtgtggaagcagcacgaaacagggtggacgcaggtgatgtggttctggccaagtggaactctgtttaccaaaccagcggggagagcacaagccacgttttgtgactcctatttttcctgtgggtgggggaaacc

SEQ ID NO: 435710 - DNA, 391 bp, Homo Sapiens
  misc_feature (27)..(27): n is a, c, g, or t
  misc_feature (255)..(304): n is a, c, g, or t
actttagaaaagtaacagctagtgaanctattccatacacttcagaaatgttttaacttaagacttcagtataatgttaacttctcctgatgtccttgttgacatgaatgcgtgtgcgtgaaatctcacacacttccatggtcactaaacagccttcaccccgggccaggccatcgggtactcggcccgcttcacgtactgattacttgacttggcgttttctagatataaacatgtacatgtgtgtcctggctnnnnnnnnnnnnnnnnnnnnnnnnnnnnnnnnnnnnnnnnnnnnnnnnnnaaggctaggtcctggcacgtttcccctgtctcagcgggaccctgtcctcacgggagatagccccagaagcccttggacaagcacagg

SEQ ID NO: 435711 - DNA, 431 bp, Homo Sapiens
agagagtagctttaaatagaaaatatgaaactaaaagaaatgtatgctcatcagttttatactgtatttggccaggtgcagaatatcgacatgtagtaatgtaagggaataaggtcaattcacatctaattgtttggagaagtcaccagaaatcaaaagttggaggagttgtatcttttgaggtgggttgcacaggcaagcagcaagttgctatctctccaaagtcctaaactgttctatttgtcctactgtggaaaaatgagtcttcaacttgatttcaatttatataggaaaatgctcaataaaactaataagggctacattccaggacacagccagaccaccatatactgaaccttgattctagagacacctcctgttcaatgtaattggattttcaatcccgaggaattcccggaccgagtaccagc

SEQ ID NO: 435712 - DNA, 686 bp, Homo Sapiens
  misc_feature (54)..(147): n is a, c, g, or t
ggatgagaatatgtaatatttggttttctgctcctgcgtaccacaccacactgnnnnnnnnnnnnnnnnnnnnnnnnnnnnnnnnnnnnnnnnnnnnnnnnnnnnnnnnnnnnnnnnnnnnnnnnnnnnnnnnnnnnnnnnnnnnnnacaaagtgctgacataacaggcatgacccagtgcacctggcttttctgaacttttttagcttatattaggtttgtctgttctagaattttgtatacatttatttatattataggacactttttagcttagctttccccactcggggttagaaagattatattgatccatgatcatgatgtcgattcatagagttgattattcccatttattgataaatattactccataatatgcatataatttatcaatttcctctcaatagacatttgagctgttcccaggcttcagctattgttaatagaactcaaggacacatttttaaaagaaaaaatttcaacccaaaatgtcctttccttttggctctctaatattgtgtcaaggttatatatttgttgtcttgaaaatccaattacattgaacaggaggtgtctctagaatcaaggttcagtatatggtggtctggctgtgtcttggaatgtaccccttatagttttattgagcattttctatataaattgaaatcaagttaagactcatt

SEQ ID NO: 435713 - DNA, 466 bp, Homo Sapiens
  misc_feature (50)..(50): n is a, c, g, or t
gagggcgctcctgtgggggaaaaggggcgctcctgctcgaaggggaaagnacgcccctgggaaggaagggggggctcttgaagcggtgtggtgagaggacgcttccgaggaaggaagggggtgctcctgcagcggtggggggagaggacgcccctgcggaaggaaggcggcgctcctgcgggggctggagagacgcccgcgcggtctcccggctcagggaccgctggctcgcgggtccgccctctccccggcgctatggaaaccgcactttctccgcctgccgtccccgatctctttctcctattacctcccaaacgcgatttcaacttcccgacaagctgacaagtgaatggcgcagaggacgccccgtaaagcgcccgcgagcgggtgggacacaggcgccccctccgcgcccctctgtcctccacggaagggcgcgcgccgctctcgatctggagcgcggtgc

SEQ ID NO: 435714 - DNA, 1529 bp, Homo Sapiens
ttttttttgagatggaaaataggatttattgggggaaccgtacaagcagaggagaagcaggggtgcccaggctgtcacagccttgcagtgcatggtgggttccgtggccaacttgccaggggacaggcctgttgctggcactccccccacaattacagggtgggagtgaaggacctcgcggctgcggacaggtccttgttagtaaggaggaggctctgcagtcccggtggggtcatcttgcctctccggactgctccctctgactggtgaagccacactctgtgaagctgtctgacagaaggggacacgcctttgctgcccaggatggacctgggccacccaggatgccgctggcctcagccagggcacgtgtgcccagcgctggctcctgctgacccctggactggctcccatctcgggaatgacgcctgccgtgggaatcgtggagagggggtttaatttaacttggaaggagcacagaaaggaaagtgtggagtgcggagcgaggcctctggtttggccggctccggttgctggggatggccacaccctggcagcaggcggccagagaccaggaaggcctacccagcacctgtccagaagagattggtgtgggttgacctggcctatgcggggcagctcagtttgaagcaggaacttccccaaacgtgcccaggctccaagacagcagcattcactttgcaccgtgctgagcagagcggggcctcgccaggtggaaagccctaggaaggctgcgtgctctgcaaacccaggggtgctgtggccgtacagcaggggcgtccgtgtccaggcagctttgtcatgtcttccaaaggtcaggaaggcgccaccgccctgccccacgacagctgcgtctgcaagcgccagctctgagcactgttctccgccgacatgaggacaccatccaagaattcctcctgggagacctcctgaggagacgcgaagaccatcgatgctttggaagaatgaaaagaagtttctgctaagccaaacctaggtggatgggaagtgcctgtgtggatgtgaagccaccttgggtgggcggctcggagctcctctgcccacatcgcctcactgggactcgccatccagtctgacgtctttgatgtccccataaatctgctggctttcaggagaacacgtcttgaagcacagctgaacttgaatcttttctgggtcctcctgctgggccgtggtggggagccgctcccgttgcctcaaggcctccaggcctgccaggtcaggctgatggcagtggctgcgcatgaccatgatgcggtggccctgggttatggcgcggctgcggcagcccagccgagcctggtcccggcacatccagtacaccttctccccagccgccttctccttcctgtagaggaaggactcgtgcaccaggaacctgccccccagggaagtcctcaggaactccaggggccggagaggatctgggctgtcccactgcgcgacgcgtggtcgacgatatcccgggaactccgaccgtaccagcc

SEQ ID NO: 435715 - DNA, 2206 bp, Homo Sapiens
  misc_feature (593)..(601): n is a, c, g, or t
ttttttttgtttctccaaaattttattttaatttaaattacagggccagccagatattctgataagaaattcacttttccttaggagaaagaaaatgctttcatggcattgttaacaaatgtatacatctccacttttttaagggttaaaaatcacattaagtaactgccttatgtaaaattaaacctttataacacaaaaaccacttccagtataatagtcttggtaatatgaatatattaaatgatcataacttcaaatgcaacatttcaaacttaaatgttttcacattgttttgcttaaaaacaaaacccacgaagtctgaactaccttcagattccaatgtaagagtaacatgaatgttgtgtctgacacgctgcaccctcacttcttccacctaaaaggctacgacctcactgccaaagtggaagctgttctagatgtgtaagttctaagaatgagcttggcaagaagacgtttcttccacttggtgtaatccatgtttttacactaactccatacacacagcactacaccacaaagccaggacaccacatcacggccaagtcttccttcctaaacatccaagagannnnnnnnncaaggagactagattgccttatttcacacagattctggtaaagacagtcttgagaaatgccaattatgatgtagactgccattttaataaaaataaaatatatctatattttctggagctattttcctaactggtgttcctgaaggtttaaaacctgctgaaacagcaattgggaggcccattttactggccagtatataattccattagtaagagaggctagcaaagaataatcatatcaatttcttaatcagctgcagccatgctgaatttgaactggcaaactctgatttgtcagttgttagttgtgatcttcatatcactaaaatgaacagataccattctaataactttacatagatatagtctagaagacattgttctgccgtggtcacagtaacaaaaaagtggtgcaaaatcagttactttataaatactgataatttgcagcattaaggaacaggacattaaaaaaaataaatttccccataggacacctatgactaggaagtcgtcttttcctaagagaagccaaagttttaattattcagttcacaactattgtactgggttacttagtctaagaaagaaaaggtgctctacagagatttcccacacacacaaagaatcagcattaatttagcataatctctatcattcacagatctggcagattcattaactcatttaaaatgaataaggccaataggatgcaggaaggtgtggctgactgagctccagggctgtatcgcagcttattgatggcaccccattaggtaactgaatacaaaggactggtttactttctttttcttttaatgctgtgatacttaaatgttaaatcagcattttcatgtgatctgaagtatttcaattacatatgagcattcattgttttttgcaaaaactcagtattaggtaatagttacatactactacaataacattcctctgctgtacaaattaaaccatttaaaagaaatgagcattctaagaattatatacaaaagaaaccttgaagcagtgttgaaatgaaatgcaaggtgtcattgctagctctactgttttaaagtatctttgaaaagtaaaattaacaaatacccttcaacatatccaggtttacaagtctcaagaaaatcaaatgtcaaaaaattctagaaagctgtgaaaagcatatatacattttccttatgatcttatgaggcttctttacacttttaagaagttgctaagtttcagtatcaatttattcgcatgtcaactttagctgcccccaaactcccattttggatagctcccctctgatttcagataaagctctgcgtcatcttccttcagcgaaggtgcgcgacctgaaggtgcgcgatctgacgcagggatgccaggtgtgcacttgccacactgcactcagatcgccaacaaagatgggtgcaaacacataggtctaatctgatatcagtgccctctttcctaaaccacactctcatccatacatttgccttcatgaacccagccatgttcagaactcccgtagcacagtctttgaattctgaaatgacacaaagatcaagagaaagcccacatgtgccctagtgtgcaagcagc

SEQ ID NO: 435716 - DNA, 918 bp, Homo Sapiens
tttttttgcacttggtagcttcgagatctgtgccgtctcttcctccgggacccagaatcagacctgtctcggcgatgcttcttcacactcttcttcttcttgcggaggggtgaggagctcccacagctgcattcggactccagtctcctctttttgcggcttctccggtggccgcctttctttttcttctttttcttgggagggggcgatgccgagctgctagaccaatgcttggtcctgtacccgcggtggccgcggtagcaggaggccgggcagtcacagtccactgggccgtcgtcatcgtcaaagggcgcgtactccaggcccggctcagcgccctcggtcagccgcggggtctccgccacaatgtggcccccaggccggtcctccctggtgagcactccctccttctccatcagcatctgccggaatgtccccactttctgccgaatctcctcctccgaatacccctgctcctccatcatctcctgcagctccatgcacttgagctccacccgccgcttgcgctcgtggtccaggatctcgcggtgcgcgcgcttcaccaggcccggctccgcggcgcgcagctcctcttccgcccgcggccaggtccccgaggaggcgctgggctgcgggaagccgttcgcggcgtcgggtgtggactgcatgctggccgccccgttgttcacggtggaggacatcgtggctggccctggagccgctggcctgggccgctggccctcaccgctgaccgccgcgatctaccgggcgctggggccaggccctcgggtcccgccggtccgggctgccgcctagtctgggctgagttgggcagggcagctccgcggcccccacggccccgcaccctctgcctccccgcgggtgctgccgccgcttgctgaaatgctggacagccgg

SEQ ID NO: 435717 - DNA, 1646 bp, Homo Sapiens
  misc_feature (111)..(111): n is a, c, g, or t
  misc_feature (113)..(117): n is a, c, g, or t
  misc_feature (126)..(127): n is a, c, g, or t
  misc_feature (429)..(439): n is a, c, g, or t
cggcggggatctcagtttttgattgcgatatagcagaaataggtgtatgtggcggggagccgatgtgatctacgctgcaatggaggtgggcgagaatgataaataggggcngnnnnnccgtggggnnctgggtgatgatgattaccgttgtgggagaggaaggaggggtgtgggaggagttttagtatacagtgtggagaggagaaggaatgcgagcgtttgctgggggttatttagctgggggggtgagcgaggtattcttgagatccggggtatggtgcgtggttaggaaatggtgtggagcggtttatgggggggcgtcagtgtctgatactgtttgctagaaaggggggtcaggagacaggatagggctaggggcataacaaatgctatttttccgccccgggcatggatgcctcgaggttttgnnnnnnnnnnnctggttttaaactttattttccatgtacagtttcagattatgctaaacatagaaaatggactattttaaaggtactttaagtagaaagtttctaactaccctagagtcacaaaccaagattcaaaatgaacctctaggccttgccctaacatttccccaacaccacaaaattgtccaacttgctctattgtaagtaacctttaaactattagcgagtttagtaacatcccgcgaggcagattttaaactacgatacagtttctatctaggccactgtgtttagtgtgtttacaaacaggcttggagttctaggtttcttcatcatcagtgaacacagagcgtcctagagcgccagcctgttcatgaggggtgtccacaaaagcacgcaaactatagcagagtgtgtgggagtgaataggtctccgatgttcctgtattcaggtatatatatatacacatttacacagaccaacaagtcaagcattctccaaactcatttgaacagagacccaaaataattttaatgcaaataacaaaatgagttagtctgtctccatcacatagcccctcaatgaaagaattacagtactttataaaaatgtcataaaatgcgcaaactacagttccttcaaatacagttgatgctatctttggtcctaatatgtgcttcttggatgtctactaattttgttgttgttattgttcttgaataactggtaataagcaccaagtgagggctgattctatctacaggtaagaagcttggatgttttctccctgattttgtcatttctttccaacttcccaaatgcatgtcatacagcagggaagaggcatctctcatgtctcaaaaaagcttaatggcacagatggatgtgggcactgaatgttgtacagtagtggcaaccagccgggaaaatccataggatcatttcagaccgcattcaacacagatactcatgtagccccgacgtttcttgtgaagggaattgatgtattgcttgagggggtcgatctctggttctaaggtgttttgtttgtttccatcgtgactaccagaaaattatagaaggccagacgcagtggctctagaaataggggtgagaggccagccaggtgtagcatgaagggctggacaagaagggagaggccttctgggataagatgggaaggaggctgtaccccacaccctgaaggtgtctatgag

SEQ ID NO: 435718 - DNA, 476 bp, Homo Sapiens
  misc_feature (81)..(81): n is a, c, g, or t
  misc_feature (156)..(156): n is a, c, g, or t
  misc_feature (219)..(219): n is a, c, g, or t
  misc_feature (380)..(380): n is a, c, g, or t
  misc_feature (389)..(389): n is a, c, g, or t
  misc_feature (395)..(395): n is a, c, g, or t
  misc_feature (410)..(410): n is a, c, g, or t
  misc_feature (450)..(450): n is a, c, g, or t
gaacagagacccaaaataattttaatgcaaataacaaaatgagttagtctgtctccatcacatagcccctcaatgaaaganttacagtactttataaaaatgtcataaaatgcgcaaactacagttccttcaaatacagttgatgctatctttggncctaatatgtgcttcttggatgtctactaattttgttgttgttattgttcttgaataactggnaataagcaccaagtgagggctgattctatctacaggtaaggaagcttgggatgttttctccctgattttgtcatttctttccaacttcccaaatggcatgttcatacagccggggaggagggcatctctccatgttctccaaaaggcttaatgggccccgntggggtgtnggggcnctgaatgtttgtacngttggggggcaacccggccggggaaattccttggggtccntttcaggcccgctttcaccacggttt

SEQ ID NO: 435719 - DNA, 1038 bp, Homo Sapiens
  misc_feature (23)..(23): n is a, c, g, or t
  misc_feature (28)..(28): n is a, c, g, or t
  misc_feature (33)..(33): n is a, c, g, or t
  misc_feature (39)..(39): n is a, c, g, or t
  misc_feature (44)..(45): n is a, c, g, or t
  misc_feature (49)..(49): n is a, c, g, or t
  misc_feature (60)..(60): n is a, c, g, or t
  misc_feature (66)..(66): n is a, c, g, or t
  misc_feature (84)..(84): n is a, c, g, or t
  misc_feature (87)..(87): n is a, c, g, or t
  misc_feature (91)..(91): n is a, c, g, or t
  misc_feature (103)..(103): n is a, c, g, or t
  misc_feature (176)..(176): n is a, c, g, or t
  misc_feature (297)..(297): n is a, c, g, or t
  misc_feature (990)..(990): n is a, c, g, or t
ggggctacccaggcagggcaaanatgcnacaangacatngaaannagancttaacttcanccatgntaattcgggcagtcatgnctncatnaatcattacacnacggctattgagtgcatgtcgtgggatgaggggctctagtgtgtgtaggaaggccatgccccttgccatgtcnaaagcaaacttcacagcctggctctggtccacgacgaaattggtgccttcatgtagtacattgtagagggatccatacggcatccagtgtgtgatgagagtaggatgaggagcaggtgganactggcaggcacctagcactgggagcacatttggatgcggagaaaatcctgagccggggacactcttcattgaagtccctgttcttcccttgtactccagtgtggacccttcagcaccttcacgacaatgtcattgccctgccagcggccccttccatagctctccagaagtgattctcggttgagcttcgtcagggaagttaagctgtttgaagtcaatgccagagtgtttgttcagggtttccattttcggggccgagtgcgggtggtcccccttccagaatgtgtccttgtatggaatacggttgagattctggcccatcttctctgcccgctctcggagaagctctctcaggggtgccttggctttgtccacaggcatctctccatacttgttacagatgctgacaagggccccatttgccaccaggtcctctgccacttgatcttggccccaaaaacaggcatagtgcaggggcacattcccgtgttcattcactgcattgatgtctgccttgtactgcaatagccctggttgaggtcgttctccgtgttgtccagccacaggcgaacggcgactgcgttgccctcccggcactgagtgaaaatgtcgtccatagcagcgtcccggcgccgagtcccctggattggggaagcctgaggacgggactcgggctgcaggatccttctccnggggaactcccgtccggccgcgcccgcagcccgccgccggcccatccc

SEQ ID NO: 435720 - DNA, 1030 bp, Homo Sapiens
  misc_feature (96)..(132): n is a, c, g, or t
  misc_feature (973)..(973): n is a, c, g, or t
  misc_feature (997)..(997): n is a, c, g, or t
  misc_feature (999)..(999): n is a, c, g, or t
  misc_feature (1004)..(1004): n is a, c, g, or t
  misc_feature (1014)..(1014): n is a, c, g, or t
cgcatcctcaccacccgctcacactccgcccacgcgccccccgaatgtactacatcactatagggcgacctggaggctcaccgcggtggcggccgnnnnnnnnnnnnnnnnnnnnnnnnnnnnnnnnnnnnnatcaggccaaatcggccgagctcgaattcgtcgagagcggggacgggagttccccggagaaggatcctgcagcccgagtcccgaggataaagcttggggttcatcctccttccctggatcactccacagtcctcaggcttccccaatccagggactcggcgccgggacgctgctatggacgacattttcactcagtgccgggagggcaacgcagtcgccgttcgcctgtggctggacaacacggagaacgacctcaaccagggggacgatcatggcttctcccccttgcactgggcctgccgagagggccgctctgctgtggttgagatgttgatcatgcggggggcacggatcaatgtaatgaaccgtggggatgacacccccctgcatctggcagccagtcatggacaccgtgatattgtacagaagctattgcagtacaaggcagacatcaatgcagtgaatgaacatgggaatgtgcccctgcactatgcctgtttttggggccaagatcaagtggcagaggacctggtggcaaatggggcccttgtcagcatctgtaacaagtacggagagatgcctgtggacaaagccaaggcacccctgagagagcttctccgagagcgggcagagaagatgggccagaatctcaaccgtattccatacaaggacacattctggaaggggaccacccgcactcggccccgaaatggaaccctgaacaaacactctggcattgacttcaaacagcttaacttcctgacgaagctcaacgagaatcactctggagagctatggaagggcgctggcagggcaatgacattgtcgtgaaggtgctganggtcgagactggagtacaaggaananagggncttcaatganagtgtcccggctcagg

SEQ ID NO: 435721 - DNA, 859 bp, Homo Sapiens
gtcttgttcctccgcggaattggcgccgttcatgtaagtacattttaagagggatcccatatggcaatccagtttgtgaatgagagtaggattagggagcaggttggagactggcaggcacctagcactgggagcacactttggatgcgagaaaatcctgagccgggacactcgtcattgaagtccctgctctgtccttgtactccagtctcgaaccttcagcaccttcacgacaatgtcattgccctgccagcggcccttccatagcttctccagagtgattctcgttgagcttcgtcaggaagttaagctgtttgaagtcaatgccagagtgtttgttcagggttccatttcggggccgagtgcgggtggtccccttccagaatgtgtccttgtatggaatacggttgagattctggcccatcttctctgcccgctctcggagaagctctctcaggggtgccttggctttgtccacaggcatctctccatacttgttacagatgctgacaagggccccatttgccaccaggtcctctgccacttgatcttggccccaaaaacaggcatagtgcaggggcacattcccatgttcattcactgcattgatgtctgccttgtactgcaatagcctggttgaggtcgttctccgtgttgtccagccacaggcgaacggcgactgcgttgccctcccggcactgagtgaaaatgtcgtccatagcagcgtcccggcgccgagtcacctggattggggaagcctgaggattgggactcaggagaagtgaggggtgacagggggcgcgggtcctctcgccgtacgcgtggtcgacgatatcccggaactccggaccggtaccag

SEQ ID NO: 435722 - DNA, 885 bp, Homo Sapiens
agcggggggccggcggcgggctgcgggcgcggccggacgggagttccccggagaaggatcctgcagcccgagtcccgtcctcaggcttccccaatccaggggactcggcgccgggacgctgctatggacgacattttcactcagtgccgggagggcaacgcagtcgccgttcgcctgtggctggacaacacggagaacgacctcaaccagggggacgatcatggcttctcccccttgcactgggcctgccgagagggccgctctgctgtggttgagatgttgatcatgcggggggcacggatcaatgtaatgaaccgtggggatgacacccccctgcatctggcagccagtcatggacaccgtgatattgtacagaagctattgcagtacaaggcagacatcaatgcagtgaatgaacacgggaatgtgcccctgcactatgcctgtttttggggccaagatcaagtggcagaggacctggtggcaaatggggcccttgtcagcatctgtaacaagtatggagagatgcctgtggacaaagccaaggcacccctgagagagcttctccgagagcgggcagagaagatgggccagaatctcaaccgtattccatacaaggacacattctggaaggggaccacccgcactcggccccgaaatggaaccctgaacaaacactctggcattgacttcaaacagcttaacttcctgacgaagctcaacgagaatcactctggagagctatggaagggccgctggcagggcaatgacattgtcgtgaagggtgctgaaggttcgagactggagtacaaggaaagagcagtggacttcacttgaagagtgttcccggctcaggattttctcgcatccacaatgtgctcccag

SEQ ID NO: 435723 - DNA, 958 bp, Homo Sapiens
cgggagacctttgaaagggatccatcggcctccagtgtgaataagattagtatgagacccagttggagactgcagccactaggcactgggagcaccatttgggattgcgagaaactccttgagcgggggaacaacttcttcaattgaaagtcccctgctcgttcggtggtactccagttctcgaacctttcagcaccttcaccgacaatgtcattgccctgccagcgggcccttccatagcttttccagagtgattctcgttgagcttcgtcagggagtttaagctgtttgaagtcaatgccagagtgtttgttcagggttccatttcggggccgagtgcgggtggtcccccttccagaatgtgtccttgtatggaatacggttgagattctggcccatcttctctgcccgctctcggagaagctctctcaggggtgccttggctttgtccacaggcatctctccatacttgttacagatgctgacaagggccccatttgccaccaggtcctctgccacttgatcttggccccaaaaacaggcatagtgcaggggcacattcccgtgttcattcactgcattgatgtctgccttgtactgcaatagcttctgtacaatatcacggtgtccatgactggctgccagatgcaggggggtgtcatccccacggttcattacattgatccgtgccccccgcatgatcaacatctcaaccacagcagagcggccctctcggcaggcccagtgcaagggggagaagccatgatcgtcccctggttgaggtcgttctccgtgttgtccagccacaggcgaacggcgactgcgttgccctcccggcactgagtgaaaatgtcgtccatagcagcgtcccggcgccgagtccctggattggggaagcctgaggactgtggagtgatccagggaaggaggatgaaccccaagcttatcctcggactcg

SEQ ID NO: 435724 - DNA, 1494 bp, Homo Sapiens
tttttttcataataaactttattgtgacaggcggggctgatccctcccatgttgggagacaccatgtggcaagtgacaaagctctgagcccgcccctcttggggccacagtggtagggatgggggaaggggatggaccccatggctggggtagtaccatgactggaggcgggggaggcaaccagaggcctgctgctttggggaggtgcattcccccaaccatgtcccgacacctctggagttcaggcaaggaccttccagtcctacttgtcctgcatcttctcaaggataggcacaatcatgtcaaatttgggtcgctttgcagggtcttcattcatgcagatcttcatgagcttacacacatgaggggaaatacctggtgggatggtaggccgaaggccttccaatgccaccttcattccaatctccatattggagaggtcagcaaagggtacctcccgtgtcaccagttcccacagaagcactgcaaaactccacatgtctgctgagcgtctgtttgtgtcttcaggcttcttctgcagagcttcgggggctacccaggcaggtgcatacatgcgaccaggacattggaaagagaacttgacatcagccatgctaattcgggcagtcatgtcctcatcaatcattacactacggctattgagtgcatgtcgtgggatgaggggctctagtgtgtgtaggaaggccatgccccttgccatgtccaaagcaaacttcacagcctggctctggtccacgacgaaattggtgccttcatgtagtacattgtagagggatccatacggcatccagtgtgtgatgagagtaggatgaggagcaggtggagactggcaggcacctagcactgggagcacatttggatgcgagaaaatcctgagccggggacactcttcattgaagtccctgctcttccttgtactccagtctcgaaccttcagcaccttcacgacaatgtcattgccctgccagcggcccttccatagctctccagagtgattctcgttgagcttcgtcaggaagttaagctgtttgaagtcaatgccagagtgtttgttcagggttccatttcggggccgagtgcgggtggtccccttccagaatgtgtccttgtatggaatacggttgagattctggcccatcttctctgcccgctctcggagaagctctctcaggggtgccttggctttgtccacaggcatctctccatacttgttacagatgctgacaagggccccatttgccaccaggtcctctgccacttgatcttggccccaaaaacaggcatagtgcaggggcacattcccgtgttcattcactgcattgatgtctgccttgtactgcaatagctggaccccatggccagacaaaaagaagaggcagaaagtacagtcagttccaaatgagatactggtgtcagggcatgggaaaagggggaagagcacacatgctttctactgtatgttacagtgcctgt

SEQ ID NO: 435725 - DNA, 946 bp, Homo Sapiens
atttggaatggagggaacccagggtgggaagaaatgtgcccgggccccccttagcacagtggggagggcaccatttgggatggggggggaaaattccctgaagcccgggggacaattctttcaattgaaagtccccggcttcttcccctggtaatccagtttttgaaacttttcagcccccttcacggacaaatgtcatttgccctgcccaggggccctttccatagctctcccagagtgattctcgttgagcttcgtcagggaagttaaagctgtttgaagtcaatgcccagagtgtttgttcaggggttccatttcgggggccgagtgcgggtgggtccctttccagaaatgtgtccttgtatggaatacggttgagattctggcccatcttctctgcccgctctcggagaagctctctcaggggtgccttggctttgtccacaggcatctctccatacttgttacagatgctgacaagggccccatttgccaccaggtcctctgccacttgatcttggccccaaaaacaggcatagtgcaggggcacattcccgtgttcattcactgcattgatgtactgccttgtactgcaatagcttctgtacaatatcacggtgtccatgactggctgccagatgcaggggggtgtcatccccacggttcattacattgatccgtgccccccgcatgatcaacatctcaaccacagcagagcggccctctcggcaggcccagtgcaagggggagaagccatgatcgtccccctggttgaggtcgttctccgtgttgtccagccacaggcgaacggcgactgcgttgccctcccggcactgagtgaaaatgtcgtccatagcagcgtcccggcgccgagtcccctggattggggaagcctgaggactgtggagtgatccagggaaggaggatgaaccccaagcttttcctc

SEQ ID NO: 435726 - DNA, 351 bp, Homo Sapiens
gtaagtgtcacacagtagtactgacagaatgggttgagggttccaaaatctcccaccaaggctcagactttacttcctacccatctcaggaattaagggctgagtactcacctctgccacttgatcttggccccaaaaacaggcatagtgcaggggcacattcccgtgttcattcactgcattgatgtctgccttgtactgcaatagctggaccccatggccagacaaaaagaagaggcagaaagtacagtcagttccaaatgagatactggtgtcagggcatgggaaaagggggaagagcacacatgctttctactgtatgttacagtgcctgtgactgaccctcatggc

SEQ ID NO: 435727 - DNA, 2351 bp, Homo Sapiens
gggagggctgagccatcctgcgtgtcttgcgctcggtggaaatgcccagccgagggacgcgaccagaggacagctctgtgctgatccccaccgacaattcgaccccacacaaggaggatctaagcagcaagattaaagaacaaaaaattgtggtggatgaactttctaaccttaagaagaataggaccgaacagaaatgctgtctgagagcaagaatatattggatgaactgaaaaaagaataccaagaaatagaaaacttagacaagaccaaaatcaagaaatagtcaacctgatttcacataacaatgtgtggcatttgttgttctgtaaacttttctgctgagcatttcagtcaagatttaaaagaggacttactatataatcttaaacagcggggacccaatagtagtaaacaattgttaaagtctgatgttaactaccagtgtttattttctgctcacgtcctacacttgaggggtgttttgactacccagcctgtggaagatgaaagaggcaatgtgtttctatggaatggagaaatttttagtggaataaaggttgaagctgaagagaatgacactcaaattttgtttaattatctttcctcctgtaagaatgaatctgagattttgtcactcttctcagaagtacaaggtccctggtcatttatatattatcaagcatctagtcattatttatggtttggtagggatttttttggtcgccgtagcttgctttggcattttagtaatttgggcaagagtttctgcctctcttcagttggcacccaaacatctggattggcaaatcagtggcaagaagttccagcatctggacttttcagaattgatcttaagtctactgtcatttccagatgcattattttacaactgtatccttggaaatatatttctagggagaatattattgaagaaaatgttaatagcctgagtcaaatttcagcagacttaccagcatttgtatcagtggtagcaaatgaagccaaactgtatcttgaaaaacctgttgttcctttaaatatgatgttgccacaagctgcattggagactcattgcagtaatatttccaatgtgccacctacaagagagatacttcaagtctttcttactgatgtacacatgaaggaagtaattcagcagttcattgatgtcctgagtgtagcagtcaagaaacgtgtcttgtgtttacctagggatgaaaacctgacagcaaatgaagttttgaaaacgtgtgatgggaaagcaaatgttgcaatcctgttttctgggggcattgattccatggttattgcaacccttgctgcccgtcatattcctttagatgaaccactcgtccttcttaatgtagctttcatagctgaagaaaagaccatgccaactacctttaacagagaagggaataaacagaaaaataaatgtgaaataccttcagaagaattctctaaagatgttgctgctgctgctgctgacagtcctaataaacatgtcagtgtaccagatcgaatcacaggaagggcgggactaaaggaactacaagctgttagcccttcccgaatttggaattttgttgaaattaatgtttctatggaagaactgcagaaattaagaagaactcgaatatgtcacttaattcggccattggatacagttttggatgatagcattggctgtgcagtctggtttgcttctagaggaattggttggttagtggcccaggaaggagtgaaatcctatcagagcaatgcaaaggtagttctcactggaattggtgcagatgagcaacttgcaggttattctcgtcatcgtgtccgctttcagtcgcatgggctggaaggattgaataaggaaataatgatggaactgggtcgaatttcttctagaaatcttggtcgtgatgacagagttattggtgatcatggaaaagaagcaagatttcctttcctggatgaaaatgttgtctcctttctaaattctctgccgatttgggaaaaagcaaacttgactttaccccgaggaattggtgaaaaattacttttacgccttgcagctgtggaacttggtcttacagcctctgctcttctgcccaaacgggccatgcagtttggatcaagaattgcaaaaatggaaaaaattaatgaaaaggcatctgataaatgtggacggctccaaatcatgtccttagaaaatctttctattgaaaaggagactaaattgtaatgtgattcacaatgtaacaatataaaaataagtttttatataattatataaaagtaagatactctgctgctttactattgtataatatagtagttttaaagttcaaaaaaaa

SEQ ID NO: 435728 - DNA, 1179 bp, Homo Sapiens
  misc_feature (1102)..(1138): n is a, c, g, or t
atccagggtttaatttaaccattttttccttccaattaaattattctccccttaggaaattataatttccccagggattccagttgtaaaaattatggcatctgggaaaatgacagttaggacttaagatcaattctggaaaaatcccagatggctggaacttcttgcccactgatttgccaatccagatgtttgggtgccaactgaagagaggcagaaactcttgcccaaattactaaaatgccaaagcaagctacggcgaccaaaaaaaatccctaccaaaccataaataatgactagatgcttgataatatatgaatgaccagggaccttgtacttctgagaagagtgacaaaatctcagattcattcttacaggaggaaagataattaaacaaaatttgagtgtcattctcttcagcttcaacctttattccactaaaaatttctccattccatagaaacacattgcctctttcatcttccacaggctgggtagtcaaaacacccctcaagtgtaggacgtgagcagaaaataaacactggtagttaacatcagactttaacaattgtttactactattgggtccccgctgtttaagattatatagtaagtcctcttttaaatcttgactgaaatgctcagcagaaaagtttacagaacaacaaatgccacacattgttatgtgaaatcaggttgactatttcttgattttggtcttgtctaagttttctatttcttggtattcttttttcagttcatccaatatattcttgctctcagacagcatttctgttcggtctgcaagaaagaatatattgctgttctgttgttgcctatatactttcctattcttcttaaggttagaaagttcatccaccacaattttttgttctttaatcttgctgcttagatcctccttgtgtggggtcgaattgtcggtggggatcagcacagagctgtcctctggtcgcgtccctcggctgggcatttccaccgagcgcaagacacgcaggatggctcagccctgaaagagcctacggcattagccacagcgcatccgctctcgacgaattcgagctccggccgatttggcctgatnnnnnnnnnnnnnnnnnnnnnnnnnnnnnnnnnnnnncggccgccccgcgtgagctccattcgcctatatgattatcc

SEQ ID NO: 435729 - DNA, 1521 bp, Homo Sapiens
  misc_feature (170)..(219): n is a, c, g, or t
  misc_feature (243)..(298): n is a, c, g, or t
  misc_feature (331)..(401): n is a, c, g, or t
  misc_feature (413)..(548): n is a, c, g, or t
gcggcgggattcaaggggtgttccaccacccccggttgtggagggagggctcccaccccggcggggggggagttgtttttttagaatatttccccccccgcctctctccaaaaaaagcccacacggggcgggggggctaatttttttaataaaaaggccccccgttgggnnnnnnnnnnnnnnnnnnnnnnnnnnnnnnnnnnnnnnnnnnnnnnnnnncgggttttgttttaaaaaccttcnnnnnnnnnnnnnnnnnnnnnnnnnnnnnnnnnnnnnnnnnnnnnnnnnnnnnnnnccgggtgtttctttgggaaaaattattgccccnnnnnnnnnnnnnnnnnnnnnnnnnnnnnnnnnnnnnnnnnnnnnnnnnnnnnnnnnnnnnnnnnnnnnnnccccaatttttnnnnnnnnnnnnnnnnnnnnnnnnnnnnnnnnnnnnnnnnnnnnnnnnnnnnnnnnnnnnnnnnnnnnnnnnnnnnnnnnnnnnnnnnnnnnnnnnnnnnnnnnnnnnnnnnnnnnnnnnnnnnnnnnnnnnnnnntttttttactagtgcaacaggattttttatttatatggcaatagttacagaccgcatacacacactcaggaaggcccactaactgggcccaccaagagacaattacccccaccctcaatgcagagtcctttgggcttccagggaacaggccttttcttacatggctctggtccgaggtccagtactcagcatgcgaagagccatatcacggaggggataagtggaggagtgtcttttcaattacttgggtgtgaccctgaagactcggatgtggatggctgagttgttgcggatccgagtcagtggctcccgtgtgtcggtctctggctccagctcatcaacaagctccacggtggaggtattggcagccacctgcaaggacccgaagctgcccgcctgcagctgcagcgcgatgttgatggcgcggttgatggccaggcccaagccgtgaatgtagatctcagagcacgcgttctgaccccgggcccctccgtccagcagcttctggcagcgggccagctgggccttaaagtccgtcttcatgttgacataaatgtcattgggtctccggggcaggcggctgggaagccttttcctaagggtgtattccactggatccagttcagcctccacagcaccgcggggctctcggttttctgccatgctgtgtgcctctcttcgttccacagggccctccaggcgcgcgaggcccgctccccgccaggccactcaagggttcgccggccagcccaagtaaccgcgaccccaggtcccagagaaagaaggatgtgggtgcaagcagccagccagctcgtgggcgccctgcccgcgccggggtcctgaacgggctgcggagtgcgcacgcgcgcccgtaccccgcgagctatgaatcgccttcccgggaattccggaccggtaccagctgctttcttggggtgcgccgccgccggccccgccgggcaccgcccaaacc

SEQ ID NO: 435730 - DNA, 1304 bp, Homo Sapiens
  misc_feature (588)..(617): n is a, c, g, or t
  misc_feature (714)..(714): n is a, c, g, or t
ggctggtaccggggtccggaattccctgggattttatacatgaagacacgaaaatgtatttatttcttttaaaatcagaagaaaacggtgagaactgtgaggccggggggacgttttcctccgggatcctggcagatcctgcagaccgcgccgtcgtgcgcgaagcaccgggacgggcctcccgcgggaagggcccaggaggacaccgggctcccctcccgcccgcggggccccagacgcggcgccgctttaaggctccgggccccgcgcggatgcggaggctgcggccgtgacgtcagcgccccgccccgggtgatgctgcagcagccgggaccgcggccgggcaggcagcagcccagcggggacagggatgcctgccgtctccacccacagggacgcccaccagccctccccacgatgatccccgcagccagcagcaccccgccgggagatgccctcttccccagcgtggccccacaggacttctggaggtcccaggtcacgggctactcggggtccgtgacacgacacctcagtcaccgggccaacaacttcaaacgacaccccaagaggaggaagtgcattcgnnnnnnnnnnnnnnnnnnnnnnnnnnnnnngtgcccgcttgagctggtggacttcggggacctgcacccccagaggtccttccgggagctgcttttccacggctgcattctctttggcatcgagttncagctacgccatggagacggcgtacgtgaccccggtgctcctgcagatgggcctgcccgaccagctctacagcctggtgtggttcatcagccccatcctcggattcctactgcagcctctgttgggtgcttggagtgaccggtgtacctcaaggtttggaaggagacgccctttcattcttgtcctggctataggggcactgctgggcctctcgctcttgctgaatggccgggacattggcatcgccctggctgacgtgaccgggaaccacaagtggggcctgctgctgaccgtgtgcggtgtggtgctgatggactttagcgccgactcggcggacaaccccagccacgcctacatgatggacgtgtgcagccccgcagaccaggaccgaggcctgaacatccacgccctcctggcaggtctcggaggaggctttggatacgtggtcggcggaatccactgggataaaacgggcttcgggagggccctggggggacagctccgagtcatttacctcttcactgcggtcaccctgagcgtcaccaccgtcctgaccctggtcagcatccctgagaggccgctgcggccgc

SEQ ID NO: 435731 - DNA, 1526 bp, Homo Sapiens
  misc_feature (143)..(143): n is a, c, g, or t
  misc_feature (216)..(216): n is a, c, g, or t
  misc_feature (1144)..(1153): n is a, c, g, or t
  misc_feature (1363)..(1381): n is a, c, g, or t
agacgagggcaagtgtggaagaaaaaaattccctcgggtgagagaccgagtaacttgcaaaaggctttattaacctgtatataagtgttgaagagcctgattgatagtttctctactagaaaagtaataagatgtattattanaacgtgagttgagaataatattccaaatgttggttgttgtcgttgttgttctcagttggaagagttgatcttnttagttttgggatgtgtaagtgatgctgggaaagcctttctttaaatagtcattgctctcgtttgcctcagaacctatttggtgaaaagtgtgtttaacacaaacagtagctgctaaattgttaactaaagagccttgtgcgaagcaagtgttcgatacgtgcttgtctaatagaatgaagagactataagccagagaggtttaatagcagttgagccagcataaaccaagatgcaccaaacttcatgtccaaaacctacatagaattgcctaccccttgggtttcgatgcttggatgttggagattacattttctattctctgctttctggcacatgcaagccagatatggacaggaaaccctcaatatttattcatttttctagtcaaggctttctagtatgataaaataaaattttacatctagctgcattgcaagtcagaaaataccttcctgcaaatatggaagatgacaaaactcagtttcaaccaagctgagctgctcttaaatatttgtagtaaagggattacgttccataggtctgaagcacttactttttaacctcttcccttctcccctttcttccctttcttttcatgactattctctcctaaacttgctaaactccccaggaaaaagggaaaatggcctgctagggagaccagtttcattaatgaaaatcatttctctgaaatatagctagctttttcaacgattctcaaatttgttattggataggcagtttggcaaaaacctagaagggaatgcttattagtttattaatttatttgttaatggcccagtttttattgaaacttttgcatgtctattactctttggaaaataattaacagctccatcctattgaaatggcttgtgtacagagcacacatcaaccaaataaaatccatggctttgtaaaggatnnnnnnnnnnttaaaataatttatttcaccaagttctccttggcactgaattctacttaaagcataattcattcagtagagaatttgagtacacggggtatggagagtagggcacaaaatgtttccatacatttgactttattgatttgaaagcaaagttactgaaatgcctcagttagttctgcattttaaaaggtgtctacctgaaagaaacaaaaannnnnnnnnnnnnnnnnnngcggggaagatggaagattattcacatgcttgaaggctattcacactgctttaacaaataaacatggaacatacgtccttaattaactgtggagttaatagtctgtctctttgtcctgatgtaatttagatcttaacggcacgag

SEQ ID NO: 435732 - DNA, 1830 bp, Homo Sapiens
  misc_feature (292)..(300): n is a, c, g, or t
  misc_feature (405)..(622): n is a, c, g, or t
aaaatatatttaatttgggtgcacaaattggttgggtaggacgatcctggtcgtggggggagtattttcaacagtctctctttatggaatagtgttgtgttgatggcggcgggtgtgtaataagtgttgatacatctttcccttagtaataggtttaggccggggggggtggaccggattataaattcggggtttggttcagggctctccttggtggggtggtctatagttaaggaactttggcccctcccggggggttgtcgcgtatgagtggttgcgttcccccgcgggnnnnnnnnnggtttgaaggtatccagccagagttgcttttcacgggtttctttttaggaccgcaggtttgttattggtgtatctttttagggggcggcggccccgaccgggtgnnnnnnnnnnnnnnnnnnnnnnnnnnnnnnnnnnnnnnnnnnnnnnnnnnnnnnnnnnnnnnnnnnnnnnnnnnnnnnnnnnnnnnnnnnnnnnnnnnnnnnnnnnnnnnnnnnnnnnnnnnnnnnnnnnnnnnnnnnnnnnnnnnnnnnnnnnnnnnnnnnnnnnnnnnnnnnnnnnnnnnnnnnnnnnnnnnnnnnnnnnnnnnnnnnnnnnnnnngttatatagatatatatttaatataatatgtgtgattgtggttacagatacatatttggtgctttatttatccagaagcatgagtcacatagtacataaagtattgaatacaaaattctaaagataaacacaatttttcttgaatttaaaatatatgggataaatgcttacaaatggatttataaacctttcacttctacttcattctcctggctgtgtcttccgaagatgagttgctagttgcaacattaaaaaaaatagctccttcaaatcctgacactatatgacataaaaagaacttttggcaaatatttattcagattgcttgtctccagtggcaaatttctcagcatttctctttgttttgtctatgccttagcctgtgcatttttctagaaaggaagttaaatgcttttaatgtattaattattacattattgaagttggacccaaatatgttaaatatttcctcttgcaaagggagaagaggaagggaggaacaggggcaaggtggggaggaaaaaaatacctcaggtgagagaacaagtaacttgcaagaggcttattaaactgtatataaatgttgaagaggctgatttgtagtttctctactagaaaaataataagatgtattattaaaacgtgagttgagaataatattccaaatgtttgttgttgtcgttgttgttgccgtggcctgtgactctctgctgtaagtttccattcaaagccaggagtcttttctcagttggaagagttgatctttttagttttgggatgtgtaagtgatgctgggaaagcctttcctttaaatagtcattgctctcgtttgcctcagaacctatttggtgaaaagtgtgtttaacacaaacagtagctgctaaattgttaactaaagagccttgtgcgaagcaagtgttcgatacgtgcttgtctaatagaatgaagagactataagccagagaggtttaatagcagttgagccagcataaaccaagatgcaccaaacttcatgtccaaaacctacatagaattgcctaccccttgggtttcgatgcttggatgttggagattacattttctattctctgctttctggcacatgcaagccagatatggacaggaaaccctcaatatttattcatttttctagtcaaggctttctaggatgataaaataaaattttacatctagctgcattgcaagcc

SEQ ID NO: 435733 - DNA, 689 bp, Homo Sapiens
  misc_feature (567)..(588): n is a, c, g, or t
cacacatataaacaagtttattagattgtcagtgatactttgagacaaattcaagttatttcattttacttcatataaacagaggaagggaggaaagttttaaacttcaagctttgttcagcatgtgtgcagttagcatccacaaaagcaccattgggtatgggagaattagcaccacagaattttaggacctaactgttaacatgcatcactgaaaaacttggaacataaaaactgaagtagtacgtggtatggtctattataaacaatacaaggcaatttatgatttgttctcatacagtacaatacaatcacaataaatgagaaccttttaagaacaatacgggacaaaaaccaccttgcaccctgttaacactaaagcagttacagatttaaaaaaatgtttctggtaagaggcagtgggttgaaattatccctcccccctcaatttttaaattcagagttatatagttacatgatctcttaagaaagtattttcaaatctatatgtctctctacctcaaggctgacaaatggtggtttgaaaacgaaaggcttgatgaattnnnnnnnnnnnnnnnnnnnnnntggatagagtcgaaaggtacttcaatgtggtggaaattattcaacataagatcagtttggaaatgatgccagtggtgttgatacttgtcttcctcgtgccg

SEQ ID NO: 435734 - DNA, 458 bp, Homo Sapiens
aaaatcagggccctcctccatgctactccttggccaccacgcagagctcaagcaggatcctttgccaactaacggtgtagatgcaaccgcaaccatgggcttttgtgtgtttggctggggctggccggagtggtgactgggcaggaggtcactctgcaccaaggtgtcatgagtggggagcggtgccttgtgccggcctcccaggaacctgctggccactgagaagggattctctggcactagccccagccgacggaaagcccgagaggcttcctctcctcagagagttagcaaagcagcctcacaaagacagacaaaaatgtgctatgtccctgctccctccatcaaatgggctgtttgtgatgccctaagacttggccctgctccagcacagggcgccagaaagagcccgctgcccgtgccattgcttgggcaaagtttcccactccttcagctca

SEQ ID NO: 435735 - DNA, 983 bp, Homo Sapiens
gctccatggtaccagttccagcaaagcactgctcacttcattaagggagtccagtaaggctttgttgttcttagcttcctttttcagttcctttggtctcatttgtgcttgacttgcttcttctcctttcagaacctgagtttcatatgaaagtaattccacctccactttgtccagccaggtacacagctcttcgtgtgtggagtgcagccgccttgcaagctgcagcgcctgttccagagtcttggccacatcagtgctcagtttagtaatgtctttgtaccttgctttaatggcttccaatttatcttgaattattaaaacttcatcacctgtggtttgtttaagtagttctaaaccatttagtaaagcctgatctacattttgtttcctgagtaagatgtcctcttgcagaacccgtagttcagactgctgcttccatagcccctcagtgctgtaatcctggactgagagcttgctcagtttgtcatgcacttcattcagccagttcatcagttcaacttcatcttcccctaaattcttagcattacataaggcctgctggaggagctcagacttgctgtgacttttctcttgaatctcaatgtaccatacttgagagaagtctaatttactctgcaccatatctttatcctccctggagctcaaaacctttaaggactggccaatgctaacagcctggtgtaaatgtttattgtgattgatgatgtcatcttctaaggctttgtgctgtgctatttgttcctcaagtttagatgcttgggttcctatgggttcacaattcaccagcctcttttctatggttgtaagccactcgttcagtggttctaaggtttcatgataattgctggtgctacccaccgagataccattccagccgcacgattccctgtttcagctttattacgcaaggcctcgccagtgctgctagtcacatagagatctgagacaggcagagccga

SEQ ID NO: 435736 - DNA, 1514 bp, Homo Sapiens
  misc_feature (52)..(52): n is a, c, g, or t
  misc_feature (92)..(92): n is a, c, g, or t
  misc_feature (164)..(164): n is a, c, g, or t
  misc_feature (182)..(182): n is a, c, g, or t
  misc_feature (186)..(186): n is a, c, g, or t
  misc_feature (1004)..(1069): n is a, c, g, or t
ttatatgtcacgtcaggtgtgcgcgagatgtgagtgtattgaggtggcgcgngaggtgtgcggatatactcggtggtgaggggtgcagacangagatcagagtgagaagtcggtaaggtgcaatcaagaagaggcgagagcgtgtgagctatgtcttacggganagttgtgaatacgatcancagngcatgagtgagacgagtgtgtagtgtcatagacgaggagtgagagagcgataagagagagtgctaactgtgtatggatgagtgatgtatgttgatgttcgtgagaaagactcgagtggagtatgaggggagtggtggcgtggtgcaacgggaggaaagggagataggtagtggggtacgcagcgcgatagaggtgggcgagggctctgtagtgtcgataatcgctagtatggtagcgggggggtagaggggcggtagagacagagcgtgttagtataagagagtgggtggaagttcgctcgtacaattttgagtatgcgggtgatgcagaaggtaggttataaccagtgctgaggggaggtggagaacggtggtcgtgtacggatgagaggataagggggagggagagggggtatcggagcgggacggggcaaaaaggatggagatgatagaggagagggcgcgaatcgatagcagttgcgagcaaaacaacataagacacatgccagagaaatacggatcaaaaccaggcgggcgggacggactgtcgcaagtgaagggccagtcgagaagtgtggtacgatgacagtgaagagcagacaagagtgagtgagatgtttccgtcaaccgtaagaattcccagtgagttagaatggagaaaagacagccactagcgaagatagtaagacccgaaggtcacaggggctcggtcaagatgtacggagagagggtaagaggcgggacaagtaggggcatggagagggggcctcctttgtccgtgtgggcccctttttgggataatttggggccggccggcgnnnnnnnnnnnnnnnnnnnnnnnnnnnnnnnnnnnnnnnnnnnnnnnnnnnnnnnnnnnnnnnnnnagggccattgttagttttatttcccccttctagcctaatgtcttcttttcattccacaggatcgagtccagggacctccctgaaaggcctcagtgccgcccccaccggaagacctttatgccatcattagtggttaagaagcaacgagcaaaaaacctttctgtaggctgagacctctcggtgcacctggtgaccctgggtggaggggacttgctgtgaagtcttcctcgccctctgccctcttgctgcttctccacattgccaggaaaagctgctgacgcctgccctcctctcttgagtcgagggctgaatctttctcctctaagcagtctggtcaggaaccttggtttcttgagaggcccccaagatgccgcagctccagggctcttcctcctcaccagaaatccctgggcttccacaatgtgaactcactcattgtcaggtg

SEQ ID NO: 435737 - DNA, 1519 bp, Homo Sapiens
  misc_feature (1435)..(1471): n is a, c, g, or t
aggggacaccctgaccaatgaagtgagttccacattgtggaagcccagggatttctgttgaggaggaagagccctggagctgcggcatctggggggcctctcaagaaaccaaggttcctgaccagactgcttagaggagaaagattcagccctcgactcaagagaggagggcaggcgtcagcagcttttcctggcaatgtggagaagcagcaagagggcagagggcgaggaagacttcacagcaagtcccctccacccagggtcaccaggtgcaccgagaggtctcagcctacagaaaggttttttgctcgttgcttcttaaccactaatgatggcataaaggtcttccggtgggggcggcactgaggcctttcagggaggtccctggactcgatccttgtgtccctgggaggatggcaagtggtacgttggctccactggggtttctggcagcctgggagggttggcactgggcacctccacctttgggggtgaagcagcctttgctcctgtgtgctctgtctggcttagcagctcccatggcccctgcccccgattgcctggggtgtgtaacggggacggtaaaggggctcgggtcgacttcctcttcgccgggatcccctgggggccttctggatccgcagctgcaggtagagctgctggagccttgccatctgctccagcaccaggcacaggtgttccagatagcgaagaccctgcccggggaggcaggcccaggctccaggccccaggccccccaccgcctcttcttccaggcctgcctctaggtctgtgtctgcctccatggactcctgttgccctgctccaaggggcacttcacgctcaggcttgcttgccagccgcagggagcggtgttgtcctgacaagctggtgggagctgttgggagccggcgggaccgctccaacacctcccccagcttctggctggccaggagtcggcctacctgggcggggggctcagaactccctgaggattcaaagtccagggagtcctgagaaaggcccggtaaggcggccagggggctgtccccaactgccatctccactcctgagtcccgggaggccagtttgagaaagagtgcctccctgccgacacctctgaacttgtcacctctctcccaggatgagcacccgtgggcagcgtcggggatccgtctgtaggtgctggtgactccaggcactatgcagccccgtgccaggccctcgccagccccatcccggccgtccacggcgaaggcgcgccgccggcccatcatggcccagctcccggccccggccccggccgctgcagccgcccgaggatcccggcccgagtccccgcggagctcgggcagctcagggagcgcgtcccgacccagctgggcgcggcccccccgctctcgacgaattcgagctcggccgatttggcctgatnnnnnnnnnnnnnnnnnnnnnnnnnnnnnnnnnnnnncgccgccaccgcgtaagctccattcgcccatagtagtctatacattcg

SEQ ID NO: 435738 - DNA, 1837 bp, Homo Sapiens
ccccaaaatattatcccccatacgatgagcccaggtttttcgctcaatctcactgagaagttttttaaaagaggtgcgggtcccaggtgccttaaggttttaatatatctcgacttccctttggggggcgcccccctcttgtctcaagaaaaagccggggtacgcgcataagccttgggcccccctcgaaggggatacttttaaggaggcggcccgccctcttttagatgctatgcaggttgactgggtttcatcttaaaattttgtccatattcatatatttatagagctagtatgtcaaaaactttacacagtgacaccattagcccctggcccacccctctccttcccacttctgtgttcgaccctacttagaccctcgcacacaaaggttgatcaaaggcagtggccacctcagactagtgcaatgccagtcctgcaggggagaggcctggcaaggtgagggtgagtctcccacagtccaagacaggtcccagaccttggcccacccagcgaggacaaaggggcctcaggtctccaaacttagctcatgtaagagcaactgcccaccattgtccctgccatgccaacttatataggcatgaccctggcccagcagtgaggcaggctgagggcatggcgggctcaggcccgagagctgagggtggcaggtgcggagtagcgctggcgggcatgcttctcacagtacagctcgtcacccacccagaagtgcccgcgcatcttcaggttcagcccacagtcggcacaggtgtagcagccggggtggcggtaccggccctcctggatgcgcacagcctggttcgcgatgctggtactgcacttctcacaagtgtggagcttgggaggggtggccagggccctggaggcgggcagggaggactgggggctcagtgagctgggcaagaaggctggcgtgccacctctctcctcagcctccagggcttcctgcaagagccgaaaggagctggactgtcggggggccgcccgtccctcgcgattttcctgcagcatcttgaagacttccgagtcctcgtccaggaggaggcttcccccttccgagtccatgctgggcctggaggaacgagggcccggggaaggcggcagcaccagcaccgccgagtcgccagcgcggccgaggccggcctgtcggcttccagggcggcctgagtaggacaggcggtcagcagcgggggaggcccggggaacatgccagactctggaagctgcggctgatggccgcctctccagtgagggagctgctagagggtggtggtgagaaggggctgccggccctcgggctgagggaggttgggctggagtaggaggaccttaaggaggactgactctcagtgtatgtcctcacggagccctggaagcgagtcgccagcacttccaaggagctgtccccattggtctgccctggagacgtagcctgagaccggtccagctgcagccgcaggggcgaggggctctggcggatcttgctctgggcctcggcatgcagcatgccctccgcgctttccccgttgatggccacgattatgtctccaggccggaggtcagcgtccttggctttgccccgctcggccaccttagtcaccatgatgggcgtgtggaaatccctgccccctgtgatacggaagccccagggcgctggcccggccacatccaccgtcaacgccatacctggctgccgctcacctgtccggctgggcgcccaggcccgggagggagggaaggcgaggagacgccaccgctcccgctgccgcctcgtgccgaattcgccacccaggcctcgctacctaggatttatagg

SEQ ID NO: 435739 - DNA, 993 bp, Homo Sapiens
  misc_feature (17)..(17): n is a, c, g, or t
  misc_feature (52)..(52): n is a, c, g, or t
  misc_feature (128)..(128): n is a, c, g, or t
  misc_feature (192)..(192): n is a, c, g, or t
tttacgccccccaactnacactgctttgaaattattcgttccagttgtcctnacttcccattccttgtgagtcttcaggagtccgggcaagattccatgcagagcagccaaagccacacgttctctgntcccagggctgccagcatggctctgaggaggaaagctcagtaactgcccactggggaataaagntcagttccatccttctgcagtgaccttcccccagaatatcaaccctttggatgcattatttcagaagagatggttggatccagccagcttgcaacactgacagtcacacagagatatgcataccattgcgcataaatacacatctgcaacatgctgggcccagacaggtcaccatgccaaaaacactccacggacacctgacaatgagtgagttcacattgtggaagcccagggatttctggtgaggaggaagagccctggagctgcggcatcttgggggcctctcaagaaaccaaggttcctgaccagactgcttagaggagaaagattcagccctcgactcaagagaggagggcaggcgtcagcagcttttcctggcaatgtggagaagcagcaagagggcagagggcgaggaagacttcacagcaagtcccctccacccagggtcaccaggtgcaccgagaggtctcagcctacagaaaggttttttgctcgttgcttcttaaccactaatgatggcataaaggtcttccggtgggggcggcactgaggcctttcagggaggtcctggactcgatcctggggtcagagccatcaggaggggcagggggctcagggtggtggtggcttctccggcagatccggttgagcaggaccttgaccttgtcccagtgggagatatcccgcttgtgtccctgggaggatggcaagtggtacgttggctccactggggtttctggcagcctgggagggttggcaccctcgtgccgaattcgccacccaggcctcgctaccttataa

SEQ ID NO: 435740 - DNA, 789 bp, Homo Sapiens
tattttggtccaatagtcagatatttatagagctagtatgtcaaaactttacacagtgacaccattagccctggcccacccctctccttcccacttctgtgttcgaccctacttagaccctcgcacacaaaggttgatcaaaggcagtggccacctcagactagtgcaatgccagtcctgcaggggagaggcctggcaaggtgagggtgagtctcccacagtccaagacaggtcccagaccttggcccacccagcgaggacaaatgggcctcaggtctccaaacttagctcatgtaagagcaactgcccaccattgtccctgccatgccaacttatataggcatgaccctggcccagcagtgaggcaggctgagggcatggcgggctcaggcccgagagctgagggtggcaggtgcggagtagcgctggcgggcatgcttctcacagtacagctcgtcacccacccagaagtgcccgcgcatcttcaggttcagcccacagtcggcacaggtgtagcagccggggtggcggtaccggccctcctggatgcgcacagcctggttcctctctcctcagcctccagggcttcctgcaagagccgaaaggagctggactgtcggggggccgcccgtccctcgcgattttcctgcagcatcttgaagacttccgagtcctcgtccaggaggaggcttcccccttccgagtccatgctgggcctggaggaacgagggcccggggaaggcggcagcaccagcaccgccgagtcgccagcgcgaccgagcccccgct

SEQ ID NO: 435741 - DNA, 725 bp, Homo Sapiens
  misc_feature (20)..(20): n is a, c, g, or t
ggggccttcggtgggggccngaaccactcgcagcgtagattctgatggggtcaatttggagtggtgtggatcccgggtgagggttcatagctgggccattggtgtgatgtgccaaggctgctttggttttaaagctagatgtcctagctgtgtctggtccatcttttccataggagatgcaggagaggaagcagctgaatcactgtggtggcttggaaaatgcttggtcagctgatgcttgccaccacccaatgatgacttctgggcagctatttgtggaaaccaagtctttaacatcccttctacctgtagcaaggttcctaggtaacgttcccccatctgtggcttctgcaaaacacctacaatacgctggatcctgtccattgccacactctgctgaaaactgcttaatcctctctcaaaacgacccatcttcagcccattgagtaggtctgtgagaggaggtataaatccttggagttctttacacttctgggcaaacagcaggtctccctctgtggtacaaccttgggtgtttagactggtctccagttcaccatctcttgatcttttcgccccagatcctgccataggagaagccgaaccccgctgtttcggatgagatggtgtatgctggttaccggaaaccttcgatcgatgcctgttgtcagccggctcagccctggctcggtttccagctccttcgccgtctctccgggtctccc

SEQ ID NO: 435742 - DNA, 862 bp, Homo Sapiens
  misc_feature (78)..(120): n is a, c, g, or t
cccacaaaataaggtttttcaaaccgggggcgtttcccccaggggaatggcacccgggaagaatggctgtagaataannnnnnnnnnnnnnnnnnnnnnnnnnnnnnnnnnnnnnnnnnnaaaggggtttgcacttccaatggtgggagggaaaagaatgacgccaaatgccggtttccagtgcctaaagggaccatggctaaagggagatagtccctgggggagctgagaggggggttgcaaattggagtggtgtggatccaggtgaggttcatagctggccattgtgtgaggtgccaaggctgctttggttttaaagctagatgtcctagctgtgtctggtccatcttttccataggagatgcaggagaggaagcagctgaatcactgtggtggcttggaaaatgcttggtcagctgatgcttgccaccacccaatgatgacttctgggcagctatttgtggaaaccaagtctttaacatcccttctacctgtagcaaggttcctaggtaacgttcccccatctgtggcttctgcaaaacacctacaatacgctggatcctgtccattgccacactctgctgaaaactgcttaatcctctctcaaaacgacccatcttcagcccattgagtaggtctgtgagaggaggtataaatccttggagttctttacacttctgggcaaacagcaggtctccctctgtggtacaaccttgggtgtttagactggtctccagttcaccatctcttgatcttttcgccccagatcctgccataggagaagccgaaccccgctgtgtcagccggctcagccctggctcggtttccagctccttcgccgtctctccatcccgggaattcc

SEQ ID NO: 435743 - DNA, 1892 bp, Homo Sapiens
  misc_feature (227)..(227): n is a, c, g, or t
  misc_feature (231)..(233): n is a, c, g, or t
  misc_feature (1381)..(1389): n is a, c, g, or t
caagaacccgcccggggtttcccgccccggggcggttttttaattggggggggaatcccaaagccctttgttcaatggccccgggtttttccttgggaaaccagttttgggcccaggttcattttacttactgggggcccgggccgccaaacggaatggttttagaaaagctttttgagggggccgaaggcgggccgaccatggtgttttcgggtgggcgggggaangggnnngcattgtaacactcgtttttatataaatattcgcaagtcatgttacagaagaagccccaccagggaaaaaagtcaacgttagggttttgttagattgacccctgccttctaggttgggccccagcctggaggcgcctgctgctttgggaaggctggggttgctgccgtgaggctgccgaagaagctgcctgtgtcgcccacccctgggccgacccccttctttggtgtgtggtacatggtgaccttctctggccacccttagcctggggcagggttttggagaacagggttcagggaagcagggtccatgagtcctgggggcacttggaaatggggtgaaggggactgacccattaagaggtggtggagtctgagatttagaggctgagcctttgggggtgggggcagagtgaacgggaacatgttgggggaaccggggctgtcagccaagtaggaagcttctgcccttccctccagcccaggtccccaggtcctgccccctgttggtcatctcctgctggccccaccttcccagggagaagcctgactgtcccttcccggctcttccccctgcagtcccctttccccacagagaggccagaggctaggaacacagcaccagtctgagggtttaattaaccaggaagggaactgttgggaggggcacccctgtaaaaatgtacaaaaggtcttggggctatgtgaaaggggtgataaatatgtacatggaaccccccttccttgagcccctcctcccccagccctcggagggcatgaggacttgggtggtaggtgaacgggagggggcactttggcctctggcttagtgagcccttggggaggcaggcccagggcctagaggcccttacaggggcaaaggtgtacctcaggaggccccatggcccccgagatgagccacactcccatgcacacgcccctctcccttctctagaggctgtgacctctgctctcccagtgaccctacactccatgtgatgcttggtcttgtgggggttgaggcttctgttcccaggttccatgacctcagaggtggctggtgaggttatgacctttgccctccagccctggcttaaaacctcagccctaggacctggttaaaggaaggggagatggagctttgcccgagnnnnnnnnngttcccctcacctgtcagcccgagctgggccagggcccctaggtggggaactgggccggggggcgggcacaagcggaggtggtgcccccaaaagggctcccggtggggtcttgctgagaaggtgaggggttcccggggccgcagcaggtggtggtggaggagccaagcggctgtagagcaaggggtgagcaggttccagaccgtagaggcgggcagcggccacggccccgggtccagttagctcctcacccgcctcatagaagcggggtggccttgccaggcgtgggggtgctgccaaccaggttggctccaggaagccagcacagcgatctggtgggctagggcccagaaacgggggcggccggggcctctcaaacagcaggtgaaggccctggggcccagtggctgctgcggcggcggcagcggcggcggcagcctcctccttccgctcttcccgagcgcgtgggtcgacgatatcccaggacttccggaccgtaccagca

SEQ ID NO: 435744 - DNA, 248 bp, Homo Sapiens
ggccaaatgtagagagagaataagtcagtttgtggttgcctatgggctgggggtgatagcagggaatggagaatgactgcttaatgcatatgaagtttctttgggggatgatgaaaatgttacagaattctatagcggtaatgattgcacaattctgtgaatatactcaaaatcactgaattgcacactttaaatggatgcattatacaatattattatatgataaaatatatcaataagtgttatat

SEQ ID NO: 435745 - DNA, 371 bp, Homo Sapiens
  misc_feature (16)..(16): n is a, c, g, or t
  misc_feature (62)..(62): n is a, c, g, or t
  misc_feature (322)..(322): n is a, c, g, or t
tgcagttattcttttnattggtccttggaaccaccctggtttttgtactttccaagtctgtnattcctcaaactacccattgtctttccggtacttgatttttgcctcctgttggtcagttgcttgcaagtaaagaaacaatcatacagaatttggtacgaagattgggtaatgggcattagaatctttggaaaaatcaggtattgggagttgctttttggatgagatggggcgaataagacttatattctagactggaaagcatctcatggtgtgcgatgagcaaacgcctgattattcattatagtcacctggggatgantagaggtctagggttctggataatgataatttaaggaggatggagaatg

SEQ ID NO: 435746 - DNA, 523 bp, Homo Sapiens
  misc_feature (34)..(34): n is a, c, g, or t
  misc_feature (64)..(64): n is a, c, g, or t
ctttgtcactggtgtcagagaaacctctgtcatnagcagatgtcctaagagtataattatagtnctttacttaatccaaaatttgttctgctctgatatctataaatgatatgattattcaaaataccttgaaatgattccacaattagattaggtctgttggagataacttattcttaaatatgagtaagattaaataaaagtagtttgagagttgttactccctgcctcaactccatggtattccaaaatgtttttgtgggcactttaatacttgtagtttgattttgtttgttagttttagaaatgaacatttcttagattttcatgggtattttttggctgtatttaaatgtaaatgatataaaagtaagggaaattgtgcaaattatttcttgtgtagtaatcagtggaagtgatcaaacagcttgaagcagtttatgatgagaaaatttaaaattgcagatgacctgaaaagtgagccagtcaattgttagttcttggaagttcagggcagagcctg

SEQ ID NO: 435747 - DNA, 1153 bp, Homo Sapiens
cggagagcctctggtacacggaaatggcgtggcggggcctgggagacacaggggcatggtgaagacagggaggaagggctgcgggacactcagtgcggctctgagggaccgaagtccgtgggctggataaacgggtcctcagtccgggaggtgtgttcacagccctgctcatccatgtgagccagggatggggcggtagggggcgcgatgaggctgtcaggaaggctcacagtggggagggctgtggtcggcaggatgctctcctgtgcaggtgggttgttgggatctggtacaggtgctgaggcagatgcaggtagcatggagccaaaaatggagcggctagaagagaagaggtcctggaaaggctcaaaggtgtccatgaagtccaggttaggctgcaaaggaatcagtcccggctggatcatgtctgcatttcccagatgtgctatttcccggggattgggccaggccaccggctggtgtgaagaaagtgtggagaagagggtgtcgctgaattccgacatgagcatgtctgtgtccagcaggggatcctcctccatggggacgggggtcttccatccatccccgtgcttgtgccaatacagcatgtcatcgtcctggaccaggctggagaggtcctcatccttgtgctgctgtagccttttcttgaagtaggttctccacttgtgatactcccggatcacaatctcgatgcggctcttccagtacttcccttccgtggtgatggcctccggccggcggtgctcgtctacgtccacagagccgtccaggggtgtcacaaagtggcacacaggattcttgcgcttctccagatactgcatgtaccaggcccgccagatggcattattgagccggatcttgtctctccactgtagcttcaggcccttgaaattcttccactttggagacaccaacttcccactgtagaccaaagtcatgcactcgaagagcttggtgagcgaggcgtcgatggacaggtggcaggagctagtcttgccgaagctgtaggtctggcacgtctgtttgtttgaccgtgtcgaaatcgtagcccttcttgggcgggtgctctcggtgcggcgacgacaccatgaagtggccgctgtggatgatgtgctggccgcgcagagttttt

SEQ ID NO: 435748 - DNA, 425 bp, Homo Sapiens
ggcagccgcggctggccgcctcaaacagtggcagctgcaggacctccttgtgcaggtgcatggcgatgtctgcgcgcagctcgtcagggaggctctgcagcagctcggtggtgtcgatgccattgttcaccgcccaggtggcctggaagtactaccagcatgcgctgcttgaggggcttggggatacggtggatgcggatgtagttgcgcaggtcgcgcgtgcggctgtggtacagaaagcggcgggcgtacatgcgctggatgatggccgtcacgttcccaaacaccaccgcgtgcatcagggcgccgatgagcatggtgcagatggagaagatcttctcggtgtccgtgttggcggacacgttgccgaagcccacgctggtgaggctgctgagtgcgaagtagagggaggtgatgtaggcgct

SEQ ID NO: 435749 - DNA, 2395 bp, Homo Sapiens
  misc_feature (216)..(216): n is a, c, g, or t
  misc_feature (238)..(238): n is a, c, g, or t
tgggagccgttttccctaaggctccatgccttttaccggtcccgggttgcaaaaattcttgggcataggcaaattccgttcaatggccaatccccagagatgcaaggtccaacgtcccgttcctcgggtcaatggcttactttgcccagccgcacggcaatggggggcctgggcaaggatctctctggcccagtgctcgtgcccgctggtagcggncgtcccccctcctcgttctggnccacagcgtgattcaccagccccagtacgtgggcctcagttccactcaagtcgtcggcccgtgaagatgagctccttcgccagggccacccccagacaacgggcagcctctgagtccctcctgcccccgggaggagccctcgcgtggtctcaatcagtcccatgactgccgaggaagctgctcagatagaacaaagtgaggcctccctcccccatccggtcccccagtgctaatcccgggggccacagctgcctctgctgtctactcgcccctctagccacttgccccatggtctggccacagccaggcctctccagactctgcctttggaagagccctagcccagaagtcaggagcccaggcccttatttcaccatgcccctttgatggagttgtaagtcaccagcaagtctcacccttcccaagcctcaaaggtggaagaaagatggctggccctcttctgtctgcttcagagagccgctaaggatcacacgaggtacgacgcttggaacaaggagagttcctaggaggtgccccatatctatttgtggattactattaataggttctctggcttagcctggcctggcctaggaatgtcagtgactcctgctcctgctaccgtcgtccgttccagctttgtcacagcctgaaattgcccttactgttccagtccatgtcctcctgagttctgcttccttccttcgaaaaacttgccttgactgacgcacccccccgggtctgtctccttttctgaattccctcagcatggaccatgtgaacgtgggcagaagggagtgggttttacattcactccgtcttagtcttccccaaaaccctgtgagttagttgcgtgaacgtgggcatgtgagaaggagagttggggctagaccagcctggtattttggtgcctggacacctggtcagttccttctctttgacctgcattgtgtagacagaagctactttcatgcctggagctacacatttttatatgttgctcctggggtggcaggagagagcggtggggggagaagggaagacattcagactttgcctaactgcatccaagaaggctgctcctaatcaccaggtcagtcacctgagaaaatgatcagttatcttctttatcccctcccattcttcaaacaaagctcaattgctcagaacaagtaatgcaaatttggctggtgccagtattcctgcccaggcacctttgtgattagctcagccattgacaaactatccctgaggctcacctttttccgaaacatggtcgataaatctgacttggacagaatgggaagactggacattgctctttgacctccttggctcgtaacagcatatgctctgaggttggtcaaatattcccaaatgaaggaagcaggttctgacaggtcacagatactacagcagctaatgctgcaccaggagggtaacagcttctgcctgagcaccctctgtgctctgccttgccttagttttgcttttggttggaagccaagaacagtggctgactgcagaatgtccagactcaccctgtttcactcacccctgactccctagccccaccccctgcccccagtcctggcccagtacctgccactcggaggtcacaggccagggcaagctctaggcctccgcccaaggcaaacccatccatagccgcaatggtgggtgcagggaaggctgcgatgtcattcatcaggccccggagtcgctggacgaacacccccacctgctgccttcagctcatctgttcccgctcctgtcaggtctgcacctgcacagaacacgcccttcactccacttgctgaagagcaggacacgcacttgccggtcctcccgcagctgggccatgagctttccagcagctcactgacgaagacattccccaaggcattgcgggcagaaggtctgcttcatcagaatctcagtgatcccttggtccggacccgccagggcgcgcacttggatctctgagcccccggccgccccgtcggaagcgcagccgcgggcccgaaggggcctccaggggcgcaggaggcacagaacgcgcagcatcggggcgcaggcatgggagtgaaggtgcttcctccggcctgcaccgtctcggctcccgctgagagctcgcagttccggcgtcgggcgaag

SEQ ID NO: 435750 - DNA, 1237 bp, Homo Sapiens
cagagagatctaatttaattctttatcattcaagtagagagacaggcattttccaaagcaaacccaaccctcgtgattatttctagccagggtgaagctaaggaaggtagcagtaggtggtaggatcagcaccttggttccaggcatcacgccagtcattttatttccatcatcatccttgtgaagaaatggaagtctgggagaggtgaaatgatgaaggcaatctggccacaaatcttccttctggatcctgctcttcagggcatgcatctcccatgctgaaggttaaaatgggggtcatttgccaacaaatttgggagtccgcttctccctgaaggctgccatgccctctagccggtcccgggttggaatattctgggcatagcacatcccttcaatggccatcccagatgcaatgtccacctccgttcctcggtcaatggctactttgcccagccgcacggcaatgggggcctggggcaggatctcctgggccagtgctcgtgcccgctggtaggcggcgtcccccctcctcgttctgggccacagcgtgattcaccagccccagtacgtgggcctcagttccactcagtcgtcggcccgtgaagatgagctccttcgccagggccacccccagacaacggggcagcctctgagtccctcctgcccccgggaggagccctcgcgtggtctcaatcagtcccatgactgccgaggaagctgccactcggaggtcacaggccagggcaagctctaggcctccgcccaaggcaaacccatccatagccgcaatggtgggtgcatggaaggctgcgatgtcattcatcaggccccggagtcgctggacaaacacccccacctctgcttcactcatctgttcccgctccttcaggtctgcacctgcacagaacacgcccttcactccacttctgaagagcaggacacgcacttgccggtcctcccgcagctgggccagagtttccagcagctcactgacgaagacattccccaaggcattgcgggcagaaggtctgttcatcagaatctcagtgatcccttggtccggacccgccagggcgcgcacttggatctctgagcccccggccgccccgtcggaagcgcagccgcgggcccgaaggggcctccaggggcgcaggaggcacagaacgcgcagcatcggggcgcaggctgggagtgaaggtgcttctcccgcctgcaccgtctcggctcccccgct

SEQ ID NO: 435751 - DNA, 471 bp, Homo Sapiens
  misc_feature (416)..(417): n is a, c, g, or t
tctaatttaattctttatcattcaagtagagagacaggcattttccaaagcaaacccaaccctcgtgattatttctagccagggtgaagctaaggaaggtagcagtaggtggtaggatcagcaccttggttccaggcatcacgccagtcattttatttccatcatcatccttgtgaagaaatggaagtctggagaggtgaaatgatgaaggcaatctggccacaaatcttccttctggatcctgctcttcagggcatgcatctcccatgctgaaggttaaaatgggggtcatttgccaacaaatttgggagtccgcttctccctgaaggctgccatgccctctagccggtcccgggttggaatattctgcaacaaggtacaaaatattagttttgggggagcagggccacagcaannaaagagttgcttaagcttgtccagcccaagacaaggccagggtccaagtgtttc

SEQ ID NO: 435752 - DNA, 1423 bp, Homo Sapiens
  misc_feature (35)..(35): n is a, c, g, or t
  misc_feature (44)..(44): n is a, c, g, or t
acgaatcaaaagattccagctgccctggtagtgantggtgagcnattttaacctctggctctgtttccggagctcaaggtaaaaatcttgaagaactcgagcagcttctgtggatagccttgggtacacatactgccgagcatacgccaatgtactttctcaatagctgggtggggaatgggatctattgtttctccaggaaccacctttagtctttctgataatggcttctcagaaactacttcaagtacggaagtatttgaatcttgactattcatacgagctactgtggcactgctaatggttctctgctttccagctcttattgcaatcacatgttcagagagtaagtgatcatgatgctcatttggagtatctaacaggataaagaccaaatcaaatctggatagtagtgcactccccatttttaaattctccagaaactgttttgggctttattgtaaatgtccttccaactgggatttgcagccagcaataatggaaagttcttgccaggaagggctacaaaccacaccagctttagcaagactaatactttgctgctccatggcttccaacaaggcttgatgttgattccccatcttatcaaattcatcgattccacaaataccttgatcaccaagtaccagggcaccagcttccaaagcaaaatctccagaggaactatcttttgaaagagttaccgtcagaccagaggtggtcgtggtgttaccacaaacatacacgccacgtggggcaacattgcacgctgcctgtagcatttgactttttcctaggcctggatctccaacaacaaggatgtgggggtctccccgaattggaattctgtttttgtcatctgcgtatttctggcttcctccaaagagtgctaatgccaaacctgctttaacaagttcatgaccaaaaatgacagggcaaagcgagttgacaatgagtttaaacaggttttcttcagcttgaatctcttggatggcataaaggtctttaagtgagaactccatcaacattccatgcttacacccatcctcagaactctttgttttctgtcctttgctattactaatagaatttgcttcaatatacaaaaggaacatacacttgtcattcttatttcgagaaccttcttccgcatttgagactttgacaattccagtaatagtcactgtgtctcccgggacacagctatccacaagatcatgaacaagctcacattctattgttcgtggaatccgacctgcttctctctgatcatcagacatcaattcctggattttgattgactgccagtccatcgtaactgtgagaggagagctgcggagagcagtaaatgacctgcctcgacacacaggcacaggacactttgtgcctcgtgccgaattcgccacccaggcctcgctaccta

SEQ ID NO: 435753 - DNA, 2315 bp, Homo Sapiens
tttttggctgtttgcggatttaatggcagggcattgaggttgggaggggtcccagctgctgcgtctgcttttcttatagcagagaggctgcctacgggtggcacggggtggccatggagtgcagagttggtgggacaggggacatccagggggctcgagatgttgctggtgacaaggaatgtcaagtggcactgaggctggcgggcaaggccacaggcagattctctcacgtgggtgctcgcccctttcctcccccttgtccctccctcccaccctggccccactcaggagtgagacccagtggccaataagctctgggacagacgaatgggcgccctcctccttccttctgttgggctggagtgagtggaggaggtgactcagctcctgggctcaggcagggtctggaggggccaggatggtctcgagtgcttggcagctgaggaatgtagctgggctcgggtagtagcagcagcgaggggcgggccagggtggccagagcccggggccaggaatgtgcagctgaggtcaatggtcccggagtccttccgactcggggtcgggcggcgggaaggagggtggccgtggcgggggtggaggtgggtgcccagggctcagagcttgtgggggttcacccacttgtaggtgccctcatactggaaacccactctcttcatcagctcgtctgcctccgtggggcctcggctgccataaatataggggatgggcttgggcttctccagctcaatctggtgcagcagtggggtgaaaatacgccaggcctcacggagctcgtcgctgcgcacgaagtgcatctggctcccgcagaagacgtccaggatgaggcgctcgtaggcgtcagggagcttcacgttcttgtatctgttgccgtaggtcaggtccagctccgactcctcggggttgaagaacatgcccggcttcttggtcatcatcttggtgtacacggcctcgttgggctgcacgcggatcaccagctcgttgcgcttgcactgctggtggaagatgtcgccggccacatcatggaactgcagcctcacctcggccttgcgctcgttcagggccttgccgcagcgcaggatgaagggcaccccatcccacctctcattctccacatagaggacgacggctgcaaaagtggcggtggtggacccgcggggcaccgtggggtcgtccaggtaccctttggtggcctcgccctctccatcggggttccccacgtactggcccaggaccacattgttggcctgcacctctgagatgcatttcaacaccttgaccttctcatcacggacgtcatctgagttggtggaggcgggcttctccatggccaccagacacagcatctgcagtaggtggttctgcatcacgtcccggatgatcccaaattcatcgaaatagcccccgcgaccctcagtgccaaagggctccttgaaggtgaggataacgcaggcgatgttgtcccggttccagatggggccgaagatcctgttggcaaatctcagcaccatgaggttctgcaccatctccttgcccaggtagtggtcgatgcggtagatctggtcctcacggaacagggaggagatgtggttggacagccggtcagagctctgcaggtccctcccgaagggcttctccacgatgatgcggttccagcctatctggctcatgcaggactcgtgaatgttcttggtgacggcctcgtagacggtcgggggcaaggccaggtagaagaggcggttggcctgtgaccccaggtggagggcattcatgtggctgttgaggcgctggtaggaggctgcatcatcgtactggccagccacataggagttgcgggcaaagaagtcctccagcttgagcttctcctctggggtggccttgaagaagggctcactctgtttgcggatgtcagccactgtgaggcgggaacgggcatagcccacgatgaaggtgttttcgggcagaaggccatcccggaacagccaccagatggtggggtagatcttcttcttggccaggtcacccgatgcacccatgatgatgaatatgtgtgtatccgactgatggaaggcatcgccctggaaaagctcttcccgcaggatcccgcacacctgggtccggctcagggccacctgctctgccatgacgctgtctgcgcttcgtcgtcgtcgccctccgcgctcgcagccccgaagtgtacgaccgtttccgggggctgagccccgccggcccatttaatcggcgggggcgggggcgggcgcctgggctgagcggaccccctcaggcgaggcgtgcgg

SEQ ID NO: 435754 - DNA, 441 bp, Homo Sapiens
  misc_feature (431)..(431): n is a, c, g, or t
ttttttggctgtttgcggatttaatggcagggcattgaggttgggaggggtcccagctgctgcgtctgcttttcttatagcagagaggctgcctacgggtggcacggggtggccatggagtgcagagttggtgggacaggggacatccagggggctcgagattttgctggtgacaaggaatgtcaagtggcactgaggctggcgggcaaggccacaggcagaattctctcacgtgggtgctcgcccctttcctcccccttgtccctccctcccaccctgggccccactcaggagtgagacccagtggccaataagctctgggacagacgaatggggcgccctcctccttccttctgttgggttggaagtgagtggaaggaggtgactcagctcctggggtttcaggcagggttttggaaagggccaggatngttttcgatt

SEQ ID NO: 435755 - DNA, 1229 bp, Homo Sapiens
aagttaactgagaattcagagaatggcactttatttttaagacttgatttttttgccatgattatctaccaattcttccatgatggtgtcatcctcttcaacagtgaccaggaccttcttgcccactagattaaagatgtcttcaggaggatagcctttgggctcacccaccttcacggtgagcatgtccattgttagaatggtgccttccggaattttcactttggccaccacagacttgcccagcttctcattgcaggccatctcacagggcagcagctgcttggttggggagcccagggcacgctccacaagacgcactgaccgcaccagctcggccagttctccaggctccagcgaggccgagtggtcactccccttccaggtcttgtccaaagttatgtgacgttccaacaccttggcccccagagccactgcggccacagatatcgctatgcctgtttcatgcccagaataccctatgggaatgtcaggaaagagcttctgatattccgagatgacccgcaggttgacgtcctcaggctggagcgggtatgcgctggtacactgcaagaagcagaagttggggttgaggggcttcacgatctgataaacttgcttcatggtgtccattgactgcatcccactggagatcaccattgggcgaccttttttggctgtcttttccagataaggaaaattattagtgtctccagatccaactttgaaaaatggaacattcagttcatgcaggaattcaactgccatctcatccatgccagaggcagtgaagaagatcccaacctcctcggcgtacctctgcagctccctgtactggtcatggctgaactccagatgtcgtttgtgctccccgtacgtcttcccccaggaatgcttcgaggtgtatggcctctccaaggctttccgattaaacttgaattctagctcactcttctggaacttggcacaatcagccccacactccttggccatgcggatcatgcgcttggctacgtccaggtcgccctggtggttctggccgatctcggcaatgatgaagcacgggtgttgcccgcccacccagcgcccgggacacagctccagctccagcggcattgcagcggctcggggtccaacgcctcactaccagtctgggtccggccgccgccgccgccgcctctactctgttctgtgagcaacgctgcctcgtgccgaattcgccacccagc

SEQ ID NO: 435756 - DNA, 985 bp, Homo Sapiens
agattccagaagatgcagtatttttcctaaggcaggagaaaaccctagttcatagacagccaggataaaaaccctggaagaccatgagccaaggtgaacgaagaggaattttctaaatcttggggacagagaattatgttacatcaaggcagccatgcaataaaatggaaggctatgaaagcaagcaaggcacaagaaaacccccattccacagagagacacaagtgttctatttggtgaagagtttggtgcacagacagactgcatcctgtgaagaggtggcccttgtcaaggctactgccgccaggaggatctttgcatctttaggatgtgtcactagctcatcgaaactatttctgtaactctctgcaagagccaatttaagctggcgtctcagttccctctgcactcaaaagagaccaatttccaattcctcctcagagtccgtgagaccagatgctacagcaaatgttccagagaaaatgaacctagaaaatgatcccggggtgctccttgcgggggaacacaggactcctcagctctatctctgtggctttaacatacatcagtttcagggtgagtgctaccattgccccccgagagtgtttctgatgggacatgctttcctgatagcacaggggatcttgggggacagaaggttcccagtaaggctagggggcacgtgacagattgagagtgtgatcatgtttccaggtgagaccctattgcatctggcagcccgaattgggcaacaattcctgcaaataagaagccactgctcttgttaggtaggtcatcgtcccataagccccactcggagcgctgtcataaaagaagtggcagattcctgtggcttggtctttctccagggtgtccatggcaccaattgacacctggtcctgcaagaacagctgactggccatctgcacgatctggtccacgtggatgatgcccccgatcccgggaattccggaccggtaccagc

SEQ ID NO: 435757 - DNA, 1131 bp, Homo Sapiens
  misc_feature (21)..(21): n is a, c, g, or t
  misc_feature (39)..(39): n is a, c, g, or t
  misc_feature (44)..(44): n is a, c, g, or t
  misc_feature (47)..(47): n is a, c, g, or t
  misc_feature (52)..(52): n is a, c, g, or t
  misc_feature (58)..(59): n is a, c, g, or t
  misc_feature (63)..(63): n is a, c, g, or t
  misc_feature (65)..(65): n is a, c, g, or t
  misc_feature (71)..(71): n is a, c, g, or t
  misc_feature (79)..(79): n is a, c, g, or t
  misc_feature (120)..(120): n is a, c, g, or t
  misc_feature (122)..(122): n is a, c, g, or t
  misc_feature (124)..(124): n is a, c, g, or t
  misc_feature (127)..(129): n is a, c, g, or t
  misc_feature (131)..(131): n is a, c, g, or t
  misc_feature (133)..(133): n is a, c, g, or t
  misc_feature (137)..(137): n is a, c, g, or t
  misc_feature (140)..(140): n is a, c, g, or t
  misc_feature (145)..(145): n is a, c, g, or t
  misc_feature (147)..(147): n is a, c, g, or t
  misc_feature (149)..(152): n is a, c, g, or t
  misc_feature (176)..(176): n is a, c, g, or t
ccacggattgccactcctgtncggtggagtaaacatgtnaggcnagntcccnctcccnntcangnctcagntccttttnttacaccttcgtggcggcaggcaccggtcacttggactccntnancannncntnaccncgnctcgntngnnnnggagtgcagcagcgtaagcgcctnccttctcatcccgcagggcctgggtgatgagctctgtggcctggcttaggtaggcagggtgggccctccttccccatcctcttcctcctcctgccctcctggctcccagggttcctggtccagccttgcagactccacctccatcgttgccagctcagccacatgggtggggctgggggtgcgccttcttccttggagaaggggtcgaagagggcaagctcagcctcggtgagggggcctcgggcaggggaaccagatgcctcctcggtgctctcacagttaaagaggagatccagggcctcctgggcagggctggatggtggggggtccactggcacctccaattcctcgaggcccctcctttctgcagggagcagttgggatagccgggggtcatcagggggcggggtggggatcagagggggtggcaggatgtgtaggtccctggacacctccaagggtcgggtcacctccccaccccggaagaactccttgagctgggggctgttgttgagcgcaggtatgtgcacagtgaagcgaagcaggtcctctgccccctttcgccgctcctcgatcactgaggcttcaaaccggccaaacacctgggcccgggggaaagcagggaactcctcgaggcggcggaagaggttgcggtgggtgtaggccaggtctccatgcagcttgcggaagtcgctgtaccgcttccagaccaccacctctttgacatcctctgggtccttctttgagatgaactgcgcggttactttgtactcggtgtagcccttggggtgagtcctggggtccgacactgtgtagtgccgcaggaagtcatccttcgcctggcgggacatgaaaccgagctggagcggagcggagcgccggcctccacctcctcgccgtccccacccctccggcccagcctccgcccgccgccgcctcgccaggcctgcccgct

SEQ ID NO: 435758 - DNA, 702 bp, Homo Sapiens
  misc_feature (513)..(517): n is a, c, g, or t
  misc_feature (523)..(523): n is a, c, g, or t
  misc_feature (525)..(526): n is a, c, g, or t
  misc_feature (535)..(535): n is a, c, g, or t
  misc_feature (575)..(575): n is a, c, g, or t
  misc_feature (579)..(579): n is a, c, g, or t
  misc_feature (582)..(583): n is a, c, g, or t
  misc_feature (585)..(585): n is a, c, g, or t
  misc_feature (590)..(590): n is a, c, g, or t
  misc_feature (592)..(593): n is a, c, g, or t
  misc_feature (598)..(598): n is a, c, g, or t
  misc_feature (608)..(608): n is a, c, g, or t
  misc_feature (625)..(625): n is a, c, g, or t
  misc_feature (635)..(635): n is a, c, g, or t
  misc_feature (643)..(643): n is a, c, g, or t
  misc_feature (662)..(662): n is a, c, g, or t
  misc_feature (672)..(672): n is a, c, g, or t
  misc_feature (692)..(695): n is a, c, g, or t
gaggaagaccacagacagagcgccgcgagtccgcagaacacatggggtggtaccggtccggaattcccgggatggacggcgaggaggtggaggccggcgctccgctccgctccagctcggtttcatgtcccgccaggcgaaggatgacttcctgcggcactacacagtgtcggaccccaggactcaccccaagggctacaccgagtacaaagtaaccgcgcaggtggtggtctggaagcggtacagcgacttccgcaagctgcatggagacctggcctacacccaccgcaacctcttccgccgcctcgaggagttccctgctttcccccgggcccaggtgtttggccggtttgaagcctcagtgatcgaggagcggcgaaagggggcagaggacctgcttcgcttcactgtgcacatacctgcgctcaacaacagcccccagctcaaggagttcttccggggtggggaggtgacccgacccttggaggtgtccagggacctacacatcctgcnnnnncctctnannaaaaaaccnaaccataaaaaaccccggctatcccaactgctccctgcanaaanganngncctcnannaattngaggttccantagaacacaccacaatncaacccatancatgaggntcctggatctcctctttanctgtgagagnaccgaggagggatgtggttnnnntggccga

SEQ ID NO: 435759 - DNA, 710 bp, Homo Sapiens
gttgcctgttttaggtcctctgctctttctggtctcgggtctctggttgtttgttcgtctgtgtgctccttcatttgcgtggctgctgtcctgcctcatgttctgtcacctggtgccacatttgggagtcgcgcgggtggtcttcctgccgtctcctgttttcgtggatcaagagggggtggccaggatgtgtaggtccctgggcacctccaagggtcgggtcacctccccaccccggaagaactccttgagctgggggctgttgttgagcgcaggtatgtgcacagtgaagcgaagcaggtcctctgccccctttcgccgctcctcgatcactgaggcttcaaaccggccaaacacctgggcccgggggaaagcagggaactcctcgaggcggcggaagaggttgcggtgggtgtaggccaggtctccatgcagcttgtggaagtcgctgtaccgcttccagaccaccacctctttgacatcctctgggtccttctttgagatgaactgcgcggttactttgtactcggtgtagcccttggggtgagtcctggggtccgacactgtgtagtgccgcaggaagtcatccttcgcctggcgggacatgaaaccgagctggagcggagcggagcgccggcctccacctcctcgccgtccccacccctccggcccagcctccgcccgccgccgcctcgccaggactccccgct

SEQ ID NO: 435760 - DNA, 705 bp, Homo Sapiens
tgggctctgctgtggccgtctgtttcgttttgtcacctgtagtgactcggcccctggctggcgctttttcgggttccactgtcaccttcttgtcatgactgccccgtcctttttgccgtgctcggttgggatttgcacggtgttcaatcagccgttgctggtttgggggattccaggagggggtgggccaggatgtgtaggttgcccttggaccacccttccaaagggtcgggtcacctccccaccccggaagaactccttgagctgggggctgttgttgagcgcaggtatgtgcacagtgaagcgaagcaggtcctctgccccctttcgccgctcctcgatcactgaggcttcaaaccggccaaacacctgggcccgggggaaagcggggaactcctcgaggcggcggaagaggttgcggtgggtgtaggccaggtctccatgcagcttgcggaagtcgctgtaccgcttccagaccaccacctctttgacatcctctgggtccttctttgagatgaactgcgcggttactttgtactcggtgtagcccttggggtgagtcctggggtccgacactgtgtagtgccgcaggaagtcatccttcgcctggcgggacatgaaaccgagctggagcggagcggagcgccggcctccacctcctcgccgcctcgtgccgattaacccccggcctcgacctaagccatg

SEQ ID NO: 435761 - DNA, 991 bp, Homo Sapiens
gcgggagggcgcagccacctaggcagcagagcgcccacctagctgaagctcatcgccgaggctcgagggccgctgccagctgcctgcgctggggctgctgcaggacatcaaggacgccctgcgcagggtccaggatgtgaagctgcagcccccagaagttgtgcctatggagctgaggaccgtgtgcagggtcccgggactggtagagacactgcggaggtttcgaggggacgtgaccttggacccggacaccgccaaccctgagctgatcctgtctgaagacaggcggagcgtgcagcggggggacctacggcaggccctgccggacagcccagagcgctttgaccccggcccctgcgtgctgggccaggagcgcttcacctcaggccgccactactgggaggtggaggttggggaccgcaccagctgggccctgggggtgtgcagggagaacgtgaacaggaaggagaagggcgagctgtccgcgggcaacggcttctggatcctggtcttcctggggagctattacaattcctcggaacgggccttggctccactccgggacccacccaggcgcgtggggatctttctggactacgaggctggacatctctctttctacagtgccaccgatgggtcactgctattcatctttcccgagatccccttctcggggacgctgcggcccctcttctcacccctgtccagcagcccgaccccgatgactatctgccggccgaaaggtgggtccggggacaccctggctccccagtgacttgggccctcctggaggagtcctgttgcctctcctgcccctccaggccactgagtgttttggccacttggaggacctggggaggagggagtgtgtccttttgagcaagaggagggaacttctggttgccttttctgagccttgcgttgggagaaccccaatttttagcacttccgggaaactggtgggacaaatgttggggccaggctccgctcc

SEQ ID NO: 435762 - DNA, 1282 bp, Homo Sapiens
  misc_feature (1194)..(1194): n is a, c, g, or t
  misc_feature (1207)..(1207): n is a, c, g, or t
  misc_feature (1226)..(1226): n is a, c, g, or t
  misc_feature (1231)..(1231): n is a, c, g, or t
  misc_feature (1237)..(1237): n is a, c, g, or t
ggcaaactataggataacacagagccctttttgaaaataaattggcattggagtgttttaccctctagctgttttacttagaatgtaacatatgctgcctacccacctcaaaatgtctgtactgcaagagggccctgggcctctgctttccatattcacgtttggccagagttgtagtcccaaagaagagcatgggtggcagatggtagggaattgaactggcctgtgcaatgggcatggagcacaaggggtcacagcatgcctcctgccttaccgtggcagtacggagacagtccagaacatggtcttcttgccacggggtgttgttgtctctggtggtgctgcatgtctgtggctcacctttattcttgaaactgaggtttacctggatctggctactgaggctagagcccacagcagaatggggttgggcctgtggccccccaaactagggggtgtgggttcatcacagtgttgccttttgtctcctaaagatagggatctacttttgaagggaattgttcctcccaaataaatttgctttaccttggtcctttcttttgtgccagtattcaagtggtatagctctgagcagggtcacatttggccaaacctgacactgtcttgctgcattctcctttggcaaacatcagggtcagaattcaggatagcccttcctagggcactggactttctggcatgggggctgtgtttgcacaagttattttcatgttacctggagagtgtccagaggctgctctgaggctgaggtgtgttcccccttgcctggttccagctgtcagagggataccatcctagggtctgggaatccaaggccacgagactccttggtttgtggtccgagatcctgtactaaggagggtctggccagaggaacagaccagcttttgcacaatgaagcgcaagggaacaagtggtttgcctggtgtcctacctgtcctgaacctggtcctgtgggccattgaaaagttagatctgtgatctctggggtttttgtggctttgttcaatgcttccactctagggcaggcagagcagtctatactctcccaagcctgcttgacctccaagtagagctgatacagagatctgtgaatattgtgatagaaattctttggtattcatacatttcagctgcaagtcagcaatttcccagggtacccatgtaaaggtnataaaacagtcantcttaaaagacagaggganagctntgactncatggggatcaggaggtcccatgggctgggttgccagggttccct

SEQ ID NO: 435763 - DNA, 2933 bp, Homo Sapiens
  misc_feature (1412)..(1412): n is a, c, g, or t
  misc_feature (2681)..(2681): n is a, c, g, or t
  misc_feature (2914)..(2915): n is a, c, g, or t
ggcctgggtggcgaattcggcacgaggctcctacatctgccctgaccggcagttgcgtcgctatttggtgctggagcctgatgcccacgcagctgtccaggagctgcttgccgtgttgaccccagtcaccaatgtggctcgggaacatcttggggaggccagggacctcctgctgggtagattccagtgtctacgctgtggccatgagttcaagccagaggagcccaggatgggattagacagtgaggaaggctggaggcctctgttccaaaagacagaatctcctgctgtgtgtcctaactgtggtagtgaccacgtggttctcctcgctgtgtctcggggaacccccaacagggagcggaaacagggagagcagtctctggctccttctccgtttgccagccctgtctgccaccctcctggccatggtgaccaccttgacagggccaagaacagcccacctcaggcaccgagcacccgtgaccatggtagttggagcctcagtcccccccctgagcgctgtggcctccgctctgtggaccaccgactccggctcttcctggatgttgaggtgttcagcgatgcccaggaggagttccagtgctgcctcaaggtgccagtggcattggcaggccacactggggagttcatgtgccttgtggttgtgtctgaccgcaggctgtacctgttgaaggtgactggggagatgcgtgagcctccagctagctggctgcagctgaccctggctgttcccctgcaggatctgagtggcatagagctgggcctggcaggccagagcctgcggctagagtgggcagctggggcgggccgctgtgtgctgctgccccgagatgccaggcattgccgggccttcctagaggaagctccttgatgtcttgcagtctctggcccctgcctggaggaactgtgtcagtgcccccgaaggaggaggtcaccccccagcaccgggctcttgggccattgctggaaaaagcctcatccttggaggctcgccagttcttctaccttcgggcgtcctggttgaaggtgaagccatctgtgcagctgatgcttccctggtctctgtaccccaccttgtcacaaggcactggcccacgcgcaagcacctgtaacagtggcccttgacagcaactgtcagttcctggaacctggagaacctctcacttgagggcatagctgagtaacaggcctcagtgtgccctgaccctctgggtggggttaggaggcacccaggatcctcagttacccagagcctttgctcttgggccccaggctttctaattaagtggagcagcgtggctgagtcggccctgcctcatcagtcacagaaggagagggtggagcccttgtttctgagtagggtggttgtggggcagtggggggcggtaggncctcagaggtattccagagtagagattcatggagcttgggaaagggagggtcttggccccaggggcacaggctgctttgtgacccacctcagagtgtggttcacacctcttctccccagcagcactgggacgctggccccagggatctgggcccctccatgaccttccacactggatgcctctttccctgcaggcccttccacctgcctcgtatccctgttgctgactccgtccaccctgttcctgttagatgaggatgctgcagggtccccggcagagccctctcctccagcagcatctggcgaagcttcttgagaaggtgcctccctcggggccgggccctgctgtgcgtgtcagggagcagcagccactcagcagcctgagctccgtgctgctctaccgctcagcccctgaggacttgcggctgctcttctacgatgaggtgtgtatgtgtatctccagtgagagggagggaggggagatggtgagcacaggttggggccatgagggcagggtgggaaatgggtctaggaaccctgggcattggtggcaggatggcacttacagatgagagaactagggttggaggaactgggggactctaggcttggatgaatatcaagtcagagagggaggcagctgtaggcaggggagacacctggactgggagcccagccatttagctgggccacgaggctttcagtgaggtttccggcagctttgagttggcaggattgggccgtttgtatgccagccgtttggcctttgtgaccaccacctgaggagatacgtttactggtcctatttacaggtgaggaagctgaggccttggggattttaacccagtttgcccagtccaaagtggtggagccgggaattgaatccacagttccctgaaattgagcccgcatcttctgtacaacagggaagatgaaaaagacaggtcctctggaggctttcagtaaacgtcggctggattctgtttacaaagctcagagtcaggatcttttatggggagtgacacgggcctggggaaggggagaggcactgagccaaggtggagacagtgaggccttcccagagacctcccttgtacccaccctggtgtggtccccatgagcctcgccttgctaactgctcggtctgccaggtgtcccggctggagagcttttgggcactccgtgtggtgtgtcaggagcagctgacagccctgcttgcctggatccgggaaccatgggggagctgttttccatcggactccggacagtnatccaagaggcgctggcccttgaccgatgagggtcccacgctgaccttggccctgacctcaggagccacgctgtagacattccctctcctggtctctgggtctggcttccaggctctggctgtggatgtcttcagcctctgggtgctggccagtgaggtcccaaatgacccagggcttaagggagaggcgagagaatgatctggcctcaggggacaggccacctgttcaggannaatatttttcctgcactt

SEQ ID NO: 435764 - DNA, 881 bp, Homo Sapiens
ttttttatgagttggaaacaactttattgatacctgagaaaaagtgcaggaaaaatattcctcctgaccaggtggcctgtcccctgaggccagatcattctctcgcctctcccttaagccctgggtcatttgggacctcactggccagcacccagaggctgaagacatccacagccagagcctggaagccagacccagagaccaggagagggaatgtctacagcgtggctcctgaggtcagggccaaggtcagcgtgggaccctcatcggtcaagggccagcgcctcttggatcactgtccggagtccgatggaaaacagctcctcccatggttcccggatccaggcaagcagggctgtcagctgctcctgacacaccacacggagtgcccaaaagctctccagccgggacacctcatcgtagaagagcagccgcaagtcctcaggggctgagcggtagagcagcacggagctcaggctgctgagtggctgctgctccctgacacgcacagcagggcccggccccgagggaggcaccttctcagaggcttcgccagatgctgctggaggagagggctctgccggggaccctgcagcatcctcatctaacaggaacagggtggacggagtcagcaacagggatacgaggcaggtggaagggccttcaaccaggaacgcccgaaggtagaagaactggcgagcctccaaggatgagtctttttccagcaatggccagagccggtgctggggggtgacctcctcctctgtggcactgacacagttcctccaggcagggggcagagactgcaagacatcaaggagctcctctaggaaggcccggcaatgcctggcatctcggggcagcagcacacagcggccccc

SEQ ID NO: 435765 - DNA, 2449 bp, Homo Sapiens
tccttggtttcttcaaaattttattaacaaaacccagggagaggaggcaaggatgagtggactccgcagccccaccaggcactgaacatgtcgacggggacagtccctctgataaaggcagatgggcggtcaaccggtggatgggcacagggagaaccggagaaacagatgagtggaggaacggacacacgggcaccgggcggctcccccatctggaatgcagggtgtaaggggtccgggccaggaggctcagcggtcggcactggagcgcaggtcggtagtgaggggatcgtgctggatcgtctggtgcagcatcagggccagcaatcccgcgcggtttgtcatggctgtgcgcacattgcgctcctgctcaaacagctcgtccagcttgtaccacacacgcacgcgctccaagtccacttccgcacgccgcagcttctcccagcagtaatggcgattgcactggcgcttgggcaggcggcagaagtcacccgtgagctcaaagacatcacgtacaagggggcacccgcatacctcgtcagctggcactttggggtcccgtgagtgctcggggcacagcacctggagccgcttacagtatgttttgctctgaggattatacacatcacagaagagtcgtgtggccccttcaatgcgtgtggggtacatggacccaaaggacgtctggctctcatacttggcgtagcagcgctccatgtggcgcaaggcaacacgtgggttgatggggtgcccacaggaaacacagaagatctgcaggtctgtgtcatcactgtcaccctcgttgctgctcctcatcgtcgcgcacagcctgctgcttggcacgtagaatgatggcctcaagctcatggaatcggcgttccatttcctgaaggcgggtgcgggcactctgctgctctcggcgaatgcgttcgagcagcttcttgccgtgctcttcagcaatgcaagggctctgctgccactgctggatgcgctgggggaggatctcgtagatgcggttggctgccagcttcatgccacagtcatctgagcaatacttggagctgggctgggcggggcgcacacagccgggccccaggcactggggcagtgacgcagggtccttggcatcagccctctctgggtgtttccatttatccttgtgcttctgcttctgccgatgccgcttgtatcgctcctccttcttcttctcagacttcttctcccgacgcttcacatgcttcactttcactgccctcttccgcagcgcggggtccaggaatggggactcttctgtgtcgctcatccagggcaggccatggtcatcaaaggcccctgcacagaagtcctgatacaggtcaggatccagaggtaggtcctcatctgagagtggctcaggtgtggctgtagcctcaggaggctccttgactgttgatgacgccactgccccctcatcttcacggatgcgccctaacttctgtgatggctgtggctgctgttgggtgggcagtggccggcggggccttggcagggactctgagggcgtcactggtgagagcgaggaagggaagtacttgtacgattcccgggcccgcagctggcactggcgcagccggcacttctgccggatcttgttggggcccccgaacttcttcatgtcccgacagaaatcacagtgaccacagtcctcagtgcgccgacatgcctcacactcaccacacatgcgggctgaccgtttgatctgctgctgctgctgctggtgatgctggctgggtgtggccaccaagggctgcggagaggatttgtggggcgaagcagagccccgagcaagcatggccccaacccctgtccctgaccctgcccggcgctgcaggtctggatcagggacaggcctcttgcgccctccaccctcatcccggggctcactgctgtcccgctcattgccatcccgctcccgtgacttcttgtgccgatagcgaatctctagcttggggtctttctctctgcactcccgacagtaccactcccggatggccttggccatcttctcagtgatccggatgcagtccccatggaaccactcattgcagttgtcacacccgatcatgaagcagttgatgtccggtttgcggcagatgcagtagatgggcgcattctccccattctcggacttgctgtcctccccggcatctggaggctctgggtctgaaccatctccctccatatctccgctcccggcgcactccctcacgacccccgccagcgacccgcgaacctgcacagaccactcggcggcgtcccaggcggttgcaaaggcgcccacaactacttccgcttctagtcacgcctcccaggcagcgtactcctattgcgcaggccccatgcgtcgtctccgctgcaaaccagtaggtggccggcctagagcccccaagacccctcagcgccgccatct

SEQ ID NO: 435766 - DNA, 1398 bp, Homo Sapiens
  misc_feature (151)..(152): n is a, c, g, or t
tttgttaaaatcccggttggcttcccaagtttcatgcccaccgtcatttggggccaattacttggagcttgggttgggcccggggcgccccacagccgggcccccaggccactggggcagtaacccagggtcccttggcatcagccctctnnggggtgtttccatttatccctggtgcttctgttctgcccgatgcccgcttgtatcgctcctccttcttcttctcagacttcttctcccggacgcttcacatgtttcactttcactgccctcttccgcagcgcggggtccaggaatggggactcttctgtgtcgctcatccagggcaggccatggtcatcaaaggcccctgcacagaagtcctgatacaggtcaggatccagaggtaggtcctcatctgagagtggctcaggtgtggctgtagcctcaggaggctccttgactgttgatgacgccactgccccctcatcttcacggatgcgccctaacttctgtgatggctgtggctgctgttgggtgggcagtggccggcggggccttggcagggactctgagggcgtcactggtgagagccgggcccgcagctggcactggcgcagccggcacttctgccggatcttgttggggcccccgaacttcttcatgtcccgacagaaatcacagtggaccacagtcgctcagtggcgccggacatgccctcacacgtcaccacacatgcggcgctgaccggtttagatctgctgctgcctgctgctggtgatgcgtggctggttgtggccaccaagggctgcggagaggatttgtggggcgtaagcagagccccgagcaagcatggccccaacccctgtccctgaccctgcccggcgctgcaggtctggatcagggacaggcctgcttgcgccctccaccctcatcccggggctcactgctgtcccgctcattgccatcccgctcccgtgacttcttgtgccgatagcgaatctctagcttggggtctttctctctgcactcccgacagtaccactcccggatggccttggccatcttctcagtgatccggatgcagtccccatggaaccactcattgcagttgtcacacccgatcatgaagcagttgatgtccggtttgcggcagatgcagtagatgggcgcattctccccattctcggacttgctgtcctccccggcatctggaggctctgggtctgaaccatctccctccatagaactcccagatggttcatcattctgcccatagactcccgccgttcagtccacagactccggttatggctcaccacagaccccatatctccgctcccggcgcactccctcaccacccccgccagcgacccgcgaacctgcacagaccactcggcggcgtcccaggcggttgca

SEQ ID NO: 435767 - DNA, 712 bp, Homo Sapiens
  misc_feature (391)..(391): n is a, c, g, or t
cacaactccaaatcatgttgctttatttaaaatgatgaacaagtttcacccaagtgaaagtttaaaataccaacccaatagcagatccacaggctttcatggcagaccccatggctagacggacgcagaactaggagactgctcagtgttctgacaactccaggaggcacgagtgtgcagaagacagtcccagttcttctgtagcatccagtcactttggagacagctggccagggctagctctcctcccaggaggttcactggggcttagatgacatttctttttgttcttttttaaaattcaaaatttctgctccccctatccagaccactggcaacttgtcctaaccatgccccctggtggcaaagagcctttttgggctgttttttnattttaaactgaagtttagaggagttgttgatagaaaactgaaaggaaggtaaggaaaaagggcaagcgtggcagcacaggagcaatgctgggaaaaagaaaaaagctttttatagatggcaagaaaagtctttttaaaaagcaggagtagcaacaccactcagatattactaccaagagattatacattcagagtttgactttactcacacccaaacacatcctgtgcccaccacagaaccaagggggctgtgggcgtgggggtaaggagggagagcagcccccatggcaggcaggcagcacagttctacctacccagcc

SEQ ID NO: 435768 - DNA, 461 bp, Homo Sapiens
tacaggtgtggcaaaatacttattacaaagaaagcaactgcaaccctagagaggggtaagccttctctgggcaatagtcatggacatttacagaggggaaggaagtaaacgttaataaataattctgtaaataaatgctagtacatcataataacataccacttagacactaccatggctttacagcaggttttctctaattcactggaaccatgctattcctgtagagcagctgattctttggtcatagtaccttcaacaaataaactatagaactagagaaactttctaagggaggaaaaagaaaaatcaaagtgatactattagttctgaagttgtgccacttgcggagattttaactttagggattacagagtttcaaggttaggaaatcacaaagctctaggtctcagtgggctaaactttcactcctttctcttcctctacagaagaatattctg

SEQ ID NO: 435769 - DNA, 1001 bp, Homo Sapiens
cgcgagagtgttatgggggcgtttaaagtcacccccgagtcgggggcgttaatttcccgtatttactagaaaggccgggcgggggggatttgtccccgttaggccagaaagcgcgaaaggtgtgggctccgttggccatgtaggagggggcggaatttgcggtcatgggttacgcttccgtggcgaccggtaagattgtaaaggaatgctgggggagaagtgccaagcatgccattgcgggcggcgcgccagaaggggggcgggggttattgtcggcccgccagggggccgttgcggggaaaaatagcccgctggtgggggccctgtataagttttttccctccctcccggattcgagggaagctgaggtaatgggcgttaatgaggaaatcagtaggaatgggttggggccacccccgggctgggactcacgcaagggccagtgctgggtctgcagcctgtggccaggggaggaacaggaatgttcctgttcgccatgaggttggctaaaaggcccctttggtggtaggttgacaccccagcaagtggcctagcatggtccgaggcagccgcatagcctgtctgcatgatagcaggcttcagggatccagcttagctggaggcttgaactgtgctagcctcggtggtacctgcactgtcattccatatgtcacaatccagggaagagaggctatcaccgagaagagttgtcagtaagaaggcaggacactctaacacgagcaaagccaccaggcttctgttgatccagggcagcatccccctcgcctggcagagttccttgccccacagccaaggctatgggaagcaaggcctccagcaaagctcatggctgccaccaaagcatctctgccaagatgcttcttatgatacttaggaaggatttccacccaaactggatcagggtcaccatgaccctgaatcacaaatccaacacaggctgattccaatcatggttgaagcctcgtccgaattgccaccca

SEQ ID NO: 435770 - DNA, 527 bp, Homo Sapiens
  misc_feature (41)..(93): n is a, c, g, or t
  misc_feature (114)..(114): n is a, c, g, or t
  misc_feature (235)..(235): n is a, c, g, or t
  misc_feature (237)..(237): n is a, c, g, or t
  misc_feature (490)..(490): n is a, c, g, or t
gtgtgagccaccgctcctggccggccagcatggtcttgatnnnnnnnnnnnnnnnnnnnnnnnnnnnnnnnnnnnnnnnnnnnnnnnnnnnnngtgtgagccaccgtgcccggncgcctggctgacattttcaaagatggaaagtggatggagaattaagagctgaaattatgtgttcccaaaaggtggggccaaaaggcaagtggaattacctgccagagccccggaggtcagngnaactccaccaggaccatggagggtgaggtgaggcttcggccaacaatggggaccgatggaaagtctatgtaaggttcagtggggtgccgctcccccacatcccacccacaccccacccacatcatgcagccagcagctacacctctgggtggggtggtgtgacgtgaggattatttgaaggataaatggaaccagagaagcttcgggtcttaggcgtactggggaggggtgggtgagaggctagaccaaaaantggggttaaagtgaaagtccataggtactgctggggg

SEQ ID NO: 435771 - DNA, 2141 bp, Homo Sapiens
  misc_feature (713)..(752): n is a, c, g, or t
ggggaagaaacagtctgtactttcatttattaaatgcagctttcgctggtcacattgcaactcaatacaaacagcccagcagagggtagggcattaactcttgttctcatcaatgtaaacacaatattaatattgaagattaaagaaaatgggtaaaaagtccagtgtctcctcaatctgtgtgaaggtgaaggtggttgcctacccttggacaggtcccaaagggagactgaggttgtcacctcttcccatccacagtgaagcaggcaagaaccagaggaacccaatcactttcttcctgtaggtctccagatggatacgtgaatcttcagaactgggctttcatgaattatgaaagttcttcgaaaggcctgagaggttcgtaccttgtgtgtgcactgaagtagttccttcaaagccctttcccatgaatcagtcactgccaatagaaaatgtgaccggtgtaaaacagccagccctcgtaattccgcagtccccatcgctatagcccctggattctggagagtagggagttcaaagtcacgggagcctcggtgatcatcctgaaggaaagctgcccatgtttaaatatcggccgaagatgcttgacctccttcctgggccactgctgatagagggtggttggtaagaggcagttgattttcctttagagccttaaaggatcagattttttatttttgattggcagcccnnnnnnnnnnnnnnnnnnnnnnnnnnnnnnnnnnnnnnnnaggagtgactttggggataaggaaacccatcaaccccacctccaggaccctctggttacaatgtccccattgggtttttccaagtggttggtttagatcatcggtttgccctccgtttgaatgcccagctacattgcagggcaaaggggaaagttttcacttaataaagacaatttcacttctatttcctgggacgaataacccctagaaccctgacttccctttctccccagttatgatgggaagcataattattaaaaagcatccagaacatccctaaagccctgccctgatcttgtggcttgcagtaagatgataaccctttactccctgtcacccctgatttcccattctgaagagactcatctaggtgggctgcatagctaacctctgggaatgcagggttgtggggcagagagggactggctggatccttgtccaaggtctctgtagtgagggcagcttggctgggccaaagagataaataaaaacaaaccgaaaaagcatggctcaattttgaatttgaaggccgggccccaaacagcgagtggcacttcccctacagcatgtctccccctagtggtgggcttcttggtgctagctgttgttctcggctgtgagatatttcagggcagcaaagccgtagcggcgggacatgtcctgctgaaactcttccttgagggttttgagacagatgcggtattgcttgttggaacggaacttggtaatgtcgaagctgggggcatgaggcatgtggatcatgtaggcgttgggcagcacaatgaactcatactcctggaagaagacaagagcagcgtgagaacccgcaagagccgagggtcatgcatgatgaaggcccaagcgaatgattgaatggctagtgaatgaatgacttgataatggcacccacaagcagatggcaaaggacagcacaacagctttggagtggggtaattcagggctgtttccatgaccttggaccaggaaactggcttctctgagccttcatgttctcatctataaggtgaaagtaataatattcttgaatgatgaccatgacggagaagccaatactgtataaacagtgctgagccgagctcatggcctagaaaaggtttcttgataaatagatgtgagctcacacccacatggacagtctaggatgacacacgccatgggatattctcttgctcgattaactgacatctgtttatgattcctcataggacttgatgcgatctgacagtctcaacagatgagtgcaaaagagggtacaaaacaggaatgagagaccagatgaaataaaaacaagtattttgctggacctaagctcaccaagaacaaacctctccctgacacatctttatcgcaggtcacactgtcacccag

SEQ ID NO: 435772 - DNA, 441 bp, Homo Sapiens
  misc_feature (47)..(47): n is a, c, g, or t
  misc_feature (49)..(49): n is a, c, g, or t
  misc_feature (132)..(132): n is a, c, g, or t
ggacgaaaggccacgcacccacaaacttcgccaagtggcggaccgcncnacgccttaccgggttgagtgggaggccgattttgagccgtatgttgttgtgagacgtgactgcccggagtacgaccggagttntgtaggctttggctggaacaaagtggctcatatcatggagctggatgtgcaggagtatgagttcattgtgctgcccaatgcctacatgatccacatgcctcatgcccccagcttcgacattaccaagttccgttccaacaagcaataccgcatctgtctcaaaaccctcaaggaagagtttcagcaggacatgtcccgccgctacggctttgctgccctgaaatatctcacagccgagaacaacagctagcaccaaggaagcccaccacttagggggagacatgctgtaggggaagtgccacttcgctg

SEQ ID NO: 435773 - DNA, 466 bp, Homo Sapiens
ataagatcgagagaggaggacaaagcaggtgtgtagcccagggaatgacagcaccccttccgagaagacagggagggcgcagacatggccaggttctgagctagaaaactgtcagcagggggctgaagctgaggatagtcattgccaaggaacagcctccgtcacagaggagacgcacagatgcggtgacgagggagggatgcggggctggtgaccgctgggaacggatgtgtgaggcagagtctccaggcatggtctgtggggcggtttgatgatactagaacatctcagagtagatggacgtcccgacctgcagactggaaagcccccagagctcccggcaggacgtatgagggccagcccacacccaggtctgtcctgatacaactgaacgccacagtgtcttagctcctttactgttgctatcaagaaacacctgtaggctgggaaatttatgaggaatcat

SEQ ID NO: 435774 - DNA, 1076 bp, Homo Sapiens
cgatctagccgatctttttcttgccacgactcgtaggcaaaatatgaaggctttaaaaaatctatcataataatgaaaaagaggttgtctcccaagcagtgctgtccctcaaagaaaagactggttatgtggaaccggcacgtttggagagattattctagtgaataccagtgtatatttgtggtaggcaaatttctaagaatgacccctacttgacaccccccaccaatgcccttgtataatatcctcccactttgagcatgggtggaccctgtttgatccatgattatatcatgttatgtagcaaaaggaagactgtctgggggtggctaatcaaatcttgtgactcctttaaaagcagagagttttctcgggctggtggcagaagtcaagagacaaagcagaaggacctcaggcaccattgctgttttaaggtagagggggctgcatgagaaggaatgcacatggctttgaggagctgagagaggccttggctaacagcaaaaggagctgggaactgcagttcctacagccacgggaactgaattcagcccataagctcattcataggcttggaaaggcattcatctccagtctccagataagacccagcctggccaacactttgaatccagccttgtgagaccctaagccgagaactcacttaagcctgcttggacttctgacctacagaactatgagataataaatcagtggtgttttaagctgctaaatttgtggcaatttgttatgtaggaataggaaatgaatacagtattttaaaagaggtaaagaggaaatcttcatacttgattccctgtagtatgctggatatttcttggtaaatgcatgaataaagtctttagtagcaagtcatgtacctggaccttgttggggatgttctcgccagagatctcaattagtcttcattggacgtttgttggcaaagttgcagcatcttactgagtagcgtttggtaaaggaactgctagaatgagactataggaataggactgaaacagtgtgtaagggatctttttttatttctagaagaggtgttactttatactgatttt

SEQ ID NO: 435775 - DNA, 438 bp, Homo Sapiens
  misc_feature (11)..(11): n is a, c, g, or t
  misc_feature (28)..(28): n is a, c, g, or t
tttcatctacnatcacttttcctttcantttttgtcccaaacagtctaaccttttcctctatcgaagtcagtttcttaagattttcttggcattcagcaagcatagtttgtagtgcagtaatctcaggattaacatttacatcctgttgctcagccttgatttcaggaacctttacttcaggcatctttatttcagtagcatttaagtcagacacatcaactgcttcattaacatctgttattgggacttaatgtatcctcagaaatgtcaacattatcttcattatacaagtgacgaatcaccacagctttcttctttcctgaggtcataaacctggccactgatatcaacgccaacagcctctggcagatattttctcattggctcaaggggggttctggactttaccagaactggattttctttctttgttgtgg

SEQ ID NO: 435776 - DNA, 2252 bp, Homo Sapiens
  misc_feature (96)..(104): n is a, c, g, or t
  misc_feature (1993)..(2162): n is a, c, g, or t
  misc_feature (2235)..(2235): n is a, c, g, or t
tctctttttagcagcaacatacaagccggccatattagagagatggaaataaagcttccttaatgttgtatatgtctttgaagtacatccgtgcannnnnnnnnagcatccaaccattcctcccttgtagttctcgccccctcaaatcaccctctcccgtagcccacccgactaacatctcagtctctgaaaatgcacagagatgcctggctacctcgccctgccttcagcctcacggggctcagtctctttttctctttggtgccaccaggacggagcatggaggtcacagtacctgccaccctcaacgtcctcaatggctctgacgcccgcctgccctgcaccttcaactcctgctacacagtgaaccacaaacagttctccctgaactggacttaccaggagtgcaacaactgctctgaggagatgttcctccagttccgcatgaagatcattaacctgaagctggagcggtttcaagaccgcgtggagttctcagggaaccccagcaagtacgatgtgtcggtgatgctgagaaacgtgcagccggaggatgaggggatttacaactgctacatcatgaacccccctgaccgccaccgtggccatggcaagatccatctgcaggtcctcatggaagagccccctgagcgggactccacggtggccgtgattgtgggtgcctccgtcgggggcttcctggctgtggtcatcttggtgctgatggtggtcaagtgtgtgaggagaaaaaaagagcagaagctgagcacagatgacctgaagaccgaggaggagggcaagacggacggtgaaggcaacccggatgatggcgccaagtagtgggtggccggccctgcagcctcccgtgtcccgtctcctcccctctccgccctgtacagtgaccctgcctgctcgctcttggtgtgcttcccgtgacctaggaccccaggggccacctggggcctcctgaacccccgacttcgtatctcccaccctgcaccaagagtgacccactctcttccatccgagaaacctgccatgctctgggacgtgtgggccctggggagaggagacgaaagggctcccacctgccagtccctggggggaggcaggaggcacatgtgagggtccccagagagaagggagtgggtgggcaggggtagaggagggggccgctgtccacctgcccagtgcttggcctggcagtggcttcagagaggacctggtggggagggagggctttcctgtgctgacagcgctccctcaggagggccttggcctggcacggttgtgctccttccctgctcccagcccagagcagccattaggctggaggtgacgatgagttcctggaacttggaggggcctgttaaaggggatgactgtgctttccagggcactgacgggaagccagggctgcaggcaaaagctggaccatgtgccctgggcccaggaggaccatgttgggccctcgtttccattagctagtggcctccttggggctcctgttggctcctaatcctttaggactgtggaatgaggccagactggaagagcagctccaggtagggggccatgtttcccagcggggacccaccaacagaggcccagtttcaaagtcaactgaggggctgaggggtggggctccatggtgaatgcaggttgctgcaggctctaccttctccatggggtaaccaccctcgcctgggcaggggcagccaaggctgggaaatgaggaggccatgcacagggtggggcagctttctttggggcttcagtgagaactctcccagttgcccttggtggggtttccacctggcttttggctacagagagggaagggaaagcctgaggccggcataaggggaggccttggaacctgagctgccaatgccagccctgtcccatctgcagccacactactcgctcctctcccaacaactcccttcgtggggacaaaagtgacaattgtaggccaggcacagtggctcannnnnnnnnnnnnnnnnnnnnnnnnnnnnnnnnnnnnnnnnnnnnnnnnnnnnnnnnnnnnnnnnnnnnnnnnnnnnnnnnnnnnnnnnnnnnnnnnnnnnnnnnnnnnnnnnnnnnnnnnnnnnnnnnnnnnnnnnnnnnnnnnnnnnnnnnnnnnnnnnnnnnnnnnnagcccgggaagcagaggttgcaaatgaactgagatagtgatagtgccagtgtctattcagcccgccgaccaanaggtttctccactacaa

SEQ ID NO: 435777 - DNA, 646 bp, Homo Sapiens
  misc_feature (513)..(513): n is a, c, g, or t
  misc_feature (596)..(596): n is a, c, g, or t
gctcagtgtccagacccttgattcccggcccagtgtccccagccccaaatctgctggtgccagtggcagcaaagatgctcctgtccctggtggtcctggccctgtgctcagtgaccgaaggctctgccttgctctggatgagccccagctctgcaacgggcacatggggtattctaccaggcctggtgctggcctcctgtgatgggccttcgcactcccaggccccatctccttggctaaccccctgatcagcctctgttcaggtacggctgctgtgggatgtactgacccctgaccccattagctgcccacctctctatgtgctctggagggtccacagccagatcccccaagcgggtggtatggccaggccctgtacctgcatcccttagtttggcactgttggagtcagtgctgcgccatgttggactcaatgaagtgcacaaggctgtggggctcctgctggaaactctagggcccccacccactggcctgcacctgcagaggggaatntaccgtgagatattattcctgacaatggctgctctgggcaaggaccacgtggacatagtggccttcgataagaagtacaagtntgcctttaacaagctggccagcagcatgggcaaaggaggagcttgaggca

SEQ ID NO: 435778 - DNA, 1737 bp, Homo Sapiens
tgaaaaagacagaagcagcttttactatatttacatccaacaaaacttcgcagggaacaatccttattgcacaggtcaggacctgggtgggtgaggcattccccaaggcggggcaggcaagaaaaattaggactggagggggcaccagttcttcctaaggggagcttgagactcctctagctcccagtgcctgactttgaaggaactacaaaccaccggaccatggtgccctatttcccttccctttctcactctccataagaacctcataagcaagggggctgtggctccagaataaataatttaaaataaaatacaaacacttaggtagaaaggcatggagagccttgggtccttcagcaacgtcagggaagagggaccatattttggtggagaatgacatccctacctcccattcagggcaaaggctcagtagctctgcatctttccagttgttttttaaaacaaaaacttctaaaatgaccagggcaatgcagatctgtgggtaccctggaggggagttcccggtataggacaagggaagaacagagctgtaccaactccccccagatctcccccaacatcagcacgaacaaactgggtaggttggtgatgggggaatcaggacttttggtaacagtggatccctcttcctgttgtcctcgcttggagcctttgactgggcatccttcccagcctgttcccaactccatgaaggcaacagggaagcagtttaactctagaatcccttcttcctcacttccccaccctaggctggagagggaagcttaaggtctctagcattctggaggtgctccaaaacattttcggcagtcaatggccttgggagtgggcatctgcgcccgccggtgcctcagctcctccttgcccatgctgctggccagcttgttaaaggcagacttgtacttcttatcgaaggccactatgtccacgtggtccttgcccagagcagccattgtcaggaataatatctcacggtagattcccctctgcaggtgcaggccagtgggtgggggccctagagtttccagcaggagccccacagccttgtgcacttcattgagtccaacatggcgcagcactgactccaacagtgccaaactaagggatgcaggtacagggcctggccataccacccgctgggggatctggcctggatgaaaggaaagaaggccaccagaatcactgagccctctgggtatgggacccaccccttccccacccaggccaaataccagactcactgtggaccctccagagcacatagagaggtgggcagctattggggtcaggggtcagtacatcccacagcagccgtacctgaacagaggctggatcaggggttagccaaggagatggggcctgggagtgcgaaggcccatcacaggaggccagcaccaggcctggtagaatactgggcaggcgtagccgttggaaataccacaaaaggttccagaagatgatggggtgggcagagggcagttcaggcaacgccagcacctcactgccctcgttctctaccagcgactccagctccttacgcagcaccagggggctcaggtatgcccatgccccactctcaacccgccgggaggctccccccatgtgcccgttgcagagctggggctcatccagagcaaggcagagcttcggtcactgagcacagggccaggaccaccagggacaggagcatctttgctgccactggcaccagca

SEQ ID NO: 435779 - DNA, 1670 bp, Homo Sapiens
  misc_feature (929)..(929): n is a, c, g, or t
  misc_feature (1147)..(1147): n is a, c, g, or t
  misc_feature (1555)..(1605): n is a, c, g, or t
ggggggtcaaggggttcagtacattcccacaaccaggcggtacctgaacagagggctgaatcaggggttagccaaggagaatgggccctgggagtgcgaaggcccatcacaggagggccagccccaggcctggtagaatactgggcaggcgtagccgttggaaataccacaaaaggttccagaagatgatggggtgggcagagggcagttcaggcaacgccagcacctcactgccctcgttctctaccagcgactccagctccttacgcagcaccagggggctcaggtatgcccatgccccactctcaacccgccgggaggctccctatcaggcacaaagggggagggcagtagagggcatgtacatccccagagccttgcctcccactgagccaccacatccaacagcttttgggatgccccttgccctcaagggcaagagatgtgcccatctctccctggcaccccacaggccccacacagggcaacattcccgttcctcatgcccctttggcccagcccttacccccatgtgcccgttgcagagctggggctcatccagagcaaggcagagccttcggtcactgagcacagggccaggaccaccagggacaggagcatctttgctgccactggcaccagcagatttggggctggggacactgggccgggaatcaagggtctggacactgagcaggggcacaaaggggcaggcgcagaaggggcaggttgtgttgaggttagagtcatcaggtgcccagccagccatgatttcctcatcatacaccagcgaatcacaggcacggcacagggagcagctggacagcagaatttccagggaaggtgactggaaggatccaggggtttcactgaggcgctctgaggaacggcgaagactcaggttgctgagagaagattctgagaggtcnccactcactgcccagagaggctgagctctcggaggcagtggatccagggcgctcccgggggtgcagaagactgtccatggggctgcggcgggctgggggtggcaggtcaggaggcagctcaggtgggggaatgcgggaggcaggggagtggcgggaaggagtgagcagctgttggaggcgggcacccagccctcgtcggggggtgcctgcctcatccncttcgcccaccagccttgggtccccgcccagcttagcccttccagggccgtcagtggactgggcactcagggctgagcctgagccccctgggctgcctccagggaggcggctcctcccctgtcaggctcaggtctgagagacttccatcgtgccagggcacaggtgatccccggggttccaggacccccaaggcctctatcatgtgggccacaccggcctccacagtgggctgtgcccctcgggcactgcccaggctaccactcttcaccaggcgtccagggggtgaggctgggtctctcagacttcgcccagcccaagtagtctggcgctgaagagggcgagtaggggaagggcgctccaaatagggctctgcctgggagctgcctgcctcttgatgtgctgacacnnnnnnnnnnnnnnnnnnnnnnnnnnnnnnnnnnnnnnnnnnnnnnnnnnnttgccgttctctcaagggctggcggaactgagcctcgtgccgaattcgccacccaggcctcgctt

SEQ ID NO: 435780 - DNA, 907 bp, Homo Sapiens
  misc_feature (878)..(878): n is a, c, g, or t
tccccctaaaaggtttaaattttaaaatttacttcctatcccctttttttaccttggaaaaagggtgaattccatttttccctgcgcctttccttaaggtttaactttaaaaatcccactttcccaaatgggaaattttaggattcaggaagaaaaagacttccacatgccatccctattcaatgcattctggtttttggtttgttggttggtttaggtatttcatattggatatgtacatttccaaatatatacaaccacatatgttcaacagatgtcacagaactgtcctcttgccacaaacgtttatatttacatacacatttatatctccagatagatgcttttctcttctagagacacacaaaggtagcctgaagagtttaggttttttagaatttttggaacctaatgttttgatttatcttgaatggatgataagatgaggagtccacaaaaaaatgcagctatacatgccaaccttttcaagagagatgagttatctttaggaataataatctgtgcaagatcattagtgatctgagaaatttcatgtgccacacaaacaaatatgaaagtgctgacaatgatgttgagcatagggtttcccaggtatcagtaccaagataccccttgtgtccgctgccagccatatgtgatactggcaaataaatagctctaatgaaatttttccaaaccaagcaaaaaatgaactgtaaactgaacgggcatatccagggatgtttcttattaggatgaaggctaaaatctgtaccacagaaacagacggatggagttcattgcactctgctttgtttttacaactgctagcccagatggaataggtcaagaaagaaactactgaaataaacaacagnaaatttgaaattttgtttgaaaaaagagg

SEQ ID NO: 435781 - DNA, 1678 bp, Homo Sapiens
  misc_feature (356)..(365): n is a, c, g, or t
  misc_feature (480)..(564): n is a, c, g, or t
  misc_feature (596)..(693): n is a, c, g, or t
  misc_feature (1638)..(1638): n is a, c, g, or t
  misc_feature (1670)..(1670): n is a, c, g, or t
atagaaggatatcaatacagccgggtggtgaggggcggacagagacttttatccaacatcggtcgcgcacgccttcgcgtcgtccgggacaagcgggtctgttgctgagtaggcgcgagtggggtgcgtgcagtcgaagaaaaggggagagggtgtggatgagcgtcaaaccttaacaatttgccggtgcgtgtgggcttgcctgcggccggcggtgagggtttatccgacgcggcgtgtgtgtgcaataaaccccgcccgcacagagtatagagttataatgctccaggcggcgccactaaaaggtgggtcgcgcgcgggtggggtgggagaagtgttggggagtgaaaagggcnnnnnnnnnntggtgaaagaaatattggcgtaaaggtgtaatctgggtggagttatgagtaaggataataccgtgtctcgtcttcacagtgtttatggtcacatgttggtgttaacataaaaaannnnnnnnnnnnnnnnnnnnnnnnnnnnnnnnnnnnnnnnnnnnnnnnnnnnnnnnnnnnnnnnnnnnnnnnnnnnnnnnnnnnnatggggcggtgttggcgcggaactgctagcannnnnnnnnnnnnnnnnnnnnnnnnnnnnnnnnnnnnnnnnnnnnnnnnnnnnnnnnnnnnnnnnnnnnnnnnnnnnnnnnnnnnnnnnnnnnnnnnngttgtcgttagcaaaaatgtttaatctctccttaatgtgtgtgtttatttacaagtactaaatctgaagaacagtaaaataggaaatagccgtatatgtacacatctgagggccgggcccacagtcagcggtgctgcttctgcaaagagcccggctgagggtgcccgcccggaccgtccgagggatcgctcttcttctgggagggggttctgcggtgttaaaggacagctaattgtgggctttgtcttaaaaatatctctctctctaaatatatctattctagctgtgtagcaccaacgtgagccactgaatccagacagggagaaagccagggcggaggctctcagcaaggccgagccgagatggcacgccgctccgggctctctcccggactcgacgctgcaggtcgtggggcccccagcccctcaggccaaggggccagtggtcctggggctggggagcacaggggaagctcgaggtatatcaagaggccaggctcccaggccgaggcgtgagcttttccagcactcctgagccaggcgcggggagagggaggacacggagcagggtaggaggtgctgcaggaagcaagtggcggcagcagcacgccaggtgggtgccagtttcacagcacatgtgccgcagccctggctccctgcagacacagggcccatgggagccgctcaccgctgctgggcacagaacggcctccaactgcagctcctaccagggcctccagccccaggccagagctcccaggtgctgcacagttaggagcacagtgggaaccagtgacaagtagggactggggcctaactccacgacctggcagagggaggtacggagtagctcggagactgctgtcccagtagacagcacaggtagtcggcttgatccttgcgcatgtaaacagatactgctaaagtcttgcgcctagacacagcncatgtgctctgtggtggccacgccccagccanacgcccat

SEQ ID NO: 435782 - DNA, 1207 bp, Homo Sapiens
  misc_feature (52)..(61): n is a, c, g, or t
  misc_feature (272)..(273): n is a, c, g, or t
  misc_feature (275)..(275): n is a, c, g, or t
  misc_feature (312)..(314): n is a, c, g, or t
  misc_feature (318)..(318): n is a, c, g, or t
  misc_feature (325)..(325): n is a, c, g, or t
  misc_feature (330)..(330): n is a, c, g, or t
cccctaagagctgtaaaattctctgaagggagggttttcccccaaattttgnnnnnnnnnnacagaagaagggtttccctcccccaaaagagttccccaagttaagcctttttcccccgcccccagggcgtgtgaaaaggggggggccccggggcttagctaataaattcgcgccccccccttttggggccccctttgttcccaaaaaaacttggggtacctgaaacctctgggccccctcggagggggattcttggggccgcgcgcccttnnanatttttttgtgatgtattattttaactatgttttttnnntaanatttatntttcntttacaaaagataatctttattcataatcacaggccacaggggtgagacctgaggtttgggttctgtggtgaaggagaacccctgtcctcctgtcccttgccctgggcctctgctggctgaggagggacaaggtgagggggcccccatggtgctcagacaaccagagcctccctggcagggcaggagtgtgggtgccacagagacaagccccttgcagagctgacctggagcccaccatccccatagcctgtgtgagcatgaagcgaggacccccgggtgggctgtgccctgggcttgtcactgatgccagtggaggctggcacctgcccctctcggcacctgagacagtgagggaaggtagctgctgccgtgaagaacaaagatgctctgagcacacacttgctggggctgagctgaggggcacacggaggcaggccctgcccgtggtctggtcagctgtccctgccgccgctacttttctggtctggggctgtagccttggtcaggttcccagcttccctcttgagaacgctgagcaaagtctgggagctctccaggatcttgaggtaggcggcctccgtctccgcgatggtccggtcgaactcgttgcgagaggcaatcttgcgtgccaggttctcgttgacgcgggccagcttctctgtcagctgcctcacctcattctgcagccgctgcttctcgtcctcctcctcctggatctgccggcacagctcctcccgcttctggcacagctcctctatgcacttgaccagctcgttgttgtagttctgcagcgccgcgccctgctgggtcatggtcaacgccgcccggggccccaccaccccaaccgccgcggaagcagcgctgtccgcgcctccc

SEQ ID NO: 435783 - DNA, 1182 bp, Homo Sapiens
  misc_feature (57)..(57): n is a, c, g, or t
  misc_feature (269)..(291): n is a, c, g, or t
  misc_feature (1132)..(1132): n is a, c, g, or t
  misc_feature (1136)..(1139): n is a, c, g, or t
gggtgcgtacgccgactggcagtgtaatatttctgtggggtgcgtagggcagtgaantaggcgatacacggatggactatgcgtgaggctcgcgcgtgattttgtccgtggcacggggggatgtcacaggttattacatccatcttgacttcatggccgcgggaggggcgcggcctgaattttcacgcggaggtgtggggggcggttagcctggacaatcggatgcacggggggttttcactgcaagggaccagtggccccgcggagtnnnnnnnnnnnnnnnnnnnnnnncccagtgcccattagccgcgagctgaaggaagaagggggagggaaccccccgggttgggccttccccccggggcgtggccacctgaagcccaggggaaggaaagccagctgggcccctcgtggggcgccggggcccagtgagggggaaggggggctttcttcccggaaagaacaaagatgctcctgggccccccactcgctggggtggagatgaggggcccacggagggcaggccctggcctgtgttctggtcagctgtccctgccgcgggtacttttttggtctggggctgtagccttggtcaggttcccagcttccctcttgagaacgttgagcaaagtctgggagctctccaggatctcattctgcagccgctggttctcgtcctcctcctcctggatgtgccggcacagctcctcccgcttctggcacagctcctctatgcctgggggccgggaggggcggcgctgtgggcccagggcaggagcgcggcggcggagggcgggcctccttccacccgaggaagccagagtcaggcaccacccccgagcgcccggcgcggggcctgcgagccagcgagggctcgggccacggacacccggcctccggcacggagggctctgctcagccgcgcgatgcccggagcgaggcgggtccaggggcaccccgctgcgagccgggaacccggccctgcggccctcccgacctccccgtcccggctgcgccgctcacacttgaccagctcgttgttgtagttctgcagcgccgcgccctgctgggtcatggtcaacgatcccgggaattccggaccggtaccagctgcgtgggtgcggggtttgtntttnnnncccgggtcggcccgcccccgggctaggcgcgtaaagtgggaaa

SEQ ID NO: 435784 - DNA, 747 bp, Homo Sapiens
tcttctcatagtctcttcttgtggaagctaaaagctcatcctgatccaacatcggtttgcttcagcttgtcagccagctggctctgctggttaatttcatgcatccttgtcatccagttgtcttgtagagactggagatctcctcatcgtacttctctttctcctctgtagagatgccagcaacaacaggagcaatattgtctatgatgggggtgttatcacaaggctccaggttcttctggtccttggcactgatctgttcatcctcaggcacagcttctccattcctccacctgtttagctccatctccagatgctggataacattcttcaaagtcttgtttttctctgttctctttttcatatttcttcttccattcttctgctgtcagttctaggttcacagagactgtattcttgatggtcttagctctctgtccgaacatcagtgtggacttggtctcagcctcattgaagacagaaggagaacagcaaatgacgatggtggttctgcagttcccacccaaagagtcctgaagaatccgagtcatcttgctgtcccggtatggcacatgtgtttttgtcccttctgccaaagcagagatcacgtttccaagagcagaccaagacttattgatatttttagcttcgtcaagaacagctccctcggcaccagttttgctgacgcggatgtaagtggccataacttggcatacgggaactcagtgatgtagtgcaataagtggg

SEQ ID NO: 435785 - DNA, 923 bp, Homo Sapiens
acatcagtgtggacttggtctcagcctcattgaagacagaaggagaacagcaaatgacgatggtggttctgcagttcccacccaaagagtcctgaagaatccgagtcatcttgctgtcccggtatggcacatgtgtttttgtcccttctgccaaagcagagatcacatttccaagagcagacaaagacttattgatatttttagcttcgtcaagaacagctccctcggcaccagttttgctgaccttttcgctcccagccaaatcaaccaaataaagtttcccactgagttttttttcagtctctacattctcttgtttaatatttatcaggaagatactgtgacttctagagctgtgttcattcatgtttgtcacagccacgtgtcggtttgctttgccttcatctattacatccatgacttcctcaggggctcgacacaaaaaccggctcagtgcacccctttacatacgggactctgtttttatcttcatgaacagccaagttggtcttggatacatcaagtaagtcccttattttgtccaagtagatctcaaaataggaaacctttatgtgaaactccaggttctcatccatggagtagatatggtcaaagatatcatgggcaattcgtgggatgatccccatgagctgggggtcatgcagcttcccctccatggtgtgggtttttcctgatgaagtctgcccatacgcaaaaatcgtcccgttataaccttcaaggacatctttgacaatttgcttcgcacatgcattgtaaacctgctcttgggtcgtgttgggaggtagcactctgtcgaagacatatggcttcccttgcccgatcaccacggtctcatcgcctttaaatttggggatgaatttgtccccgcggaggatctccgcttcgttgaggggccggaaaaa

SEQ ID NO: 435786 - DNA, 900 bp, Homo Sapiens
  misc_feature (604)..(604): n is a, c, g, or t
  misc_feature (795)..(795): n is a, c, g, or t
gcctttaggcaaatgttttaggcatctgactaaggagcccacccgagtatgagtaacagaagccaagatctgagctttctagagggcagggcctctttctagtcccccagcctcttcctttgcttgtgactgtttgtttcagacagaaaggatgttgtccgtaagttctcagccagtctccagtattaagtttgaaaacatgaggtggaggcttcctctcacattgatgtggtccctgggctggctagagccagtgagcaggtaaacagaagccagccctttctctaactcctggcctgttccaccacatattaagggactcttcaaaacctactccctcaaccttgctccaggaaggacaggatctggagtagaaagggggagcatcactgactttttcacaccctttgagccatcagtctttctttcgtccacacacttgaagtcctcctgcacccagctggactagtgacttcagagttcacaggcaggttcaccctgggatcctgcccagcaggtccaggtcacgctgattagtgtaagcaagagcctcccacaatccactgccagggagttcctgggtggattcgagtaacagattccntcctggcccaaaggccaggggtttttttcttcttcacagctttcaggcaagtattggatttacagacagtaactaggccccagaacctgtggagatacatttccctggtgctgcgcccacttgcctctgggggagtaattggaatggccttggttctgtttttaacattccggcattcccaggaagcccgncggccctgctcacgcagggattgggcacatagggccatgctggttgtaaaaccccccctccagggcttggccagggttgggaaggtggtctcggtcaagccgact

SEQ ID NO: 435787 - DNA, 1061 bp, Homo Sapiens
  misc_feature (69)..(80): n is a, c, g, or t
ggatagggttattttttaccagcccacccactttccttttaataaatttccccctggttccaattccannnnnnnnnnnnttggcaataatcccccaaaaccccattcccaatttattaaatatgttgcaagctcatagccacttagaagagggcaaatctagttgtgatgaagagttcctagagctctgggagcccaagatggaggttttccagtacctgcacatgtggctcaggaggatgctgcccaggggctaatgagttgggagagcaaccatgggaggtagaagtcagatggcccagctcagggagctatctctctcagcatctcagctttgagactctgccaccaccttttcccagcccaagctgctgcctaaaccaggcatgttgaagggtgagcagtggttgccatgaagccaagaccaagagattgctgagactcccactcccctccctcagactttaggcctgtgacaagccacactgtcctccagaacccatcgagctttaggcaaaatgttttaggcatctgactaaggagcccacccgagtatgagtaacagaagccaagatctgagctttctagagggcagggcctctttctagtcccccagcctcttcctgtgcttgtgactgtttgtttcagacagaaaggatgttgtccgtaagttctcagccagtctccagtattaagtttgaaaacatgaggtggaggcttcctctcacattgatgtggtccctgggctggctagagccagtgagcaggtaaacagaagccagccctttctctaactcctggcctgttccaccacatattaagggactcttcaaaacctactccctcaaccttgctccaggaaggacaggatctggagtagaaagggggagcatcactgactttttcacaccctttgagccatcagtctttctttcgtccacacacttgaagtcctcctgcacccagctggactagtgacttcagagttcacaggcaggttcaccctgggatcctgcccagcaggtcctcgtgccgaattcgccacccaggcctcgctactt

SEQ ID NO: 435788 - DNA, 428 bp, Homo Sapiens
tatgttaactgcttaatttatttagtctgatcaatggcccagttcaggcccaccactcctacacttgctggggacagccaggaaacaaccagccacacaatgctgaactgtgctgctgctgggagtccagggctcagccctagaagcaagcttgcaaacttcacacataagtacagtctatatagcaagtaaactctgaccagagatgacatctggtcccacaactcatcaggtctatgtacaatatttcacataccacccaatagataagataatattaacagcaaccactctcctttatcaattccccctgctccaatacaaccaccacacattgcattaataccccaaacccattcccaatttattaaatatggtgcaagctcatagacacttagaagaggcaaatctagttgtgatgaagagtt

SEQ ID NO: 435789 - DNA, 605 bp, Homo Sapiens
  misc_feature (382)..(390): n is a, c, g, or t
  misc_feature (488)..(539): n is a, c, g, or t
agaaaccaacccttgctggtccttactgtgttcctgcactacacttagggctttttcatgagttaacaaagagctgctgcttatctccattttacagatgagaaaactgaggcccagaaagactcagtgatttgcccggggtcacacagccagtgttggaaccagcatttacattcaggcctatgtgaactcaagttcagagcttttatttctccagcaggccaaggcacaaaaaattttaaaaacaacttgagtcccatcttcctgttggcatagtgtctggcagacatctttttgattcgttctgtccatctggaaacactgtggctgactctgtgttggcagctcccaggcccttggaggggaggttcaaaactcacannnnnnnnnaacttaagagaattctggcagagtacacataaaagttgccattttaaccatttttaaaatgttttatttatttaggagacagtctcgctcttgttcannnnnnnnnnnnnnnnnnnnnnnnnnnnnnnnnnnnnnnnnnnnnnnnnnnntgtgtttcaagtggttctcctgtcttcagcctcgcaagtagctgggattacaggtgtgtgccaaca

SEQ ID NO: 435790 - DNA, 1853 bp, Homo Sapiens
  misc_feature (1364)..(1383): n is a, c, g, or t
  misc_feature (1646)..(1646): n is a, c, g, or t
  misc_feature (1829)..(1829): n is a, c, g, or t
agcgggggagcgacccgggagaaggagggccaagatggcggaagcggaggagtctccaggagacccggggacagcatcgcccaggcccctgtttgcaggcctttcagatatatccatctcacaagacatccccgtagaaggagaaatcaccattcctatgagatctcgcatccgggagtttgacagctccacattaaatgaatctgttcgcaataccatcatgcgtgatctaaaagctgttgggaaaaaattcatgcatgttttgtacccaaggaaaagtaatactcttttgagagattgggatttgtggggccctttgatcctttgtgtgacactcgcattaatgctgcaaagagactctgcagatagtgaaaaagatggagggccccaatttgcagaggtgtttgtcattgtctggtttggtgcagttaccatcaccctcaactcaaaacttcttggagggaacatatctttttttcagagcctctgtgtgctgggttactgtatacttcccttgacagtagcaatgctgatttgccggctggtacttttggctgatccaggacctgtaaacttcatggttcggctttttgtggtgattgtgatgtttgcctggtctatagttgcctccacagctttccttgctgatagccagcctccaaacgcgcagagccctagcgtgtttatcctgttttcctgttttagctttgtcatcagttgggtgattgctcacctttactcctgcagtaaatcaggaatgggaaattagaaaccagtgaattgaaagcagcatgctgaagagagtgcaattcaccatggagctttgtctcgtggcccttattttgtgtaatttgtggaggtatttgataactgagtaggtgaggagattaaaagggagccattatagcactgtcaccccttagtttgaggaactgagtgtgttgaaaggctgttcttttctctcttaatgtcatttctttagaaaatacatgtgcatactacacacagtatataatgcctccttaaggcagtgatggagtcaccgtggtccatttgggtgacaaccagtgacttgggaagcacatagatacatcttacaagttgaatagagttgataactattttcagttttgagaataccagttcaggtgcagctcttaaacacattgccttatgactattagaatatgcctctcttttcataaataaaaatacatggtctatatccattttcttttatttctctctcttaagcttaaaaaggcaatgagagaggttaggagtgggttcatacacggagaatgagaaaacatgcattaaccaatattcagattttgatcaggggaaattctacacttgttgcnnnnnnnnnnnnnnnnnnnngcaaagggcctctaaagaatcagcctctttggtccctttgtgctgtcacctttttgccatgtttaacagcatcttggttggcactctagtcttaatcttgctccttaactttgaatatgcagtctaaaatgtcagtagtcaacatgtaattttcctttgaaattctgaatattccagtgctggaacttatccaaaaagaagacctcagaaacttagattggtagatctctagtgcatattatcatgtgggcaccttctcttanggtggaatgaggcagtctggatgcagcatagttaaaaggagctgtttaatattctctgtagtctggcctctttactaggaagtaaagctaaatcagaagcctgtatttaacccatgtgaacagggagggaatttagtggttctgatgggctggattactaagaacagcctaggataacttaanagccatgaccgttggggaatgggg

SEQ ID NO: 435791 - DNA, 429 bp, Homo Sapiens
ggagatggagtctcactcttgtcacccaggctggagtgcaggaaaggcagctgaccacattcaacacggattcaggaaaagccctcagcaaatgaggaagctcttccgcctgtaagtgcaccagtgcaaacccaacactgagccgggagagactgagcccatgttcaccgagactgggaataagattagcgagcgccggctcacctcgccagtgcagtgagaagccgaggcacagactgacaaggggaagcaaagccactgtcagacagaggacacgcgtgtgcacacggaaaccccacgagtccacagaaacaccgccatggccaaggcgggagtttagggcacaggattaaagcaccacacacaggtgacaaatgaaataaaaatacacagtcctcaatagcatatcgaacacctaggactagatct

SEQ ID NO: 435792 - DNA, 1287 bp, Homo Sapiens
  misc_feature (1044)..(1054): n is a, c, g, or t
tttgttggggcgtgtgtatgtgtatttggggggactgaagggtacgtggggcgaaacaaaaccggccatggcagcagcggaggaggaggacgggggccccgaagggccaaatcgcgagcggggcggggcgggcgcgaccttcgaatgtaatatatgtttggagactgctcgggaagctgtggtcagtgtgtgtggccacctgtactgttggccatgtcttcatcagtggctggagacacggccagaacggcaagagtgtccagtatgtaaagctgggatcagcagagagaaggttgtcccgctttatgggcgagggagccagaagccccaggatcccagattaaaaactccaccccgcccccagggccagagaccagctccggagagcagagggggattccagccatttggtgataccgggggcttccacttctcatttggtgttggtgcttttccctttggctttttcaccaccgtcttcaatgcccatgagcctttccgccggggtacaggtgtggatctgggacagggtcacccagcctccagctggcaggattccctcttcctgtttctcgccatcttcttctttttttggctgctcagtatttgagctatgtctgcttcctgcccaccttcagccagagaagaatcagtattgagggtccctgctgacccttccgtactcctggacccccttgacccctcctatttcttgttgggctaagggcccgcccctggaacattgttccaggaaggccctggggaagaaggaatccgaaacctgtgccctaaattgggggggaacctttccggctccgaaggtttaactttaataaccctgtgtttaattctcttcgccctgcgggaagggcgcgatccgctttcacaaaaactgtctttcttccctccccccaagatcctatgcctgtcccctggataccgtaggaattggaccttccaaaggtgcgcgctaagaattcccttttagaatctcttttccccgccttccccctttctaaagtggattttaaggcaaatcttttnnnnnnnnnnnagagatcggcaaacggggagttgctgacctcttataagtggtttccgtcccgcctctctgtacattcccctgttatcacccatttttgaccacgccaaagtggtgcaaagtccgcacgcacgcggcccacccgtgcatttatccggggtgtggggcgcccgtatgaaacaaaatgcctctctcgagagggcgccccaatactccataacgcggccacccaggcttcttctact

SEQ ID NO: 435793 - DNA, 1133 bp, Homo Sapiens
ttttatatttcaccttttttattgaatttgtattaaaggaggtagtgagggggcggaagcacttaagagtcagaatccatattagactctggggagtgaaaaattaaattaaatcagtaagatggggagtgggggaagagtcagagggaactttgcccacctttgaagatcaaatcaagaaatcagggaaagcaaagacttaggagaggagaaagacattctctcaatccatcctccttccccagggcagagaattaaacaacgttactgagtgagcctctgagcagaaggctctcccatctatgcacagacttcactcctcctccccaggccttcctggacaatgtccagggctggccttagccaacagaaatagaggggtcaagggggtccaggagtacggaagggtcagcagggaccctcaatactgattcttctctggctggaggtgggcaggaagcagacatagctcaaatactgagcagccaaaaaaagaagaagatggcgagaaacaggaagagggaatcctgccagctggaggctgggtgaccctgtcccagatccacacctgtaccccggcggaaaggctcatgggcattgaagacggtggtgaaaaagccaaagggaaaagcaccaacaccaaatgagaagtggaagcccccggtatcaccaaatggctggaatccccctctgctctccggagctggtctctggccctgggggcggggtggagtttttaatctgggatcctggggcttctggctccctcgcccataaagcgggacaaccttctctctgctgatcccagctttacatactggacactcttgccgttctggccgtgtctccagccactgatgaagacatggccaacagtacaggtggccacacacactgaccacagcttcccgagcagtctccaaacatatattacattcgaaggtcgcgcccgccccgccccgctcgcgatttggcccttcggggcccccgtcctcctcctccgctgctgccatggccggttttgtttcgccccacgtacccttcagtccccccaaatacacatacacacgccccaacaaaccagaaaccacctcctgcccacgatcgttgggcaggcttcaaggtttcctccc

SEQ ID NO: 435794 - DNA, 863 bp, Homo Sapiens
ctcggtaccctgctgggcgatccagacagagaaggctcacaggtcctggcctagctgctccagctcgttgaggaggaagtccatatcagcacaggtcagtgcagagttggccacaaccacacggaagaagttgccccgggtcccgtggggctggtagccaatcatcatggagccctccttcaccatgcgctccttgagcacgggggccacctttgacagcctttcgtggtaatctggactctcctgcttccctcgcaggctggggggtacgaaccagatacacacattgacaagctcaggctccatgactagctcaaacccttcccgcttcttcatttccttccaccaggtaccgggcaaggacaaaggcctggtcgatgcgccggctccagtgccttgatcgccctttgccttccacatgagccacagcttcagacagtccacacggcggccacagctgcaccaccttgtctcgccgtgtccagagccacatcgtagaacttgtcctgctggaaaaggtagctggcctgggacccatggcagcgcttgagcaggttcgaggtatcctggagaagaagtgcagagcattgcaggcctgctgcgaggagcttgtggggattccaggccacagagtcagccatccacatgcagccatagcccatgacgctggcacacatcagcaattgcctccagggggtcaaaggcccctagcacagtggtgccagaggtggcactgaccaggaacggcacagcaccctcagcctcggccataccaatctgcctctccagatcctcggggaccattttccctctctcatcagccttgaccactcggacactgtcggtgccaagtcccagaaacg

SEQ ID NO: 435795 - DNA, 1113 bp, Homo Sapiens
ttatgaacagagataaacggggtgtatttggtggaaaaatggtattaaaggggcgatttacggggatatagttattaacgtatatggatatctccgaggcgtataagggtgaaataggtgcacataatatcatattgtgggaaaatagataaggccgccaatttgttgtgtttgtggcacatcatgacgcatggatttaaagggggggcaggttgtaaatgaatgaggggaggggtctaggtcttaagatttttgattcaccaaaattgccagggaagttaaatggaggcccataattggcttccttgatccctacggtcaggaaggcatgctcttcacctccggcgctagggtattcatgcactgggcattcccgcaccaggcagtcttgcactggttattgctgaaccaggcagtcctgtgctgggcaggcctgcaccgggaagtcctgcactgggcagtcccacaccgggcagtcccgcattgggcattcctggaactgcaggattacctggcacaggcatcttttaatcccttttttccttgggcagggggatttttctcaatctctctcatatcttctagggtaactacatgaacaaaagtttctctcccattaagttttttacggtgtaagcgttcagacttacgtgcatcatcttcatttttaaacttgaaccaatgcctgtcctagaccttgcccattgttatcaacaagaacatgtacagcattttcatccactgggattccttctaggaactgaagaacatccatctttgtaatgctgaatggaatatttgttatgtgggcacagactttggcagagttgacatccccctctggatttagtatcatttccctctggtcatagctgaagttctgcagtctttttcgaatcatatctatcttttctagcatacctttcttagtaattggatgaacttgaataaagcgattgcccatgtactgtttatgacgacacagagcagccttatagtcagcctcatttctgaactctacaaagccttcgccagttgctttcccattgggtccataagctatataaatactatcttccacaatatccagctttttaaaaaaatcaatgacat

SEQ ID NO: 435796 - DNA, 491 bp, Homo Sapiens
  misc_feature (259)..(259): n is a, c, g, or t
ggtgactgtcatcctcaaactggattgcctcttctttcagccctgttcctcaaagaaaaacacaatcaggttgctttgatctggattcttcattactacatctgaaaagcttctcatctagaagtcctcgaccatgtctaaacattgaagatgatccagatattcatgaaaaaccatttttgagttctagtgctccacctataacaagtcttagtctcctaggaaattttgaggaatctgtcttgaactatcgtttcgntcctctcggcattgttgatggttttactgccgaggtaggggcaagtggtgctttctgccccacacatttgactcttccagttgaagtgtcattctacagtgtttcagatgacaatgctccctctccttatatgggtgtgattactttagagtcccttggtaaaaggggttatcggagtacctccttcaggaacaatacaagtggtatgtgttttatagcctacaattgcaat

SEQ ID NO: 435797 - DNA, 970 bp, Homo Sapiens
  misc_feature (16)..(16): n is a, c, g, or t
  misc_feature (28)..(28): n is a, c, g, or t
  misc_feature (120)..(120): n is a, c, g, or t
aacctggggggttttncccaattgccanccttgtcccaattgaaattggtttccaaccattaccaaaagggattaggacatggagttttcccagtctacatggaatatatggatttcatntcaggaatcctttcataaaaactggtccaggataacaggagagaatccactctcctgattgttaatttggtacactccattctatgctaatttttacttgcaaacttgggtactgagtaaatactttaaatcatcactccttatcaacatcttggtgaaaactgagggtttgttggtgattcagtgtaagatttgagttcatatgcagcaccgctatcaacctccattgactttctagagaacaggagccgtacgtctctatggaggtagatctttccagatttagaactctggaacctcagatgtatgaggtagcgtaataaccgttcttctgtgtgtcggatgttctctttattaacacttctcttcacttcttgtttaacaggtacagaaaaagttctttgtcgtaggaatgtctgatgattggctggcatatctcgtaaatcatatatcacaacaaacatcttcaccacagtcttattaggattaaataaggtcacttgtattgttcctgaaggaggtactcgataaccccttttaccaagggactctaaagtaatcacacccatataaggagagggagcattgtcatctgaaacactgtagaatgacacttcaactggaagagtcaaatgtgtggggcagaaagcaccacttgcccctacctcggcagtaaaaccatcaacaatgccgagaggatcgaaacgatagttcaagacagattccttctagatgagaagcttttcagatgtagtaatgaagaatccagatcaaagcaacctgattgtgtttttctttgaggaacagggcttgaaagaagaggcaatccagtttgaggatgaaaggctct

SEQ ID NO: 435798 - DNA, 997 bp, Homo Sapiens
tggttaggaggctgaaagaaaaaacacactgttattttggggcagtggggacacaggccccgtggacctgtcctgcctggcccccaaggccatacttaccccccagaaggcgggccatggggtaactggaagctgggggccagcagtttgcacaggaggcctgtctgagccccacccgccagacctgttgtgagcagctcctgtcactgaggctggctgaggtgtccggggtggggccaaagtagccccttggcttcgctgctttgggggacagttgcacaaattggacgagcggccccagctctctggctgccatcttgtgctggccgagtagacgggaggggccaatccgtgccaacctctctggctggcagggtggggcagcaggactctggctctggtgaggggcgtctcccactgctgccattttgggggacaccctgggtttgaacctgaaagccccagctcttctgccttgccacgtgaatgtattctttgggccacaagcccccggctcacccctgcctgagctgcctcacccctgtgagcggcgggggtggatgattgctccagaggctgcagagagaaggctgagctgtttctccagtgaagggggcaggaggaggtgcctcaaaggcaaggagtgggtggctttgggcttagggttgcagtagaggggctgccgcccggggccccaacctgtagccagctcgtaagatgtggaccacccagctctgcacctgacccttccgctgaccaaatgggagaggagcaggtggccttccgggtctgatatgatgcgctttttaccgttgggtaaggttggggtgaagagaagtgtgcggctcctgggtcagaggaggctgccccttctattgctcacccacttcttattcccggtcccctacttgggttcgtctccgcccattttgggttttgtcacagttttgtcttttgggtttctcatccagctcctcccattgacctaagttcagag

SEQ ID NO: 435799 - DNA, 436 bp, Homo Sapiens
  misc_feature (31)..(31): n is a, c, g, or t
aggtctgtagtaaacgagcccactgttctgncatgccagtgaattctccagtaacagcatcaaagccaacatggatggtgtgctcaaaatcagatggaggagaaatttctggccgttccttttctttctttttacttcctttctctgtgcctgagaatatggagatgattttatgcctgggctttttctcttctggaacagagggcaaaggtttcaaactgtgattggctgacaaagggtctttgcctccagtgctaaagatggtgctgctcattcgcacaggaggtgctggaggcttatcttccagttctccgttatcagacatgattcagaattatgaaatggccccgggcaaggcaaggtccccgccccagcgaggcgcctcggtcagagctcccggcgggctgcggagccgccccgggctagcgcgcggtgc

SEQ ID NO: 435800 - DNA, 814 bp, Homo Sapiens
  misc_feature (735)..(771): n is a, c, g, or t
aacgactccataaggcgaagggtcccggggcccacctcaagtaatttgttagaaatacaagtggatttttagagtttattaagcaggggagtggaggggagatgtggcacaaatagaagtatgtaacattcaaacaacagcatctaggatttttgaaaaaactttcggttacagttacacaaagggtcacttcctccccagcgacacatgggcctctcaaaggagaggagggagtaagtcccacggtagggccagtggttgctccctgggttttggaatcatttctgcggagctttcaaggccagaccctgggcttagggtcgagacttcatagcagtgacagccagacccagcaagatggctgcgaccgtgaaaccctgggcggcgatccgggtgcgcatcatgagctgagagcgctggctgttgccccggtggaaggagtagaggccgtaggtgagggcggccgccgtggccaggcaacctatgggtaccaccgggttctcgcgggtcttgcgaacgaacttttccttgaaactctctggattcctgtaaacagtggggctcagcccctcaatgactggaggcttcgatggttcaaaggggacctccggaatcacagggccgggagtcgccatgtccgggccacagcagcaggagaaaatcgggactccgacctcagcctcccggtgaacgtccgctctcgacgaattcgagctcggccgatttggcctgatnnnnnnnnnnnnnnnnnnnnnnnnnnnnnnnnnnnnncgccgccaccgcgaatacgcgcagcgccctatagtgattatca

SEQ ID NO: 435801 - DNA, 1376 bp, Homo Sapiens
  misc_feature (1234)..(1234): n is a, c, g, or t
aggaacacctgtcttctgctcggagtgtctatccagaaagcctgggtggagtacgtcaaaattgatctcgccacttggaatttccagttcctaccccaggtgaacggccacccagatcccttcgaggagatcatcctgttctccctccctcctgccttagactgggactcagtacatgttccaggtccccatgctatgaccatccaagagttggtggactatgttaatgccaggcaaaagcaaggaatctatgaggaatatgaagacattcgtcgtgagaaccctgttggcactttccactgttccatgtctccaggaaacctagagaaaaaccgttatggggatgtaccctgcctggaccaaactagagtgaagctaacaaagcgaagtggccatactcagacagattacatcaatgccagtttcatggatggctacaagcagaagaatgcttacattggcacacaaggtcctttggagaatacctatcgtgatttctggctcatggtatgggagcaaaaagtcttggtgattgtcatgaccacccgctttgaggaaggcggcaggagaaagtgtggccagtactggcctttagaacacgactctcggatccgatttggtttcccccccgggtaccaaaccacgcgtggacaacatgcatcattcaaagaacgcttcgcttaaaatcttcaccacctcgggaaccgctcttactcctcacccccacccactctcccgcccttcacattccacctacatttcgtcaatctggacattacgaccccctatctgatcttatacaatcatacccactttcccgctaatttatcccctaacttgaatggcgtatcttttcagttcaccttccagtatacaacactttccgccctccccccctccagtctcttcacccacccaactgactatgacctctctctctccgcttcttcgatctattcttctctcaaggatactttatactcctacctatcttgattattccataccaacgctcgacaccattacgtattcccgactgtctcctcccggatcggaaagtttctcaccgaagtccctcccctccctatctactaacgagtagcgctaggcatttatctccgacctatatcctacgatcagtccagctaagggtagccacttctacgtctacccaccctactcctctattccccctcccacactcgaacaccccgccctacgtcgcactccaccntccatacctactccacgaattcatccctaatgatatatctacgctgcccaccaatttactcatactgcctacgtgtcaccgccgctactcactctcatcgaagtcacatccctgtatgcatcccctacttggtatttatgtt

SEQ ID NO: 435802 - DNA, 261 bp, Homo Sapiens
  misc_feature (115)..(194): n is a, c, g, or t
  misc_feature (214)..(214): n is a, c, g, or t
  misc_feature (222)..(222): n is a, c, g, or t
ggcatcagatttcctgtctttgtggggatgatggacccgagtaaagatgcccattcggggtcaaaggcagagccgcttctgcagcttctcaaagcgttgtttgttttttttctgnnnnnnnnnnnnnnnnnnnnnnnnnnnnnnnnnnnnnnnnnnnnnnnnnnnnnnnnnnnnnnnnnnnnnnnnnnnnnnnnaagcgattctggtgcctcancctccctnagtagctgggactacaggcgtgcgccacagggtggttta

SEQ ID NO: 435803 - DNA, 802 bp, Homo Sapiens
  misc_feature (627)..(685): n is a, c, g, or t
tagggtcacgtgctgaagggacatgtgagaagtgaatagaaggcaagaggggagccttcggtcatgcccgcataaggcccgcttgaggccccttggtcaagcggtaacgccagtgtctgggaaggcacccgttacttagcagatcgggaaagggagtgtcctttccttggaggagtcagggaacgctctgctccagcagcttcttgtgggaggctggatgttacccaggcctgcctgcagtcatccggaggcctgaacccctccctgtggtgcttcaatggtcacgttccttgtccactttcatgctccttccgtactcctggttcctctttgaagttcgtagtagatagcggtagaagaaatagtgaaagtcttaaagtctttgatcttataagttcatagaagaaaacgctgatgcctgccgccttctctctctgcttcagctacctgacggacagcgtgaagccccccgggctgctctcactgggcctggcaaggaagtccccacgctgacctctggataggaagagcttctccgcctccaccctgctgatgttggggtgaaaccaccttcaaaaggtgcccagaggccacacgcggtggctcacacctgtaatcccagcagcnnnnnnnnnnnnnnnnnnnnnnnnnnnnnnnnnnnnnnnnnnnnnnnnnnnnnnnnnnntgtcggggccgtagacgcttctcctggggtccaggattctgggccgccgtgcgccgggctcacctgcacgagggtctcaccgcgccgctcgccggcgctcggggtgcgcactccgct

SEQ ID NO: 435804 - DNA, 458 bp, Homo Sapiens
  misc_feature (13)..(13): n is a, c, g, or t
  misc_feature (46)..(46): n is a, c, g, or t
tgcccagttgccnaccattgatgtcagatacccttcccagccccanagctaggaaccaggcctgtctttgtatcccagtggctggcacacgttggatcctcagaaagccccctttgcctgcctgctccaacaatggcttgaagacaaatattacaccaactgggcagggcgctgtgagggccaagatggctggtcctgagcactgggccacagccagcccaggcccttccgggacacatggcccacaaagctgcctttcccaggtaatggggagcaagggggagacagaagtcagggaaagtttccatgaaatcttacaactcaccaaggctgttggattcgcatctgagggacgcttgggctcagcctattaaacaggaggctgggtcctggccctgactccgtccaaggcctcctgccaccaccgcccaccctaggaagcactttagaatcttcac

SEQ ID NO: 435805 - DNA, 647 bp, Homo Sapiens
tgcctggggcaataactcaatggggcaatgtggtcagggaaattccacaggtcctattactaaaccaaagaaagtgagtggcttagatggcatagctattcagcagatttcggctggaacatcacatagtctggcatggactgctcttcctagggacagacaagttgttgcatggcaccgaccttattgtgtagatcttgaagagagtaccttctcacacctgcgttcttttcttgagagatactgtgataaaataaacagtgagattcccccactccctttcccttcatcaagagaacaccacagttttctcaagctgtgcctgaagctactttcaaatcaccttgctcttgcacttgcgggaggggtagctaccagcattctcgggaggcaggcaggtccacttcgaaatttgctcttcagactgatggactcaactgtcccagatgaaatccaagaggtggtaattgaaactttatcagtgggagcaaccatgctgttacctccattacgagaacggatggaattacttcattctcttttacctcaaggacctgatagatgggaaagcttatctaaaggacagagaatgcaactggatattcatcctgacaagtttgcaagatcatacccacgtagcctcccta

SEQ ID NO: 435806 - DNA, 516 bp, Homo Sapiens
  misc_feature (153)..(220): n is a, c, g, or t
  misc_feature (386)..(386): n is a, c, g, or t
  misc_feature (389)..(389): n is a, c, g, or t
  misc_feature (422)..(422): n is a, c, g, or t
  misc_feature (478)..(478): n is a, c, g, or t
cctttttaatcaggaggggagaacccccccgttttctttgtccatttctgagtagctcttttgccaacacacaaaaccccccaaaattctttgctgaaaatataagccaccaattcgattttttcattgaagagaaagtgtgtgatagtcatnnnnnnnnnnnnnnnnnnnnnnnnnnnnnnnnnnnnnnnnnnnnnnnnnnnnnnnnnnnnnnnnnnnncgccgctgcggcatctgctctgctgtctaaagctcagtcgaggcttctgaggatgcttgaagagacgttgtcaggaggtctccgcgcggaatcattaggtagctgaggcaggtgcactgaatgcggttttgttggttctgtgtcttctttcggagaggggcagtancancagtgactaattggtcggctcccccaggtcagncggggcgcagtgtctggcaggccaggcatcggaggctaggcacagcatccggtggncctggagctgggtggggttggcacgatgcggcaagagg

SEQ ID NO: 435807 - DNA, 1780 bp, Homo Sapiens
  misc_feature (1170)..(1170): n is a, c, g, or t
  misc_feature (1175)..(1175): n is a, c, g, or t
  misc_feature (1181)..(1181): n is a, c, g, or t
  misc_feature (1186)..(1186): n is a, c, g, or t
  misc_feature (1193)..(1193): n is a, c, g, or t
  misc_feature (1197)..(1197): n is a, c, g, or t
  misc_feature (1199)..(1199): n is a, c, g, or t
  misc_feature (1203)..(1203): n is a, c, g, or t
  misc_feature (1255)..(1255): n is a, c, g, or t
  misc_feature (1304)..(1304): n is a, c, g, or t
  misc_feature (1677)..(1677): n is a, c, g, or t
  misc_feature (1696)..(1696): n is a, c, g, or t
cttggttgcagctgttttatttccagcatgttcccaacctggtgaccctccacagtccagcagtagagagatgggtaaggggttagatcggcccacacctccacctgtccctaaggttacctcagttgctgaaagctaaaaccttgcgcgcaagggcgaccttccccaggagggaggagagacgctggaagagcagccaagcctccaagccagggccggccgggatcagcagaggtgcaaagtcccactcagacggacccagcccttcccctcccaacactcatcccttccctgctgggggccggggctggggctgggctcagtggcccaggaggcgcagcatctcctgaggatccaccagcttctccctgggcttccccgtgccctggccccgggccacctcctcgggcatccagcttctcccagtctgagaaagagactggccggacccctcggctgctgagcagggcctggatggctgcgtagccaggcctggggccagaggggagcaacccagccttcaggtcctgcagcagcatctggccggtgaggaagctgtcagtcatggttgtggctatgacacctgtaggtcctctcttcacccagccgctgcagtagaggcctggcacatccataacccggccctccacattggggatgaccccaagcttggagtcaaagggcacgcttgggtcgacagggcggctcttatacccaatgctgctgagcaccagcccacaagggaggtcttccatgtctcccgtgggcactgcacgggtggcctcatcgacaccctccagtctagtgactgctaggcggacacctgctgcccgccgcccatctggtgagggcagcacctgctgggggcttcggaaaaagcggaggccccaggcacgggaggccgatgcctggcgggcagcttccgccggccctggcttctctgtggccgttcgaagcagcagttccgtcagccgcttcctcgggcgggggaccttaatggtgaaggccacttgcaggggtgcacgccggcccactagccacactgtcttcactcgactctgcctcagtacacccagggctgccttcgtgatgtccgttctctccaggtgctcaggtggggtcagtaggatgcgggccacgtccagagccacgttcccctgccccagaatnacggntgtgtnacagntaaggtntggntncagntcctggttctcaggaagcccgttgtaccagcccacgaaggcccgggcggagnacacacctggcagctcttcaccaggaatttccagggcccgatggtcctntgccccgtagctcagcaccacagcgtggtaggcctcccgcagctccggcaccgtcacgtccctgcccacctccacgttgccccagaaggcacagcggccagaatgggccgtctgggtaaatgtgttgatgacattcttcacctcggggtgatcaggcgccacaccaaagcgcaccaggccaaagggcacaggctgtttctcgtagatgtccacgtgggcctgggggtgctgctttagcaggtgttgggccgtgtagaagccagctgggccactgcccaccacacagatctggggggtcttctcctgtgtggagaaatggtggcagaagctcggggtgctcccggcgggaggcagccgggtccgaggccacgcngaccagccccaccagcgcnagcagcgcgaagccatggctgggaacagcaacctgcaagtggatctgttcctagctatgtccgcaggcaagcccgctcctgccc

SEQ ID NO: 435808 - DNA, 840 bp, Homo Sapiens
cgggggacctccttgatcttgtcctggagacccaagaaatccacaggatccaaaatgggccgggctcccggtaactgaatcatctcccgaagctccttaatggtgaaggccacttgcaggggtccacgccggcccactagccacactgtcttcactcgactctgcctcagtacacccagggctgccttcgtgatgtccgttctctccaggtgctcaggtggggtcagtaggatgcgggccacgtccagagccacgttcccctgccccagaatcacggctgtgtcacagctcaggtctggctccagctcctggttctcaggaagcccgttgtaccagcccacgaaggcccgggcggagcacacacctggcagctcctcaccaggaatttccagggcccgatggtcctctgccccgtagctcagcaccacagcgtggtaggcctcccgcagctccggcaccgtcacgtccctgcccacctccacgttgccccagaaggcacagcggccagaatgggccgtctgggtaaatgtgttgatgacattcttcacctcggggtgatcaggcgccacaccaaagcgcaccaggccaaagggcacaggctgtttctcgtagatgtccacgtgggcctgggggtgctttagcaggtgttgggccgtgtagaagccagctgggccactgcccaccacacagatctggggggtcttctcctgtgtggagaaatggtggcagaagctcggggtgctcccggcgggaggcagccgggtccgaggccacgccgaccagccccaccagagccagcagcgcgaagccatggctgggaacagcaacctgcaagtggat

SEQ ID NO: 435809 - DNA, 1723 bp, Homo Sapiens
  misc_feature (281)..(281): n is a, c, g, or t
  misc_feature (1201)..(1201): n is a, c, g, or t
ggtccggaattcccgggattgagcccccagatacttatgaagaagatggtggtgtgtacttctcggaagggcctgagcctcccacagcctctgttggcccccctggcctactgcctggggatgtctgtacccaggacgacctcccttctacagatgagagtggcaatgggcttcccaaaaccaaagaggcagcccctgcagttggagaggaggatgatgactaccaggcgtactatctgaatgcccaggatggggctgggggcgaggaagagaaggccgangggcggggctgggggaggagcacgacctgtttgctgggctgaagccactggaacaggagagtcgcatggaggtactgtttgcctgtgctgaggccctgcatgcgcatggctatagcagtgaggcctcccgtctcactgtggagcttgcccaggatctgctagccaacccacccgacctcaaggtagagccgccccctgccaagggcaagaagaacaaggtatccacgagccgtcagacctgggtggctaccaacaccctgagcaaggcggccttcctgttgacagtgctaagtgagcgtccagagcaccacaacctggccttccgagttggcatgtttgccttggagctacagaggcctccagcttctaccaagggcttggaggtgaagctggcataccaggagtctgaggtggctgccctgctcaagaagatccctctgggtccagtgagatgagtaccatgcggtgccgggcagaggaacttcgggaggggacactctgtgactatcggcctgtgttgcctctcatgctggccagtttcatctttgacgttctctgtgctccaggttcccggcccccaagtcgcaactggaacagcgagacacctggggatgaggagcttggatttgaagcagcagttgctgccttgggcatgaagacaacagtgagcgaggcagaacatcccctcttatgtgaaggcacacgtcgggagaagggtgacctggcattagcactaatgatcacttacaaggacgaccaggccaagcttaagaagatcttagacaaactcttggaccgagagagccagacacataagccacagacgctgagttctttctactcatctagccgcccaaccacagccagccagaggtcttcctttcaaagcacgggggcccattctgccccaggggccctgncaaccactgacctcaggctctgcagggcctgttcaaccagggagtgtgggcaggggctgggccaggccccactgagggtttcacagaggaggatgtgcctgagatttccccacatttcccctgtgagggtcttccatctgaggcagctttgaccccaaggccagaagggaaggttcctagccgcttggcacttggcaggtcgtggaggctataatggacggggatgggggtccccaggacggcctaagaagaagcacacaggcatggccagcattgacagcagtgcccctgaaacaacatcggatagttcccccaccttaagccggagaccacttcgaggcgggctgggcccccacctcctggggtcgaggtcaggacagtgacagcattagcagctctttcttcggactccctgggctcctcatcctccagttggaagtcgccgggccaagtgccagtgtaggagcccgggcgaagactgttgaagttggcaggtcaagggcgccgcccagaatatgcccc

SEQ ID NO: 435810 - DNA, 1163 bp, Homo Sapiens
  misc_feature (541)..(541): n is a, c, g, or t
gcggccgcggcgagggccccggccagcccgcctgagatgatgtgggactgcgggttgtaggtccggtgggggttgacctgctcctgcaggaactcataggtgatgaagtggatggactggaaggggatgttcatggtcagctgcgtggtgtagctccggtagaaggcccccaacccctcggtcctccacaccgtccggatgcagctgattgctgaccggtgctgcgagttgtacatctgcaagcgctgcttcaccactgtggttggaaccgcggggcaggccagacggacagccagtgggcagtgggttggatgtggccccaccccaggtcggaatgaagccaagccataaagagaaacaagccagttagacaccggaaacaggcgagagccagcacacacagccctagtctgagcagccgcggagggccagctcccggcagtcctaggttaaaatccatttttatctccaggactcacgcctggaaggtggctatttccgtctctcctgcctgaatcttgctgaaggcagccccccgaanccaggccagccacttcagactagagtcgctgatctgtttcccagatcctggctacccctggtaggaaccctcaggacccaccacaaaaagctgaatcctgtcccctgtcccctctgccctcctccttccccaacacatctactggaagcgtgcccccttgtgtattctcaggggtttgtgcctctaatggtaattctagcttctgtgacacagtgcgtttggaacagacactagaattatgtctgcccaagttcaatgacattctaagtggagttcacaggacaagaggcaaatgagactaactgtggtaccttaggctcagggttttaatggcctcatgtattgccaaataaatacatacaatgtgctttacttttaaacaaataaagactgtaaaccaatagttatgacaaggagaaagagagagtttgagcctcacttttttctactttaaaaaagataaacaaaacccttgcttggttacacgaagttaactacctgtttactgactgggtccctgaatgaactgtcataaaaagaagcccaagatatataatatgtaagcgaatgtttatttgggcatttttaggtttttcattgaactacttcctagaagggtttc

SEQ ID NO: 435811 - DNA, 909 bp, Homo Sapiens
cgaggccccggcagcccgcctgagatgatgtgggactcgggtttaggtccggtggggcttgacctgctcctgcaaggaactcataggtgatgaagtggatggactggaaggggatgttcatggtcagctgcgtggtgtagctccggtagaaggcccccaacccctcggtcctccacaccgtccggatgcagctgattgctgaccggtgctgcgagttgtacatctgcaagcgctgcttcaccacttctgctggattcattaccgcatcgtggagcagggtggccatactcccagctatcccgttggctaggtggctgtttccttggtggtggaaaacgtcatttaaagtccttttcatgttttcatagcaggcaaaatacatggcatgggccggccctgcacccatgatcatgacgttgacgcctcgcaagggcctccagaagccttcggtccgcatgattttcttgagggctccgtagatacttgtgtactgggctttgggatctggactcaaactctgcattcgtgtcttcaccgagtccaccgggtacatgaccgagtgctccaggatcccggccatcgctcctgctgtcatgtgggtggacacggaggcgctagtcggcaggttctcgtagtcctccgacccggtggcgtccttgccgccgccgccatctcggctgtccccatccatcctccgcgccaccgcctggctgcccacgctcccgctgcgcagctccatccgccagctcggcggggcgcaggaggctgcaggaggtgggcagggagggggaggggcgcaaaacttcacttcttaaagtgggagccacctccccggggccgcggcgcctgacgccatggcgggctggggtggagcgcagcggccagagacatcccgggaattccggaccc

SEQ ID NO: 435812 - DNA, 1377 bp, Homo Sapiens
ggctgcgcagtcggtgccatcttctacgcccctgggagcgttgtggctgctgtttccttcggctttcctcctcctgctccaccatgttgagccgacggcatggccgcctctggcccacggtctgcggggtggaggagctactgcgccgccgcgcgggagcgggaggcagcactgcggaaggcgcggagggagcagcagctggtcagcaagaggctgctgagaaacgacgcccctagaggaatgctggagagggatgtgtggcttgcgatcctcggggaaaccgatggtgcagcatgttcctgctggcaagcccagcgggggacagatgtgaaaaggacgagagagggggctctggtcagccttcgtcgaggcttgcagcaccctgaaacacagcaaaccttcatccggctggagggcagcatgcggaccctggtcgggctcctgaccagcaaccaggccctgctgcagcttgaggcggctcggtgcctgcatgagctctctcactccgagcagtccactgttgctgaggcctgcctgccagccacttcttacctcctcacctacctctccagtcacagctcagacttcatagagctgtgtctgtatacactgggtaacctgatcgtggagagtgaggctgtgagaaggcagctcctgccacagggcattgttccagccttggctgcctgcatccagtccccccatgtggctgtgctggaagctctcggatatgccttgtcccagcttctacaggctgaggaagctccagagaagatcattccctccatcttggcctccactctccctcagcacatgctacaaatgttgcaacctggcccaaagctcaaccctggggtcgctgtggagtttgcctggtgccttcattacatcatctgcagccaggtcagcaatcctctgctcattggccatggggctctgtctactctggggttgctgctgttggacttggctggggctgtccagaaaaccgaggatgcaggactggagctgctggcatgccccgtgcttcgatgtctaagcaacctgctaactgaggcagcagtggagactgtgggagggcaaatgcagctcagagatgagcgtgttgtggcaaccttatttatccttctgcagttcttttttccaggaaacagcccagtctgctccctgagggcctttgggctccttcaaaacctcaactgcaaaacagtcctagtttctgtagctccgttgtctccctggatctgatggacctctcttacagcttgttgcagtatctaccgtggtgagcggtaatgggtggtcacagtcctggccaatgttggcgaacaagggctggctaatgagccagggtttgggccaggcccggtttcggcc

SEQ ID NO: 435813 - DNA, 1109 bp, Homo Sapiens
  misc_feature (987)..(987): n is a, c, g, or t
ggtccggaattcttgggattgtttccttcggctttcctcctcctgctccaccatgtggagccgacggcagggccgcctcaggcccacggtctgcggggtggaggagctacggcgccgccggcgggagcgggagcactgcggaaggcgcggagggagcagcagctggtcagcaagaggctgctgagaaacgacgccccagaggaagctggagagggatgtgtggctgcgatcctcggggaaaccgaggtgcagcagttcctgcggcaagcccagcgggggacagaggaaaaggagagagagggggctctggtcagccttcgtcgaggcttgcagcaccctgaaacacagcaaaccttcatccggctggagggcagcatgcggaccctggttgggctcctgaccagcaaccaggccctgctgcagcttgaggcggctcggtgcctgcatgagctctctcactccgagcagtccactgttgctgaggcctgcctgccagccacttcttacctcctcacctacctctccagtcacagctcagacttcatagtaagccctgtcccttcctatcttgttcttggtttagattttaaaattgtgcttttgggaccagtttgagctggcaggtaggaggaagaaaacatgtttgcccttatgcctaccgccatgggtacacccatcatctccccaccctcttgtggagccgcaagggtagctggctccagcgtccccatcacctcccctccccatactccccacacggcagcctgggcttggaacaggcccaggccccgtgcttttggtggcccggtccccaggagctgggcccttgatcccactggggttgaatggcgtcatgggaagcgtgccggtagtgttaaatgcgatcgccccggacacggggggcccctgggttcagaaccttggtagggctggattgacaggccacgcccaagcagaggaaccgactgatgattcctccggcatgtnctagtgtagcctcgcttagtcaccccctaactcgctacctctcccaccgatacatacgtgcccccgcactgtctgggatcggccctgcgacccctattagcagaagtccgcatccccgcgcg

SEQ ID NO: 435814 - DNA, 1347 bp, Homo Sapiens
  misc_feature (1301)..(1301): n is a, c, g, or t
tcagattcaacagcccccagcagcagccactgtggcctcgcaggcggtgcttccaaggctgtgaggcatcacgaagctcccggaggctttggccacttgcctatggaggcgcctaggggaggtggggaggggacctaagcccccacttttgtctacccagatgctgccttcatttagatgtatcctgttgttcagaagcccccactggccccaaccgcacctgccccggctcatgcctccctgcgtctgagagggcagtggtcacaggctgtgggctctcgcatctttgaaatgatttattgttcacttttgcacacgcgtgctgaggacagggcaggtccagcctggggcctgctccccactgcagcatttccaggcccccagagtgggccgaagggggacatgggcgtgtctttccacattaagtagcaggagattccctgagtaaaaggcattttcttaagtaggacgtgtccaggctccagcagcagtcctgggggtgggggttgtgggccttcaggccagggcactgcccatgacttcggagaagccacctggtgttccaggtgctgctggctgaggctcctgcagctcaggctgggcctctttccaggccagagacttctccaatttggttttaaaaagcaatccgtgacctgggcagtctgcagtctctttggaggctcgcttcttgcagcagccgcggcacaggctgaacacacatctgttgccctgggcacaggaaatctcgggagcctgtggccagcaccactcccggggccaggctggccagcaggggagcagccccactggggaagcctctgccagatgcccacggcctggatgcagccctgggaactgctcccaagccagatgcctctccctcaccccaacccacccagactctcttcccctccaggcctgggcaggggcttggctggaagcaaggggccgtcctgaggcatccatgccaccttgagccacgttgcaaacccagctgggcgggcaccagacctgccaccccaagcagtgcagagaccaccctgcccacccccaaagctgaagccttggtggcttgcagccggaacccactcaccttttgggtttccacactggtcacactttgcatattttggcttcagagaggggtcgaaggtctttgtgggggttcctcagctgcttcttttgcttgttcttggacaggacctccgtgccaccctcctcttcctccagggcccgcttgctgcgcgcacctgccttctccttgctccctccctgggcccgggcggatgtagggctgnagatcagtggaagggcagtcgcggtgggcttgctcctctgcctgga

SEQ ID NO: 435815 - DNA, 2088 bp, Homo Sapiens
  misc_feature (153)..(153): n is a, c, g, or t
  misc_feature (224)..(228): n is a, c, g, or t
gttaaattggcaagggtttaaaaccctgggggcttaatttggaaaaatttaaattacggacttccccctatttaggggaaggaccccggccagaattctacccactttttggtccaaaggaaaagcttgggtttcaggaaaaccagcttatgngccaatgtgcccattttcaataaccttctttccttccgcacccggacaataggatgcctcggagttttttnnnnnttttttccatcttgaaaatgatttattgttcacttttgcacacgcgtgctgaggacagggcaggtccagcctggggcctgctccccactgcagcatttccaggcccccagagtgggccgaagggggacatgggcgtgtctttccacattaagtagcaggagattccctgagtaaaaggcattttcttaagtaggacgtgtccaggctccagcagcagtcctgggggtgggggttgtgggccttcaggccagggcactgcccatgacttcggagaagccacctggtgttccaggtgctgctggctgaggctcctgcagctcaggctgggcctctttccaggccagagacttctccaatttggttttaaaaagcaatccgtgacctgggcagtctgcagtctctttggaggctcgcttcttgcagcagccgcggcacaggctgaacacacatctgttgccctttgggtttccacactggtcacactttgcatattttggcttcagagaggggtcgaaggtcttgtgggggttcctcagctgcttcttttgcttgttcttggacaggacctccgtgccaccctcctcttcctccagggcccgcttgctgcgcgcacctgccttctccttgctcccctccctgggccccggccggatgtagggctggcagatccagtggaagggcaagtcgccggtgggcttcgctccctcctgcctggatatctcctcctgacaccgcagcttcagctcctggctcacagcagcgatgccctccagggtcttcaccttggccagctcctctcgcagctcctggtgcacctgcagcgtgtggtgccacagcttgaagaggtgggccccggacgtaggacagggggcaggggtgctcccgcacgatgtccagatactcctcggccagctcccacacggcagggctccggccctcgaacagggcggggttgtgcaggttgccctctgcgctcatgacgccctgcacacccgtgtcccggaggcagcgctccacgtcctgcaggcactggatgttcccgttagcaaacacagggatggccacagccttccgcacagccttgatatgctcccaggacgctgcacccgacaggggccccttctgctccttggtgcgtccgtgcaccgtcagcaactggcagccggccttctccagcatctgggcgtacctcacggtcttgtcaatctccgggaagacacggattttgcacgtgacaggaacagagagtttctcgtgggccagcaaaatcattctttggagcaggtcccactcgtcctgcagaaaggcgccatagtgacctctcttggctatcatctgtgggcagcccaagttcaggtcaatggcgtcacagtaatcctgagccaggagagccgcctgaacaaacacctccgggtcattggcacagaactgcacgatgaggggccggtcctcggggcacacctcgcagtacaggttctccttccggtagttggcgtcgcggacaaagacctgggcatgcagcatgggcgtgtagcagagctgtgccccgtggcgccggctcagcagcctccaggccagctcgctctggtccaccatgggggccacgacgtggcgggcccctcgcagggtgcggctccagaactcgaagccctgcagctttggcatcgtctccaggcgcgcgagggccccgccgtgtccgccgcgcgcctttggctccgagggcgccgggtgccggtgtcccgggcccgcccctctccggcctcgccgccgcccggggcccctgcagctcccggggcgccgcgaacgcccgcaccgcgccggggccgccgccgggccctcgtgccgaattcgccacccagg

SEQ ID NO: 435816 - DNA, 1099 bp, Homo Sapiens
  misc_feature (1002)..(1013): n is a, c, g, or t
ggcatattaatgttttggtttatatcctctatagtaatagaaaaacatttaatacttgtaatgctgacgtgttaatttgataccagttgagtagaatgtgatcaatccagtttacaatctatcatgagtattattaactaaaatctatgtgcttttcaataggaatcattcttctcttgctgtaacacttgaccttaacttttagaaagtgttcatttttaaactgcaactggaaaggttgaaaagttaggactcttgtatttgtgaactgtaatctgaagcagattatttaaagtgtagaaaaagaaacaagttcttttttgcaaaggtctgtgataccatatttcagctttgtgtaagtaatttgaatatccaaagggttgtgatgatcagttctgaatatgcaactgtccacttaataaggacaagtattccagtatctcttatgactgtagtcataaatgatgttggaatgtacattttgtgaaatagttggtatccctttactatgattaatttttgttattccaggaaatacttgtgaagccagccaatttataaagcactttagcatctgttcaggtaatttttgaaaaccaacttttccccttcaggataagaacttccaggttacctaaaaatgcaataaaaatctttatagtctaagcttcttggcatataatttttcatcagggttttcttttattaattgagcacaatactgttttgatttaatttttttccctcaaaccacccagctccttacatagtttttaattatatagctatctgaaagaggtggctaagacatttgctgcacacacttgaactaatgttgggtcaagtagcttcgtgttactggcctgatcccagtgtaattcaggtggaaaggtatttttatctcacagggatgtgtagctatgtattttactaattgtgaaacactggaaattaatgatgcagacaacttggtggtggtctttggacagctctctgcagtannnnnnnnnnnncctgttaccataaattgtatttaagtgcttgctttccacttaagttgtactaattagaaccggtaactcccagccctccctgtttg

SEQ ID NO: 435817 - DNA, 695 bp, Homo Sapiens
gggggctgccctccttgttgtgtttttaaattttagttaaaaactgctacagcttatgactttgtactttaagataattgtattgatcttttttcagattccttgtattttttaataaagtaatcttaaataaaactcagataggttaagtgttagaaattttaaacagcttacattgttagcgtaaagttatcttttcttttttcctaatcagagttcttgaccctttggttattgagtttaaaacttcaattgaaattcaatagtatttattttttaaaaaaatcactaaactgtgcctaaagaacataactgccatattaatgttttggtttatatcctctatagtaatagaaaaacatttaatacttgtaatgctgatgtgttaatttgataccagttgagtagaatgtgatcaatccagtttacaatctatcatgagtattattaactaaaatctatgtgcttttcaataggaatcattcttctcttgctgtaacacttgaccttaacttttagaaagtgttcatttttaaactgcaactgtaaaggttgaaaagttatgactcttgtatttgtgaactgtaatctgaagcagattatttaaagtgtagggaaacaagttcttcttttttgcaaagtctgagataccatatttcagtttttgggcagtaaatttgtatccggggttgcgt

SEQ ID NO: 435818 - DNA, 1003 bp, Homo Sapiens
  misc_feature (883)..(883): n is a, c, g, or t
  misc_feature (926)..(926): n is a, c, g, or t
  misc_feature (934)..(934): n is a, c, g, or t
  misc_feature (948)..(948): n is a, c, g, or t
  misc_feature (971)..(971): n is a, c, g, or t
  misc_feature (975)..(975): n is a, c, g, or t
  misc_feature (981)..(981): n is a, c, g, or t
  misc_feature (995)..(995): n is a, c, g, or t
cgggggcccggtgggcccgcggaggaaagatactggggagtgggagccgcggggttcagagcgatgattcccccacaggaggcatccgctcgacggcgggagattgaggacaagctgaagcaggaggaggagactctgtccttcatccgagacagcctggagaagagcgaccagctcactaagaacatggtgtctatcttatcatcctttgagagccgccttatgaagctggagaactccatcatccctgtgcacaagcagacggagaatctgcagcggctgcaggagaatgttgagaagacgctgtcctgcctggaccatgtcatcagctactaccatgtggccagtgacactgagaagatcatcagagagggccccacaggtaggctggaagagtacctgggaagcatggccaagattcagaaggcagtggagtatttccaggacaacagcccagacagcccggaactcaacaaagtgaaactgctctttgagcgcgggaaggaggccctggagtccgaatttcgcagcctgatgacgcggcacagtaaggtcgtctcgcccgtgctcatcttggatctgatcagtggtgacgatgatctggaggcccaggaggacgtgaccctggagcacctgcccgagagcgtgctccaggatgtcattcgcatctcccgctggctggtggaatatggccgcaaccaagatttcatgaacgtctactaccagatacgctccagccagctggaccgctccatcaaaggactgaaggagcatttccataagagcagttcttcctctggggttccctactcccctgctatccccaacaagaggaaagacacacctaccaaggaagccagttaagcggccagggagagatganatgctggacgtggagaccgatgcctacatccactgcgtcagtnccttcgtnaagctggcgcagangagtaccagctgctggcggaatnatcnccgagncaccagaggagacntcgactcc

SEQ ID NO: 435819 - DNA, 725 bp, Homo Sapiens
tttgtgaccacttctccctccatcatgaagtggtgcaaagtacatttatttttacaatgaaagctcatctatgaatctgataaaggccttccttcaactggagacaatttgggatgttgcaaaacaaggtttgggaagcccttctatggatcggttttgtgtccaagtctgtccctgccaaaagccatcaaaagtctccatcacccctgggctccagtctgctacccccagacttggcagctgggatctctccttcctggttcatagttctcattcccacccctcagcgatggagttagagttccaggcccacgtggtgaacgagattgtgagtgtcaagagggaatacgtagtttatgatctgaagacccaagtcccaccccagcagctggtgccctgcttccaggtgacggtgagtcaagtcgcgaggaggccgacagagggctgctggaggcgggtgggagtgaggatgcacggccagaggccaggccccatgcccccgatgcccacctccttcccccccgccgggaaggccctgacttttccccttccagctgaggctgaagaacacggcgctcaagtccatcatcgctctcttggtgcctgcagaggcactgctgttggctgacgtgtgcggggggttgctgcccctccgggccattgagcgcataggctacaaggtgacattgctgctgagttacctcgtcctccactcctccctgctg

SEQ ID NO: 435820 - DNA, 2883 bp, Homo Sapiens
  misc_feature (53)..(53): n is a, c, g, or t
  misc_feature (616)..(616): n is a, c, g, or t
caccctaaattgctccttctgcaaaccaacgaactgccctgccctgggccaanaggcactgaggctggggaccaaagacaggggcctgaaggaaggctgtaagagggtggggcggaactcctcctccgaacgcctcctgcagtgtgctggactctagggaaaatggccagtgagcctgcctcccccagccacctaggggactcctgggagggaaaggtcccagacctcaggcctgtgggcgggcgggaatgtgttttaagagagggggtcagtcccgactgcctttcctccaggagctctggctgcttctctgagccctgccacatctctgggctgtaggggagttctctgtccccacctctgacctaggctggagggagggcccttctgccctgctgctcttggtacacatggagcagcagtgggcacaggcctctgtcttccttctctcttttcctgtttcagaagccatcagggtcataaaagccaaggtgtggagggaccccaggcttccgggagagtgctggttcggctgggaacacgggctgtggggaaaaagcaggagccaggactagggggctcagggacacagctcccggaggcgtggagacaggtnctctgtcccagaggacttcaagctcacccagcccagaggcaagctaacactggtttatctgtccaatgacacgccagtctggtggaaccaggcagggctagcagcaggctcaggcagaggtgtcgaaaaggcgatcgatcatgttgcccacctgctccaccccgtacttgatgtacttctccgggttcttggtgaagggcacgctgccaaacttctgtagaaaggccccgtaggtctccttgacaatggtcttctgggcctggcgaatcctgtccctctgctctgtgtctggaatagcccaggccttctggattttgcacagttcttcgaggccatcattgaagcccttaaaacgctccttgataatctgccgctccttgtcccggagcttgactcccggctggaacacaggtagattcttctctgcgatgtaatcagtcacctttaaccagctgcgctggtaggtctggatctgctgctcaatgtgctcccggtaggagcgctcagcagtcttctgtgtcactgccaccagctggatcagttcagacttctccagggacttgaggatgtaattgtagttgttgtgcaggaagatggcgctcagagctgggtcctcgtacaccttggacttgctcagcaagttcaactgcaggttgcccagcactttacagatataggtgcttagcagccgcttgctgaactcagagctgtagctggtggccgaagagctggtctcttgggaggccagcatggcgcctgccgtctcctggaagtccaaaagctgctgcaggaagaggatggcattgctggtgagctcgtgtacggtgccgtccttcggcatgttgtactccttgtccgggtcattcttgatgttgtctgcgaagtcctccagcgctttggcaccgatggtctccatggatgtgatgaggccaggcagcttgttctttgtgctggcagccgtgccctggagcacctggtcaaactcaggcttggtctgcttgaggtgtcgcaggatggggaagacggtgagcaccgtggagaagtcgtgtcgcacaatggccttccgggcagcagacacgatgttctccccttcaagcatcagcccatccagggcatcctgtatcagggagtcgaaggtcttcttctggtggtgctcggggatgatgtcggccagcagctggtactcgctctgcgccagcttgacgaaggcactgacgcagtggatgtaggcatcggtctccacgtccagcatgtcatctctcccggccagcggcccgtgcttgtcgttcaaggcctcggacaggtgcttaactcggaaatcatgctcgtgaccttccagaggaatgaggttagagcccccctttttcccatctagaccatgctgggaatactgtttcggaaggtttctgagccttacggatcgtccctgggccgcttgactggctttcttggtaggtgtgttctttcctcttgttggggatagcagggggagtagggaaccccagaggaaggacctgctcttatggaaatgctccttcagtcttttgatggagcggtccagctggctggagcgtatctggtagtagacgttcatgaaatcttggttgcggccatattccaccagccagcgggagatgcgaatgacatctgggagcacgctctcgggcaggtgctccagggtcacgtcctcctgggcctccagatcatcgtcaccactgatcagatccaagatgagcacgggcgagacgaccttactgtgccgcgtcatcaggctgcgaaattcggactccagggcctccttcccgcgctcaaagagcagtttcactttgttgagttccgggctgtctgggctgttgtcctggaaatactccactgccttctgaatcttggccatgcttcccaggtactcttccagcctacctgtggggccctctctgatgatcttctcagtgtcactggccacatggtagtagctgatgacatggtccaggcaggacagcgtcttctcaacattctcctgcagccgctgcagattctccgtctgcttgtgcacagggatgatggagttctccagcttcataaggcggctctcaaaggatgataagatagacaccatgttcttagtgagctggtcgctcttctccaggctgtctcggatgaaggacagagtctcctcctcctgcttcagcttgtcctcaatctcccgccgtcgagcggatgcctcctgtgggggaatcatcgctctgaaccccgatcccgggaattcc

SEQ ID NO: 435821 - DNA, 1749 bp, Homo Sapiens
  misc_feature (258)..(258): n is a, c, g, or t
  misc_feature (321)..(383): n is a, c, g, or t
ttaggaaaatctacctccttagccacccaggaccagacccgttgtggcgtctttttcaccgcccatttttcccgccccgagttgttatgggcacaggacacagccgcactggtgtgtcttagaggttttgtgtgaggccacccgaggatgccccacgggtgggtggggccccgcggaggccatttctcccctgtggcccctttcctctccaccgccggttttatatattttgcccccatccccggcctggtagatggntttgttccttcaggcgccccataagaggcgttttgctttctggctgggggttgcttggccccnnnnnnnnnnnnnnnnnnnnnnnnnnnnnnnnnnnnnnnnnnnnnnnnnnnnnnnnnnnnnnnagagcccggcaaacccagggccttcatcctgctgaaggtgggcatgggctggggggtaaggaaatgaggccctaggtgcacacctagggctgggggtgagggcacggaggtccaggtgtgggtagaggccccttgcatccaccctgctggctctcctgtccctggtctccaccatgtcctcctcccttagaagaaacaggtctggggcagggagcaagctgagcctccctgaagtcccaggtgacctcaatcccctgataacccatgccttgcacagcctaagagggtgtttcttcaactgaagatggcctgaaatgggccagacccaaattttcatcagctgagaatctaagaaaggaagcgatacaggctgatgacccctggggttcgctcttccgctcatgttgaggggaccttgaagaacagctcctttccctgtatctctccccacagagccctccagaggagtaaaggggtcacagagaagctggcctgagactgctgaccgcatcttcttcctcgtgtatgtggttggggtgctgtgcacccaattcgtctttgcaggaatctggatgtgggcagcgtgcaagtctgacgcagcccctggagaggctgcaccccatggcaggcggcctagactgtaaaggggcagggcctgggctgcacaccttaggatgaagtttgctttcccatggctgggggcgggccatgacagggcctctggattaagccaccctgagctctccctccgctagcacacaagcacagagcgtgaaataaacccatctccagtgcaagtgtgcctcaagggtcagtcttcaatctcgtcctaaataggtggggccctattttttgcttccaacccccattttgctccttaacttttccccattgtccctgtctcccagcccacaggcaggcagcctaattgctccttctgcaaccacgactgcctggccctgggccaagaggcactgaggctggggaccagagacaggggcctgaggaaggctgtagagggtggggcggaactcctcctccgaacgcctcctgcagtgtgctggactctagggaaaatggccagtgagcctgcctcccccagccacctaggggactcctgggagggaaaggtcccagacctcaggcctgtgggcgggcgggaatgtgttttaagagagggggtcagtcccgactgcctttcctccaggagctctggctgcttctctgagccctgccacatctctgggctgtaggggagttctctgtccccacctctgacactaggctggagggagggcccttctgccctgctgctcttgcctcgtgccgaattcgccacccgagcctcgctacctaccgtatggtt

SEQ ID NO: 435822 - DNA, 521 bp, Homo Sapiens
  misc_feature (384)..(384): n is a, c, g, or t
ttttttttgaagtggtgcaaagtacatttatttttacaatgaaagctcatctatgaatctgataaaggccttccttcaactggagacaatttgggatgttgcaaaacaaggtttgggaagcccttctatggatcggttttgtgtccaagtctgtccctgccaaaagccatcaaaagtctccatcacccctgggctccagtctgctacccccagacttggcagctgggatctctccttcctgggttcatagttctcattcccacccctcaggcgatgggagttaggagttccagggcccacgtgggtgaaacgaggattgtgagtgtcaagaggggaatacgtagtttatgatcttgaaggacccaaggtcccaccccaggcagntgggtgccctgttttccagggtgacggtgagtcaagttcgcgagggagggccgacagaggggttgttgggaggccgggttgggatttagggttgcacggccagacgggggcccctttgcccccgtttgcccactttt

SEQ ID NO: 435823 - DNA, 532 bp, Homo Sapiens
  misc_feature (83)..(83): n is a, c, g, or t
  misc_feature (112)..(112): n is a, c, g, or t
  misc_feature (139)..(139): n is a, c, g, or t
  misc_feature (175)..(175): n is a, c, g, or t
  misc_feature (185)..(185): n is a, c, g, or t
ctaaaaataaacttttaaaaaatgtttttatgttttgagatagtgtgtggtgatgtgcaccttcagaatcaaagagtatcttnccagggtcttccctcccctgaaggttaantcgtaggcagacgaatcaggtattganccctgtccttggaataatcacgatgatgttcaggantcatgaggantcatagaaccaaagagcctcttccagggtcatccctctcctgaaggttaatccatagacagatgaatcaggtattgatccctgtatcttggaataatctagaggatctttgcgatatcattaggattcatagaaccaaagatccccttccaggatggtccttctcctgaaggttaatccataggcagatgaatcggatatagattacctgttcatggaataaatctagaggatctttagaatccatatgggattcataatacacagctatgccgatgccatcatcaccggactagccctttctgaaaacacagtcatacatctacacccattagaaatacgcgatgc

SEQ ID NO: 435824 - DNA, 1038 bp, Homo Sapiens
cagggttccgggggagggaaaagagccgggaggtagggatgccccgcaagtggattttccaagtggccagcccaggggggttgtggagggcaaatgttttcgttggccacatgggacaggagatttgcaccggacatttgacaaataaacggtcccgtcccatggggggctgcgatgatgctagcgagcccccgtgccggcccggagctccaggcgctgtacatccttcggaagaggtcctgtcggaacaggatgtagtctgccaggagcagggcgccccgccacacctattctgatgatatcgtgcgggctgccttgtgcttcctcttcccaggacgtcgtcttcttcctgtgctagaatcatgggatgtaccttgtctctcagaggccctgctgggttggaatcagaggcggctcgtggtcttctcaccacgtccaaatccccatcctcatccagctgagcttcagccacttcctggccagtggtgtcagtcccggcctggagggagaaaccctcattaccatggccacttcctggaggggaccctgtgctgcctgtctcagcagaaggaggctcctttgtgtgaacatctctgtgactgccacccttggctcctgaatctgtccaagagtcttggctccatagaagcttgaattgggacaggaaaactggctgccccacgctgttcagccgtaccatgagatgtctatggttcggggtatagaggtggacatctgacagcacagtgtcgctcctaaaggtgacctcgtccatggctgccgcaggagccagctgtaccatggcccaggctccaccttagtcctaggacaggagtccctcagaggtgagaatgggtcctcagcatggcaggtcccagaggagatactgcagacaggtccaagctggtagcgagtagctttgcatcgccctgggagaagatctcagagacttggccagggaagagaatccagccgccgcggggcccagcctgggatcccacccgactcccgtctctgtgggacttaggcggccgccat

SEQ ID NO: 435825 - DNA, 999 bp, Homo Sapiens
  misc_feature (58)..(93): n is a, c, g, or t
  misc_feature (821)..(821): n is a, c, g, or t
catatggcacggttaagcgaatgacgagcgcagggagtattgagcgaggaagcggcgnnnnnnnnnnnnnnnnnnnnnnnnnnnnnnnnnnnnagtcgacggtaccggacatatgcccgggaatttcggccattactggccggggacgggagtcgggtgggatcccaggctgggccccgcggcggctggattctcttccctggccaagtctctgagatcttctcccagggcgatgcaaagctactcgctaccagcttggacctgtctgcagtatctcctctgggacctgccatgctgaggacccattctcacctctgagggactcctgtcctaggactaaggtggagcctgggccatggtacagctggctcctgcggcagccatggacgaggtcacctttaggagcgacactgtgctgtcagatgtccacctctataccccgaaccatagacatctcatggtacggctgaacagcgtggggcagccagttttcctgtcccaattcaagcttctatggagccaagactcttcgacagattcaggagccaagggtggcagtcacagagatgttcacacaaaggagcctccttctgctgagacaggcagcacagggtcccctccaggaagtggccatggtaatgagggtttctccctccaggccgggactgacaccactggccaggaagtggctgaagctcagctggatgaggatggggatttggacgtggtgagaagaccacgagccgcctctgattccaacccagcagggcctctgagagacaaggtacatcccatgattctagcacaggaagaagacgacngtcctggggagaggaaagcccaaggcagccccgcacgatatcatccagaatagaagcacaccatgggccacgccccctgggaggatgtttggcaagcaaggtgtgggcgggggcggccctggctccctgggcaggactaccatccctggtttccgaacagggaacctcctttcggagg

SEQ ID NO: 435826 - DNA, 523 bp, Homo Sapiens
  misc_feature (218)..(218): n is a, c, g, or t
  misc_feature (225)..(225): n is a, c, g, or t
  misc_feature (252)..(252): n is a, c, g, or t
  misc_feature (273)..(273): n is a, c, g, or t
  misc_feature (275)..(275): n is a, c, g, or t
  misc_feature (310)..(310): n is a, c, g, or t
  misc_feature (433)..(433): n is a, c, g, or t
  misc_feature (459)..(459): n is a, c, g, or t
  misc_feature (471)..(471): n is a, c, g, or t
cctcatgcatgtgcatggtgcctggcagctggtcggtgctcagcacacagagctgtgacgggcctcatgcaatgtgcatggtgcctggcagctggtcggtgctcagcacacagagctgtggctgcccctggtgccgttccagggatgctgtatttttaggatttgccagcttacgagcctctcaagcatcgtccctttgaagtcagccccgttgtggntcctcanttgtatcacgtacctccctcatcaganttggctcataataattttttntntttcataaagtcagatcctcagaggaccgtaattntcaaggttgggtactcataaaaaggctgcaggctctgacagccttatcagaagccacagtctcagagacactggggacacatgcccgccactgatggaatagcccgctgaggttgatactttnaaggcagcaaccttggtttggatgtntagtcttggggntttctttaaaaacataaaagttctttacatcacagccatgacgttaggtttt

SEQ ID NO: 435827 - DNA, 722 bp, Homo Sapiens
atgttaaaagccttaatctcatttgggtactcaaaagagaaatcagagtttattctggttaacttgagaagccaagaaagatcatttttagcaagtatgccttccatccttggcagaggcttcccagcatcctaggctcagcttaccgggtgataggccccataagacacacacatgagcagggtgagaaatgcttgctttatagctgctccaccctcatctccagagattttgtgtctatggttgtgggtctggaaacctggcaggaaccacttctagagtacctttgcctaaactcttttagaattgaggccccaactttgatggcacatttaatacccaatttcttccataatagatatttttaatagcaggacagatggcactgattagatcaagaactatttggaagtgcctcttatgtttttttcctgcattctgtacataaagttttaagtggcaggtccagatatgtaaaatcatttctctctattttccagctggttttgttaatgattctctaggacagcaggtaaatgagttaagttgttggcttggggcaagtgaagtttgtgactatgcttgatttaataagctgagagtctcttgtttgtctgtcaaggtgccttcctctgctgaagccttacctccttctcacccagtaacggttaactcttctcttgtgtatatgcaaataaacctattattcacttctcaaaaaa

SEQ ID NO: 435828 - DNA, 1150 bp, Homo Sapiens
ttttttttgaccaaagttaaaagcgcatcaaacacgcctagcttttattattttaatcacaaacctatagacccctcagtataccctccatggggcctggccccagcaatccaaagctgacaaccttgggtgtaggtatgaggggtgggaatggaggggggagtgtctcttgataactctgaaatggggtgattcctccaaatgaagaactgggtggggaacagaggttggggtggcctagattctcagtatgcggagcaataaaaaaatcagataaacaaatgagggggtacaatatgcttttacaaccctcctccaagcttctgccttgctgggggaaggcttccagtttttcctgggctggggaggtcccaggatagccccttccttcatcctcttgccctacatgttgaaaaagaatactgaggtactggttctggtaacctgaactcagtcccccactaatacccatcaccttcccaaactgcccctcaaggaagaaggcaggactctgcccaagggtgggggcctctcactccagatataggtctggaaaattcatccatgaaatttcataatctgtccccttccccaagagcaaggttggctcagagccctcctaggttaggtcaggttggtcccaggttaaggcaggggagcttaagtaccactcctccctgcagtgtggaatgcttagatgggatgttgctgagggacaagggtggggctgtgatctccacaagcactagcggtggcctggtcctactgattctttcacacctgaaatacctgtgctgggctgttcctatagggaaggggtggggcctggctcctccattcctagaaggccaggagagttcccaggggaaggggctgggtctcatcctcacttctgttccttgcctgggcagagcagggcagggttcatggggaaggggcagagcttaaacccccagggctgggacctccattacttgactcctcttctgtgccaggacggactagactggtggttccaagacaaaggatggagcaacatcctgacatctccctttcccaggagacctggctaggacagtccctaggggacagggtcgagacctcatcctgtcttcttcccctcacttggcaaggatgagtcccacagggg

SEQ ID NO: 435829 - DNA, 330 bp, Homo Sapiens
  misc_feature (288)..(288): n is a, c, g, or t
caattggtcctccctgcaggaacatccacatttgacaactatctacacaaaaaagcatcttcatgagaattaaacatcaggtgagtggtaaacagtacctggtttttaacttcatattgctaaaagagtcactgaagagggtaggacagtcttgaactgccaatgccacccctcccccatgccccagcagcagccacgtggtgtgaagagagaatatgtattcttgggggagggatagcacagtaatttgtttttgtatgctacttcctattcatacatcacatttgnaaaaatatttctagacgttatgaagtgtcaaattgcttttgc

SEQ ID NO: 435830 - DNA, 1098 bp, Homo Sapiens
  misc_feature (104)..(114): n is a, c, g, or t
  misc_feature (329)..(339): n is a, c, g, or t
tcacaatagctcggagtaacgcacagtacagcgtccgtaagttgattaatattccccaggggcgtctcaaatctctcgggagaggttctccccacaattggttnnnnnnnnnnngatatgtgggtgtcttttccccacgagtgccccccgacaaagccatttttcccccaccgcaacgctcggtttataacaccgggtccctccggctctcctgcgtatataatatacgaccccctcaaatagggggccccccttgtataacaaaaatgtggagtagcacgcaaatatgtgggcggccccccccgggggaggatctactattagggcgnnnnnnnnnnntctgtttgttacgtatgtgtatatgtatgtctcttataggttgtatagatatgtaagtatgtttatttatattattcagctttttgcaaggttttgtttgtttgacagcaggaatgggctggggagggtcccccgcaagctggaccccttgttccgttcggcccgtgaggagaacggaactggcggccaaggggaaccggcggaacgagatcagctggagcgcactgatttcgaggctttgtgttcatttcgccctaggccccttctcgatgggctttccaatgtcctttccccggagcttgaggccaatggcccgctcgattttgccaagcacctggttattgggtatggcccgtccgctctcatagtccgcgatcacctgtggcttctcattgattttcgtggccaggtccttctgcgtaagccccttgctctgccgaccttgctggatcaccttgcccacctccagggtcaccctgtcatggtgcagctcctctgtctcccggtccagcttggccgtgttcttggtaatagaatgttgtttgttctggccagcagcccatttcttggaagtctccacatcttctcctcgtctctgtgccgctaagatagcctgcttggatttggcctgggcggccgtagggcccttcttgcgcagcaccgtcaccgtgtcccagtcgctctcggccatggcgggcgaagacgagcgtccgtccggcggctcagcggcagctgctccgctaccctggcgcgcgacgc

SEQ ID NO: 435831 - DNA, 947 bp, Homo Sapiens
  misc_feature (860)..(896): n is a, c, g, or t
gttccccacatcgaattttgaagaagaatgagtcggatcacttagacagcagagcatgaacaccccctctccggaagaaccgggaaccgggtctcttgtggaactggcttccggccccatgctgacaggccccggacccgctgtgctcaggctcagagaaccatcgccaacagcacaggctgacgggaactggcaaggggaagggactcggactccacttgctcttaggggtttcctgaggcctgcagagaccccaccatccctcagtctgtactacctggagaagcaaagctccagaattcagagaacaggggacccccagggccatcttcttcccccgagtcccactctcaccaaccccagctgggagcgggtagcctccctgttcagcggacccggcgaagggtggagggacactcaccaatgggccgctcgattttgccaagcacctggttattgggtatggcccgtccgctctcatagtccgcgatcacctgtggcttctcattgattttcgtggccaggtccttctgcgtaagccccttgctctgccgaccttgctggatcaccttgcccacctccatggtcaccctgtcatggtgcagctcctctgtctcccggtccagcttggccgtgttcttggtaatagaatgttgtttgttctggccagcagcccatttcttggaagtctccacatcttctcctcgtctctgtgccgctaagatagcctgcttggatttggcctgggcggccgtagggcccttcttgcgcagcaccgtcaccgtgtcccagtcgctctcggccgtggcgggcgaagacccgctctcgacgaattcgagctcggccgatttggcctgatnnnnnnnnnnnnnnnnnnnnnnnnnnnnnnnnnnnnncggccgccaccgcggtaagctccaagttcgcccatagtgagtcgtatacat

SEQ ID NO: 435832 - DNA, 821 bp, Homo Sapiens
cgcctttgcaaaggttttgtttgtttgacagcaggaatgggctggggagggtccccccgcaagctggaccccttgttccgttcggcccgtgaggagaacggaactggcggccaaggggaaccggcggaacgagatcagctggagcgcactgatttcgaggctttgtgttcatttcgccctaggccccttctcgatgggctttccaatgtcctttccccggagcttgaggcctgaaatgagccacagccactggccactgcagcaccagctccctcctccccccaacgctgcccctcttcaacatcttcccagggaaggggggccacgccgctcccgtgcctcactgggctctcagcacacgagcactcctggttcccacatcaatggcccgctcgattttgccaagcacctggttattgggtatggcccgtccgctctcatagtccgcgatcacctgtggcttctcattgattttcgtggccaggtccttctgcgtaagccccttgctctgccgaccttgctggatcaccttgcccacctccagggtcaccctgtcatggtgcagctcctctgtctcccggtccagcttggccgtgttcttggtaatagaatgttgtttgttctggccagcagcccatttcttggaagtctccacatcttctcctcgtctctgtgccgctaagatagcctgcttggatttggcctgggcggccgtagggcccttcttgcgcagcaccgtcaccgtgtcccagtcgctctcggccatggcgggcgaagacgagcgtccgtccggcggctcagcggcagctgctagagccgct

SEQ ID NO: 435833 - DNA, 2036 bp, Homo Sapiens
  misc_feature (1907)..(1908): n is a, c, g, or t
  misc_feature (1911)..(1920): n is a, c, g, or t
ctcacggagccacaagttatattttattttaacacgagattaacatatagttacaaggtcaatacaagcctccagtggaagctctttatttggtttaattccatctccagagacaaacaggcaactctaggacctttacagtggcgatcggcctcacacagcaaaatgcctccaaagtttagaattagtgcaacacacatacgaacgttttaaaggtgctcaacatcaggttaaaatagaattctggacctttttaaaaagtttttggatgatataagcacaggaggcagagccaataagaaacatgaaaccaatatttctggaaaaacacttagcatgaacgtcactttttgacgtcgtgtaaactttcttctgcaatgacggatgttaccaaaaggcattgagacctttgcgctgcgctggttagacaagccgcaggcttatctccacggtgagcaggataaaaacccccaaggaacagcccatgacaaccttctgtgcctttttatactttcccatcctacaaaggaaaaactgggtaaaggacaagttcctccctttcattgcgtttctaagaacttttcagggcaggttcttttaaaattagtcatcttacaacacaacagtattctagcacggtggcgaagtgacaggcggcagatacgggggaggaaggagacgttcacgggaaattccacattctactctatgtgaactgctccagaaaaatacagacatgatttcacagtaggattcccagagtaaatgatgatacataggacaactgacctcctctaagaagcccggctggggcagcagtgagcttttcatggagccacgcagactggcccggaagcaacacccaggttcaacatttaagagcactcgctataacattctttttggacgcaggtggtggaaaagtttaaaaaacaggcggaggagtgacggggggatacaagcatatcctatactgggggtgacggtcattcaaagagcaaattactgcagcttatatcttttccactatgttgcaagaaatgaatctatcctgacccataatatgaaagatgcgacgcacatgcattcccgaggctctaaaatcccattttaaagaaccgtttcacatcctcgtggagtggagagtggtccacttgacttggtgaggtcagaagttcctgaagatccctgtcgtccccgttggcgggggagcccattgtggagctgtggggactgccacactcaccatgcacctgttggtttgcagggacagaggtgcggccctgactcttctcaccctgtgtcatccgggcttgtctttcgtctgtcaagtcagtcctcctgcgtgactgatgggtgcaccacgcttaggtcacccgttgcagggaccggaagtccatggctctgccgcaaccctgagcggtttgcagtcccccccggggaagaagcagtcagagaggctcacgctcacctactttaaaaacccaaagccacttcctcttcacctgcctgggcctcagcgtctctgcgcttgtggtttctcgtccccgagggctgactgagctgctccggaagggtggtgtgtggtcaaccttggttggctgagaggagcaatttcctggtttccacaagtaaagacagccccatcccttgggacctgtcctttccgtccctgtccctttggcttctataggacttccttgtcttagattcataaacagcaagaggaactgaggatgcttgaggggaccacctagttaccaaagccaagcaaagaataaagctgcccgacatcatccccaggcttccgtggcgctctcggtcacaggagctctaggccaatggttcctcttgactgtttctgcaccaaatgagaggaggggctgctctgctctaaggcgtggcgnngcnnnnnnnnnntggtggccacagattaggggacctcaggttttcctcaaaaacccacacagggaaagaaacttggctctaaaagcaaactcaacgaattccatcccgggaattccggaccggtccac

SEQ ID NO: 435834 - DNA, 2044 bp, Homo Sapiens
gaaacaccaactgggtgtcctacaattcaattcaattatgatactaactacctggagttagcacaagtctgctccaacttcagacatttattacatacagagcagatatgtgggtttgcttgcagggccaaagcctgaggagaatcgtcacccctcccccagccgccccactgctcagcccggagtcacttcgagatcctgggggaacagacgagggagcggacatacatcacagtggaggtggcagggtggtggggagaagccggcagcgcagcggctgcagccctcggtggccagcggggcttgtggggcagctccccaagatctgtgcttctctggttgggggtgggtgcgggggctgggctgccctcataagggcctcccagacaggagtgcagtgggcctggaaggtaggaattaggccagagaggcccagctgggcagggagagcagtccagggtggcgtctgccctcttcgggcttggagtcggttgggggcggctccatcctcagccccacggggcctctgcttggtgtcctctctgttgctccctgggagcaaggccacagcgggcaaccctaggcacttagtagcgtgtctgggagctgggctccgtggagccccgtgcaggaggcaggccccgggagcacatcatcccccatcaacctgaggctgagcctgtgtcctaggtctgatcccggagaggccaggggcctccccttcttcctgaggcctgggcctgccctggcagcctgagaaatcccaccctgggggcttctgggagggacaggactccagggcccactcctccaaggtgagtcttctgcccaggcagagcctggggggacacgggtcagaacggggctggcaagagcctgcctgcatgggcaggatggggtagcagtctctgttctcaagcagctgccccagggagccgggcctcgtgcttttatgccagctccctgggcaggggacagctggggtggggacagacaggatagaggcttgacgacggggaggccccagagaaggccggctggggtgcaggcacctgggcagcctgaggcccacctccctgggcaaaggctagtgcctggcccagctcccctaggcagagtgagggcccaggaggcagggtggccccatgagcagcatgcagaggtgggcccagggcaggcagcctcggcggcggggagcccctgcctcctccaggggtgctggggagtaggaggcccagggtagagccaggaccacctcggattctgcctgcgctgggcccaaggtgccctggacttgaggactctgggctggaagctggccaggagctgcccgggtaaactgtcccgagagcatcttcccctcgggtggaagcacccctcccctcctcctcccagctgatccgcatccccgcactccctgcccgctggaggggccagactcaggtgaaagctgcaggttgagaggttagaagaggggtggcggcgcctggctggctaccccgcgggccgggcgggggtcaggtggtcgggggtcctatgtacaggtcgggccaggcagggcagcagcttcactcgggggtgtaggacacctgccacacgatgatgtgactgcgctctgccttggacagcacgggcttcacctggctcatgtcccctgcgccctcctccgtctcgtcgtcctctccgtctccaatgcggaagtcgatgtagccctccccgccgctcagcaccagcacgttccgcagcttctggccctcgacctccgaggccaggggcagctggcccagggccctcggctgggctgtccagcacactgccattcagggtggccagcacgttccctggcaccgagacaaagaacttcacggcatcgcggtgcccatggaagcatagctgggcctgggccatggagcagtaggggatgaagctgctgtccgccctgtcactgctgtcatcgccatacacgtggatgatgcccccgggacgggcgccctccccagaggtgggaattctcttattggctcggagccccaggagctgcctc

SEQ ID NO: 435835 - DNA, 467 bp, Homo Sapiens
gacggaggggaggggttggggggctcccttaggaagcctatggcagggtgggtcagtgcccgtggggcacagagtggtctgcctccctcctccccaacacttgccatcctgcagagcccctgaacacccctggggtgaagttaaactggaatcccagtgggcaggcatgaagggccgcgaagcctgcctctccatcccagggtccttcccatgggcatgcctgtctagagtgccaggggatctgggagcagatggaggaactgaggcactttgagctgggggactgagagggctgggaggggtcttcctccattatatacatgggaagacccagtctggggtggctgataggaactcaatgtcccattcaagaagggaatctgcactgaaagggagggcttctcctaggccctcccctcatcccagaatgaggaccaggggtggctgagcaggaggtagcctagcgg

SEQ ID NO: 435836 - DNA, 990 bp, Homo Sapiens
  misc_feature (916)..(948): n is a, c, g, or t
acaaggttgttttgtgtttatgtcgttttcccgttcgtgaacgtggatggtatttttccctcgtattgtttttttaataaatttaagaacagctctaccttctctcctccccccagagcaactaaaaccaactaaaaggggctatggtctggggggcagaaggcgctaggagtcgtaatcttcttcgtcctcttcatcaggtgctgaggggcccgggggcgctgggggcaaaggcagagtagaggcgaagggcaggaagggtgtcggggggctctgaaagtgggcagaggggtggctggcctggggtgggggttgtgatgtctcctcttccccatcagtatctgtgtcctcagattcatcctcctgctccgagtctgtcccggacagcttcttgtccttgcttttcgttcccatcccaccgttcttccggccgccgctgcctggcttccggcccctgcgggcgcccttgtccccatccatgtggttgtcttccccgtccccctgcatgtcgggaacagatgccaccaggtccttcaagaagtcaaactgctgctccagctcgatgcactgcttcaggtgggatgtggtcatggtcttcgcgttccgcgactgggtcacctggcaggccttcttcaacagcgactctaggaagagctcgagcgcccgggagatgatgacaggcaccgccgccgccaccttcccaatctcttcgtccgtctgcatgatcttcttgatccgcgccggcgggaaccgcgcgttgtacttcttcttcttgctcggcatctcggggcctctctcgccgcgtcgggtccagcgccgccgcccgcagcctcccggctcccgggcctgctcgccgcccgcccgtcgcggttcccccgctctcgacgaattcgagctcggccgatttggcctgatnnnnnnnnnnnnnnnnnnnnnnnnnnnnnnnnnatgcgccgcccccgtgtactccggtcccctatatgatgatcc

SEQ ID NO: 435837 - DNA, 988 bp, Homo Sapiens
cactgatttgttaaccctgggagtgcccccttgtgaaaccagatgagtccaaaacaaacggccaggatctcttcctaaaaagcccatgatggcccttctggctgtgtctccagttggtgcctggatgctgcccatgtgtttaagggccattctgaccatctggtctctttcctgtgggctgtggggtgctccagtgtcatctccctctgctcctgattttaaaaactgtagaatataggactggaccatattcccactcagttcaagggtttctttcatacaagggaggtccgaggcactggccaagctcaagaggtgaatcagtgcctggcagatttgggtccgtaggctgacacagtacttgaattccaaaaagtctatggtgtcttcactcttctgtaaagcggtgaccaatgcattccagatccgagcatactggtcaacagacccgtactgctctctcttccccgggacggaaagggcagctgcagatctgatgcgcactttgaagttcttgcatgatgtcacgaccgatgtcagggcattgtaggcctgggaggtccatggggctgtccctaaaggaagggcaggatttttaaatacatttcccattgcataacaagcattccatcggactttcatggcagcttctgttagaacagtagaaattagggcctggatagactcctcaatgatttctgcaaatgtgggtttttctatatgagagggttgcagaaaatgaagcaaatttccaagggcccggactgcattgctttttaccttgtctttatccttggatgcttctatagctgatcgtaacattttcaagagcaggagaccagagaactcttcctggaaacttgggtctggtgtttccatgttgacaatcagagtgtctgtcaggttgcccagggaccaggctgctttggctcgaacattcagagacttgtcttcagagtgacatcaatattgcatttgctgcatcgca

SEQ ID NO: 435838 - DNA, 370 bp, Homo Sapiens
  misc_feature (33)..(33): n is a, c, g, or t
  misc_feature (41)..(41): n is a, c, g, or t
  misc_feature (71)..(71): n is a, c, g, or t
  misc_feature (293)..(293): n is a, c, g, or t
  misc_feature (325)..(325): n is a, c, g, or t
tttcaagggttcaccattaaagggagggttatnaagttctngcccagaagccagagggaagagaccttggnttcaccgggaggacagaagggatgctggcacaggcaaaggtgaatagaggatcaagcaaggagggcagcagaaaacctgccaggagagaaaaggtgactgatgatgtcagattctagagcaagtagcagaaactgggacccagagcacaggagggagaagtggcctgagcaagaagggactcctcgtcatctgtaacacaggggagggaaatcagcgtgcanacttgggggccgcaagttatagggagttccantcttatggcttctgttttgttttttgaagcaggagagaaagtctg

SEQ ID NO: 435839 - DNA, 1498 bp, Homo Sapiens
  misc_feature (115)..(115): n is a, c, g, or t
  misc_feature (234)..(234): n is a, c, g, or t
  misc_feature (267)..(267): n is a, c, g, or t
  misc_feature (362)..(362): n is a, c, g, or t
  misc_feature (364)..(364): n is a, c, g, or t
  misc_feature (366)..(366): n is a, c, g, or t
  misc_feature (392)..(392): n is a, c, g, or t
  misc_feature (497)..(497): n is a, c, g, or t
agtcacaccaatcagcccctggcagttcattgccactgagagaggagtgaggttgggtagatctgccccaaggaagcttagcacaaagctatcaatgccactggggctgcggcgnatttccttcaaaaagcctttgcgggtaaagacttgtatacgatagttaccacggtcagcgactagtacttcaccttgactggtcacgtagagactgactggaagattgaacattcctgnagtgctgctttggcccccatcttcttgagaaanaggcactgctggatattggaggctgcctcaggaccccgctgtttagcaggtgaggccctagggctggcaaccacttcctccgggctcatgtccancncnctaaaagtaacagaggtagaggcagnagacgctgtggcctccatggcccaggaatcttccacgttaactgtccggggcttcttaacagcttgtccaatttggagggggccaacatgacctaccttaaggancaccacatcttgcagggtgagttcccgagggcaagctggcagtgagctttggctcctcctcatacagctgttctcttccagtagtgctacatctgcctgcttgatcttggccagggagtagtcacagcgagacacagcctgcacttctgcaatgttaagcaggtaactctgctcctctaccacttgactattgactttctcaacttcagccaaagagcctgtgaagaccttccgagagcgagccagctcatcctggaccctgcgctcctcatgcccatactcctggagaactgctttataccttgcctgaaggtccttggagacaccttccaaggctgccttccgccgctgcagctcccccataagttcccgcagacgagttaacttctctccaaagtcccgacgccgctcctcagctgcttctttgacagggagtgtacagtggccaggaggctgatggtctgcctcccggcagggctcacataacaccaaaccacagctccggcagaattgccggggcagacgccgcccacaggaccgacacatgagcagccccacagcctcgctgagcccagctgtatcaatgatctttagcactgtcagattgtctgtcagctgggtcaagctggttatgcgggtaatcttgctgcaaaagggacagcggacaccattgatgctactggccaatagcttctccaggcactggcggcagatggtatggccacagtgcagaagcttgggacgcagctgctcttctgtgaaggactccatgcagatggggcattctagcacttcccggagggcatccaggttcaggtgagaagctgctgctgcagccattgctcttcctttgaagggtattgctagcacagctcagaactgaacagcacagtattcatgccctagagggtcaaattcctgaccgcccgcggctccgacgagtccaccgccggcagcccacccgcctgcctccctctgcgcacgcgccgttgagcaccgct

SEQ ID NO: 435840 - DNA, 1765 bp, Homo Sapiens
  misc_feature (47)..(57): n is a, c, g, or t
  misc_feature (482)..(535): n is a, c, g, or t
  misc_feature (1048)..(1069): n is a, c, g, or t
  misc_feature (1359)..(1359): n is a, c, g, or t
  misc_feature (1367)..(1367): n is a, c, g, or t
ttttttttttaaaacaaaaggtttttattcaaaaaacgccaagtatnnnnnnnnnnntaagatcttttttattcccctgtacagtatttcactcagataaaaccagcaggctacctgctgctcaaaacacagccccagagaggatctggaaggcacaccatccaaaactgcttttcataattatcctatatacacagtcagcaatgcccctccccatcacccacagagccgggacccacctgggtaagtaggtgaggggccccacaaaagccagggagctgcagcactgtcccgcctgagtcccgtcaccccacaaacagagcaagcgtcgcagccctcccccaaaaggtccccaagtcagaggaggaaaggaggaaagaaaactagggcagcagctatggaagcttggaataggaagggaaccaaataaataaataaataaatacataacattgacctccaggttagaatgcgcatctttnnnnnnnnnnnnnnnnnnnnnnnnnnnnnnnnnnnnnnnnnnnnnnnnnnnnnnttagatccactacaatctttttgtatactaccatgccaactgtacacacatttacagcttttctgttgattgcattgtttgtgcattttttgtgtgtgtgaggtcttggctttgaaaacagttaagtaaaaaacccaaaaggaagaccagttcactcggagttttactaaaggaggcagaaaaaagggcaggtggctcagcgtttggccctgtagcctcttccatggcacctttcatatgaaggagggggtgagggaggacaggagagaaaaatagggaacaaacccaggcagatttttggagaagcagcaggtaaaagaggcaagttcaagtatttctcccagcacagccggagtccccacagaaggcactcagaaagagtcggaagaggtgacagggacttaaaatggtgctagtcctatcccatcccaacctgtttcccccctacctgacccatcgcggcattcagcagaactcatgatgaaggaaacagttccatggcagggttctgannnnnnnnnnnnnnnnnnnnnngggatatttcagagtccagcaatgctggacacctatgagaagaagagagtatctatgggaggagttgaggcctaggacccctggagagtcactcttccccactgttgggaggcagcctcccaggggcctgggatctggaatgagttgtaaatgttgttcctgtatcaagcactgtcctgcttggcgagacgtgtcactggtactcgggaagctggagacagaagcttcccctccctcgggcatctgacaagagaggggaggacctgccagaaaggctgctatttgctggnccccggcnacaggctgtggaggtggatctcagcagtttcctggggcaggagaacatcttgcatccatggatggttctggatttcttcgaaggttggcctatctgatggtctcagggccaagcaccatctaatgagatgctgacattctgcagaaaggaggatagacgaggttatgaatgactcaacttgtttttacactgcaaaggtcttccccatttgcttctcagaggcccacaagtctggggtcccagggaggccaagcattttctagaacactgtgctgggtacccttcaataggaaggtattgactaatatctgggtcctccagtctgtttcagctaaaaactgactcccctcttaaacctgtggttttcaaacttcaatagtgggggcctttcccacaac

SEQ ID NO: 435841 - DNA, 541 bp, Homo Sapiens
  misc_feature (37)..(37): n is a, c, g, or t
  misc_feature (77)..(77): n is a, c, g, or t
  misc_feature (212)..(212): n is a, c, g, or t
tgtaaatgtgtgtacagttggcatggtagtatacaanaagattgtagtggatctaatttttaagaaattttgccctntaagttattttaccctgtttttgtttcttgcttttgaaagatgcgcaattctaacctggaggtcaatgttatgtatttatttatttatttatttggttcccttcctattccaagcttccatagctgcctgccccntagttttctttcctcctttcctcctctgacttggggaccttttgggggagggctgcgacgcttgctctgtttgtggggtgacgggactcaggcgggacagtgctgcagctccctggcttctgtggggcccctcacctacttacccaggtgggtcccggctctgtgggtgatggggaggggcattgctgactgtgtatataggataattatgaaaagcagttctggatggtgtgccttccagatcctctctggggctgtgttttgagcagcaggtagcctgctggttttatctgagtgaaatactgtacaggggaataaaagagatctta

SEQ ID NO: 435842 - DNA, 1372 bp, Homo Sapiens
  misc_feature (41)..(41): n is a, c, g, or t
  misc_feature (117)..(117): n is a, c, g, or t
  misc_feature (491)..(514): n is a, c, g, or t
  misc_feature (666)..(722): n is a, c, g, or t
  misc_feature (779)..(789): n is a, c, g, or t
  misc_feature (1214)..(1267): n is a, c, g, or t
tttcaaaaccagacaatcgcttgggaggagagttgttctcncccacaagtgtgtggatttttataaacgcgtggggcctccatgaatggaagccagcagtgttttgttgacgacccncccgtgtttttcccccacctagggcggaaagaatatttatgtatggccagagagggcaaacaaggggtgggctggaatgctccgcgcgggcggagttcaagggtgtcaatccacttggcgggttttgtggaagggggttttccccattttcggcgcaaggaatgggcgtctaaaggggagttacgccagcccagttctgtgtgcgattaaagagtggccaccgggccggggggcgctaaaatttgatatattgggaagcctcggccttggagaactccccgttttgaataagtatcccacgtgaagaggcccctccggagaacgtcccatttgggaaatttgtttcagaaaaccccttcgggttgcccgccgcnnnnnnnnnnnnnnnnnnnnnnnnagattccaaacgccttagtcactgggccagggttcttccttgggaaaccaaggtaagggccatgtgttcccgttccctacgtggggcccggggggccaaaaagaaagggtttagaaaaagttttcagaagggccggaggcggccgaccatgnnnnnnnnnnnnnnnnnnnnnnnnnnnnnnnnnnnnnnnnnnnnnnnnnnnnnnnnnggggttttgttttctttgttaagacaaaaggtttttcatcaaaaaacgccaagtatnnnnnnnnnnntaagatctcttttattcccctgtacagtatttcactcagataaaaccagcaggctacctgctgctcaaaacacagccccagagaggatctggaaggcacaccatccagaactgcttttcataattatcctatatacacagtcagccatgcccctccccatcacccacagagccgggacccacctgggtaagtaggtgaggggccccacagaagccagggagctgcagcactgtcccgcctgagtcccgtcaccccacaaacagagcaagcgtcgcagccctcccccaaaaggtccccaagtcagaggaggaaaggaggaaagaaaactagggcagcagctatggaagcttggaataggaagggaaccaaataaataaataaataaatacataacattgacctccaggttagaatgcgcatctttnnnnnnnnnnnnnnnnnnnnnnnnnnnnnnnnnnnnnnnnnnnnnnnnnnnnnntagatccactacaatctttttgtatactaccatgccaactgtacacacatttaccagctttctggtgattgcattgtttgtgcattttttgtgtgtgtgaggtct

SEQ ID NO: 435843 - DNA, 1127 bp, Homo Sapiens
  misc_feature (854)..(854): n is a, c, g, or t
ctttcccaattaagggtgtgccccttttcttagtaagggggtcccatttcccaagtactgtgtctccacaggtgggagccaaacatgcccggccccatcagctcttaaagcagcaaagaggccctgcagctggctggctggctggacagcacagttaagcaggtggctgcatcctctgcagttgctggcagcccatcttccctggagatgtaaaccctcctgcaaggctggctcttctttgggtgtgatgaagatgatgacagagatggatgctgggctctgagggtcctggttccttcgaaggacatccaggggcctctgagatgatgggctctggttcctggcctgtagcatgggtaggagcaggaggctttgcaaggtagactctacaggcaggaccttgatggaggatggggtttcagggtggaagacctggatcacaggggcacctcagctcctgaatctcagtcttcactttcagcactgtcagttttcatgggctctgttgtttcttgttgcagcccaagtgtagatatactcggggcatcatctgcttcctgtgccatcgagcccccgtctgggtgtacatgagtggagaactgacacaggcgcctgcaaatcagccgggagttcctggccttggctccaagtgcagatggacacgggtcttcatccccttccttggcaccttccatttaagccaaacattagaaatgtaaagaagggcttgtttctggagtttccagtttgttccattcatctactcagagcatcttctttggacaacactgtctgcagctgtgggcccactccaaggggaggcgatggactgtaggtctgtggagctcagcacnagggctgtgccacggacttgggtgtcagtgaagtcacgctcattttcagatggaattctcctccccgatgtgaacaatgaaccgacggtgtcattttcataggattgtcctggagcccacggagatgcgggcttgggattcaacgtgatgctgagcggatcttctctgcttcagaccaggcctcatgtggcttcactattcatccacacatagatgctgcagagacaccgaggggactcacaaatgcacctgtgcagaaggtgtcaacgtgga

SEQ ID NO: 435844 - DNA, 1279 bp, Homo Sapiens
  misc_feature (67)..(67): n is a, c, g, or t
  misc_feature (103)..(103): n is a, c, g, or t
  misc_feature (236)..(277): n is a, c, g, or t
  misc_feature (334)..(334): n is a, c, g, or t
  misc_feature (386)..(386): n is a, c, g, or t
  misc_feature (1255)..(1255): n is a, c, g, or t
gtcccattctcagtactgtagccatttcccagtactggctcccattctcagtagtgtatcccattcntcagtactgtgctcccacttctcagtactgtgctcncacttcccagtactgtgctcccatttcccaatactgtgctcccattttgcagtgctgtgagcccccatttcccagtactgtgctcccatttcccagtactgtgctcccatttcctagtactgtgctcccattnnnnnnnnnnnnnnnnnnnnnnnnnnnnnnnnnnnnnnnnnncatcagctcttaagcagcaggaggccctgcagctggctggcctggctggacagccancagttaaggcaggtggctgcatcctttgcagtttgctggcagccccatcttncctggagatgtaaaccctcctgcaaggctggctcttctttgggtgtgatgaagatgatgacagagatggatgctgggctctgagggtcctggttccttcgaaggacatccaggggcctctgagatgatgggctctggttcctggcctgtagcatgggtaggagcaggaggctttgcaaggtagactctacaggcaggaccttgatggagggtggggtttcagggtagaagacctggatcacaggggcacctgagctcccgaatctcagtcttcactttcagcactgtcagttttcatgggctctgttgtttcttgttgcagcccaagtgtagatgtactcggggcatcatctgcttcctgtgccatcgagcccccgtctgggtgtacatgagtggagaactgacacaggcgcctgcaaatcagccgggagttcctggccttggctccaagtgcagatggacacgggtcttcatccccttccttggcaccttccatttaagccaaacattagaaatgtaaagaagggcttgtttctggagtttccagtttgttccattcatctactcagagcatcttctttggacaacactgtctgcagctgtgggcccactccaaggggaggcgatggactgtaggtctgtggagctcagcacagggctgtgccacggacgcgggtgtcagtgaagtcacgcgcattttcagatggaattctcctccccgatgtgaacaatgaacgacggtgtcactttcataggattgtcctggagcccacggagacgcgggcttgggattcaacgtgatgctgagcggatcttctctgcttcagaccaggcctcatgtggcttcactattcatccacacatagatgngcagatcccgggaattccggaccg

SEQ ID NO: 435845 - DNA, 976 bp, Homo Sapiens
  misc_feature (231)..(272): n is a, c, g, or t
  misc_feature (947)..(947): n is a, c, g, or t
tcaccaccccattcagacgcctgtatgtcttcgaaggaacaggaccctcagagccagcatcatctctgtcatcatcttcatcacacccaaagaagagccagccttgcaggagggtttacatctccaggaagatgggctgccagcaactgcagaggatgcagccacctgcttaactgtgctgtccagccagccagccagctgcagggcctcttgctgcttaagagctgatgnnnnnnnnnnnnnnnnnnnnnnnnnnnnnnnnnnnnnnnnnnaatgggagcatagtactgggaattgggagcacagtactgggaaatgggagcacagtactgtgaaatggtcttacagtactgggaaatgggatcacagtgttgggaaatgtgagcacagtactgggaaatgggagcatagtgctgggaaatgggagcacagagtactgggacatgggagcacagagtactggggaataggagcacagtactgggagatgggtgctaacagcactgggagataggagtatacagcactgggaaatgggagcacggcactgggaaatgggagcacagtactgggaaatgggagcacagtgctaggaaatgagagcacagttttgggaaatgggagcatagtattgggaaatgtgagcacagtactgggaattgggagcacatggtactgggaaatgggagtttacagtactgggaaatgggagctcacagtactgggaattgggagcacagtattgggaaatgggagcacagtactgggaaatgggagctcacagcactgggaaatgggagcatagtattgggaaatgggagcacagtactgggaaatgggagctcacagtcctgggaattgggagcatagtgctgggaaatgggagttcacagtactgggaaatgggagcacagtattgggaaatgggacacagtactgggaaaggngacgcacagcactgggaaatggagctagt

SEQ ID NO: 435846 - DNA, 868 bp, Homo Sapiens
gtaatagaccaatcttggatttataattggaagtgttgatccctttatttgcagaatttgaaggacttaagagcacaagttgagagaaacaaatgacacagctctttttgcactttgtaatattctagaaaaagcctcaggtaaaaggaaaattgtttcactttgtttctgctgttaattttgtgatggcagtaactacatatgatctacaagtgtaaaattgtttaacaagtcttaagttttctatacttctatgtaactttttagatctttcatttggtacatgttatttaaagagctacaaagtgctaaatatgtcctgggatgaacagtcaaccctggaagatttattgtggcctagaggggtgctcaaagatttggaggaagtagtatttgaattagaccttgaaggattggtgggatttagccaagtaggatgacaagaaaatgagtgtgtgagggagcaatgtgaatgacatttatttgagggaaggaggtgtaaaaggtggggtggcttctgactgtgtgactagaacagaggctgtgtgtagtggtgaggccaagctgtgatagttcttgaatgccagactcatgagtttgggctttatcctgtagtccaggagttataaactgtttacagggagcaggtaagcaatttaaatgaacagtaggctgcttctaagaatctgaatgacaactgacactttagaccttgggttggggagaaaatgggaaataataacagccttggggaagtctaggagtccttatgccctgcttaaggtgaaactgatacagaattctggctgatggttgctatttgagatgctgtttctagatttttcaagagggcggaaatttggatttt

SEQ ID NO: 435847 - DNA, 559 bp, Homo Sapiens
gaccattttgtccacatcgacaccatcagtctgctcttagaggatgccctggagtattcggcgttgattgcggggcacccgaaatcagacttgccacctggactgtcgaggtgcagaccctgggagcaccactggcccatctcttacacaggctgaccgatttctcctggtgttcagagtctgtttttgtctagcaccatttgaaatcggttatgatgtagggggaaaagcagcagcctcgaagcctcatgccaactctgggcagcagcagcctgtggtttcctggaagatggatgggcagagaatagggaaggaagatcatgcttttccctactaacttctgtaactgcatgtatgatacattattgcagaggtaagagatagtttaatggatttttaaaaacaaattactataatttatctgatgttctctagttgcattttgctgaaatgtagtgctgttctaaattctgtaaattgattgctgttgaattatctttctgttgagaagagtctattcatgcatcctgaccttaataaaaaataagttcagtttaaa

SEQ ID NO: 435848 - DNA, 808 bp, Homo Sapiens
ggcctccccttcccctccaaagtccagggccaccagaactgactttattaaaaaaatgacaaaacaggtctatacatatttacaggctgggagccaggaggctcaggtccgacagcaggggccaggctgctcacttcttggagagcttgacttgcttgtgcttggggggtgcccacttgaggcagacggagtccactgtgatgggtggtttcttatactgggcacttttgaggtgctcctccaccagcttgggtgtgacacagatcacgtgctggcccttccagtacttgaccatattgagggattgcagggtactgatgatgtcattttgggtgatactggtcatctggctgaggtccttgatggacagtgtgccccggaagtcccgcaggatctccagcagcacccaggaccagtagctgcggtagctgagcttgcccaggtcagacagcggcttctccggggagccgactgtgctctccagcttggagagctcataactgaaagcgatgaggaacttcccgtagccgcggcgttggtaggggggcaaggtcaggatgcaggccacattgtttccatccggggactccttctccttggagaagtagccaacaatgtgggccccctgccggtccacctcagtcaggatgtaaaagacgaacggctccacgtcaaagtacagtgtcttatggtccaggaaaagcttggccagcagacacaggttctgacagtaaatcttatggtctttgccatcaacttcgtacacggagatgttgctcttgcggtagatctctttcccgggggtgcc

SEQ ID NO: 435849 - DNA, 358 bp, Homo Sapiens
  misc_feature (32)..(32): n is a, c, g, or t
aacagacacttgatatcctcaattaaaccccncctgttgtaacatcaccctagtagaagcccacacacagactctgaatctttgcacgaacacggggtcaaggaaagacagacatcaaagactattatttgagtatggattggaaaaaagaaggcacctctgagaaacagtacaaaaccaggttgcataaagtgaccaaagctttggtcaaagttttagctgtaagactgccacaaaggtctgggtggacagacactgcgggaacacacagtaaagcacccttccacagcacgagggcagctagctggagacctggacctgccccgaggcttgtagcagcatcctcagccctgtccgc

SEQ ID NO: 435850 - DNA, 1157 bp, Homo Sapiens
gtgcgaacgacactgctcgttacgacaagacacacacttggtggctccgtgcttcccacacaagacgacgaatacatttcccgtagctgctcaaatcatatgtgggtcatgtgcactcctgtgcggaatagcggtaattttccgcacagatacctatgcccgtgcacgtttgagaatttgcacaagccctggtacagctcgacatcgacacggagatattctcgcgacttattcaggtcccccccctgtattctgggcttggaacagctccatcatgtcttgcaaacccagtccacttcgggctgtccaggggctccggtgtacgaccatcattaggtaggcaaaggatgttcctcgaagtccgtgttcccttctccaggtagatcaagcatccattgtgaattggagaaggaagttttcctgaagagccagaatccttgctaagtcatttagatccacccgaccatctttatttctgtcaaaaatcttcatcatggtgccagtgtattcttccagtttagcctcagaaatggcctttttgtggtgaagaaagaggtctcggaggaagttgcggagctcagcagctgatataaagccactgctgtcagcgtcatatttgcgccaaatctgcataaactccacgctgctgtccagtgggttttcccggcgaaagagcagaagaaagttttcatcctcagataagaacataccagcaagctctttcatccgaatgcgaccatctttagaggcatcttgggtagtcataaactgctgtttcaccttgtgcaaatttgctttcatgaccgtgtcatcagtacccagtttcatcaacatgtggagaaagaaagcatcgagttccttctcttctatgtaacctttttcatccgcatcaaagcgctgccagacctgccagaagccagcggcgtccaagcgccccagagtcggttcccgggagctgtccatggtgttgacgacgaagaccaggcaccggcgcggaaggacctagacaactttgggaaggactccttcaccgtatttcttgacttgctctcctgcttctttcgctatctgattagctttgagtaactgttgctggggaggacgcgagcgctgctggccgtggcgtcgctgagccgtccctcagccctcagcccgct

SEQ ID NO: 435851 - DNA, 1909 bp, Homo Sapiens
  misc_feature (45)..(58): n is a, c, g, or t
tttttttttaagtgttcggtttttcttttaattatttaccagatnnnnnnnnnnnnnntagtgattgtttctcttcacccccaacatttccgtttaccaaggtcgagttggagagaaattcattgaacaacgatttgtgctcctggcctggagcaaattcttctcctctgctctacgccacctcaggcagcagggacagggcaaagggctccaggcagaaatcctggtggctgggcagcagagtggcagtgtggcgatcgcttcttctcgccattgccagagcattcagaccctttcccgtctgtccccctaccccaagtcccccagtccctcaaaggaggcagggagtggggactgcaggaagcaggacaggtgcacgggtggcctgggcagctccccacagatctggcagaggggacaacccctgcttctattgcacatcctggctcagcccccctgccccgagcagtaggccacaaaatgaaacactttccaaattcagagagcccggtgctgtgtgccaggctcaaggaggggaggtgtgttgttgtgtggcttgttctggaagatagatatgtatttttaagttactccatgatggggccaaggcaacaattttgcctctttgcataaggggtctggacatctcagggtcctgtagtgactgggcctcttcccaggcgagtgcagaagcctcggaagaagcctttcccccaccggcggacctcctggctccatcagatgaagaggcagcgcccaccggccacaccagcccctccggactgtcacgactctgggccacttggggcgacctctttctctgaacacctggagaattctgtcaaatgaccctggagaaaaaccttttatactacatgtttttccataaaatggcagctaagtcccctcaaataaaacctttaagtatttcattctcattcttaccagtgaaatcaagtgggacaggaataagctatttaactgacattagcgacaggataaacccctctaaaaaaccgcagggggggagtgggaactgattcagatttggcaaagctgcaaatctttccccttcatgggctggaacgaagctggtgggtgaagacaaatctaagtgtgccaatggcaagaactgcaggctatgaaatgacaggtcagacacaggactgtataaatcgtggcactataaagatgagaaggcaggtccatgatacagctgggagcaagcctttggagcatcgcttccagaaattctatctgtcctgtagtaagtagtagcatccagataaaatcagtggttctcctttctcctcttccaaacacattctgagagtttcttgtttaaataactatgtacacacccagcaagcctggtctctcttttacatgagggtccttcacttgagggtcctacaatggctttagagtcggttccaattgcctttttggagatttactgcttgggaccaaacctccctctgataaggacagtttctcaagttcagcttcaagttcagcatctgagatcctagggttaggcacgctgttggtaaaatgcctattgcgggggttgtcaggcagatccaaaggttctttggtggtatcctgaaggaggatgtccaattccttctccagttcttcactgtcaaaatctaagccatttgttaccccaccagccagagtctgagaaacttcatcctgggtgtcacagagctcttggatctgatccacgaggctctctgccttctccactgtgacatccttcatggagagtttgagtgctcctaccccagcctggtaggcgttaaaaaccatctgatctgtctgggaggcatagatccggtccaggatgccttgaacagtgtccagcttggccctcgtgccgaattcgccacccaggcctcgctac

SEQ ID NO: 435852 - DNA, 457 bp, Homo Sapiens
  misc_feature (88)..(88): n is a, c, g, or t
aacagctgggaaccaaaccctttgggaagcatcgccttcccaagaaatcctatctgtccctgtaagtaaagtagtgagcatcccagantaaaatcaagtggttctcctttctccctccttcccaaacacattctgaaagtttcttgtttaaataactatgtacacacccagcaggccctggtctctcttttacatgagggtccttcacttgagggtcctacaatggctttagagtcggttccaattgcctttttggagatttactgcttgggaccaaacctccctctgataaggacagtttctcaagttcagcttcaagttcagcatctgagatcctagggttaggcacgctgttggtaaaatgcctattgcgggggttgtcaggcagatccaaaggttctttggtggtatcctgaaggaggatgtccaattccttctccagttcttcactgtcaaa

SEQ ID NO: 435853 - DNA, 1301 bp, Homo Sapiens
  misc_feature (101)..(101): n is a, c, g, or t
  misc_feature (161)..(161): n is a, c, g, or t
  misc_feature (186)..(186): n is a, c, g, or t
  misc_feature (1140)..(1140): n is a, c, g, or t
  misc_feature (1209)..(1209): n is a, c, g, or t
  misc_feature (1214)..(1214): n is a, c, g, or t
  misc_feature (1240)..(1240): n is a, c, g, or t
agtcccaatttttgcaagggcatcctctgtcttacctacactgacagtgaatgagtggtggttccccttgccgttcatggagaccagcggcagagctgagnaaatttgaggggaagtgggggaagcctgggtgagtggttttccggttaggatgggaaaanacttacgcaccagtaagaactaaanccctgggcctcttaaaccaccagtgaatctagaatcttccgccagcagcgctgctcccttaatgtcataggctcaactatcttattaaggaagccagatttctttttcacttctctatagaaactagctataaggaaggatacgcaacttggttgctgggatttagaagtaactgtctactccatgacataattcagagtacccaaatcgggcccataagatggcaatggctcatggccagagtgaggaataccagagatgactgatcgaggtacatttcaacaaccatgggatgaaccgcgggatccggtctgcctagagccgggagaccctggatggctacacccttacttctattgaccaaggagctgaagctttattttggaaacatgatcaagattgtgtattagaaaaacataaagatgaactttcttggcacagaaatgagataaaatatacagtgctacaactgcagaattagcacggacgccaatctaaaaacagcaaatatttaacagtagctttaatgaattaatgcacaatattttgaaaaatctttgaccttgctcataagcagatgcctgccttgaagaaacactccaagtctgccgtgattccgagcgaaatgccaaggcagagtcaagacaatcattacctttagggctgaaacctgggcatgaggctgccccttctgggatgcctcctaaccagtctgatgtactggggaaggaggagtgaggtggggtcttcctcgggtcccagaagctgaaaacccagcccttcctttgccatcagttctgtgccaaggctggaagatgctgctgggagtgcagggcttcccccgtgtgggcgctgcagctcacacaggagcttggttggaggaatgaaggatgggattctggggggtagccggaggggtagggggctcactggggagccaccagaacatgggtnggacctccttttgaggagccagatggttttcgcagccccttttgggactttaagcacgttggagcaggnaaggnccaagctgggaaccccaagatttgtnctcaaggttggcaattttaccttgcagaccaagagaggcagcatttttggttgggcacaaa

SEQ ID NO: 435854 - DNA, 339 bp, Homo Sapiens
  misc_feature (123)..(123): n is a, c, g, or t
gctcacacaggagcttggtggaggaatgaaggatggattctgggggtagccggaggggagggggctcactgggagcccagagaacatggctggacctccctgtaaggagccagatggtgttcngcagccccatgtgggggcttgagcacgtggagcaggaaggccgaggcctggaaccccaagaactggtcctcagggttggcaaaatgtaccatgcagaaccaagagaggcagccactgctggcctgggccacagagccctgcctcaggctgttgggatataagccgcctccagaagcagagcctgctgtccatcaaccaggcaggctggtgggcttc

SEQ ID NO: 435855 - DNA, 924 bp, Homo Sapiens
  misc_feature (75)..(368): n is a, c, g, or t
  misc_feature (694)..(694): n is a, c, g, or t
  misc_feature (763)..(771): n is a, c, g, or t
agcggtatgtatcattcttctttctaatctgttagcagttatctcccagaagtatccctagcatcctgaagcaannnnnnnnnnnnnnnnnnnnnnnnnnnnnnnnnnnnnnnnnnnnnnnnnnnnnnnnnnnnnnnnnnnnnnnnnnnnnnnnnnnnnnnnnnnnnnnnnnnnnnnnnnnnnnnnnnnnnnnnnnnnnnnnnnnnnnnnnnnnnnnnnnnnnnnnnnnnnnnnnnnnnnnnnnnnnnnnnnnnnnnnnnnnnnnnnnnnnnnnnnnnnnnnnnnnnnnnnnnnnnnnnnnnnnnnnnnnnnnnnnnnnnnnnnnnnnnnnnnnnnnnnnnnnnnnnnnnnnnnnnnnnnnnnnnnnncaaacaaaccaaacaactgagagagggcatgctagtggagggaaaaggagagagtacaagagttgatactgcatcagagttccagggcagatactgacaagtgactgaactttgactgtgaagtcttcccatttatttttgaaatgggagtcgatgccttttgtacgttatcaaagtgtttattaaatttcctcctttactcagacatagagcatcaaaatatcacgagtaaagccaaaccccagcttttcactggggctgatatcttcctccccatggcccactgccccctcatattccccagcacttggactgtgtcacatggngtattgattgtatacttgttgtcttggcctcatgcaaaaaggcctgggtctagatctagtcagatgagnnnnnnnnnagagcatgttgatgatacaacacctgttttaaatgtctggccttatatgttattttggtcccactggtaaataatagattttattactatggatatttacctatgaaaaatgggaatggtgatctgccataatttatcaagcccatttttgga

SEQ ID NO: 435856 - DNA, 1369 bp, Homo Sapiens
  misc_feature (340)..(340): n is a, c, g, or t
  misc_feature (352)..(352): n is a, c, g, or t
  misc_feature (669)..(729): n is a, c, g, or t
  misc_feature (1192)..(1258): n is a, c, g, or t
  misc_feature (1291)..(1291): n is a, c, g, or t
  misc_feature (1342)..(1342): n is a, c, g, or t
gcggggggcgggttccccgaggggcagatccgatttcatcaccggggccgcacatgccaccggtccaccataccccccgatcggaccgacccgcgccgcgcacacgcgcagcgcaattatggcagctgttttctgtcctcggcacggtcaacgcgaggggtcgcgtgaggtattcggagcgccacccccgcgcccaggttagcgggctatcgagccgcgcgcacgcactctcccgcgggaccgcgctatgtgtcgcccgcgcgcccccgctccccgcggggggtggccgccaacgggtctcagacgctcgcctcacgcggtcggcgcacaactagcgganctcgcgctgatngtgggcatccggcgcccttgcggttcgatccggagtggagagcgggaagcggttgtcgcctacacgctacgctccgcgcggcaccaacgggcgcgggcacgcgcacgggggcggcagagacgaggcccgggcggtagcacaagcgatcccggcagggtctgccccaactacccagtcgaggaaaacgcgaacaaccacacgcgcggcgcacccaagtcgattcgccccagagccaggccgggggtggctggccgcgcccaccaccgccccccgctacgggcccggccgcgcgcggggcacggcccgaggcctcctcnnnnnnnnnnnnnnnnnnnnnnnnnnnnnnnnnnnnnnnnnnnnnnnnnnnnnnnnnnnnnagcgcgccaccacgggagcacgccctcccacgggggagcgggtgccggacggctaggaggcgcaggttgcgccagaggccatagcccccccgtggctccgtttcgcccctctggaggatggggagccctccgggccctaacgttggtccccttcttcagcttggtccctttgcaaatgtcctgtaagagggcgcctcgaccccgctgctcatctctactcagcttgggctgctctgtgtttgcctgatgaaatgtgggaggtggaggaggaccaggtgggggtggcgggggaggaggaattggcattcttgccctgctcccagttggcactgttctctctccgtctttatttgtacctttaggtcattcatatacctggccgcagctgctctgggagcgaatcctctgccgcctacactccggcttcgtcctgtcctgctcgccccccggcaagctctttctnnnnnnnnnnnnnnnnnnnnnnnnnnnnnnnnnnnnnnnnnnnnnnnnnnnnnnnnnnnnnnnnnnnccttttgccaacccggaaaggaatctgctcccnccgtcccccgatttgattatccggcccggcccgccggcggcggcgtggggncgggtgtacgggaggaccccgccccgc

SEQ ID NO: 435857 - DNA, 864 bp, Homo Sapiens
  misc_feature (284)..(578): n is a, c, g, or t
  misc_feature (755)..(767): n is a, c, g, or t
actgtgttagaaacctttgcagttgattggatcacgaggctagggatctgtgcatggtggccggtgaaacccaagtctcccgagtgctaggtgagggagggctcaacgggggtaatgtgtatggggtctgctgtcctttgccatcccctggaccatattaactctgggacagaccatgattaggtctgtcaccaaacttctcctaatcggggtttatgtatcattcttctttctaatctgttagcagttatctcccagaagtatccctagcatcctgaagcaannnnnnnnnnnnnnnnnnnnnnnnnnnnnnnnnnnnnnnnnnnnnnnnnnnnnnnnnnnnnnnnnnnnnnnnnnnnnnnnnnnnnnnnnnnnnnnnnnnnnnnnnnnnnnnnnnnnnnnnnnnnnnnnnnnnnnnnnnnnnnnnnnnnnnnnnnnnnnnnnnnnnnnnnnnnnnnnnnnnnnnnnnnnnnnnnnnnnnnnnnnnnnnnnnnnnnnnnnnnnnnnnnnnnnnnnnnnnnnnnnnnnnnnnnnnnnnnnnnnnnnnnnnnnnnnnnnnnnnnnnnnnnnnnnnnnnncaaacaaaccaaacaactgagagagggcatgctagtggagggaaaaggagagagtacaagagttgatactgcatcagagttccagggcagatactgacaagtgactgaactttgactgtgaagtcttcccatttatttttgaaatgggagtcgatgcttttgtacttatcaaagtgnnnnnnnnnnnnncctctttactcagaatagagcatcaaatatcacgagtaaagcaaaacccagctttcactggggctgatatctcctcccatgcccactgcccctcatt

SEQ ID NO: 435858 - DNA, 810 bp, Homo Sapiens
  misc_feature (756)..(756): n is a, c, g, or t
gtcagtcaacatggaggcagaggaatcggagaaggccgcaacggagcaagagccgctggaagggacagaacagacactagatgcggaggaggagcaggaggaatccgaagaagcggcctgtggcagcaatgaagcgggtagtgccaggtattgtgtacctgggccatatcccgccgcgcttccggcccctgcatcgtccgcaatccttctcagcgcctatggcagaaggtcggacgcgtcttctttacaggctagagggtaatgtatgctaggcacctgcacggtgacaggaggaggttgtcgctcgctggcggggtgcaagcatgcatgtcctgttgcttcagctgcgcgaggctgaggcacgaagttgctggatttcgggggtggggagtgcggtgcttggctcctggctggtgaatcagtctgtgaggatgctggggtgggcgggcggacgggatatggggagagtgggtagcgcagctgtgtctggtggttctttagttctcggattgttactatttgtgttcttatcccggctctgttcacctctctttccggacctgtttactggtttgttacatgaatacaacctgagtaaaagtctcgtcagcgttttctagcaaaactgaacataactctttagcattgctgcctaggtcaagaaactatttgatcaaccgcccctcttctttccaccctcaattttactttgcggctgaggacttgtgccggttttaagtagcgttcagggctggncagattaaggagtggacaattaaggaaagaattgagttagctagaggaaagggt

SEQ ID NO: 435859 - DNA, 1688 bp, Homo Sapiens
tttaaaaggcacataaaaatatttttattttctataaatacattaggaaatgtatttcttcccaacccagtccaccccattaactcaattttttctacataaaaaagatgctaataccaccctcacctgtgactgctaaacagagaaagattgcctggactaggcattatcctcctagttggaaataaaggccctttctgggggcaggaagtgggattttcaggggaccctacagacgtaggcagccaagagtcaaacaaaacaagcatatgcaatagtcataattatgctagtatgacagtatgaattaggtgactcagccaggcacatacaggagttcggagtggggacagtggaagcccacaaaactccatgtttgggccatcagtagacacttggtctgagaaacacagtaaaatgtctgcccgggtagtcacgatcattctagtatgaggtagacaggaagcagagcagggccaggaaatggaaggggccacccaggccctcaggagtccctgacaagggaaggtccctccatgctctctgagggtggcggggctccaaagatcctggccaggagccctttgttggagcgggccttgtcctgggcagttgccaggcgagcccgttcacgtccccctggccgtgctgctttacgggccctcagttcctgctcagtaggacgctgggcaaatgtccaggagccatctgggcgagcagggtccccatcggccgcaagaaagcgttgtccccgttccacactttgaagatagaagtcggtctcacgcttggcttgagcaacctccgctctcaagcgctgcctgcgcacctggcgctcaaaggcgaggtgctcgctgaggtgggaccaggtgaaacggtgcaagtacttgaggttccaaagatcataacggaaggggctgcgcctgcgggcacccataggcgtgttgtgtagactggccgccacgcgcttggctatgcgcttgtcacggaactccacccatccctcggtgtagtccttggtgtaggaccgcttttttccctccggcagctgctgctgccttcttcttgcgtctcacgaaccggtcctcagcctgaaagaagacgcgtccgacctcgccataggcgctgagaaggttgcggacgtgcaggggccggaagcgcggcgggatatggcccaggtacacaatacctggcactacccgcttcttgctgccacaggccgcttcttcggattcctcctgctcctcctccgcatctagtgtctgttctgtcccttccagcggctcttgctccgttgcggccttctccgattcctctgcctccatgttgactgacacgagcagcacgacctaatttcattacttctaatgactgcatagattcatttgcatggttaaatcacaatttaacctattttatattgatgtatatctaaattctctttttcacaatagaatgttttaaaggaagttgggctactcacaagttactacataagaaagcaaaagatgaaaaggcgaagcgagaagtgtcttcctggactgtggaaggtgatattaatactgacccatgggcaggttatcgatatactggtaaactcagaccacattatccactgatgccaacaaggccagtgccaagttatattcaaagaccagattatgctgatcatcccttaggaatgtctg

SEQ ID NO: 435860 - DNA, 1135 bp, Homo Sapiens
ctggggtcccttggggacttgttagcaaagcttggggatttccatgccccccaatgcttcgaacaacctgtatatccattcgcttgggcaagcttcttggataagtgtttccgcaatttctctgtacccgaccaccagtcttcacggcagtcactgggcttgccatcaggcactcaatatggtggtcctgaacaagtttcccgcgctccatcaatgccacttctccacctaaatggtctccattcaggtcccccatgatcaccctttgcgataaggagtgatatccacattgacaatgtcaccttctttgtcaggcctttctgtctggtattgccatggcaaatgacttcattcactgaggtacagcaagactttgggcaaattataataattcaggggagaagggtagcaatttcttgcaatacatgctaagtgtacagcgtgatctatttcttcagtagttacacctggtttaatcatgccggcagcaacatccaagacttctctagcaagcctacatacaagtcgcatcccttcgtatatcttcagatgagagtaatttaatctgagaagtacctttaagagcctgttcagattcagacattcctaagggatgatcagcataatctggtctttgaatataacttggcactggccttgttggcatcagtggataatgtggtctgagtttaccagtatatcgataacctgcccatgggtcagtattaatatcaccttccacagtccaggaagacacttctcgcttcgccttttcatcttttgctttcttatgtagtaacttgtgagtagcccaacttcctttaaaacattcctgcgagcagaagtacgagccctggatgcccagcttgatgcaagtgggacactggagcttggcctcactgctgcagccgtctgtctcgcacacccgcgtctccacggccgccatgctgcctgcccgctggaagagcgcctcaccgaggaagaggcggcggcgggagggaggaactgccggtcggaggggaggggagagagaccgagtcgggggaggagctgggcccgccgctgatccggaaaattccggaccggtaccagctaggggaggaggcacgtccgggggggagcggtggaaagaggc

SEQ ID NO: 435861 - DNA, 839 bp, Homo Sapiens
  misc_feature (27)..(27): n is a, c, g, or t
  misc_feature (37)..(37): n is a, c, g, or t
  misc_feature (86)..(128): n is a, c, g, or t
atgtatcggaatcacaaacttggaatncttagagctnaaaggggcttgagagcccacccagaccctgctcacgctgtaggaaggcnnnnnnnnnnnnnnnnnnnnnnnnnnnnnnnnnnnnnnnnnnnaggctagaaacgtccagccaagggctctttcacaactcctatccctgaaatatcccataacggccagataggtcatggggtattaaccaacaaagagatccagcataactgcttcttgaaatacaaatcactcagactcgcaggttccatcaggaaatagcaaaacatgagagggaaaggactggtaatgccatgttaccagtcagaggttccatcagaaaagaaccactaggaatgatgtagaaagagaggattgtgaaagcggtttgagcaattagaggggctggtgaaagtctcggttcggctgtttcttcttcaccagaccacaggccaggcggttggaatggatggtgggggagagcaagtacgactgagacctgcaagccacaagctgggacctgcacctgtctctcatcagagcccgtgctggtctctcatccccaaaccttcatccttgtggctgcagaccaagaagctggttctcatacccggcccagggtctggaaaagccaaaggcagagttctgcgggagtgggaggagccgtgggcccagcggctgcccacaccacaagtgcaggagatccatggtaacgtgcacgtgatggaacagggcctgacctacatccacttccagtgaatacgcatggctgttgctctacttccacttccaaacctcatgcaaatctctctcgtggccaaccctcaccagag

SEQ ID NO: 435862 - DNA, 839 bp, Homo Sapiens
ggtgcaacttggaaggagatggccaggatgttgagctggtcatcaatggacgagacaccttcttgacaagaggccagagaacagaattacctgtttcattaaatcttgcccagccacatcgctgatggggcctcagttctgtaccctggaatgcacagtccatagtcaactgtgtaccattgcttgagtgagttcatggtccgtaggaggatgaccactagcccaccaccttccactgtttctacagtcctggccagcaagtttggagttaaggcttcaaaatccgtgcagcacacacatgccgaaggtattgcccaggatcttgtgggtctcgttgtagtagcagtagcgaatgtttgtggctgctatgaagagttcaaaggggtcgtcctgctttatgttcagtgttccattctgttattttcttctgcagctgtcgcattcttttcttccggtgactgctaaaccccagctctgttcttataacaccagcagcactgaaggccgagccttcacagttgctttggataacatgtgatgaagtattaccacctgatcttttcctcgatccccaactacaacaaagagagatctttgccgctcagctactccattctcaatgagaatccggattcggttatccacctttttccgatgcatggtgaaaaattattactgcgccccgagcccgggggatcccagccagtggagaaggggaagcacgtgggagcacggaacaactccgaaagagaaggcacagctgactgcccctagcgtatgcctggtgtccgggtcacgtagtaagcctggctccgcaggcacgcgtccctctcaggaac

SEQ ID NO: 435863 - DNA, 562 bp, Homo Sapiens
  misc_feature (447)..(475): n is a, c, g, or t
  misc_feature (477)..(477): n is a, c, g, or t
  misc_feature (486)..(486): n is a, c, g, or t
ccatagttcttaacttgtatttcaaatcttaagaaactccctaacagacagaaaattagagagccaggaactaacagcaacagcaacaagatattcaaatatattttgacacatactgtacatttttttctgacatacatctgcacaaactacagttgacagtgttaaaattcttttaacattaaaaaaggtaacagcacagttttgttaaagattgacaaaagttttagagcacaagaaaaaagtaaataagaagggggatgaaagagcaaacagaataaactgcctcgagtaaatgtttaatgctgtgaaatgaagtacaatgaattgtaaatttgttcaaccaaagaaaactaattttagagagcttgctggcattcagtgaaaagttgttagtccctgttttcaatttcatcctgtattttctccctactccctctagagctnnnnnnnnnnnnnnnnnnnnnnnnnnnnngntgctagcanaagttctaattagagaaacaagaacattcagtgtaaagtttaattttagagattaattaattttctggttttcatt

SEQ ID NO: 435864 - DNA, 1650 bp, Homo Sapiens
  misc_feature (18)..(18): n is a, c, g, or t
  misc_feature (139)..(139): n is a, c, g, or t
aagctgtgcatgtgtggnagataggcctgtctgagccgacttaggcagaaatggtcaatacaggcaaaataataatagagggtcccccttcccttcttgtgagaccaggctctgtctcaggaacaggcctgagggaggnaggagccacgttcctccttccttggagccctgaggtggccaggctgtccccacacaaagcatgacatccaggtgccagctggctaagaaatggagcctgaggctgcagctcaccacctgtacctcacagatgtccattcagaggaaagaagggtgctccaaacgccaggcccccaaggagcacagactcagggtccaggcaggttcagtgctagtaggcaggtgggcactgctgtccaggaaaacctggtgggcagctgtttcccctgcccaagcctccctctctctagcctcttctccctcctcactcagccatctctacctgaaagtaaagctaaaccctttagaagccatgggccatggtatccccacaatttgggcccctcgcactccccgctaggaagaagggaaggggagccagaggcgatgttgcataggtggaggccacacagttggtggtgcaggcctggctgggctgaaggaagatgagaggggctgaaggagggtaaggaggagttctgatggctcaggcgaagtaagaagcatcaggggtgagagatgtgggtggcccaagggttatcctctctagcctgaaatgtgagctcaatccctgggtgctaaatctgctggggagactttagccaggggagttggcagggcaggagggctgttcacagacatgcacactgaagcacatcagggtggaggtggtggggggagcacacggagagaaggcggtgtcagagctttaggggaacaggacgtggggccagcgccctggggtggtggcaggatgcccctttgaagaccctgcgacacacagcagggcttcagctcataggatagggaaggatggaagggttgggcaagatttagagaatgcttgcctctgaccctgccattggaattatttctccagttggggcttgtgacaacgtcctcagtcccccagagatgtgtttgagcgacaagcacactccactcctccgcacaggtttagggaggcaaaggccgcccccacagacaccccacctctggaggtccttttcctctaccctccactgccctctcctctgttactcccacctgcttccagaggtccccgttgccacccaggtctatgtcatgctctctccccttagtcactcgtgctggccagctttaacgagtgctgcccgggtggcatctcactctctaaaaggggtacacactcagaacccaggtgaggaggcccctgttgggaggctgaggagtttagagagaggactgaggtacacagtcctccacatttcactcccctccccactgcaccctggcaacagctctgcaggactggggagcggaagctgagtgatgtctgtgcagtgagcacagtccctctggacctggagtgggggcccagttagataaacaacagtggagggagcggcagaaaggaaacccaatcttggggtcagcgccaagaagagggcagcaacatttccacggtgttggatggaggcctagggctga

SEQ ID NO: 435865 - DNA, 592 bp, Homo Sapiens
  misc_feature (13)..(13): n is a, c, g, or t
  misc_feature (31)..(31): n is a, c, g, or t
  misc_feature (101)..(101): n is a, c, g, or t
  misc_feature (123)..(123): n is a, c, g, or t
aaccccaaaaaanaccccaaccttctggaangttccttttccctctaaccttccaactgcccttctcccttctgtttaattcccaacctgcctttccaaangtccccccgttgcccaccccangtcctaatgtcaatgctctctcccccttaatcaactccgtgctggcccagcttttaacgagtgctgcccgggtggcatctcactctctaaaaggggtacacactcagaacccaggtgaggaggcccctgttgggaggctgaggagtttagagagaggactgaggtacacagtcctccacatttcactcccctccccactgcaccctggcaacagctctgcaggactggggagcggaagctgagtgatgtctgtgcagtgagcacagtccctctggacctggagtgggggcccagttagataaacaacagtggagggagcggcagaaaggaaaccccaatcttggggtcagcgccaagaagagggcagcaacatttccacggtgttggatggaggcctagggctgacacctggccccagcctcagacctgctgaatgcattagctagttggaatccagcctgctggtcac

SEQ ID NO: 435866 - DNA, 1117 bp, Homo Sapiens
  misc_feature (552)..(579): n is a, c, g, or t
  misc_feature (1045)..(1045): n is a, c, g, or t
  misc_feature (1105)..(1105): n is a, c, g, or t
gtcagtgagtcatccacgactttattatccaccagtttgatttgtacaatctttgcgcttaaatccacgacaaaaaggccacagtgtgatgcacccaattgacagagacctgtcttctccccagccaggcccaacccaccccacaagcccttgtccccaggacacatggagccttccaggtgccctacatgagtcccccatcactctgtagctgtccaccctggggccacacctacaggaatcacatcagcccccagggccacaagagacctagctgactgattcaggctgagcgccattgcccatcctccttgggctgattcattggcccagagcctccagaactgtgtccccaaagggcaggtcatgggctacaaccccagtccaggagtgcctgctctccagggactccttccactaagcaggcgctgagcagagcaccaaagggggcttgggagtgactgcatgtgtgtgcctgtctaggcaacctagagtctgtctgtgcctgacaccctctgacagttccggagtgcaaacgtgtaggtgtgaggnnnnnnnnnnnnnnnnnnnnnnnnnnnnatagccacagctgctagcagaagttctaattagagaaacaagaacattcagtgtaaagtttaattttagagattaattaattttctggttttcattttccctggcaatcagtaaagctaccaagaaaatagaccaaagaattggtttctctctaagtctgtgcatgtgtgggagatgaggctgtctgagacgacctaggcagaaatggtcaatacaggcaaaaataataatagaggtcccccttcccctcttgtgagaccaggctctgtctcaggaacaggcctgagggaggaggagccacgttcctccttccttggagccctgaggtggccaggctgtccccacacaaagcatgacatccaggtgccagctggcttaaggaaatgggagcctgaggctgcagtttcaccaccttttaccttcacagatgttccattcagagggaaagaagggtgtttccaaacgncagggcccccaagggagcacagattcagggttccaggggaggtttcattgttagtagggnaggttggggatt

SEQ ID NO: 435867 - DNA, 443 bp, Homo Sapiens
  misc_feature (41)..(41): n is a, c, g, or t
cttatttcacttagcaaggtgttttcaagttcatatatgtngtggcatgtataggaatttcattcctttttattgctgaataatattccattgtatgtatatcccacattctgcttatccattcatctgttgatggatgcttgtttcttcctttggtttattgtgagtagtgctgctgtgaatgttgacgtaaagtgtctgtttggatccttgtcatttcttttgggtgtatacctaggaatggaattgctgagttatatataaatctatgtttaactttttgagaaaccaccaaactgtttggtggctgcatcattttacattcccaccagcagtgtacgagagttctaatttcttcacatactggacacttgctccactttcttctttgattgtagccatcctaatggatgtgaagtggcatcgataaacaccgggtaccg

SEQ ID NO: 435868 - DNA, 881 bp, Homo Sapiens
  misc_feature (47)..(47): n is a, c, g, or t
  misc_feature (815)..(815): n is a, c, g, or t
cttcttcgtaaaggattccttttccacagcatgaccctgctttcctntgcttcatggcttctctgtggagcatcacccccattttccccaatgactggctgtactttgaaacattccattttctcatcccacgtccccagaagagcaaagtggacttttcctgatggatttgtcacttccccccgtcacctttcttgctacatcccgagagaagtagctataaggaacaaatttaagattacacttgtctcctgtcttgtgattcacaatatcaatttcgccagactgatctatccacaacttgcccacaataatgttgtgtacagttgtggtaactttcttccaagtgtagtggtgcccagttgcatggaaaatacaatgaatggtaccgaggggcataatggagaggtatttgcctcgaaacttgctggtgattttgatttcctgacgcaatgtccagccatttttggactcagcatggtgcgcagcagcagggggatgatgactcacctgttcacagagggatcggtacccattctcctctaatcggtccagctcaaaggtctccccaagcagtgggttgaatggcttactggtgcggaagacagtagtggagtaggaggacacggtgaaagctgcaacataacagagctgttctagagaattctcacattttgcagctcggtctaacagctcatggtattccagatcttcagtaaggcgctgaagcatggacaagggctcattaaagtttaccggcatggggatcttagagagttcttttccaatgcagttcttcatgatgctccataaantgaggctatagtttggcttgtatggtattctggttctcttttcctttttggtctcctccagctgat

SEQ ID NO: 435869 - DNA, 1009 bp, Homo Sapiens
  misc_feature (696)..(696): n is a, c, g, or t
  misc_feature (732)..(732): n is a, c, g, or t
  misc_feature (899)..(899): n is a, c, g, or t
  misc_feature (909)..(909): n is a, c, g, or t
  misc_feature (924)..(925): n is a, c, g, or t
  misc_feature (962)..(962): n is a, c, g, or t
  misc_feature (966)..(966): n is a, c, g, or t
  misc_feature (982)..(982): n is a, c, g, or t
  misc_feature (985)..(985): n is a, c, g, or t
  misc_feature (987)..(987): n is a, c, g, or t
  misc_feature (989)..(990): n is a, c, g, or t
  misc_feature (992)..(992): n is a, c, g, or t
  misc_feature (995)..(995): n is a, c, g, or t
  misc_feature (997)..(997): n is a, c, g, or t
  misc_feature (1002)..(1002): n is a, c, g, or t
  misc_feature (1007)..(1007): n is a, c, g, or t
gccatacaaaacaggtaaaggtctttattggtcagccactactgcccgggcaagcagtggtgtgagaggtacagaacggtgcgggttggggaacactctacagaatctaaacctaccgtgacatcagctgagaacgtcttgttccttacagagggagcgatccatctctcacagactgtaatgtaccattaccacttaacacagcatatagatatatgcatatacggatagattatatttatttattacaaataaactgtagtttcacatctctcaaaaatggacccagttttcacatggatgttcaggttctgaatgtacaagccaaggtcaatgtgcttatttaattcgtccatgcaaagcttatacgtgtatcactaagtactttaaaaaatagaatggtctccttttgaggcaaatctgtttagactcaggattagtaaaacagtatgaaataatgaggatacactgatagaaattagggaagtgacatactgatggttctgggtatgtgaggggtggggggttcgttgtttccttaagacctgccaggaaaggggagacttggaaccaggagtggcagggccacccaagctggaggaggtgggtctgctcagtcctatgcagcgcaggctcagagcaccaccgaagacctttctgccaaagatctcatcctacccatgagaaccatcatantccagagactaaaaaacgccagtcccagctggaganggggaaggaggtccattcctatgggcattgtcccaacatgtttgatgggggcggcaggtgatgggggcaaggtagatccacctggctgggcagaccttgtcttgtaatgacaaaccatgtgaaagaaaacttccaaaaagaaaccagatgttcagttaaatattggnaccctttgantatgtggaaatactnntctcgatggtctcatgcggatgctggccccttcactnaaantctcgtgtggagtgtntgntnanntnggnanatgtngatgngg

SEQ ID NO: 435870 - DNA, 1072 bp, Homo Sapiens
  misc_feature (580)..(580): n is a, c, g, or t
  misc_feature (889)..(952): n is a, c, g, or t
cagaccttgtcttgtaatgacaaaccatgtgagagaaaacttccaaaaagaaaccagatgttcagttaaatattggcaccctttgcctatgtggaaactcctcatctcgatggtctcatgcggatgctggcccccttcactcaaacatctcgtagtgacgtgtctgcctcaccctcggcaccatgtcgatgaggagtttgaccccataggcaaatatggtgaggccgatcagaacgcctatgctgccgtccaggtaccagaccgccgagtcatgcttgaacacttccgcgctcagaagaatggagaagcccatcacgccacccacgagggagttaaacccatctgttatgagtgctctactggtcagaaccttccccagcatgaacttcaacacggccaggatgctgcaaagaatcccacttaaaatggagacactgaacaggaaatcgtccacttctgggagcagcctagttgagaggtcatggatggctttgaccactatacatatggatgacagaaggaatatcacccccaagatgacacaggctatgtactccctatgggcagagtgcacagcggncgcgttgctgtaacgccacaggacaatcgccgatgacaggacgtccaggatggcatcaaatgcaaacccaaaagcagaggcgctgtacctcataacggagacagtaaaggcagccaccgcgagggccagggtgacaatgatggagaaccaggacacccacaatgccttcttcctgtagttctgggcttcgtgaggtttcaggcgggtgctgctttctagtaagcctcggtcctccagcccgtcgctgaactggccgctctcgctgatccgcacctgccgctcctcctccagctggggcggctcgcgcannnnnnnnnnnnnnnnnnnnnnnnnnnnnnnnnnnnnnnnnnnnnnnnnnnnnnnnnnnnnnnncgggacggtgggcccctgggagctgcggcgctggatgcccgcggccggctccatggcgcggggctgcggatcccggcggcggcgacgacaagcgcggcggggactcgagtcagaagtgcg

SEQ ID NO: 435871 - DNA, 757 bp, Homo Sapiens
ctcagatgctttcttcacatgtcgaaaaaatgtccttctggcgaatcagctcatccccccaggtagagggcgactttgccatggcccctcggggccctgagcaggaggaatgtgagggcctgctgcagcagtggcgagaagaagggttgagccaggtgctctcaactgcaagtgaggggccccttatagataaaggactagcccagagcagcctggcacttctgagtggataatcctggagaagagaatgctgcttcagaggacaggtggtccagcaggcagctgagtgaccttcgggctgcagagaacctggatgagcctttccctgagatgctaggagaggagccactgctggaggtggagggggtggagggctccatgtgggcagctatccccatgcagtcggagccccagtatgcagactgtgctgcccatcccagtgggtgccctggccacagagcagtgggaagaggacccagcggtgttggtctggagcatagcacctgagcctgtgccccaggaagaggcttccatctggccctttgagggcctggggcagttgcagcctcccgacagtggaaataccatatcatgaaattttgtggcgagaatgggaggatttctccacccagccagatgctcagggcctgaaggcaggagatgcgcctcagttccagttcactctgatgtcttataacatcctggctcaggacctgatgcagcagagctcagaagctctatctacattgccatccag

SEQ ID NO: 435872 - DNA, 1142 bp, Homo Sapiens
  misc_feature (268)..(268): n is a, c, g, or t
  misc_feature (346)..(346): n is a, c, g, or t
caggtagccagaagtttgcggcccaaactgggttcttttggatctcctggggtacacggaggggaccatttgtcaagcattcaggatcccccagggaattgggccacagtgggcctgcagtttctttgttaaagctaatggaagaagtcttcctgtccaggatacttccaggttggcatcccatggtactggagctcttcatccctgatgaagtgtaagagagtgaattcagggacagaatttgggtccccgcacagaatgatggggnagtggctgccatctgacagtctgcccacttgttccacttccgccaggagaatggccatctgggccaggcttgacatcngccccgggcgtgggtgtaaaggatatgggtatttgccacacacagcggggccaccgagacttgtcccaggccttctgggacgagtggttgcagtagcaacactaagcccacattatcccgattaagtagctccaagccaggccggaagtactccacagggctagcacagagcaggcggaatctggtaggcttgtagcagacagcacagccatcggttttacacccagtcctcctcttgtagaaacaggtaaagcccatcattcgcagagagggttccagctgctcccagtaatgatcttcctggacttcctggagacacaggatatcagggtcccagtgctggaattcctgcatgaggttcacgaagcgatagttccaattgaggatgtctggatggcaatgtagatagagctctgagctctgctgcatcaggtcctgagccaggatgttataagacatcagagtgaactggaactgagggccatctcctgccttcaggccctgagcatctggctgggtggagaaatcctcccattctcgccacaaaatttcatgatatggtatttccactgcgggaggctgcaactgccccaggccctcaaagggccagatggaagcctcttcctggggcacaggctcaggtgctatgctccaggccaacaccgctgggtcctcttcccactgctctgtggccagggcacccactgggagggcagcacagtctgcatactggggctccgactgcatggggatagctgcccaccctcgtgccgagttcgccacccaggcctcgcat

SEQ ID NO: 435873 - DNA, 482 bp, Homo Sapiens
  misc_feature (458)..(458): n is a, c, g, or t
tatacaaaggttcatgtacaagctttaaaaagtaccttaacaggtacatatgaaatatacagtttatcttacagaacatttaaaaaaatgtttttggagtccattttaatgccaccctgacccatggtaattgttttgaaatgttggtggcacctgtgctctgtgaattggaatctgtccaggcactggagatgcctgctgaggtccttgaaccccatgtggcagggccacagagccaggatgaggacagaaccctgaagcagtaggtgttggaatactgtttggtccttggggctggagatgaggacctgtgacaggtaatggacaatgtggccctgttccagaaggctggtgctggggtcccggtcccaaagtggtatgatgtgtagcttgtgagggatacggtggtacagttggatgagcactcgaaggaaaaagtggaggtccttgatgaggtngatggtgtaaggcttgagctgata

SEQ ID NO: 435874 - DNA, 896 bp, Homo Sapiens
  misc_feature (861)..(861): n is a, c, g, or t
caatttttaatttttgttaatatcaacagcaaaagcctagtgcattgggagatgtgcaacctccctgaaaatcttttctgtttctggagtacttcaggggtggcctctggcccagagcctttgccacagtgctcccaccagcccccacctcatccgtctgtttgcagagcctcatctacaggtccccacgctgccttctttactcactctgcgcttggccgttttgttatttggcttagtctacattgggcggaagtctgtgtgcacagagtgggtgttccttcgagccccttccactcagagggccacacccagcgatgccagtgaaggtggcacagcctctcttcagtttctcctgactgtgatctcactggggtagaattcccctgagagaattccctcactcacggctccctttgccagagtcagttcaatcaggtctgatgtgagcaatttacacacttgtctcagaaagtccctcagggtttgtagaggactgcaggggggcatccgctgcagactcagcctttctctgcagccatcctgcagtggggggtgagcgggcacagggctgagaactgctcttgggtggtgggaagcaggtgtcacggtgccagttttcccccctgtacccttcccccagcttgagccgtgtcacccccctctccctccacgctgggcctgtgtctcaggctctctggaaggtggccctgccccggaccctcttgcaggtgtcctggtttgacttggaactagatggccatctttccaggctttggtggcccaagagcagtctggggtggatggaagtgggctgttcccctcctctccagccccctgcccacccaactggttggaaantggctaaactaagcaagggaacggtggccataggg

SEQ ID NO: 435875 - DNA, 864 bp, Homo Sapiens
  misc_feature (736)..(736): n is a, c, g, or t
aaaaacaaggaagaaacaaccggcctacatcaacgaatttaaggttggctcatattcatgtggtgtgtctttcggccatgaatgaggtaatgttaaattttgttcctttgctgctagaagtcataatttaatgaaaacgaagtttttgcaccaatatcttcattttttaaatcatggttatcaatttccccatcaagtaatgatttgattgtttttgtcagttccttttcattcatctaagtgctgtcctgaagctctttataactgacagtttccttgttgtaaaggcaagaagaactgccatttggtatgttgtaaccatggctacatatggtttgcccaaatagttcattttaacttcacctgtacacagataatgtaaccatgtaagtttccttccactgaaatgttggctataaaataattcaaacatctgtacacttttttctaattcctggggaattgcaaacgtagatgaaggagcctgagtaagaggccacgcaccagcctgtagaacatatatttgaaaactaattcccaaatctattactgtgtcttggtttttgataaaattgttgaacttattgttgagatcagcgctgacactcatatctgtatacatccgatgtagcttgctggtaaactcataaccacaggcttgctttaatttgttgatcatggcttcttcagagtccatagacatggataacccatgaattaaacgttttgccagcantcttgcgtagaacttttgaaagacgtccttgtcatcaatgtatttgaacactgtgatgaagctcgtgagcctgtcttccacttcattctctgtcatccctttcgctgacttcttcagtaagttgtcac

SEQ ID NO: 435876 - DNA, 456 bp, Homo Sapiens
ataatggcacttgtctgccaacctctctggacctggaaatgctgtaaacacacggggcccaccttctgccactgctccttagttcaggccgggtgaagggcggtgctggcagaacacggcacctgcggacgcctctgcatggccaccggccctcagtcgaggaacttgggtgagccacgccaggggcacactatcatcgcctggaaattaactttattgacaacatcagaatgttcaaggctttaaaaccacacttgtgttttgtgttgctttcactctcagaagattcacagctagtttgagcccatcaatttcatagagaatcatgtattaaaaacaagtaaattgaatgaccaaataaattaaaaatgttttaaagccctgagttcatagactggttttaggagatttttatgacacacgggactttgttttaataagcagctgatagatttt

SEQ ID NO: 435877 - DNA, 436 bp, Homo Sapiens
  misc_feature (48)..(48): n is a, c, g, or t
  misc_feature (424)..(424): n is a, c, g, or t
caatgtacatttctgaaaaacacaatgtcagaaccttcccacccaggnttggcccagcctgccatgtgaaggcaacacgagtgctatcacagatgcggcatcaggagtgtcagggtgaagatcaggcatgcacatgaggtggaggaagacgagatttagagatgtccagcctttcgctggatttgagaattaacagcagactctctgtcttgccttagctctgaaggatacagcatcctttggtcactgtcagaggaagctcagttaccatcctcaaggatggtagaaaggctttccaaatccccctgggctaatccaggcagaggctggattctatcccgtccacctggaataatgcttccatcccccaaccctcatcatttgaaatttccaagaccaagataacgcatcctttcccagaganaaaggctttttg

SEQ ID NO: 435878 - DNA, 626 bp, Homo Sapiens
  misc_feature (392)..(392): n is a, c, g, or t
  misc_feature (454)..(454): n is a, c, g, or t
  misc_feature (520)..(520): n is a, c, g, or t
  misc_feature (554)..(554): n is a, c, g, or t
  misc_feature (565)..(565): n is a, c, g, or t
  misc_feature (583)..(583): n is a, c, g, or t
  misc_feature (603)..(603): n is a, c, g, or t
catatggagaatgatttttgctaactccagcaaaaagcaaggctgtatgaccctttatttggcaatgttaaccatacttttcttctttttgtcctatagccccactctcaataactgccatctacattctctcttctcctctcagaaatctcactctgaataacttaatgaccatagtactcacacttttttaattaaagtgatgtgtcctcacaaatacatttctcaaactcaaaacatcatgcttgaaatatcactgaacttgtcaccaaagaagtcacatggcaatgataataaagaaatatgcagactacactctgacggataagagctctaaagagtaaaaacaatggaatttggaaaaaataggagtaaagaattgctttgagcantaaaaactgagattgataagccacttttctttttgatataggcttgtcactcacagccaaantctctcagcaaaaccacagctactgtttaccctcctgagagatgctccttcctcacccaacacgcntcaaccttcctagaaaggtttatcctctttacanttcttgttaanggtggcactgaatacaanggttactcatgatcaacttncttactagttgtcagtgtctgcc

SEQ ID NO: 435879 - DNA, 893 bp, Homo Sapiens
  misc_feature (37)..(37): n is a, c, g, or t
  misc_feature (834)..(834): n is a, c, g, or t
  misc_feature (839)..(839): n is a, c, g, or t
  misc_feature (844)..(844): n is a, c, g, or t
  misc_feature (849)..(849): n is a, c, g, or t
  misc_feature (860)..(860): n is a, c, g, or t
  misc_feature (873)..(873): n is a, c, g, or t
attaaaacatcgcaataatgttcctgtgtgttatacntcgagggttttagaaatgtgattttcttcttttgacctgtgaggagtataacttctttcagccctcagattttaaatacaagcaaataaactcactatttttagacgtttttttcctccaaggtggttttcttctcttaaataactcgatctgtacccagctgggtagcagccagcaaaggccatcagacaaccagaagcacatccatttttgtagtgtcacaaacatgtatatgccacactttgcaccttaatgaaatactttgaaacagaagttattcactgtgtttttgatgatctatctgtattggaaatatgttcctggaaaatgcatttaaataatagtaaattctcttgcatgttccattatacgtgtcttctaagagctgttcaatacagtattcactctagaaacaattatctttttctcttaatgattttgtgtgcatctttaatctttcaagccaaattacagctatttcaggtttcctgtgttagcttggggataggatggtggctggagacaggcaggcttctctgccctgggaagagcccactcagcttaattgctctgccatcgtagagcctggttggacttggcttcctgaaaactcccactgatagtgcctgttagatctcctgtttgtttcagttggcagaacatttactggccccaactgtggcatcatcctctcagcagtcttcctgtcacccgcctggcaggcagaaggagctgcagtcccacgtgggcctgcctggggggggtgggggctgcatggcttttacgggtgggcagtnttcancacanggtanggtttaagttngggattttttgancagggcaacttctgcaactg

SEQ ID NO: 435880 - DNA, 1317 bp, Homo Sapiens
ggcaccgccgaagagtttgttccttttggcttgctaaatacattctggaaagcaaccacacaactggagctgcagaagctgtatatagttccatttgacatggctaggtgatactgagggattgctgaggttttacaactatgacatgaaacctggacacctgaagaagtaacagtcttaactctgtaagcagataagcaattaatagagcagaaaagctctgtttttcttgaatcatttgtagtctcaatcatttcagctgagggcctcaatgacttcccccagggcatatggaggaatttgggcagaattctgcttgtatgccgtgacacttgttgaactaaaaaccttctgggattggcaaggaccagagctactatagcaatagctcccacagttctcacaacagttcatggtgaggttgtttgtagagtgaaattttgaaaaacaggcatcactacaaagaccatgtaccacattttgatatttaacttcaaatcgagtatcagcattcttctgacacatactgcacttagttgaaatgcttttggtatatatggtaacaacaggttttttctttagctcataagatgacaagcatgattggctgcagaaatctttgctaggataggaattctcaaagcgagttgtgatcacatccttaggatttaaaatgtctttcgagcagtttgtgcaggttttcttgggaggaggtggcaggcaggcaggtgaagaatgtctggtgatgcatcgtgtggagcagaagagctgagtagatcctgtcttatgatatgcagtttggcccttataaagcatttttttacaaccagaacaaaaaaccttaatagcaacagctggaactgaaggaagcaacacacttgggccagatgatgcaaaagaaagctgaaagcctgggttcaactgctgggcaataggtctctcattaactgaagacacaccaccaattttcaatttactttcttgagtttttggctgttggacacatccatactcttgagcattgtctggttcttctttaattttgtccagaagctcctgctgtggtaccactgctttgccacattcaccatccaaaggttctttcattctaattttttacctcaaagagtgtctcaggctcaaacgaatagatttcttcttggtaatggatagttggacaccttctgtcgcctccctgctaccggaggagcactggaataggaaccaagtcctctgcatctagacagggattattttctcttctggaattccgcctgatccatcccaacgcaacgaccggccaaccacgcctccgct

SEQ ID NO: 435881 - DNA, 1262 bp, Homo Sapiens
caatttaaaaaaatagctttattgaggtatactttgacatgccataaaattcacccattgtatgtgtacaattcaattacttcatttatacaactgttcaattatcaccatattccagcttaatggtcaatatttgctttgtcttttgttcttttctctatggtaagcaaaaatctattatttgaaaggttccttcactgaaagctgggtggagttgaactctaaaattacctacaaaattactttctatctagtcatctatgtctaattcttcaatttgacacatgcatgtaactagcacaagctgcattttaaaggcagcaggaaggtcttttactatcattagaagttaactttaaggattgagcaggcacgatacagcatagattgtttcgtgtgctatatagtaaggtcaatattcttgctccttctacaaataaaaaaaagttccacagaataacaagtacaggtggagttcccaacggaaatgcaggtactgaatacaaccaactgcaactgtttctctgctcctcaatcctgctggcgtagtacgcgagctgccgacgtcccccaacccaccaggtaagccggccgctcctgtccctaggctgtgaggggttcagaggtaagaccttcggtgtattcacttagctccctacggaaaacttcgagaagaaggcgactgagatcggttagcacttaaatccctttcaaagccccggctcccatcgcccctcctatggcctcctacctgcagagaagcaaagcaggtacacccagtgccttaggcgggccaagcctagcactgtgggagcaaaaaacatggcttcatcgtcagggtgcgctatgaccagcagggtccggctttcggctcccagccgtcctccctgctcccgactcttcattcgttctgaggagtcccaaacccagaggaagccccatgccaagaccgccaacgccacacacaggagccacattgcttccatgatgggtaagcagcactgagcctgcgcagtaggaaaaggctgcctctgaccctgcactccggctggaaaacttcaccggggaatgttgggttccgctggttaagtccctccgccgacatgctcggaagcttgaggtttaacgttaagggtttcttgtgttttacaaagaagtttcatgccgtcaagtttctaccctagtcctacacactgtacaatcggttaaaaggagggtttaaaataaaccccctttaggagagtcctcccctcatttcgaat

SEQ ID NO: 435882 - DNA, 454 bp, Homo Sapiens
  misc_feature (285)..(387): n is a, c, g, or t
tttttttaaagtacctatttgtttaatatacacacccaccatgcacatataactatatgcatacacaacatgaacacaaatattaacaaagtctggaaaatatatagggttaattaacacctattgattccggataggtgggactgggaaattatgtacatttgttttcttctgtttgcttgcttacatttttatattttcaataatgaagatatgattgcttacataataaggaaaaagttaattttcacttaaatgttaaggccaggtgcggtgggttatacnnnnnnnnnnnnnnnnnnnnnnnnnnnnnnnnnnnnnnnnnnnnnnnnnnnnnnnnnnnnnnnnnnnnnnnnnnnnnnnnnnnnnnnnnnnnnnnnnnnnnnntttattaataaaaaattagctgggtgtggtggctcacacctgtagttgtagctactcaggaggctcc

SEQ ID NO: 435883 - DNA, 2160 bp, Homo Sapiens
  misc_feature (33)..(33): n is a, c, g, or t
  misc_feature (43)..(43): n is a, c, g, or t
  misc_feature (53)..(53): n is a, c, g, or t
  misc_feature (70)..(70): n is a, c, g, or t
  misc_feature (94)..(94): n is a, c, g, or t
  misc_feature (567)..(575): n is a, c, g, or t
  misc_feature (1026)..(1026): n is a, c, g, or t
  misc_feature (1052)..(1052): n is a, c, g, or t
agccgcaaccaaaggggcctttgaagccgcccnggggtaaccncaacatgccnccagaggaaaataaccntaatttccacgtcccatgtgtccnccctttaaacgtccagccccaggacagtccagccaagtgacctgacaagagatgtgacatcaaaataattttttgccaggatatcatcaaaataagcaaactttgcaaatacccagacctatgagaacatgctcttaggctgaacaattcgatgctggtgatgaggtcaaaggaaataattcagtaagaatggaaattactggagatactattgtctcagggctttgtactacatgaaacttgacagtggtgtctgtacagtttaactctgatacatttacttggaaatgcacttaattttcaaaaactggagagggtccctgtgtgatacctcaggaaaattcttgtcctaatgcagtgtgtccatcaaatttagtctttattttttcaatttactacaataaatatgaaaggagggagaatcttttttacataaatgccttgcatcatcctccagtcccctcactgggggnnnnnnnnngcatctctcaagtctttgtccaactttggctgctcagaccgatggctggtgacagtcactgcaggggttcaggagtggaggaccttgtgtcaagcagaacacacgtgtctgcatgggtcagttgtgcatgtgcttcctgggtggctgataccactgaaggccagtgtgcaggagcattggggtgactcagggttcagtccagagccaggagtggctgggtgttctcattctctcccttctcctcatgtttcagggtcccagcttctaccacagactgagatcttttcatcagcttgggtgagcattctttctccagattcggggacgtatgcttcacgtgcattgcattataggaatgtgtgagtatagtcattttcatccgctgtagtcggggaccgaagtaacgtcccgggcccaagttccccatgtcataaggaggaagaagttcctnccaaattcagagggcaaaaattcagnggtgtattagctggtgaaggctgtttaaattgtttccatgcaggaaaatccgtttcctggtcttgtctttaagaaatggcttgatgagtgtgtagagggcatgaatgtaccagggctggttgacaaagtggactcctccaaagcgggcaggaaagctgtcctgcaacccttcaatggccagtttaaggattgaaggtgtcagtttggaggcttgtttgaaggaaaaattactccagtctataattaaaatgaagccatttatctgaagctccggatcttcgattaggacttccaatgacagcaggatggcacgaaggatgtctgtgaaggagttcctactctgatcccaattggctgcaaacagcaaaagaatcttcctgccgtaatggtctcggttttccagcaccccggggaacccatcgatcagagccctcttaatgccgggatcatctgccttgaagtttttgaacatgtccaggtttagctggcggtactggaaatactgagccaggagtctaaaggcatccgcttggtgaaacttcctggctcggagaaatctcaggatgaaggcatcatctgtacgtaaaaatccaatgtcaggcctggtgatgatcatgtccctgacttgctgaatatcctgatgtaaaacatcggggttttcattcagttccaggcgagctttctctatagtctctggactgagtccagcctgtaaatgggtcatcttggccaaatctccgttccaagtgtttaacttctgatattttggaagaagagagactggtcccattcacctgatggtctgctgaaactgtggcccattcaacagtgttttactaccaggctgccccggaacagacaaatagagggtcttctttcacattcaggccctatgtggtggtgttcatccaaaacagaagcaaaactgaggccattgcttacttcacacggccgcccagccttgctttgggaatgtatttctgcaggtgtcctcgctgctgaactgggtgggtgagatcccctattctggcaggttcgggctcagatttctctagaaagctgtgaatgagagctcgggctccacaaggggctgtgattttggtaggag

SEQ ID NO: 435884 - DNA, 386 bp, Homo Sapiens
  misc_feature (306)..(306): n is a, c, g, or t
  misc_feature (368)..(368): n is a, c, g, or t
ttgtcagtgaggccgttgtcagcgaaggcgctagagaacgtggcgctggatagctggcgctggaaggagttggacagacagatggggtggagcatgcagcgctgctcactggggtaggcagggctgttctcgcttagggctccgggcgggggctcatcggaggctgttgaccccacctcgctgctcacctcagaagtggagagctcactgctaatctcggaagccatgccgctgctggaggacggcacgcccagcccatctgagggccgatccttgatcaccatgttcactgagggaggaaagatnccaggactgggtggtggcacagccccaccggcgctgagcttgcagcagcagaagctgtcctnagtgacactgagctgcac

SEQ ID NO: 435885 - DNA, 1889 bp, Homo Sapiens
  misc_feature (375)..(375): n is a, c, g, or t
  misc_feature (1540)..(1829): n is a, c, g, or t
tccaactttcaaatgttttatttttagtgtttttaaacattttaatacaacaaagatataaaataatatatattagttaaatctggatttaatttagaatcaagatatttacttatgtacaaacactgtgcttcaaggtatggctaccacaggaactttcacatcttcaagtaatactagtttctctgtggatagagagacatttaggtagaattcacaaaacaaaacatgtccgttttagtcccagctaattttgcttcccccattaagtaccagtttccactttctttgttccatgtcagaaatacttcatttttctaataatacataagatcctctggaataaaacttaggtaaaagtggaacatttttaangatgacattactaattgataatattgcttggctatgttcaattctccagacaacccagttcttcagattgaaagagacctgaagtaacaatgaaattaccatagtgttctttctcctgccatatcaggcacaaactttccttatgctgaaacatggaatacactgaataaaaagtcctttggttaatttagggtagaatgtattataaaaaccagaatagctgaaatatggcttacagatttcagagatatttgtatagaacttgaagcaaagtaattggtcacattttagttatttgaaattggtggcattacatccgggtgaggtgagaagggggtccaaaacctagtttcatactaattttagtcattcaaagttactcaaagacagggaaaagaaacaaaaaacctactcagtctctttccattcttattagtcacctgaagcattctgacctttgatgttactaacaattctcctctacagcagtatgggataattcaggctaaactgcttacaaacactaactgttaaactgtcaagttggcattaaaattgacacctttgctggcttagaaactgtctaaatgaaaccagtactgtttaagaaagcaattggactattctacaagacagctttcttgtctcaaatgcctgaataccttaaagtactggcaaatgactatattatcattacctttagtatgaagaaaatgtaagtctataaaagactataaaataattacatttattaaattagagagtttaaaacaagaatgtggttaacattcttaggcaatttagatctagaatcctttaaaaaagcttactatgaaattaatggtgaaactgccttttgttgaatacagtcaaagaagactagtgttataaatatgactttgtgaatacatgagtaatactttccaaacagatgtttctaaaacagactgtttcttatcagctataaaacaatctggttcctctgtttcccatttacaaattacaggatttctggaattcttagtaaaaacacacaggcagagacagggcacgaaacaccgctgctcacagagtaaagagttataatccctgcaggtctcttgatccaatgggttctggtctctctgtcactgactttttcttctgaatagcccacatttattannnnnnnnnnnnnnnnnnnnnnnnnnnnnnnnnnnnnnnnnnnnnnnnnnnnnnnnnnnnnnnnnnnnnnnnnnnnnnnnnnnnnnnnnnnnnnnnnnnnnnnnnnnnnnnnnnnnnnnnnnnnnnnnnnnnnnnnnnnnnnnnnnnnnnnnnnnnnnnnnnnnnnnnnnnnnnnnnnnnnnnnnnnnnnnnnnnnnnnnnnnnnnnnnnnnnnnnnnnnnnnnnnnnnnnnnnnnnnnnnnnnnnnnnnnnnnnnnnnnnnnnnnnnnnnnnnnnnnnnnnnnnnnnnnagtccgcattatttaaccggacgcgtgggtcgacgatatcccggtattccgggcgtacca

SEQ ID NO: 435886 - DNA, 1914 bp, Homo Sapiens
ctaggtacgaggccggtgttatcggccgagggccttcctcctggttcacaaacttatcttcgttgatgctgttgcatacctcactggcaagcgcctctgcctggaccttgaccgctacatcttggtagacatcgatgacatctttgtgggcaaggaagggacccgcgatgaaggtggctgatgttgaggctctgttgaccacccagaacaaacctcaggaccttagttcccaacttcaccttcaacttgggcttctcgggcaagttctatcatactgggacagaggaggaggatgcaggggacgacatgctgctgaagcaccgcaaagagttctggtggttcccccacatgtggagccacatgcagccacacctgttccacaatcgctccgtgctggctgaccagatgaggctcaacaaacagtttgctctggagcatgggattcccacggacctggggtatgctgtggccccccagccactcgggtgtgtaccccatccacacgcagctctatgaggcctggaactccgtgtggggcatccaggtgaccagcactgaggagtatccccatctccgccctgcccgctaccgccgtggcttcattcacaatggcattatggtgctgccccggcagacatgtggcctcttcactcacacaatcttctataatgagtatcctggaggctctcgtgaactagaccggagcatccgaggtggagagctctttctgacagtgctgcttaatccgatcagcatctttatgacccatctgtccaattatggaaatgaccggctgggcctatacacctttgagagcttggtgcgcttcctccagtgttggacacggctgcgcctacagacccttcctcctgtcccacttgcacagaagtactttgaacttttccctcaggagcgaagcccctttggcagaatccctgtgatgacaagaggcacaaagatatctggtccaaggagaaaacctgtgatcgtctcccgaagttcctcattgtgggaccccagaaaacagggactacagctattcacttcttcctgagcctgcacccagctgtaactagcagcttccctagccccagcacatttgaggagattcagttcttcaacagccctaattaccacaagggtattgactggtacatggatttcttccctgttccttccaatgccagcactgatttcctatttgaaaaaagtgccacctactttgactctgaagttgtaccacggcggggggctgccctcctgccacgagccaagatcatcacagtgctcaccaaccctgctgacagggcctactcctggtaccagcatcagcgaggcccatgggagacccagttgctctgaactataccttctatcaggtgatttcagcctcctcccagacccctctggcactacgctccctgcagaaccgctgtcttgtccctggctactattctacccatctacaacgctggctgacttactacccctctggacagttgctgattgtggatgggcaagagctgcgtaccaacccagcagcctcaatggagagcatccagaaagttcctgggtatcacacccctttctgaactacacaccggaccctcaggtttgatgatgaataagggattttggtgccagggacttgaaggtggtaagactcgctgtctaggccggagcaaaggccggaggtatccagatatggacactgagtcccgtcttttccttacggattttttccggaaccataatttggagttgtcgaagctgctgagccggcttggacagccagtgccctcgtggcttcgggaagaactgcagcattccagtctgggctgatgtcccagcctcccataccagcaaaatgccccctgcttccctaagggtcaggtccagagcagggcccacagg

SEQ ID NO: 435887 - DNA, 921 bp, Homo Sapiens
  misc_feature (835)..(872): n is a, c, g, or t
tgggaaagacaggtgcccaagaatcccagacttgggttaaaattttctaacccaggaaggcaaataagcttggaacactacaattcaggagtagaaaactaaaaaggcttctttgaatatatgttaaaatgagctcaactgtgatgacagtggggaagtacccaactgccaatttgtggagaaagcatgaaccaagcacctgtttgggtctaagggtgtgagcggggctatctcccccttgacggattcctggtaataattgtacttagcgatgtggcatttaagcttatcacaagtaatatttgctaaattttggaaactcccagggttgagagagcctgacaccaatcctttcaacagttatagcaaagttcatgaaagaagagatcactttgtacttgagtacttaacaaagagttaaattagtgatttttaaaaagttggagacgtggaaagagaaataaaaataatgaagtcctcactgagtcaagtttcatgagtgatgaataataaataccaccttttaaagcagctgttgcacgtattaatcatacctacaaaggtggtttaagatgtagttcttgttcagctgaattaatataaactcgtaagcatataagacatcactgctacaattcagagttgggccaagttgtctcaactgtccaagacattgggaataaaaaggcaaaaagcatttactgggtcaggggcctctgcacatactcactgtaatgaatcttaggcacagttttctggcttcacaaaagtcacaccctcacacaatgtcctcagcgctctcgacgaattcgagctcggccgatttggcctgatnnnnnnnnnnnnnnnnnnnnnnnnnnnnnnnnnnnnnncgccgccaccgcgtgaactccaggtcgccctatagtgagtcgtaacatc

SEQ ID NO: 435888 - DNA, 422 bp, Homo Sapiens
  misc_feature (263)..(263): n is a, c, g, or t
atcaattcatctattcttttcctttcttcagactgggcagagagaaagaaaaacagcatcagtatcttctcctaggcccatcgtgcgtagcttgatggtcttgagccctgattgcccaggccatgcccaccgggccacaatcggcctcatttggcatcactggggatgatgggtccccagtgatggcacagcccccaagtatccctccttttctcatcacccatctgttgtggaagatctgtcacctggggttcaactggatncaggagggaaacagtggggacccaagaacagaatggggctcgtagatatgttctgttgcccatgtagcacgttaaaaaatgtccaacttgcccacacctgaaaatcaggcctctgacttcacagaaaatcaggtacagtgggccaggcgcggtggctca

SEQ ID NO: 435889 - DNA, 360 bp, Homo Sapiens
  misc_feature (327)..(327): n is a, c, g, or t
aaccggagggatgctttcccctttcagcccagaggtgagcactatgacgacatgtggggaagaagccctcttcctagtgacaaggggatgaggtgatgtcttgctaaggtggcagatgtgaggcctgaaagtggacatatgtgccacacttgtcattaggtctgaagcaagggaaggatggccgaggggagacagagtgcacctggtatttggttgaataatatgggccgtaaaaaagcgggctctgggactggcccgattagggctagagatgatgcgggtctacagcagtcatggaaactagaggggacgtccctcacccacccntcagaacttggtgttgggcagattatgcattag

SEQ ID NO: 435890 - DNA, 1309 bp, Homo Sapiens
  misc_feature (512)..(539): n is a, c, g, or t
  misc_feature (782)..(797): n is a, c, g, or t
  misc_feature (1244)..(1244): n is a, c, g, or t
  misc_feature (1262)..(1262): n is a, c, g, or t
  misc_feature (1265)..(1266): n is a, c, g, or t
  misc_feature (1268)..(1269): n is a, c, g, or t
tttgaaaaatataaaattttaataaaggctacatctcttaattacaataattattgtaccaagtaattttccttaaatgaactctttataatgcataatttacagtataagtagaacaaaatgtcatgacaaaagtcattgagtacaagacttgtaataaaaaggcataaaatatatttatacataaacccctttcaaaaaacaagggaaagcttgagccctcaatatagggcgacacacggagcgggtgaccgtgcaggtacaggtactgtactgatttaaagtcaagcactagagatagtggattaatactcttttgccgtacactatatacagatgtatagtacaagtaacaatggcaaacagaatgtacagattaacttaacacaaaaacccgaacatcaaaatgaaggtgtgtggaggaaaggtgctgctgggtctccctacaactgttcatttctttgtggggcagggggtagttcctgaatggctgtggtccaatgactaatgtnnnnnnnnnnnnnnnnnnnnnnnnnnnnggaactgtcatttccacgaaagcacagcggcagtgattctagcaggcctcagggccctgggcctggggaggctacatgagggggagcctcagtcacaggatcaacctggggcccgaaggagcagggttccctgcctctccctctgcaacagatcatcccatccaacacaacccccaaaatgttgatgatgacgcaacatggtcaaccctcaagacctttaagacaaaacagagcagcataggnnnnnnnnnnnnnnnncgcaccaatttctgcatgtgtcaatggtagggcaccattttaaaaagtctgtctaaaacagtctgtcttcacttggagggacgtagtgcaaagcataattcctctgttagtgaagaaaccatgaacgcactcctagctcaactcctaagtttagtcagaacaattaaaacttcctgtctcccccttccaagtttaaagcagcatatccataaactggggatgggggaaatcaactgttctataaatatcagtaaggattcctgttcaggtaagctatacacagtttctcttagtttatgggtttcagatccctagggaagtcatatattatgtatgggcagtctctccaaatacaggcagcatcttcaatagccaagagtggtcatgtttttaataaatagttcaggcttttcttatctcagtcagtacccagctcatgaatcatgnaaatcaacctccccccgnccnncnnaagcccactggccgattcttccttagactttgtcttcttc

SEQ ID NO: 435891 - DNA, 880 bp, Homo Sapiens
  misc_feature (456)..(465): n is a, c, g, or t
gctggtggacactgcgcaattttgcacttggagcgcttaagaagttcgggttgggtacgcggaccgtcgaggcgcgcgtcctggaggaggcggcttgtctgctagacgaatttcaagccaccattgcttcggcctggccgggagagcggaagggcctggtgtgggagagtcccttgcactgccaagacggggccactggaaggagccccgtttgaccccgtgcggctactggataatgctgtatccaatgttatctgttcttgtcttcgggaaccgctatcgctatggggacccggagttcctgaggctcctgaacctcttcagtgacaacttctgcatcattagttccagatggggcgaggtgcctggcacgcggcagcacatctcctctgcccaccgtaacagcaggacccggagagccatttccaggagtagacgtcggtaatgacgacgcannnnnnnnnnggcgtcaccgaaaccacgagcaccaccctgtgctatgggctcctcattctgcttaagtacctagaggtggcaggtgtgcaacccggagagacccagaatgggaggctgcagtctggggatggctggagggtcctggaagtgcgcagctcacagcctcccccggcctgagccaaggtgcaggagctggaccctgtggtagggtggaggcccgccccaagcctggactatcgcgtgtgcctgccctacgccaacgcagtgctgctcgagatccagtgcttcatcagcgtggtgcccctggggctgccgcgcaccctcaccctcgacacccacctgcacagccactgtctgcccaaaggtaccccctgaattctgggggatcccgtggcgcggacccgggggggcatgagaatcgcca

SEQ ID NO: 435892 - DNA, 883 bp, Homo Sapiens
  misc_feature (804)..(840): n is a, c, g, or t
tttcggaagattcggtggtgcgggcccgggagccagtccatgagggacaggcaaatgtacatctggagagacagggtctgtctcaacatgggccctgcacaagtccactaggccttagtttccctacagggagattggactaggactttgatactggatgttctagaactcttccaggaatctgtccattctaatgatccattgtaggtaggtctgtgtactcgggatttggcataaggctggacgcaccaaggaaagattgtggccggccctctcacctcgccccatctggaactaatgatgcagaagttgtcactgaagaggttcaggagcctcaggaactccgggtccccatagcgatagcggttcccgaagacaagaacagataacactggatacagcattacccagtagccgcacggggtcaaacggggctcctgggggtaggaacaggacggtggtcataacgcgtggtcctgcccccagccagccccatgggcttactggctttcttccacccaaataccttccagtggccccgtcttggcagtgcaagggactctcccacaccaggcccttccgctctcccggccaggccgaagcaatggtggcttgaaattcgtctagcagacaagccgcctcctccaggacgcgcgcctcgacggtccgcgtacccaacccgaacttcttaagcgctccaagtgcaaaattgcgcagtgtccaccagcacggccggttagaaaacaagattcctgtggtgaggccgctctcgacgaattcgagctcggccgatttggcctgatnnnnnnnnnnnnnnnnnnnnnnnnnnnnnnnnnnnnncggccgccaccgcggtaagctccaggccccattagactgacca

SEQ ID NO: 435893 - DNA, 1785 bp, Homo Sapiens
atcaggccaaatcggccgagctcgaattcgtcgagagcggggagttcgccatggcttcccgggaggaggtactcgccttacaagctgaagttgcccaacgtgaggaggaattgaattcgctgaagcagaagctggcgtcggctcttttggctgagcaggaaccgcagccagaacggctggttccggtgtcgccgctgccgccgaaggccgctctgtcccgagatgagattctgcgctatagccggcagctagtgctgcccgagctgggcgtgcacggacagctgcgcctggggaccgcgtgcgtgctaatcgtgggctgcggtgggctcggctgtccactagcgcagtacttggcagcggccggcgtgggccgccttggccttgtggactatgacgtggtagagatgagcaacctggcccgccaagtgctgcatggcgaggcactggctggccaggccaaggccttttcggccgccgcctcgctgcgccgcctcaattcggcagtggaatgcgtgccgtacactcaggcccttacgccagccactgccctagacctggtccgccgatatgatgtggtggctgactgctcggacaacgtgcccactcgctacctggttaatgacgcatgtgtgctggcgggtcggcccctcgtgtctgccagtgccttgcgcttcgagggccaaatcacagtctaccattatgacggtggcccttgctatcgctgcatattcccccaaccacccccagcggagacagtgaccaactgcgcggacggcggggtgctcggtgtcgttaccggggtcctggggctgcctgcaggccttgggaagtgctgaaaatcgctgcgggtctggggcccctcttacagtggcagcttgttgctctttgatgccctgagagggcatttccgctctattcggctgcggagccgcaggctcgactgtgcagcttgcggggaacggcccactgtgactgatctgctggactatgaagccttctgtggctcctcagccactgataaatgccgctccctgcaactactgagcccagaggagcgtgtttctgtcaccgactataagcgactgctggattctggggcattccacctgttgctggacgtcaggcctcaggtggaggtggacatttgtcgtttgcctcatgccctacacatccctctgaaacatttggaacgcagggatgcggagagcctgaaactcttaaaagaagcaatctgggaagagaagcagggcacacaagaaggggctgcttgtcccccatttatgtgatttgcaaactgggaaatgactcacagaaagccgtgaagatcctccagtccttatcagcagctcaagagttagaccctttaacagctccggatgttgtggggggcctcatggcctgagctgccaaaatcgatggaacatttccacagtacggaggtgactggtataatctgatgagaaagatgtggattgccataatacctccaagatccactttgttgccatttttccggaaacacccaaaggaactgggggattcctccctaatccgcgcgaactaccgggacctcccttttttttaacggacggtttaaaaaattgcgtacggtattcggaacccatgaacttccattaccgggatttattccccgttctccgaaaaaaacccctcccttatttttcttttttcaaccaaaccgcgagacggatggccctttgggaaacattttccacccacccttcaacgtgtgacaccgcgcgaaccttttcggatctttttaac

SEQ ID NO: 435894 - DNA, 553 bp, Homo Sapiens
tgagccaccgtgcccggcctctcagctcttaagattctgacactctcttggggaagctggtgatgactcaaggggaccaggaagccatcagccctttgagacactctcagacaggcaagggtgccaggctgggttgatccaaagggagctggttttttacaatccatgcatgaggttagtctgccttgaaccttgccctggactctgagtctctgctgaccctaacccatgactggctgcatcccatccactgccgagtcctgggatctacaccctgcgaagcccagggtcaccagagctttccccacatatccacctggaatcacagagaagctcacacccaatctggagagcaaatgaccaaagcgagggcctcagctcacgaatgaggaaggccaggcccaaagagggcagggacttacagaaggccacacagcacattagcagggctggctaggaaccaaggtcttctccctttcacccagggctttgctcactgtttaatgcttttccccaccctttgagctttttccttgctgccccaggaccatgc

SEQ ID NO: 435895 - DNA, 1635 bp, Homo Sapiens
  misc_feature (63)..(63): n is a, c, g, or t
  misc_feature (126)..(126): n is a, c, g, or t
  misc_feature (185)..(185): n is a, c, g, or t
  misc_feature (221)..(221): n is a, c, g, or t
  misc_feature (237)..(237): n is a, c, g, or t
  misc_feature (243)..(243): n is a, c, g, or t
cacagcccgcggccccgagcctgagcagatgggcctggcaccctgctgcacccaggcactgtntggcctggccctgcggcatcacagccacctgcagcagatcagactggagttccatagactttntgaagaaaacactttgttgaaaaacgatctgggaagggttcggcaagagcttgaagctncagaaagtactcacgatgcacagaggaaggaaattnaggttttaaagaaagncaaggnaaaggcctgctctgagatggaggtgctcaacagacagattcagaactacaaggttcaattatcccagcttcaatgtcagggttcttcaactgggacaggaggcttctacccaccaggcccaaaacgaggagcatcgtgtgaccattcagatgttaacacagagcctggaggaggtggttcgcagtgggcagcagcagagtgaccaaatccaaaaacttagagttgaacttgaatgcctgaatcaggaacatcagagcctgcagctgccatggtcagagctgacccagacccttgaggaaagtcaagaccaggtgcagggagctcacctgaggctgaggcaggcccaggcccagcacttgcaggaggtccggctggtgccccaggaccgtgtggccgagctgcatcgcctgctcagccttcagggagagcaggccaggaggcgcctggatgcacagcgggaagaacatgagaaacagctgaaagccacagaagagcgggtggaagaggcggagatgattctgaagaatatggaaatgctcctccaagagaaagtggataagctgaaggagcagtttgaaaagaacacgaagtccgacctgctgctgaaggagctgtacgtggagaacgcccacctggtgagagcacttcaggccaccgaggagaagcagcgaggcgccgagaaacaaagccgcctcttggaagaaaaagttcgcgctctcaacaaactcgtcagtaggattgcccccgcagccctctctgtgtaaagacagattattttctaggattcattcgaaagcacatcttttaaattaagccactgtgctgccttagattccgtgggtcatgagccatgagtcctgggacatctgaggattgggattctttgttcaccccgcagatagttaatgaatggtctgccctgggcaagatggaggtgggggctgggggaatatgcatgttgcagaagccggcgtttttattagcggtcctgagtaatttcccttggcaaaattcccagttttgccactcgctggagccagatcctgggagctgtcagcaaggagcaggtaagtgagcagttatggacagcactttccatgtggtgcttccgaccctggctgtcagagtgaaatgtaaagtcagggctctgtacagttttgccatttcactgttctgctttaagcttagcttattagaactcttggtggagggtgcgtacacacattccagaaaaggcttcactcgctgggaacgtcaacccagcgagaaaggaggggaagccccttctccggggaccttatctgtggactcaggaatgatggtgtttattgcaaatgcacaatctttttcccattgaaatgtcatcacactggaaattgtactatatgtaaa

SEQ ID NO: 435896 - DNA, 766 bp, Homo Sapiens
cggctggcttcaacatccggtgctggtgtttcgaggcctttctctctgttccacagagcactcttcccgggcgtccagctgctcaagccccgctgcgctttcgctccgaattgctctgctccttttcgggacaatatccccatccactcacagggctgcatgcgtgaccacctctctgaggcccgtggattccggggcaggggcggggtccgggctctgcgtagcttctgtgtcctgggcttgcctgcggcgaggcccggctgcctgccgcctcctcagactctctgccatcacctggggccaggccagtggccgctccccacagcccggacgcagtggtaggaggccacgtgtgccctcctggccacttcctgccaccagcccatctttcggcagggcctgcatctctgcttccagggagggcccgtccactcgcttcccgcgggcaagctccaactcctcctcctcgagggccaacgatacgcacatctgggcgcgcttctcgctcgcacagggctgcagcttcagtgccctctccagctccagctgctccgacctctggctcccagcgtggcacggggtcccatgcggcggctcctccagctccaaggtcaggtctctgcgagcagggcagggctcccagccccagacagctgctccactcagctccgcctcagcctctctcctgatctgctgcaggtggctgtgatgccgcagggccaggccacacagtgcctgggtgcagcagggtgccaggcccatctgc

SEQ ID NO: 435897 - DNA, 1186 bp, Homo Sapiens
  misc_feature (1012)..(1012): n is a, c, g, or t
  misc_feature (1058)..(1058): n is a, c, g, or t
gacaggaatccatgggagaacaagcagctttgctgaacttcaaagacgatcacctaaagagaaccagcgcacacattcagatcacaaggcttgtgtggagaaaacacatttggaaggaagattcatcttgggagaagtcaatgtaataaacggcagtgacaaacgtgatggaaccagaggccagcccagggcgggaggatgaggccacccctgagttgcagccaggcgtatctttcagtgagatgattttcatgcttggggagggggtacattctacctatgcatatttctatgtcgtttttcatgaaggtttagaagattttcttcacaggttaaagttttggggctgggatgcaatgcggccttgtctgttggctgatttgccttcaaggagaggtcttgaactttagatttggctgaagcagcattatgttcttctggcattccagattcacctggttttccggaactttccttttcactgtcaagctttgaaggagtaaactctaagttttctgcacagccactggaagtttggggcaaaccattcacttcctttccaacctcagctctttcctgagaggaaggacttgaaagagccactgtatctgcatcatcagctgaaagagaactatcactgaactcagaagaacatgctgttgcttgtagtggcattgcagcttcgctgggaactgcagattcatttggaggagcactagagaaacaaggctcctctccatcagagtcaccctcaacacaggcctcaaaaaagcattcaatatcttccttgtccatctaagcccgagtccagtggtgtctagtggcaatggagtgctgcttttctcttctatgtaattggtgacctccccacaatcactgtcatgagatgagagagataagtacgaataaaagtccccttttctcagctggatgggccggtgagaatgctccaacactttctccttgatttgagttaatgaagtaggagcagccacctcgttttcaggttganatttactttttagggctgtcgaagccatgtcaatgatttccttaanaaagttgtgtactgaacaatcttcggcatctttttgatggaaaacatctggctcacagttgcaacaggaaatgtcgctgatagaagcattttcctctgttccgttttgttcaagtgctaggcaaaaac

SEQ ID NO: 435898 - DNA, 1279 bp, Homo Sapiens
  misc_feature (1043)..(1043): n is a, c, g, or t
  misc_feature (1144)..(1144): n is a, c, g, or t
  misc_feature (1213)..(1213): n is a, c, g, or t
  misc_feature (1230)..(1231): n is a, c, g, or t
  misc_feature (1233)..(1233): n is a, c, g, or t
  misc_feature (1260)..(1260): n is a, c, g, or t
  misc_feature (1262)..(1262): n is a, c, g, or t
  misc_feature (1270)..(1270): n is a, c, g, or t
gtttattctgtctctggcctcttgtaagaagtgtctcgtcattgatgaccagctcaacatcctgcccatctcctcccacgttgccaccatggaggccctgcctccccagactccggatgagagtcttggtccttctgatctggagctgagggagttgaacgagagcttgcaggacacccagcctgtgggtgtgttggtggactgctgcaagactctagaccaggccaaagctgtcttgaaatttatcgagggcatctctgaaaagaccctgaggagtactgttgcactcccagctgctcgaggacggggaaaatctgcagccctgggattggcgattgctggggcggtggcatttgggtactccaatatctttgttacctccccaagcccctgataacctcccatactctgtttgaatttgtatttaaaggatttgatgctctgcaatatccggaaacatctggattatgacatttatccagtctctaaatcctgaatttaacaaagcagtgatcagagtgaatgtatttcgagaacacaggcagactattcagtatatacatcctgcagatgctgtgaagctgggccaggctgaactagttgtgattgatgaagctgcccgccatccccctccccttggtgaagagcctacttggcccctaccttgttttcatggcatcccccatcaatggctatgagggcactggccggtcactgtccctcaagctaattcagcagctccgtcaacagagcgcccagagccaggtcagcaccactgctgagaataagaccacgacgacagccagattggcatcagcgcggacactgcatgaggtttccctccaggagtcaatccgatacgcccctggggatgcagtggagaagtggctgaatgacttgctgtgcctggattgcctcaacatcactcggatagtctcaggctgccccttgcctgaagcttgtgaactgtactatgttaatagagataccctcttttgctaccacaaggcctctgaagttttcctccaacggcttatggcccnctacgtggcttctcactacaagaacctctcccaatgatctccagatgctctccgatgcacctgctcaccatctcttctgccttctgcctcctgtgcccccncccagaatgccctccagaagtgcttgctgttatccaggtgtgccttgaaggggagatttccgccagtcnaccttgaaaagtctgtnngngggaagaagggttagggggcctgattncnttggaagngtagaaaag

SEQ ID NO: 435899 - DNA, 955 bp, Homo Sapiens
  misc_feature (908)..(908): n is a, c, g, or t
  misc_feature (936)..(936): n is a, c, g, or t
gaaagtcccttccgtgcggttaagggagttttgccaaaggggtttttaacacaccgccaaggaaatcccagagtgtccccaggctgttttttccctggggcaaaagtcccaagtcactgaatttagggcaaaaggcaagttcgggtttctgttttcgtaaagacaaaccaaacaaaaaatgttcattccacggcccgttccttttctccaaaaagaggaaagagaaacccagccccggtgtctgcgagtccatgggttggtgatgtgtccttgggctaaagcattatgtaaacatacaaggtagcagcaccactcctagaggaagtctggccgactgagccgggcggcaggacagcaaacggctggccgtctggcagtggagtctgtccccttcggcagcttcttcctctgcttggctgggttgtcctttgtttttactgcagagccctgggaagattcactgaggtgataaccactcagtggctcacacggaggcaatgacaatcatgaggtggggagagatgttggagatgctggcaaggaggtcaggggccaggcgggacaggtgactctcagagaactcacagggcgggaagatctgcagcacgtaggcaggctgattggagccagggttgggaacgttgatgatccctgccgcctgcttggcctgcaggtaagtgatgaaggcagccttgagggactcggtctggctcacaacatcctcttggtcacggccacagggcagagccagcagcagacagtaatctgtctccaccgtcatccttcgggcaaccccttccagctgcgttgcctccagccgcatcctctgggcgatccttagtgggggccctccttcagaaaggggcagggaccgatgggccaggacgttgttgccagagacgaagtgncgctgcacagcagctgtgtcattcttgnagggccagcaggccctgcc

SEQ ID NO: 435900 - DNA, 835 bp, Homo Sapiens
atcaggccaaatcggccgagctcgaattcgtcgagagcggatttgtagtcacactctagaatgctggggtgggagatgagataactggatagagagcctgtaaaacagatgataattgactaagacaaaaaggtagcaacagcacgttactccctgcagtggcctgacaactgaatcagctccttagccagggtctctgcacattcatcttcagatggagtttttttcaagctgttcattcacaaggtcacgaaaaatatgcatgccaatcaccatggaggaacatgatatagaaacaactcatggtgtggtccacgtcactataagaggcttacccaaaggaaacagaccagttatactaacatatcatgacattggcctcaaccataaatcctgtttcaatgcattctttaactttgaggatatgcaagagatcacccagcactttgctgtctgtcatgtggatgccccaggccagcaggaaggtgcaccctctttccgaacagggtatcagtaccccacaatggatgagctggctgaaatgctgcctcctgttcttacccacctaagcctgaaaagcatcattggaattggagttggagctggagcttacatcctcagcagatttgcactcaaccatccagagcttgtggaaggccttgtgctcattaatgttgacccttgcgctaaaggctggattgactgggcagcttccaaactctctggcctgacaaccaatgttgtggacattattttgggctcatcactttgggcaggaagagttacaggccaacctggaccctgatccaaacctacagaatgcatattgcccaag

SEQ ID NO: 435901 - DNA, 1288 bp, Homo Sapiens
  misc_feature (348)..(356): n is a, c, g, or t
  misc_feature (1157)..(1168): n is a, c, g, or t
gcggccgccatggtggagcagggtccgagccacgtcctgcagggcacgtctggggcatttcctgttttgtggtaggaaatgtccctgacctttcagaaccgaacccaatcctgaggctgactcctctacggaaaatgaggacaggacgggggtgagggaatgagagtgggaggtccctgcacctcctcgcccggctcctcaggaagaaaaccgctggcccttcccgagtgtgccggccgagggccgagggccgtgcacatggggagagggcgtcagcctgatggctgagcttttaaatgtcatcatcataacattatttatttaaatgtagttattttggtatttaannnnnnnnnagagaggaaaaaacctgtattttcctggtgggatgaaatagggatgaaatggctcagaatggtatatttaggcaattttaaaacatttattatttacataaagaccaaatatgatgaatctgttccgtgaattgtgtcggccctcagcatggggctggggcagcgtcactgcggtgacgcccattgaaaggtatgaaatgactgcacactagctggattatcactcagccgtttaagaaataaaagcaaaaccatcacgtgactgagaccgtgtgtgtgaccgcagcaaagcgcaggtgtttggatggatcagagcccctcggtgcagctgtctgcatcttccaagcactttacagataccttggaatgtatatttttgtcttcttactcagaaggtttgcagtttgtaaaataatcaggattctgctctgtcctgtgtgtggggtcagctccctccacagagggctccagctctgttggtcacagctgatggggttctctgattgataggagacgagctcttgagctctaaggaacagtgaggtcgccggtggggagcttggctggggacaccaagcaaatgcatcgtatgtccccttggagacgtttttatgcagctgtgtatgttactatccaggaaggagtcgggggtagactttcccgtgtaagctcagtccataaactggttacttctgatcctggaacgtggacttcacatgataggtctggatctgtttctgttgggatcacaggtaaggaaaatgtccattcaaatggtaaaagaagggaggagggtgttannnnnnnnnnnnggctagtaggccccattctgcttctatgaccccagactgaagtgtgcctctcacagatggagggtgcacccgctcttgtctcctcctcattctgcaacgtcacaatggattaataacatg
